United States Patent Application Publication US 2011/0183924 A1 - sequence listing, part 153

SEQ ID NO: 400005 - DNA, 410 bp, Homo sapiens
tgtggaagaaggccagaaacagctgcttcctaattatgaggagcatgaacagggcttcccctgcacaggcgctctctctttgcctgctgccatccatgtaagaggtgacttgctcctccttgccttccaccatgattgtgacgcctccccagccatgtggaactgtaagtccattaagcctcttcttcccagtctcagataactacagttatttcttcctggttaaaagcaagcctccagaatcagacacaacagtgtccaaatatttactctgcaacacaaaactcaagactgaaatcaagatcagttacatttatgatgtgatttgaatgatccttggaaggtacaagctgcaaaaattacatcagaatatttgtttacaaataaaaatatatattgggaatgtgtga

SEQ ID NO: 400006 - DNA, 345 bp, Homo sapiens
caagaccctgtagaggcctccctccacgctgcctccctcccttccccgctcccctccacagaggccttcccagctccccactaacttccgggcagcagcagagtcctacggggcgggggggtgccggtagccttcatctcactccccttctgcccccgcaggccacccagaaggtgggggtggaggacagttcagccgcagcctggaggctcactgagcagggcaccgtcccacacactctgggtgcctcgggggctggatgtcatgtggcgagtgccagcaggaaaagcgagaggacactgtggccactagagcaaagttggagcttttttggtttctttcctt

SEQ ID NO: 400007 - DNA, 133 bp, Homo sapiens
ccattcttgaaatgtagccacctctggtgtaggatgttgtggaaagaaaaacaccacagtaacaggcgtttttgttattattgttaacgtttttgcctttgactctccctgattattaaatggagaaatcctt

SEQ ID NO: 400008 - DNA, 773 bp, Homo sapiens
cttgggccttccctctgagggacctgggagccaggcagggttttgagcaaagcatgctgtgatccgactcattgtgaaaaaggcctctttacagggaagctgagagcaacagggcggccagtgggaggaggggatggcaggggaagggtccaagcaggaggggtatcgaaagtgcctgtttgtgtcccaggcacacaatggcacacatacgttaccatagaatgacatcgatggtggtgataatgtcaaacgccacggtgccacatctcagggactgattctgaacaaccgtgactcccagattcaggatagcctcttgcattggggtcgtggcttcatatgagggtcactctcctcaccctgctgcctgcagagccaccaggggtcacactggcagattgcagccccagcagttaaaaaaaaaaaaaaaaaaaaaaaaaaaaaagaaatgaaagggagtggggaagatgggtaggaagagagagacagcaaatgcccccttcctcctgttctgatgaagttagggtatgaggggtacagagtgcagggaacacccaacagggacattatcatgccatggagcagctaatactgcttgagatcattcttcgtggtctccctgatgctctttgaggggtccccttgttgtctcgcagcctcttagtaccctcctgtcttcctcctccctccaagaaaggacaacttgacaacggcaggaatgaatgggtcggccgtctttcctcttgtctttctcgtcctgaagcacatcggat

SEQ ID NO: 400009 - DNA, 452 bp, Homo sapiens
cacacctgacagtcaacagctagttgggtggctgaggtgggaggatcacatgagcctgggaggtggaggttgcagtgagccaatattgcgccactgcgcttcagcctgggtgacaggagtgagaacctgtctcaaaaaaaagaatgtgcaagaataacaatagtatatgcatgagcaacttgtctgcccttcctgaaggaacagctccttccttccttccttcctttccttcctcttcctcttcctcttcctgtctttccctttttatttcttccttaagacagggtctcctcctgtcacccaggctggagtgcggtggtgtgatcctggctcactgcagtcttgacctcctgaggcgggagaatcacttgaacccaggaggcagaggttgcagtgagccaggatcgtgccattacactccagcctggtgacagagcgagcctccatctcca

SEQ ID NO: 400010 - DNA, 325 bp, Homo sapiens
ctaaaatgtgaaaatacttagataagacttcatttgaatttgacagagttatgtttttatcaggcatgttcatttaattattcaataaaataatttagttgacatgattgttagtgtgcagtgtttgtgtattatacactgggtataaatcaaactaatgaatttgacagagattgctgcataaaatgtgttactatgagttctaaacacaaatattgtactgtaaatattttaatctgaatgaattacatgttcatgtattcattagccataacatgttttttgaaattaaaaaggcaatatcatattactggcttgaaagacc

SEQ ID NO: 400011 - DNA, 368 bp, Homo sapiens
tcggcagttgacccttcaacttaaaaattaaatcatagaatattagtcagttgatggacaactgacatttgctttaacgaaaaaaagaggggtctttctcaccgaaagagccaaattattttataatatttttgttacattatgaaacaatagggaactatattctaagaaaaaatctcttaggaatttgatactgtaagtaactggacctaataatatcttttatgtataatttgtttgtaattttatgttgcacttctctgaagactgatgtagtttaataaaaggaatgaaaaatattatttttgaaaaatattcttcgtatttatggacattttaaattttgtaatttgttttaactaactttt

SEQ ID NO: 400012 - DNA, 356 bp, Homo sapiens
atttggcaagataaaagttttagttagaagaatagttggagcctgtgaaagctgtagggcaaaatggtataaagtgtgaaggggaacaatggacccctatgacatgactccttattccattagtatttgtttgatttcaacaagaattgcaaaataatacagatagggatggcatagaaaaataaaatcaaagttgtaaaactcaattttagccattctttctgttaaatttcccccaaaagacttttaatcaagctgttaacaagtagctaaatttatcaatttgagtcaaacctaactcaaacacatgagataatttatatttaagtaaccctttgacagaagagagctaacaa

SEQ ID NO: 400013 - DNA, 493 bp, Homo sapiens
tgccattttggctgtgctctcagcttgatcttccctttgtatctcttgaaaaggtgaaaatgaagttgaccaggtttcacaaatgccctcagggcaaaggccagctgcactccccactagatttctctttgggttcctctgtgccttcaaccctggcctgagaattccttatgtctcctcagttcattaatgcctttaagaatatttacactcgcactcacatggacacggacacgcgcacgcgtgcacacacacaccctttacttgctcagtttcggagcattgtccgatccttgtaagtgacttgccacatgactagaacctccagcttcatttcactccttctttccttcccctcccttttccctttatgccatcggtctgtattccacgatctttaaaatctaccttaagtactttctgggattatgtaaaaatcagacaactctcctagccaccatccttttctagagataggagtgactgactcctc

SEQ ID NO: 400014 - DNA, 699 bp, Homo sapiens
ccagttctgcagctccttcttgctttctgcattccagccacactaaccctgaaagtgtgttcttgcattttatcatgttccctgctgccacagggtctttgcaagggctatttcttcggcctgaaaggtggctccctccccctgtgcctgggtaactcctaccctccttgccataataggtcagatatactcccttaggggaacctttctcaaccaccctgaccagagcaagtgctccaatgatgtattttcacagcccacacctctcctttggatgacacattgcactggacactttgcatttatttgtataattatttgcatatgtctatgttccacacatgaagatagcagtgataactttctggttcatcaccacatatctagtgtctagcatggtgctgatacatagagagtactcaatagatagtatcaactgaatacacaaatgaatcacccgagttagggtgcaagtcatggctaacatcctcctcctgccccttccctggagcacgtacctcatgctgctcctcccactcttgagcacaatcccagttgcctctgacttacaactttgcatcacagtcgggcactgagatcaggagttttgaaaatggccaggagatcttctgtgttgactgcctctccactcatttgggctgctctaaggagcttgtttagtacctggaggagctataa

SEQ ID NO: 400015 - DNA, 523 bp, Homo sapiens
gaaacttcatattacaggtgttccatttcacagttaatggattatgaagaatgctgtgtgcagagtgttcagactgaggtgcagagattagcagatgtgtaagaagagaataactgcttaaagatgcggctcagatactgtaacccttagaatttcatggaaaactgattttcttgaaaaataatgcaaggtcaaagtccttttgtttatttattaggactctttgaacatgtctcatcggaattattggacttaccgtgttttaggaagtaacattctggagaaagctagggacacatggattaccttagccttcccactagactgtaatccccaagaggctggagagcacatccgtactgctaactgcatacctggcacagtgcctggcatacagtgttcaagtattattcaataatgtatgtggtagaatgattgacagataatttatgtggggaagatttgtgtttaaatgggagatcctgaaaatacaactcaatctctttttggtaaaatgtatggc

SEQ ID NO: 400016 - DNA, 516 bp, Homo sapiens
caatgagatggggtgaggttacaggcatcagcccattctaggctttgctcttcaacacatactgtcctcctgagccaggacgcagaccatggctacttttgcccctgcatgtctgttctgatttctttcttcatatgggatgtctcactattcttctgctttgaatatggagcttcagtctctaagctaaaaggccaagtacagattcacctgccaatgaagctctttaaattctctcttctttctcaggactcattggctgtaagtccatggagcaaaaacagaatttgctacttttcaatgacattgttttagttgagttgtgtttaactaacttgttgaatgaacggacactgtacattctccctgtaaaataacagtgtgttttctattatgcctatgtaagtctgttgcctcaaattgacgttatgttgttaacttatctaccagacagtttatttaggttgtattcaagttggtcttttgtgacataaataaaatcagggatgtgattat

SEQ ID NO: 400017 - DNA, 216 bp, Homo sapiens
gctgttagtcattaaaaacaaccttctttgtatataaacaagctcttgatgtttcaaaagaatgtatagtatttaaagctatatgtatttccattacccatatggatgagtatacatttatttaacctatttgagatgatccaattgaacaaaaacatttcctatcatttaagattttcttcaaaaatgcatctattaaacacattttcttgttgt

SEQ ID NO: 400018 - DNA, 612 bp, Homo sapiens
tacttaacctgagcccctggttcctcatctaaaacatggaattgatcattataagacctggctataagctgtaatgaggtgatccatgtagacaccttagggctattgcctgagacatggtgaccagcactcaggagacattagtgataaaccccacaaaacccattccagttattaagctcaaggaggccttagtactgttattcttcactacctctcagaatcaaaagtggctcatttagattgagaggctggaacagtccaaagctctcccagctaataagtgacaggactgaggctgcaacccagacatctgattcatgtcagcgttagttccactgtcacataagaaccacatgagtccttccatcatgtaacttatgagcctgttagaaagaggtggacagattagagagacatgtgaagggcctcctttttcatgatgggaaactgaagccttgggggagtattttacctactcaggagtattttgcacttgtgactacctcactatacccaggacagagaaagcccatagtgccctgtcaggccacaggggcttgctggctttttgtgtctttgcagcccccatttctgtttttgaaaaaaaaa

SEQ ID NO: 400019 - DNA, 886 bp, Homo sapiens
tacttaacctgagcccctggttcctcatctaaaacatggaattgatcattataagacctggctataagctgtaatgaggtgatccatgtagacaccttagggctattgcctgagacatggtgaccagcactcaggagacattagtgataaaccccacaaaacccattccagttattaagctcaaggaggccttagtactgttattcttcactacctctcagaatcaaaagtggctcatttagattgagaggctggaacagtccaaagctctcccagctaataagtgacaggactgaggctgcaacccagacatctgattcatgtcagcgttagttccactgtcacataagaaccacatgagtccttccatcatgtaacttatgagcctgttagaaagaggtggacagattagagagacatgtgaagggcctcctttttcatgatgggaaactgaagccttgggggagtattttacctactcaggagtattttgcacttgtgactacctcactatacccaggacagagaaagcccatagtgccctgtcaggccacaggggcttgctggctttttgtgtctttgcagccccctttaaaacctgacgtgcagtacacgtgagcattctagaacctgctataccagggcttagccgacagcaggccaagagtaggaacaaagcaagaaaacgttccgtggggagacttgagctgggaattagggtgttggtgcccctagtgaagacctagtgggcatctgtaggccactgccacctctgcttttggccacagtgccactcaggcagtggcctccattcacccaaagactaagtaacttgcccttgattacactggtcttttgtgtccagggccaagtatctgctcaggcc

SEQ ID NO: 400020 - DNA, 235 bp, Homo sapiens
ctctttccctggaactaaggtgaagaaccatgagggaaggaaacggaagcataggaccatgcagcagtcctcaggccagtgatggacactcccttgactcttgtgtccattcttggcttttctttttctatggctccttcctagggagatttctctcccatctgtgacccagttgggagtgggaaactgtgtccaccatgccagcagattgccaaggcctgccgctgctgcacag

SEQ ID NO: 400021 - DNA, 413 bp, Homo sapiens
attttcaaaggcgggagctgaagtggtgtgtttttaaaagcaaggtacagaacagacaatgctatcatttggttttagaaaatctatacgtgtttgcttctacatgcatggaatatctctggaaggatatgcaagaaactggtaatagtggttgcctctgggaagagaactaggtggcaagcagacagagggggagggagatttgctttctctgcatcccttttccatctttgacttttgtaccatgtacatgagatgcacattcaaaaaataaataacagtctggttgcagtggctcaagcctataattccagcacttcaggaggccgaggcaggcagatagcttgagccccaggagtttgagaccagccatggtctcaaactagggcagcatggagaaaccccatctctat

SEQ ID NO: 400022 - DNA, 945 bp, Homo sapiens
gcacaagcaaccctatgagaggtgaattattgttatccaaatttaaagatgaggaaaatgaagctcagaaatgtgaaatgacctttttagtattacacggaagatctgggactcaaaattaacaggctattatcaagaacatttatgaagggaccacattatatatgacagcgttggatgtccagtgaattttgcatgatacggagttgaattagtccctggcttcaaggactttcctttctcttttatcccttctattctgttcacacttttcttctagatactggaactataagcccaaaactacttaacatgaaagactttaggtacacgattccccactggcagctgctttaatggtgaaggatttcttgagtactagcagaaaacataatatataaagagagttgtgtgctagacaaatggactaagaaaccatgatttcttggggttttgttcttgctattttcaagctaaaatgcacccctgggattgcagatggtcataagaaaaattatcaagtgaaaagttaaccactgccaaactcatatgattgaaaattggccattgttatgtttagaatattttttgtgcatttgcaattaagaataaaaagtcagaatttaaaaatgaaaaaaagaaaagaaaaagccacttcaccaaacatttcctaaaattcacagattcccaggggtttgaagacagtattcccaatttggaatgtagtcctgactatcccaaggatcttggaatctcagggttagaagggatcttaaaaatcacccattttaacctcccctcaatgcaggaattctctctaaagcctcctcaacaggcggccaacccccatatccgcctgaatgcttccagagaaggcgagtcgaatcctttgttggacagccctgattgtttttcctgatgttggtgatgggccttgagaaaaag

SEQ ID NO: 400023 - DNA, 305 bp, Homo sapiens
tccccacacccacagcacacagcagaggctcaacacaaagtagccaggcagtgctgctcccggacagacatgcctgagggaccgtgctcagtgattcaggagtggtccagatgtgggaaggcagccacgcttggttgggggcacaggacgtgtgggggctggggtccctgtgccgcagggtgggcgtgagtgggcgctgagttctactacctcctccctcagctggtgcctttaaaggagggaagccatggggcagtgggtctgctctgacccgacaggcaggagtgaaggggaagggaagggaa

SEQ ID NO: 400024 - DNA, 458 bp, Homo sapiens
  misc_feature (36)..(36): n is a, c, g, or t
ctttatttcccccccccaattcttattttatttttntgagatgttatgcaacggcatggacaatgatgccggttcagaggcccagccgagacaatgatgcacagggaaactccctcgagccccagctgtcacctagtacttcgaagacactgagagaatgcatgttgcctggtgtgcaaggaaaatggtgtggattgttcattcatcagcaggagaatgtaacatgcatacattggatgcaacagcaaaggcagaaggcatctttaaaaattctgaatttgccctttcactaaagacagatttatttttttaaaaaagtacctctggaataacgttaaattgtaaaatgtggctcaacttttcaaatacttacctaattaatacacatagttagatcaagccaaagggtatattctaataatatgactcaataaagcaacttgatatgacttcttctc

SEQ ID NO: 400025 - DNA, 457 bp, Homo sapiens
cgtcctaacaacgcgcagacccccgcgttgtaatacccccccttcagcaacggcatggacaatgatgccggttcagaggcccagccgagacaatgatgcacagggaaactccctcgagccccagctgtcacctagtacttcgaagacactgagagaatgcatgttgcctggtgtgcaaggaaaatggtgtggattgttcattcatcagcaggagaatgtaacatgcatacattggatgcaacagcaaaggcagaaggcatctttaaaaattctgaatttgccctttcactaaagacagatttatttttttaaaaaagtacctctggaataacgttaaattgtaaaatgtggctcaacttttcaaatacttacctaattaatacacatagttagatcaagccaaagggtatattctaataatatgactcaataaagcaacttgatatgacttcttctc

SEQ ID NO: 400026 - DNA, 479 bp, Homo sapiens
cgggttcacagggctgtgaggtgcttcaggcagagagtaggggtaagataatcagtggaggtaagaggacataaaatacctgtaacccaacgatgtagggtcatgagattgtcttggctcagtgtgagagagaggtaccaaaggtcatcttcctaaaatttaaaagacaataagattgtccagggtccggccaggcgcagtggctcatgtctgtaatcccagcactttgggaggtcaagctgggcggatcacttgaggtcaggagtttgagaccaggctgaccaacgtggtgaaaccccgtctctacgaaacatacaaaaattagtcgggtgtggtggcacactcctgtagtcccagctactcaggaggctgaggcaggagaataattgcttgaatctgggaggcggaggttgcagtgagccgagatcataccactgcacttcagcctgggcagcagagcgagactctgtttaaaaaaa

SEQ ID NO: 400027 - DNA, 465 bp, Homo sapiens
gttgctgcgaaggacattatttcattcctttttatggctgagttgcattccatggtgtatatgtatataccacaatgtctgtatccactcattgattgatgggtatgcaggctggttccatacttttccaattgcgaattgtgctgctataaacatccatgagcaatatctttttggtataatgatatgttttcctctgagtggatacccagtagtgggattgctggatcaaatggtagttctacttttagctccttaagtaatctccacactgtttttcatagtggtggtactagtttacatttccaccggcaatgtaaaagtgtttcttcctgtccctctggtcatctgtttttttaagggatctacctaaactcaaccataacccattccatccacctcatcttgcctcaagctaagaaataggagtgcagagaagaaaacagtacagataagaatgctaga

SEQ ID NO: 400028 - DNA, 523 bp, Homo sapiens
ttgacttctctgagattagctgtcttcagtttgacactctaatgtcttggtcttactcttgtacagaacttactttttattcctctagatcaggcctcagtttgtggttgttcagtaatagtagtaatagccaacatttattgggtattatactgtgcagtctaagagctttataaatgctagccttttatccatcatggtttccttctcttatgtcagaaatgtttttaaacctagaaaaggtaaagtaaatgagacgtcattcctcattgatcagtgtaagctcattccatccaatctcgtgatatttttctctcaagcacaatcagaatttagatttattattttgaaaactagctgtagaaaactaatgcagagttcctattccttcatctactattaaatagggactctgctttcaagtataagcctagcgtgtttttctgacaaagtaagcctcctggtttctaaaggaactaaaaatcttttctaaatgatatgaaacccatgacgtgaagcacat

SEQ ID NO: 400029 - DNA, 220 bp, Homo sapiens
aatggaaaatggtgttaacagacaatgcttcatggacgacagatatgcagtctgtccatggaactggcgtctgcccataaagacacagtctaggccactttaacatctccctatcctggtcctcttggctcccaggaccaatgtggtatcccacttctctggcatggagctctgccctcagattcctgagcatcaagctcagtggctcttcacccaggca

SEQ ID NO: 400030 - DNA, 597 bp, Homo sapiens
gttcattctatgatctttaatacatcagttattcattttgagacatgttgaacaaataaattaggatacagcaggaatcccatcttttgaagaattcattggtaatgggacagagaagtcagtaattcaaaaacagcagaactgttaaaatttcaagtctacttaatttgtttactaaacaggctgtaatccatctcggcacactgtaacctctgcgtcccgggttcaagcagttctcctgcctcagcctctcgtgccgaatttggcacgaggaaatgcctagtcaagtacgcaggccacgtgggctcagtaaattctatcaaatttcatccctcagagcagttggctctcactgcttttggagaacaaactgctcatatctggagatacgcggggccagttgccacacccccaactgttgctgacactagtcagatatctggggaagaatgagtttagtgctcttacaaggactagccccaccttgatggggatgtgtccagcgacttgcccaaccattcgggtcccacttgcattcctcaagagccaccaggggcgtgggtaatagccttcccttggttggtttggggggctccc

SEQ ID NO: 400031 - DNA, 921 bp, Homo sapiens
ccaaagtgcactgtctgtgctgtcagcccacctgtggctgggcttgcaggggtgatgtgggctcaccctacaacaggcctggactagaacacagagtggtccatggccttctggggttctctgcgcttgagcactgacccatcacaggggacagtaaccaggttcacggtaaaggctggtggctctgttatggagattttggtggctttaccttcagcaaaagctgacatgctgcccactatacaaagttcaggtagaacccttccttccctaagttctcagagtaatggagttaacagactactagtttgggagccaactgggacttaggtcggcactgctcttagttaagggtccctgggccaatcactgaccttctctggccccacattcttctggtgtggaatgaggtattgaactaaaacaaatcttgaagatcccattcaacattctatgtatctaattaagctggtgtaaaccacttttcccactcccaggtttctctcttgggatctttgagcttctgaagtcaagtaagagtcttttcagttggacctacccataccaccatcattcaccaccaagacaaagggtccagtggggctgggtgcagtggcttacgcctggaggccgagactggagaattgctcaaactcctgacctcgtgatctgcctgcctccaaaagtgctgggattacaggcgtgagccactgcgcctggccctcttctgtctcacagcaaagttcaactcttatatgtagttatcattttagaaagaaggaaacttaggtccagagatctgaagggtgtcttgttggccagtcttgtgcttctgaaagtcatgacagcagaggagcaatgcagtcctcccgcccttgactgggcaactccaaggctgcacctattaacagagctcgaaga

SEQ ID NO: 400032 - DNA, 497 bp, Homo sapiens
ccaaagtgcactgtctgtgctgtcagcccacctgtggctgggcttgcaggggtgatgtgggctcaccctacaacaggcctggactagaacacagagtggtccatggccttctggggttctctgcgcttgagcactgacccatcacaggggacagtaaccaggttcacggtaaaggctggtggctctgttatggagattttggtggctttaccttcagcaagttctcagagtaatggagttaacagactactagtttgggagccaactgggacttaggtcggcactgctcttagttaagggtccctgggccaatcactgaccttcttcttatatgtagttatcattttagaaagaaggaaacttaggtccagagatctgaagggtgtcttgttggccagtcttgtgcttctgaaagtcatgacagcagaggagcaatgcagtcctcccgcccttgactgggcaactccaaggctgcacctattaacagagctcgaaga

SEQ ID NO: 400033 - DNA, 1633 bp, Homo sapiens
ggagaatcactttagcctgggaggtcgaggccgcagtgaagggtgatcgtgccactgcacgctagcctgggtgacagtgagaccctgtctcaaaaaaaaatgttttagatgaagagattatttcattttttgaaggtggtacagcagtgaatacatttctggccctactgtaaacaagaaaattcaggctatcagtatgaacttaacagaatatattacaacatttattaactagatgtatggtggtttattaccaagtcaacaggtataaaaggagtaacagtggggtttgttggagaagaggcaaaaatttctgtatggtattaattgcaacttgagtagtttggaggcttcaacagtttgacaatgatttctgttccatactacatctattcctgttttacttctttgggattactacttccctcttttaaaactcctcacattccctagcttgccccttctcccaaaagatagggtgggtaaaacaagcacaaaactgttaacccttgatcctagtagcagttctaggaggcagcctccctctaaagctaatatcaatattctgtttaaaacactcatttaatttgatctcatctggctcaaaatttcttgtgctcttagtgtaaattaagcagtgaatattctttaccacacttagaatgtgacaatacacactggtgtccagttgattaacttggatccattcgaggaaattctagagtccatgtcattacagaaattgcctgtatttttttctagatattgttaattattaatctgtattggacttttaaggggcttgtattataaggactggctataaacaggtttttatttgaattaacagaggtttcttttggcttccttttatttaggtagcggataccccagctaagtgcttgttaatttagttgataactatatcaaaatattattctgtctctgtacacagtggatgaaaggttctagaattgtttcaacaatgtgttaggttggtgcagtttttgcacccacctcaaaatggcaaaaaccacaattacttttgcaccaacttaatttagcagcaggctttccaattagatgttttcctaggtgtcactgagggccgaacttggaaacagtgcattcactatgctgttccccacactggctagaattgttcttgtaataggtttgctaccatgtatgtagacataataaagtggattatgacaatagccctttttccaatattgtaaactctttttaatgtagttataaatatattagcaatgaatttaaataatttaaaaagcttcaagatgagcgtactgtttcttacagtttggaaggaaggaggcagtttcagatttgaaacatctttagtggttttctagtaaatgatgtatgtaagttctgaaataggttgttcctttgtggttttaaaagatttacataatagttctagaaagttcttggatcttatgaaagtgttagcatgttatttcataattaagaaacgtgaattgtaaataccatccagctttttattataccagaatgatttagttgttttcatagaatttatactttatggaccaattctccccatacctagtgactttaaataaataatttaaaatttaaaaaa

SEQ ID NO: 400034 - DNA, 391 bp, Homo sapiens
aagtctagtttctctggtgccatggcttggagggtcacgcctgcagtcatggccagcacatttaaatgggtgccaggatccaggaaccagggaaagaaaatagttgggggaacgccccctactgtgttctccatcctggatcacatactgaaaggaaggagactaaaataatgcttttattctcacttctctttctagatgggtaacagatcgtcttctctgcactccaacctgggtgacagaatgaggcttcatctaaaaaaattaatataatgaatcacattaatagaataaagaagaaaacccacataatcatgtaaacgcacaaaaaccactatctgaaatccattacttttcatgataaactaggaattaaaaggtgcctataagc

SEQ ID NO: 400035 - DNA, 270 bp, Homo sapiens
agtgttcctccagtcatcagagccataccattttgttgcattggccgggaatccaaggtacgacactcatcggagtgatgggtaacagatcgtcttctctgcactccaacctgggtgacagaatgaggcttcatctaaaaaaattaatataatgaatcacattaatagaataaagaagaaaacccacataatcatgtaaacgcacaaaaaccactatctgaaatccattacttttcatgataaactaggaattaaaaggtgcctataagc

SEQ ID NO: 400036 - DNA, 453 bp, Homo sapiens
gtgacatagactgtgaccattttcttccattatttcagtctcacatctggaaagagaacattctatatccgagatttttagttaaaaacctaagaaataggatattaatttttcttgtctgaatcttatgttttatccaaaagtttggccacaaatttccagcacattgctgaaaccagaattcttccagtgactacttttgtgaaggaaccaactgttttcataaatcaagcttaaggagttatgagtctaataatcatcattattgtcatcattccagatcttcatggaatgctactatgagctgaatgggatgcctgagatactgcctctaggaagcaaagtggctcaaggtgggaaggacttaataattcataaaaatcaagctcttctctttactatagatagggctgatgtgtcacattgttaaagtattaaattggtatgcatcag

SEQ ID NO: 400037 - DNA, 1446 bp, Homo sapiens
gcagtatctagagttaacagtaggggatttatttttcaatctaaagtttttcacctctctctagtaagacatctgaaactcataagccatctttaagaatttcttacaaaaacatgctggaagacagtggatcttgtttgtatcctgaagatttttttctcttcgttattttaaattaattgtcaacagatgtgcaactgttaggttggttcttaagtcactcggagaagagagagatgcatctactcaaggttggcacttggagaaacaacactgcctcttcctggcttatgaagttcagtgttctttggcttgttagtcagaactgttgcagagcaagtgttgtttggatggcttatatgaacatatcatttcatgttgggaatcatgtgttgtcagagttgggagagactggagtctttggaagaagctccactttgaagagagtggcaggagttatagtgccaccagagggaaaaatccaaaatgcatgtaatcccaataccattttcagccgatcaaagtactcagagacctggcttgcacttattgaacggggaggttgtaccttcacacagaaaattaaagtggcaactgagaagggagccagtggagtgatcatctataacgttccaggtactggcaaccaggtgttccccatgtttcatcaggcatttgaagatgtcgtgtggttatgattggtaacttaaaaggcacggaaattttccatttaattaagaagggagttctcattacagccgtggttgaggtggggagaaaagcacatcatctggatgaatcactatttggtctcttttgtgattgtcacaactgctaccttagcatatttcatcttttatcacattcatagactttgtttagcaaggattcagaaccggagatggcagcgattaacaacagatcttcagaacacatttggacaactccaacttcgagtagtaaaagagggggatgaagaaataaatccaaatggggatagctgcgtaatttgctttgaacgctataagcctaatgacatagttcgtattctgacttgtaaacattttttccacaagaattgcattgacccctggattttaccccatgggacatgccccatttgcaaatgtgatattcttaaagttttggggattcaagtggttgttgaaaatggaacagaacctttgcaagttctaatgtcaaatgaactgcctgaaaccttatcacctagtgaagaggagacaaataatgaagtttctcctgcaggaacctcagataaagtaatccatgtggaggagaaccctacttctcagaataatgacatccagcctcattcagtagtggaagatgttcatccttcaccttgatggcatgacttttgaggaagtgtattaaacctgtatgtgaaatcaggtcctaatactgacaagcagtttgtctgtttga

SEQ ID NO: 400038 - DNA, 415 bp, Homo sapiens
gaatatccactagggatctcattctgtcgcctaggctggaatgcaatgcgtccctgaccttgcttcatatacacaacatcctttcttatcttctgaagatatgaatgaaagtgaaagttgacttcaccacaggcccaggtcttgtattgaggacaaggaaatactgccccataatgctgttgagaatatttaagagcagtcaggaaaccctttgtagcttggctttattgcagcaagtgtcaaagaggaggacctgaacttccaaggccaacttgactggaaaccctctagtctttaatccatagaaacctgacttctgtgccccccatgcctagaaaactacttttaaaaagaacattagtggtcaccacgttggtaaagtattaataaataaacatgttttagttctaatcat

SEQ ID NO: 400039 - DNA, 292 bp, Homo sapiens
gaatatccactagggatctcattctgtcgcctaggctggaatgcaatgcgtccctgaccttgcttcatatacacaacatcctttcttatcttctgaagatatgaatgaaagtgaaagcaaagaggaggacctgaacttccaaggccaacttgactggaaaccctctagtctttaatccatagaaacctgacttctgtgccccccatgcctagaaaactacttttaaaaagaacattagtggtcaccacgttggtaaagtattaataaataaacatgttttagttctaatcat

SEQ ID NO: 400040 - DNA, 978 bp, Homo sapiens
atttctccctctctctctctctctctctctctctctccctctccctctccctctctcatttcccctcactcccctttcacagttgacttcaccacaggcccaggtcttgtattgaggacaaggaaatactgccccataatgctgttgagaatatttaagagcagtcaggaaaccctttgtagcttggctttattgcagcaagtgtgtatgtgctatttatactggcctatttttatatttttgttttgtttttatattttcatgtgtttttatatgtttttatgttttgttatattgcagcaagatagacatcataatattcattataaatacaaaaagaaaaatgaggagaaggagggagaggttggggtaagtagcaaagagaaaattcaaataggatttgactattagagttaagccaccagagcccgggtgctccaggtgagctcagcctttcagccatccctggcaaggcagcagacacacaggatgagctatcttggggtctccagaccagttcatccagcagttactaaatgacctctgtggctgacgtgtagaatggacaaatcgcccagccacactcagactgaattcccccgtctgggagcccatgcactttccaaaagattcccatgatagttatgggagccacaaggaaattaaccaagctagaatgcccagtctcttctctatgcacacgaagagcatcttatgccctcaaatataaaggctcccaacagcacgcccttatgttatttcccaaatatacgtatctgaaatctatacttggtgtggctagccgaattgcctattcatgccatcggcccaggggaagcatactaccccttccacagaatttctatgcccatcctctcctaacgaatcgcaaggaacacattgcatagttacgcctatcgacgcattgcagagtaaccccatccgttcgctactctaggataatctctacgtaccact

SEQ ID NO: 400041 - DNA, 375 bp, Homo sapiens
tacccatttctttcctgcaggtttttactgatttggaaggttatgcaatcataacctgcctacccgtgttctgctccaggtagacaagggaatcgctaagaatccaaacttcattctatcatccctaaacagagctggcgaggctccccgaaggcggttacaacatccactgttcctttatctcttagcaccacgctctgtgttcacgggtcacccactactgctgcacgctttcaagctgctacacacagagccccggcaaagagccgacggtgacaaagagaggagcgtcacatacaagagcgtctgaagaaaggcagaaagatggcctgacgacttaccaaaaagccttggggttggacataagacaacaag

SEQ ID NO: 400042 - DNA, 312 bp, Homo sapiens
ctggaagggcttgctgaaaggtttgcaaaacctatttgcaaaagggagccattggaagttttaaagtagggtcttggcacattcacactattgtttaaaaagctactcacagacctgtggtagatggtttctggaagctgggacgccagctggggccttgttgggttaccggcagaggcgaggtggcccttcccaggtacagatgagtgccggttgcagtgagagtcgaaatcaggtgacaaatgtaagggacacagagagcagaatgtcagcagggcccggtgctgtctggatgtggcacgagtgggagag

SEQ ID NO: 400043 - DNA, 357 bp, Homo sapiens
agaaggctgttggatgctttagatatttttaaaggtgacttcctggaggcagcattgtaggagctaagaactcagactggccaggtccagtggctcacgcctgtaatcccagcactttgggagactgaggcgggtggatcacgaggtcaggagttcaagaccagtctggccaacatggtgaaaccccgtctctactaaaaatacaaaaactagccaggcgtggtggcgggtacctgtaatctcagctactcaggaggctgagtcagggaattccttgaacccaggaggcagaggttgcagtgagccgagatcgcgccactgtactccagcctgggcgactgagcaacacgtgtctca

SEQ ID NO: 400044 - DNA, 432 bp, Homo sapiens
agtgtcagagcctttacgtggaccttcccatggaaaaggaaacagaatagtcaatggaaaaggagaagggcctcctgcaaaacatccttccttgaagcctagcactgaaatggaagatcctgctgtgaaaggagcagtacaaaaaagaatgtacagacattgagagcagtgttgatttacccaatactaatgggaaccattgagcatttgccttgtggtgtctcctcagctgtattcacacattccatcaccttgtcttaatggataatcatgcactaacaagccttaccagtggcttcagaggaagaacagcaaaggcgtgaaagaagtgaaaagaagcaaccacagctaattttagaacatgcattctgacagaaaagacatctgagaaacaaaacaagcaaatttgttttccattttgcacctgccaaa

SEQ ID NO: 400045 - DNA, 814 bp, Homo sapiens
agtgtcagagcctttacgtggaccttcccatggaaaaggaaacagaatagtcaatggaaaaggagaagggcctcctgcaaaacatccttccttgaagcctagcactgaaatggaagatcctgctgtgaaaggagcagtacaaaaaagaatgtacagacattgagagcagtgttgatttacccaatactaatgggaaccattgagcatttgccttgtggtgtctcctcagctgtattcacacattccatcaccttgtcttaatggataatcatgcactaacaagccttaccagtggcttcagaggaagaacagcaaaggcgtgaaagaagtgaaaagaagcaaccacaggtcatagaaggaaataatacatacaaaagtgaaaaaatacaactatcagaaaatatatgtcatagtacattttctgctgctgctgacagattaacccaacaaagaaagattgggaaaacatatcctcagcaatttcccaagaaactgaaggaagagcatgatagatgcaccttaaaacaagaaaatgaagaaaaaacaaatgttaatatgctgcacaaaaaaaatcgagaagaattagaaaggaaagagaaacaatataagaaagaagttgaagcaaaacaacttgaaccaactgttcaatcactagagatgaaaccaaagactgcaagaaatactccaaatcaggattttcataatcatgaagaagtgaaagatctgatggatgaaaattgcattttgaagacagatattgctatactcagacaggaaatatgcacaatgaaaaatgacaacctggaaaaaaaaa

SEQ ID NO: 400046 - DNA, 328 bp, Homo sapiens
gcttcggccagacccgacagtcagtgctcaatgctgcttctgtcactgcctgaaacaaggcgtggtgaggcaggcggagaagtcaattctctcgcttctggaaaacagcttcaaaaaagcactgattcattgctgctcctctcctgttcacaccgggacctgtgaggcactgggagtccgtgggaaaaataaagaaggggaaaccccacaaagaaggcggctgttcctcttggaggaagtgggagagctgtccctgtgccctctttacgcgacacgatcaaagcgtaaagaacatccctttaatccttactccaggtcctgggtagaa

SEQ ID NO: 400047 - DNA, 425 bp, Homo sapiens
caaaaaaaaaaaaaacaaaacacacccagaactttcagcctaactggccaactgtaagcttaatgcaactcctttcttatgcaagaagaagctagagtggccatcagtatatatattagctaaaatatatatatatttttagtactaaaaaccaatgtccttgttggctcatgcctgtaatcccagcactttgggaggccaaggcaggaggattgcttgagtccaggcaggtgttcaagactagcgttggtatcatagcatctctacaaaaattaaattagccaggcatggtggcacatgcctgtagtctcagctactcggaaggctgaggtgggagcatcacttgagcccaggagtttgaggctacagtgagctctgattgtaccactgcagtctgcctgggcaacagagcaagacccactctc

SEQ ID NO: 400048 - DNA, 738 bp, Homo sapiens
attgaaatagataaaatgaatttcttttctagataacaaaggaggtgtcataaaacacttgttatgggccagtgtgatggctcatgcctataatctcagtgctttgagaggctgaggtggaggattgcttgaggccaggaatttgagaccagcctggggcaacatagcaagaccccatctcttaaaaaaaaaagggtggggcgggggggcactgctgggcgcggtggctcatgcctgtaatcccagcactttgggaagccaaagcaggtggatcaaaaggtcaggagttcgagatcagcctggccaacatggtgaaaccccaactctactaaaaatacaaaaattagccgggcatgatggcgggtgcttataatcccagctactcaggaggctgaggcagaagaattgcttgaacccaggaggcggaggttgcagtgagcagagattgcaccactgcactccagcctgggcaacagagcgaaactctgtctcaaaaatgaattaattaattaaaacaattactggccgtcgtttacacgtgtgactgggaaacctggcgtaccacttatcgcctgagacatcccctttcgcagttgcgtatacgacaggccggccgatcgccttccacagtggccaccgaatgcaaatgaaatggagcgtatatttgttcgcgtaatttgtaaacattcattttaccatagccaatcgaaatccttaatgataaccggggtgggtgct

SEQ ID NO: 400049 - DNA, 1832 bp, Homo sapiens
tctaagtcattaaggaattgccacactgtcttccataatgattgaactaatttatactcttgccaacagtgtaaaagtattcctttttctccacaatctcgccagcatctgttattttttgactttttagtagtagccattctagctggtgttagatgatatctcactgtggttttgatttgcatttctctaattatgaagttaataatttcataattttattaaatttgatgaaatcaactcaagatggattacagacttaaatgtaaaacccaaaacctaaaaatcctagaagaaaacctaggcagtactatgcaggacataggcattggcaaagatttcatgatgaagacaccaaaagcaattgcaacaaaagcaaacatggacaaatgggatctaatcatactaaagagcttctgcacagccaaagaaactaacagagcaaacagacaacctacagaatgggagaaaatttttgcaatctgtgcatctgagaaaggtctaaaatccagcatctataaggaacttaacaaatttaaaagaaaaaaaaaacaacccattaaaaggtgggcaaaggacatgaacagacacttctcaaaagaagacatacatggagccaacgaacatataattctttatatacactgttggatatgattttttaagtattttgtcagagggtttttgcatttatgttcatgacaaataccagtctagttttcttgtaatggcattgtctggttatggtattatggtaatgctggaatcactaaatgagttaggaagtattctctctaattctgtcttctgaaagacatggtagaaaattggcataatttcctccttaaatgtttggtagaatcgccagtgaactcatctaggtctgatgctttctgttttggaagattattaattgttgtttcaatttctttaatagatattgggctctatattatctgtttcttcttgtatgagttttagcagactgcatttcaaggaattgatttatttcgtctaggttaacggatctatgggcatgaagttttgtatagtattattttattgttcttttaatatccatgggctctgcagtgcagtgatgcccccctttttcttttctgatattattaatttgtatcgcttttttttcttagttagcctacctaaagacttatactttttattgatcttctttaaagaaccagattttgattcttttgagttctgtattgatttcttgttttcaatttcacgggtttctgctccaatttctattatttctttttctgctaactttgaatttaatttacttttctttttctagcttcttaatctggcagcttagataattgattttagatctctcttctaatatatctatttaacgctatacatttttctatcagcactacttttgctgcatctcacagattttgataggtagtattttcagttttatttagcttaaaatattcttttttatttctctcgatatttgttctttgacctatgtattatttagaaatgtattgttgactatccaaatattttgggatttttcagctctttttctgtcatcggtttctagtttaattccactgcggcctgagggcatacattgtatgatttctattattttaaacttattaaggtatgttttatggcccagaatgcgatctaccttggtatatgttcaggacaatgttttgaaaaatactactagatagttctcttcataatgatttacctacttgtcttagtctgtttgctgttacttacaacagaatacctgaaatggggtgatttatttaaaaaataaatttatttcttac

SEQ ID NO: 400050 - DNA, 204 bp, Homo sapiens
ccgcatagatgtacggcttccagaagagcggcggcacctcagctcgatccaccgtgaagacaggctctggctgcagagatagctgaggctcctggatgacctgccgcagactcggcaggaggtggctgagtttctgggccatggccatggctgtgggcctgggcagggagctgggagagagaccagagcaaagtcaggggcctg

SEQ ID NO: 400051 - DNA, 478 bp, Homo sapiens
gggttcttatcctttacctctattatgtgggatcttgggaagcaggaatttttctggttcccttcccgattcgattgacctaggaaactagattaaaaatcaaaaagttacttggtgagaatagaattagataaaaaggagaggagacagtttttgaggctattttatgaatgcctctccttcctaacagctgggtgacatttctctgtcacatagttcattcattcaacaaatattttatttttatttatttatttttattttttattttatttatttttttgagatggagtctcgctctgtctccaggcagagtttgcagtgagccgagatcgtgccactgcactccagcctggggaacagtgtgagactctatctcaaataaataaataaataaataaataccttatgtatcagaacatgtcaaaaaaggcaaaaaataaaaaagagaaaagaattttacattgtattctctaaa

SEQ ID NO: 400052 - DNA, 299 bp, Homo sapiens
ctaacatggtgaaaccctgtctctactaaaaatacaaaaaaaaaaaaaaacaaattagcagggtgtggtggcgggcacctgtagtcccagctactcgggaggctgaggcagaatggcatgaacctgggaggcagagtttgcagtgagccgagatcgtgccactgcactccagcctggggaacagtgtgagactctatctcaaataaataaataaataaataaataccttatgtatcagaacatgtcaaaaaaggcaaaaaataaaaaagagaaaagaattttacattgtattctctaaa

SEQ ID NO: 400053 - DNA, 1114 bp, Homo sapiens
aagacattgaggacgtaacacctgtgttcccccagctttccaggtccatcatctctaaattgctaaatgaatcagaaacaaaggtccagaaaactgaggtagaagatgcagatatgcttgagagtgaagaatgtgaagcttctaaaggctactatctcactaaagccttgactggacataacatgtcagaagctcttgtcactgaagcagagaatatgaaatgccttcaattttccaaggacgttattattagtgacacaaaagactattttatgtcgaagactcttggcattgggagactgaaaaggccctccttcttagatgatccactgtatggtatcagtgtgagcctttcatcagaagaccaacatctgaaactcagttctccagagaatacaatagcagatgagcaggagactaaagatgcagcagaagaatgtaaagaaccctaatcaaggacttgctgggtgtgcttttcagaaagttggtaatgaagttaaattaaatttcttattgaattatttgaattcaatgaatgcactgcagagactattctttattgattttgacatttggagtcgctctttgtggattatatttccttgatatttttgagacttggggtgtaattgttcagtggtttttgctcattaaaatttctgggaccattgtttataaatttattgctaatcttacagtattaggattcattataaaaaccaacattttaatgtatacgtgttagggtaaaactcgttgaagtgctgtgattgtcctgtattcaattttgtatgtttcacctctactgtgattcagacagatcatggtggtcactgggaatttttgctgtggccctgcttttccttcttcccacttgtctcatgtctgtgaaactggtacaacctgccataagatgaaatgaattgtctcaacaaagcaatattagaagagcctttactatcttattggtgatgacacgtttcttaagtaggagtttgagtgaattatttgatatattactttgttaataatagttaacaatagtttcttattttctttcagagtttgggccttttagattgcatcaaataaagatgagctactttaaaagaca

SEQ ID NO: 400054 - DNA, 493 bp, Homo sapiens
gaaactggactgtcagcgctctgagggcagggactgctctgtttaaaccacgactgcacacacattttcctaaagcaagctaattgcagacttaagcctctccgaacagcttacatgacacccaaacatggacccacaatacattttgtgtcgcacaacatcaagtcacacaaaaatctcaaaattatacattacaatacaatttaattgtgctgtggtattaaagtcaaagacaaaggctttaaaccgagtgcctatgaggtaaccacagtaaagtcacacctttaataataagggaccaagaacacacgggatggcaacagggagtgagtgtccagcagagccctagacggaactggcgcaaccgctccagatcggaattcgaacccagaacttctggcgaaggccatgtaagaactactccaaggaggaagaggcctttacggccaggtgcaccttgctggaactttctgccggaggggaccccctcccc

SEQ ID NO: 400055 - DNA, 296 bp, Homo sapiens
tgccccttgcaagccttgacccactgccactacaatgtcacctttatagttctgagtcttagaaatctcttctctctctaggacctggctaaactcttgtgatcaaatagaaatggtcaaccagcaaatgttaccactagtttaaaaaaaggttccatcttgcacctggtagataatctacagtggtttgtcaaactgaatttattgcagtgtgtctacattaaaacttgccattcagaagtggtgtgaaattgggtacccaatccttggcatcctgaccgccctcctgtcagatt

SEQ ID NO: 400056 - DNA, 360 bp, Homo sapiens
gctgtttcttttttattcacacagatatgaggatgaaatcaataaacgtacagctgctgagaatgaatttgtgactctgaagaaggtaagggctgtgtgtgaggtttctgaggcttgcagctgcaggtttctggctgggttgggggaatctcctcactccactgccacagagctgccaagttcaggcctttggagcaataaacagaagtcaggtgcaccttagtctggaagatccctaaaagagttagttcatcagtctttagttttttagtaggattaaacttagaccatcctaatgagatacaaattgcccgttcaagtggagactggtcttagacaaggaccatcactgcaccagtc

SEQ ID NO: 400057 - DNA, 499 bp, Homo sapiens
accatgcgggtggctgtcacttgaaaatttcccgtgcattcctggaggtacctgcccctgtctctcaatcccctgcaaaaggagtcggagccgggggctccaggcgtttactccaagattcacatgcgtcttcccatgtcccagctgcctttgccgctgtcgatgcagacacctaaaaaggaggatttttccaaccccactgggagccccgcctctgcctctccacccgttccgcgctgaccctccaggcagcgcccctggttcgtctgcgctgtcctttccacctgacaaaagctggggcggcggggcgcggcgccgggcgacctcacatttctgccaaaggagagagacgcgtgtccgcggtgcgcccattcggggcctctgcaaatcgaccgagctgaggaacaaagcggccagcgcgcggcgagacgcagcccccacggaacccccgagcgccccagccctcgccgtcccggcccagccccccgcaagcggccgc

SEQ ID NO: 400058 - DNA, 256 bp, Homo sapiens
gggtcctgttggttttggacagctgcaacctttgagtggtagggaggttctgaccattcatccaccacaggtagcttgcgttcggagttgcaggatcacagattaagatcacagcctccatgatctccctggggtttaatttgctgctggagatggagggcttgggagtctccactgtgcagaaaacagggagaagattgccctgtgtggcacctttgattcctccaaaggcatttttcaatcagagttggcattt

SEQ ID NO: 400059 - DNA, 381 bp, Homo sapiens
gacaaataagagattcactattgcgttgaattggttttccaaaattttactcctgaattagatttacaagacccactattgaataatctacagttgataatctatgttgatggctactatgccataaattctaaaagaaagtactgaattgtatatgctgttacaatctgacacaaattattagaaagaagagtacttcctaaatttagttacgcccaacctgtggaattaattgccctcactcaagactgtgaattaaccaaagataaactgtaaatatatatactcatgtgcttttggagtagtccattatttttgtatgtattatttttgtatggtatggaaatgggatttcttacatctaatggtatgcccataaaa

SEQ ID NO: 400060 - DNA, 499 bp, Homo sapiens
gaccctcagcgctacagcagattgggcgcagagtggctgttcagagctccaggctcaacctcccacagcgatcctgttccccgcagcccgcagagcctcccacacctgaagcgcacgtgggctgcctgctgggtcagcacttgctgcgtatgccgggcagcctgagcaccaaggaggggaacgcagagcctcaggccggcagcgaagcacacagctctccacgatagcctgttctgaatccagtctgcggtcttcctcctagtgctttttcctcctgcttccctgtccctggaataagctacctgcacggaagcaggagacctgtgaaagaaccatctctcggcagctgggtgggaaggggccgcaacagtgtatacaggggctgggcacggtggctcatgcctatgatcccagcactctgggaggccgaggtgggtggatcacttgaggtcaggagttcaagaccagcctgggcaacatagcgaaacccgcctctact

SEQ ID NO: 400061 - DNA, 541 bp, Homo sapiens
gatcagatccttgtgagggtgtcttcaggagaattggggcacaaaaatcgacagaaacccccttctctctgaagaccccaaactatcttgttattttattattaggacattttccagatgagaaaacagaggctttaaggggcaagggccctctcaagatgagccagcagatgggaggggcctgcagggggtctgtgtccacctgactgtgaagcgtggcctgggccctacatgcttcagggacggggttggggaaagtgagagcactctggggatgggacaagcacagtgtcatggggagcagtccttggggacagagaggcccagtcccccagatctggatgtgaaactgctctggggcctgggatgcactctgtacttcaaaatcagttttcgttgtaattatgcagtagtacctgaacacgtgctcaggaaaaacctgcaaacaatacagaagtctatgagtgacaaagggcgtttccccacggtccccagagggagtctctgttttcccttgggagcctttcttcactgcctggtt

SEQ ID NO: 400062 - DNA, 279 bp, Homo sapiens
gaggatgaaaaacgaaaccaggtaaccaggactttctcacacgttccacccaggacacgttgacatgatgatctcctagcatgtgctggggatggatctgggtgccagggacatagcatgaacaaaacagataaaaatctcttcctttaagaagttgggccgggcgtggtggctcaagcctgtaatcccagcactttgggaggccaaggcaggcagatcacctgaggtcaggagtttgagaccagcctggctaacatagtgaaaccccatctctactaa

SEQ ID NO: 400063 - DNA, 380 bp, Homo sapiens
aggctaggacagaaaaggtagagagactttcactcaatgagtcagggaataattcctaccaaaaggcgacagcaaaaaaaaaaaaaaaaaaaaaagacactttaagctcagagagttagggaatagtccctattgggaaaacaaagcaaaagaaaaaaacattttatcctatgaagttagaaaataattccctactcagggatatcagaaagtcaggacttcctgacttaagcccagtcagccagaaaataatttctcctagcagaagagtcaggaagaatagatatccaacctacatgcaaggaaatgggttttctataaagaaagacaaccatgaagaagagagtttcagatgaggagtaaaggtctaatgttcacta

SEQ ID NO: 400064 - DNA, 2039 bp, Homo sapiens
  misc_feature (1039)..(1039): n is a, c, g, or t
tggttatgggctttgtttctggagctcagacagtccttagtttgaatcccaaatctgtccttacctccgataagcctcactaaagctcactaaacctctgtccccttatctgccaattggagataatcatgatatttaatcctatggagtgctgtgaggattaactaaaacaatgcatttgaagttcttggcactatgtctggcatggaggtatatgactatgatttgtaaattgcaatgcttctgagatggcagtagagggagcagagtcaatgggaactggacttcagaaaattagcaagattgatattaaacccttttacaagacaatgttcctgttctgatggagctagagcaacctgcacacagatgagtcgatgagattcacaccaggccatcttatcccaataatccttgctgtcccactcatgtggtactagcagatgcaaccagggaactcaacgcatctttctgcgtgtacatattgtctgtccaacctccaactccagctcaccccagtttcctcagaacacttaagaggggagaggagaagtatggtgatatcacaaaactgaaactagcaaatgtttatattctttgtacaaaaattgggagaaggtggagctggtttacctcccttacagcggcaagagtgatatcctctctcttcctctctctgtttcccacaaaagcagctccactgggcagagtgggaaaagcacaatcagaaccgattttgaatccaccctgtcttctatttacaactgtgaacctgcctatcccacccagactctcttcatctccatttccgctctgtacagcaaggtggcagggaagctggagggttaacctggtgagtgccaaagttacccataacttgtttattattctattattaacagctattgattcagcatttaacctgatcccatttcttacattatatctttgacttttcccagcaatttcaggtgggacataatatccccacttttatagacagggagttttggggttagagaagttaggtaacttatanaactttgtgccactagaaattgacacaccagaactagaagctacttttctgaaagtctttaatctgggattttcttcttagcatgatgcagcaaaaaattagatatagggcttatcaccagggcaactgggtggctgtttgagaaaggagacaggaatctgtgggggcctttgaatttggaaaaccttccaggggtttcattttagcatttggtttgttcttcattttacttcgaatttttttatgtctttgtctctgagggactgacaaggccagggccagtgtagggtcaagaaactgcagacctgcttatttagttttgattctaaaaaagagaaacaaattggacatagaagcgccctttcttagatgtcttcctccactcatgaaatacagaaggaagacagaggttcaaggcagaagatttaaccaagaaaaaagtgcgtatttgggcagagagtccctcatgatagacatctctggataaacgagttacagttggcagcatatggcaaatagagcagaggttctctaagtgttacctgcagatccctgggagtggtccccgagatctttttagagcatctgcaaggttaaactatttttataataatactaatacagttttgtcttttcaccctgctgacatttgcaccaatggtaccaaagcaaaggtgggtgaaactgttggggccttagcacaaagcaaggaagtggtgccaaattatactagcagttgtatatttcaccaccatgcacttacaataaaatgccagtttgacttaagaatgtttttgatgaagcagtaaaaattattaattttattaaatctcagaccttaagtacacgtctttttaatattctttgtgatgaaatggaaaaggcacatattaaaggatgatggtcatctcgaggaaaagcacttgcgtgattgtttgagttgccaagacgagcctgtcactttaaggaaaacaactggtagtatctgctgccaataata

SEQ ID NO: 400065 - DNA, 351 bp, Homo sapiens
tattttgcaataaatattgctattgctcactttgggtttatattgcctttatgagctgtaacactcaccatgaaggtctgcagctttactcttgaagcttagcgagaccactaacccaccagaaggaagaaactccggacacgccgcctttaagaactgtaatactcagtgcgagggttcacggcttcattcttgaggtccctggaactcagcggcaaggtctggacacgtgtcgtcgcgggcacagaaggtgcggcacgaagaccagctcttatccagaggcagaggaagaggaccatcaaattggagcaattttgatgacacattcattaaaatttgttgaattgtaca

SEQ ID NO: 400066 - DNA, 409 bp, Homo sapiens
gagaatgaagtatggatgaaccatgacttttaaagttggtaggcatgggaaatttggagggaaaagagatttctgatgagtctattattaaaaaccaatctataggaaaaaaagataagagcattagaggttagaaacaaggtcaggtccttcactctgcaagcaattctttcacttgattaagctctgtcatctcctttgccccattccccaagttaaatgctctacgacattcttgtcttcttctacccctcatccgatgacactgtctcccatgtttaaaaacaacaacaacaaaaccaggatgccaacaccaccaacttccttaccatctaccttcaaacttattataactttatatacatatacacatatatatttaaaataccttattacttccatatcatct

SEQ ID NO: 400067 - DNA, 5808 bp, Homo sapiens
  misc_feature (4)..(5): n is a, c, g, or t
  misc_feature (8)..(8): n is a, c, g, or t
  misc_feature (10)..(11): n is a, c, g, or t
  misc_feature (13)..(16): n is a, c, g, or t
  misc_feature (18)..(19): n is a, c, g, or t
  misc_feature (21)..(23): n is a, c, g, or t
  misc_feature (82)..(82): n is a, c, g, or t
  misc_feature (503)..(503): n is a, c, g, or t
  misc_feature (1383)..(1383): n is a, c, g, or t
  misc_feature (1970)..(1970): n is a, c, g, or t
  misc_feature (2052)..(2052): n is a, c, g, or t
  misc_feature (2540)..(2540): n is a, c, g, or t
  misc_feature (4692)..(4692): n is a, c, g, or t
  misc_feature (5403)..(5403): n is a, c, g, or t
  misc_feature (5629)..(5629): n is a, c, g, or t
cggnnggntnncnnnngnntnnntctgtaggggagggcctgccctcctggcaggggcccttgtgtgcgtcctgagctcaccntggttttggaggtggctgggcagtggcgggcagagccccatgctgtcctctgcctttgaggtgggcacggcacacgtgagagctgagcattggtggaggaggccacaaccggtgcccagtggttgagtcgctggtgcccaccgagggcccagggagtgagggaccccctgaagaggtagctgggagccagaccctcctcccgtggatgccttttcaagtccctgtcagttgttcagagaagagggggaggattcgcgctttgcgtcagatgcgtgcgtcctgcatgggtggtgccggccggctgtgcccaaagtcatgccctgcccctgtctcccgcagcctggcatgggctcacgtccgtgtgcttgtccagcctccactcgccacagctcccctcccctcccctccttttccctccccncctttccgctcccctcctctcccctcctttccgctcccctcctcttccctcctctgccctctgctcccctctcctcccttcccctcctgtcccttcccctcccttctcctcttttcccctcccttcccctcccttcttttcctttcccctcccctcctttcccctcccctcctctcccctcctctcccctcccttcccctctcctcctttcccctcccctcacctgtttgactctgctgtgccaggggccagggcagggctggcccctcactctgcggagtaaatgggtgtgggggccgggcctgtctgggatcagggcagccaggcagggtctcctgcaggagcaggcatagtcccagggagcaggcagctgcctaggaaggcagtcaagcagatggggacctcggctgccccaagactggcccggggctggtcctccctgcgtctggcctctgggtgggtggtggtggcttccttgtgacttcatccctccgatcgggcaggtggttttgtgcagtgtgtgcctgggaggcgcacggcagcatgatcggtccctgagtgtcacggcagcatcagaggccagtttggcatctggagtagctgccaccgagagaggcccagccgccaggcagctgggagcacaggtgtcggcatcccactgggagcacgggtgaggtgcctcccttctctgggcagagtttccccagttggtggtgtagacgccaggaacgcggttgtacggacttcgtgaggatctaacacagcagtgtgtaaaaacagcgccaagcgtgtcctcggtgggcgctcagaggcggttgtgagcagtgcagatgctgttggcctagttctgacagggtggcccaggggtctccccgtggcntggcatggacggtggcagctcctgtggtcatcactgccatggtccggagcggccctgggctctgcagcaaggcggtgaatgtggagctgagcggtccgaatcagggtctgggttgctcgttcaactcaggaacttccccagattcctgagttttcctctagccgaggtcaggggcagccaagggaagggtcagccagctcatccagacctcgctctgcaacaaatctccagcctgggttgccatgaggcaccctggggaggactcaggacgaggccccttgaggctgaacctgagacctaggaaactccaggtgggtcctaacagggcttgtcactgagcgtaggcctggacacggccctgtggtgtctcacccacgggcaccagtccctgttgagcaaggtccacgcagccctttgttctggacggagctgacgctcaggccacagactccgactccattcttcagaggcttcatcgcctgcacaggaagagaggcctggagataccaggttgtcttggggccacagctggcccttggcatggctggggagcagcaaagcagttcattaggaccagggctgaccanaccagtgtccatgcccagaggttctgggttctgccctcttgctgtcgtccggtgcaggccacatggccacctgggaaggccngggtcgtcgtcatattccgagtgtgaccaagagttcaggggcccaggtacctttctgggcccctctcagggtctttggaaaagtccagaatgagctgggctggtggagaattcaggaggtgtggccagtgcccccctgtgctctcagaagcaggggtcactggcgagagggctgggtggcccggcgatcaacctgaaggcattccttacctgcccttggacccggtgagccagtgactggcgtaggctttcaaacctttcaaaccacttctcctggagccccgtgttgtgtgcgtccctcagcccatgcaccccggaaggcacgcctcgcacccagctgtagagccccatgttgtgtgcacccccagcccatgcaccccggaaggcacgcctcgcaccgtgctcctggtggggcccgtgccaggggggcccaggctcctggggacagtggcccaggacttgggatgttagaaataaattttgggtgcngcaaaagaaatagcactcgaacataaatttaattttctcagcaaggcaattttacttctatagaagggtgcgtcttgcagatggagcaatggcgagagcacacctgaacgagggaggtggaggtctcatcctaacgcagccagtccctgctgctgtgtggttcccctgttggctagggttggaccgcacagtctaagctaattccgattggctattttaaagagagtagcagtacgagccggagtggcggggtgaatagtttgacgggaaggatggttacagaacaggtgactcaggatgactaagaacagagcaggtgacaaggatgactaaggtcagagcaggtgaccaggagtgactaaggtgaccaggggtgactaaggacagagcaggtgatagaggctaggcaggggttgtttactgaaactaggggcaaggatatgtaaagtacaaggaagttaaactttagaatgaagaacaaagaatggggatgtaaccatacggatacattgcttctttggagaggagctcagaattcattatacttaacaatttacaggctaaaacctttgaagaggaatttattatgttctacaggagcggtgccgctggcctgtggcttctgcagggacaagtagtggctgtggccgggaggcgttcggcagctgtgcttcagccccggccccagcttcagctcttcgagttgctggcttctctaaggcctgtcctgaagtggcctggagactgctgagttacttctggaatctgcaccgtgaaagtgaaacctggaccatgatgtgaggctggtgagagggtgccctgccgtcacccccggccttgtagaaaactcattccaatggccctctggttctcactcaggaccaaatagtgatggttttttgtttgttttcgttttgttttgttttgttttgttttgttttgtttttttagacagagtctcgctctgtcgcccaggctggagtgcagtggcgtgatctcggctcactgcgagctccacctctcgggttcacaccattctcctgcctcagcctcccaagtagctgggactacaggcgcccaccaccacagttggctaattttttgtatatttagtggagatggggtttcaccatgttagccaggatggtcttgatttcctgacctcgtgatccacccacctcagcctcccaaagtgctgggatgacaggcgtgagccaccgcgccgggcccaatagtgatgtttttactgctctgggcctgatcgcatgcaccgttgtctgtgctgtgacttccgtcgttgtctgtgctgtgacttccgttgttgtctgtgctgtgacttccgttgttgtctgtgttgcgacttctgtgggatattcgttggagaaggagccacacagctgtgtgggacccggcactccttcatcaccatcatccagggccacggacaccccctctcacaagtcgctgggatatgaaattagggaataaatgggaattttcagtgcgatgcagctggcgctaggatcctcctcagtgtgacgtctgagaccttttcccagctggagccctgtcattcattcattcattcatcccatgccaggctgggcggctgccagaggcacaatccggaaccgccccttgctaatgggcggaccagtgaaagcaaagcgggctcactgtgcagaccaatgattgacagttccagggtgtgatggacacaggcggctgccaggaaggagccccttcagaagcagtgggcggggcggggtggggaaggccgtggggaggagtgacttccagatgaggctcacaggactgtacccggagggagggggcagcaaggaccctgtgggcagccgggggcacggcacaggctgtggctgtaggtgtgggtggtgcccaggcattgacagaggggagctcactggacggggcagcgtggaggtgagggtcgggtgagggcccctcgggagcccctggccatgttagttgcacatttcatgactctttaaggagttagtgaggcctgggtgtgacctatttcccgttccaattaaacaggtcattagtccgtgtcgtgctaaagcagatcactcgcaaggaatggaaaacccttgaaatacgttttttaaatcggtgaaagtgagaaacngatgcctctgtgggaaaagaccagactccagggtctgcaccctcagagtgatgagctgcgtctgttaggggtgacctgaggtccctgctttgaaccagcttgttgaaaccggaagccatttctcatcttctgtaagagcctgcagcccctgtcagatgccagccattccccaggtcttgctgacactgtcattaggattcctatgagggccagtggggagacagctcagtctcggccctgcttccgaccccaccaccacccccaaatgcatactgctggcctttcctgggtttaattttattttgcagtggtagaggttgttttgctaaaattatttcaaaatctgccttgtggaaaaacgcccacgtcagggtgaccatctgtggtaaccgagaattccttggaggcagcgtcttcaccgcctggctaagcggatggcacaagctgccagccagacctctgtctgtccctgcccagaggccccagctgccccttcctccaggcacctccctgatctctggagtccaggttttgttcccaaggtcctacctttgtatctaaatgctgtgtcctctccccggacgatctcctccaggcactggctctcaggggccagctccccatgggcgatgatgtctctgatacaggaacttatgggtaccttgcaagtttgcacagaaagtggagcccgtctgttccttctggggtgtncgagcggggcctcggggagcaggtgcaggacagggcacaggaggaacaggcacggctggtggtgtgcagtgaacagcagtggtcacaccaggtggtggctcccgtgggacttttgaggccggcccagccctgagcaggtggggtctgcagaggcctcgtgggttggaggagacttattcagagggagttttggtcttgctagaaattgcatgagatgaaagatganattttaattctatcattgaggcatagtctttccaacacaccccctgaggtgtgagggaggctgtccctatatgatgtggtccccgctccttcaggctggggctcctggccagttcatctttcgtcctgtgtctgactttctctatcatttctaaaatgactaagacaatttattttgtt

SEQ ID NO: 400068 - DNA, 429 bp, Homo sapiens
ctccatccatccatccatccatccatccatccatccatccatccaggatccttctcttcatccatccatctacacagccttcatctggtcagagatacagacaccaatgccaaacagcagggcccagagttgtcaggacgctacagtgagtgggcagcagaggtccctgggggtggccagggatcacggccagtggtgtgcactcctgcttctctctctaaggctggccgagggcagggaaagtaatttgtgggaaagtaaaggattgaagtcaaatcacaactctacttttataatctggtaactggacccaggtgacttaacctctctgtgcctcagttcctttgcctgtaaaatgggcataagagatgtttctttggggttcttatgaagattaaatgaaaatgacaatgtaaaccaagcaagaga

SEQ ID NO: 400069 - DNA, 746 bp, Homo sapiens
aggatcaccatttatttcctatttagatatactgacattcatccatatgaaaatatgcaggtcattagcttactataattttactatttacttttgacttaatggggcataaataaaactttcttagtacacatgaggtggatatttgatacacagaacatttgtggtgggctttctgtgggttagatgtaaagcccacgtattttaatattcactattttaaatgagcaatgcatgaggggaatgcagtgtcagtacctggcctatttttaaactagtgtaatcaccctagtcataccattcagtatgtttgctttttaaaataagtaaccacaattaagttgttgtagcccttgcacttcaagagatttagtccttcctttcagttgtctgttaggtccattctgtttactagacggatgttaataaaaactatgtgagcctgaacgtattctcggccaaatttagtcttgtctctcatcttgattggattaattctaaagtctaaaatgattcagtccacaatagctctaggggatgaagaatttgccttactttgttgttcgctcagttcctaagactgtgagttgtcaaatccctagactgtaagctcttcaaggagcaagaagcacattttctccgtgtcatgtaatttttctaaggtgcttggcagcactctgtaccctgtggagtactcagtaccttttgtttgatgttgctgacaagacctaaaaaacaatccctta

SEQ ID NO: 400070 - DNA, 268 bp, Homo sapiens
caaagcttagggattttttacataacttttcagcatagaaaaagaggtacttagaagtattgaaggaaaaaatgaagacctaagaaaaaaatatttcatgatcatttccctaagccatttccagaatggtaaaaggtttaatcagtttttattacctcatttttaagcctgtatgagaatgtagaaactatatattatatgtatatttattttatgtatattttatgtttgtaaattgtttagaaagataattggttatgagatgtaa

SEQ ID NO: 400071 - DNA, 287 bp, Homo sapiens
cagcacagggattctgtagcacagggaaactgttctgtatgatgctgtaatggtggacacgtgacactctgaatatgtcaaaacccatagaactttacagcagacagagggaacttaaaataggcatctgtcagactaagagcaaaaggaagaacacataagcgccgcactctaattgataagatcaccccccaccagggtagaggtgaatgattctgcaacctctccacctttataccggaattcaagaactacggcaatggatggaagacggtgggagccaggtt

SEQ ID NO: 400072 - DNA, 426 bp, Homo sapiens
agaaattgagatttatggaaaagatgcccttagtgtttctacagtaagggcagaaagatgtgatacctttcctcacccatcttaaggttcaatggctgacacttctgcaacaaaagacaaattaacaagaagaaagcataagaggctgggtgtgactcacacttgtaatcccagctctttgggaggctgtgctgggaggattgcttaagcccaggagtttgagaccagcctgggaaaaacggtgagaacctgtctgcaaaaaatttttaaaaattagcctggcgtggtggagcatacctatagtcccagctacttgggaggctaaggtgggtggatcgcttgagctcagaaggttgagattgtagtgagctctgtttgcaccactgcactttggcctgggtgaaaaagtgagacttgtctcaaaaa

SEQ ID NO: 400073 - DNA, 465 bp, Homo sapiens
tgtaaataaagttttattggacctatagtgacagtcatttggtcatttgtttatgtattgtttgtgtctgtgttcacgttttaatggcagagctgaattggtgccagagactgtatggcccacaaagcctaaaatatttactaactggccttttaaaggaaaagtttgccaaccctactctaaggggtccagcgataggaggcgcataaaagcagctgtcacctctaggctgaggaaaaaaggacagtaaaacactctgaggactgtgataaagtctctccccgaaccttagactgaaatttagtctctttgaagagagtatggctctcacaggaatacatagttgcctatggcaaagaaacctgctagataaatttagccaaaggtgtcaggtaggagaacatagcatgagggtgcagctagaggtagtctttgaggactactcagctctcacactgaattaaa

SEQ ID NO: 400074 - DNA, 469 bp, Homo sapiens
ccctgcctagaaaagacattttaataaccttggctgctaaggacaacattgatagaagccgtctctggctatagataagtagatctaatactagtttggatatctttagggtttagaatctaacctcaagaataagaaatacaagtacgaattggtgatgaagatgtattcgtattgtttgggattgggaggctttgcttattttttaaaaactattgaggtaaagggttaagctgtaacatacttaattgatttcttaccgtttttggctctgttttgctatatcccctaatttgttggttgtgctaatctttgtagaaagaggtcttgtatttgctgcatcgtaatgacatgagtactactttagttggtttaagttcaaatgaatgaaacaaatatttttcctttagttgattttaccctgatttcaccgagtgtttcgatgagtaaatatacagcttaaacataa

SEQ ID NO: 400075 - DNA, 634 bp, Homo sapiens
cagagacagagtcttgctctgtcgcccaggttggagtgcagtggtgggatctcagctcactgtaacctccacctctcagattcaagctattctcgtggctcagcctcctgagtagctgggactacaggtgcgcaccaccatgcctggctaattttttgtatttttagtagagatggggttttaccacactggccaggctagtctcaaactcctgacctcaagtgatccagccgccctggcctccgaaagtgctgggattacaggcatgagccactgtgaccagcctccgtgtaaatctatacaatctattcctcagctcctttccagaatatcctggaagacatgtaaaacatgtatgtgagtgtgcacatatggattaaataataaatcacttccaggaaggaaaggaagtttggttatctttaaacaatttctgtggggtttttttttggtactttgattatgctttcaaaaacaatattccagatttctttcctcttttccatcctcagattcctttgcctaacatcttccctaaggactaacctctccccatccaaatgagattacaataccctcctctcctacttaactttctttttcttttttgagacagaacctcactccgttgccc

SEQ ID NO: 400076 - DNA, 581 bp, Homo sapiens
cagagacagagtcttgctctgtcgcccaggttggagtgcagtggtgggatctcagctcactgtaacctccacctctcagattcaagctattctcgtggctcagcctcctgagtagctgggactacaggtgcgcaccaccatgcctggctaattttttgtatttttagtagagatggggttttaccacactggccaggctagtctcaaactcctgacctcaagtgatccagccgccctggcctccgaaagtgctgggattacaggcatgagccactgtgaccagcctccgtgtaaatctatacaatctattcctcagctcctttccagaatatcctggaagacatgtaaaacatgtatgtgagtgtgcacatatggattaaataataaatcattttttggtactttgattatgctttcaaaaacaatattccagatttctttcctcttttccatcctcagattcctttgcctaacatcttccctaaggactaacctctccccatccaaatgagattacaataccctcctctcctacttaactttctttttcttttttgagacagaacctcactccgttgccc

SEQ ID NO: 400077 - DNA, 646 bp, Homo sapiens
atggcagcagttggacctcacagtgtggattgtgccttcaccctggaatgtttatgccctatcaccatggtgatgggattagggatctcctgcccttggtcctaagtgccactatctgtgctgagtttttcaaaggtcagagcagattgaaccattgtggtttcattttccctgattttgatttttcttatggggaacctgtgtggctgcattcaaggtgactcgaagaagccttccaaaaagcatgtgaaaaggaagccctactctactaccaaggtgacttcagggagcacattcaatgagaatacaagaagatatgctgtgcacaccaaccagtgtaggagacctcatggctcccgggtaaagaagaagaggtacccacaagaagatgacttccatcatacagtcttcagcaaccttgaaagattggacaagcttcagcccactcttgaagcctctgaggagtctctagttcacaaggacagaggagatggagagaggccagtcaacgcgagggtggtgcaggtggcccctctgaggcttgaatctactccccatgaggacaccgtacacgacatcactaacgaggacgccacacacgacatcgctaacgaggatactgtacacgacatcgctaacgaggccg

SEQ ID NO: 400078 - DNA, 329 bp, Homo sapiens
ctaagttccagtccctgagtcattcatgagtagcactgccaatgaactgacagccatgctgtgtccctccacatcccctaggtgactcgaagaagccttccaaaaagcatgtgaaaaggaagccctactctactaccaaggtgacttcagggagcacattcaatggtacgtattctggaatcactcactggttgttagaaaaggattctacaggaaatctggagcttaactgctggcttttgtctggagagcctccatgatccaagacatctggtgggaatgaggatgtagggtatagtaaaagaaactggttttcctggtgacatact

SEQ ID NO: 400079 - DNA, 487 bp, Homo sapiens
agttagatttcacataactgacaaaaattaaaatttctgatttcttgtaaaaatattttgtatgtgtgaatgcatactgaatgtaaagtggataaaaaactcacacttgcactcatggaaggcttttcatgaatttgtcaatttttattttttatatttccccacttcaccagataatgcatacctgaacctggaaactgattcccactgcagaaagtgttctgagccacatcccttagcttcactagtgcaggtccacctgggaggatgtcccagcatcagcttgacccatgctgtgatcagccacctccatgcatcacaccaagcaagcccctgggtgattcacagtctccaccaccagggcactgaccttaactctgtgtttttctagctccccatgaggacaccgtacacgacatcactaacgaggacgccacacacgacatcgctaacgaggatactgtacacgacatcgctaacgaggccg

SEQ ID NO: 400080 - DNA, 398 bp, Homo sapiens
agtcagttactgaccctcagattgtgccagggttgtgtgtttatgtgtgaacaagagagtgtgagtgtgattttgtccacttttgatatggaaggtgagtccgacctcacatcgagagaagccacaacagtgaccaacccttacagagggagatttgatgacagacacccattaataaaaatatggcaaatgtccactgcagctcagaagagagtcttcaaggaggtcagagaatccacagctctgctttgtgcagggatgtctcctcttcaccaaagcatttagcatccactggggtaaacagggaggatccagctgtgtctgctcattccaagtggttttgagaaaacaaaatcaacattaaattaaagcaaataatcagagatgtattaacacta

SEQ ID NO: 400081 - DNA, 609 bp, Homo sapiens
cccttctttattaaaaaaaaaaaaaaaaaaattaaaagtgcggttgtggtgatgtacaccagtagtcccaggtgcttgggatgccaaggcagaaagattgcttcagtccaaagtttgaggctgcagtgagctatgatggtgatggtgccactaagctccagcctgggtgacagtgcaaaactgtctcaaaaaaaaagaaagaaaaagaaacagaattgtccaggacatttttcccccttctgggtatctccaattcttctatccctggttcacctcagagtattgcagttctgagaaccagtgcattctggattcattgtagaactttgattctctacttgactgtatgtcagaatcaccagagagcttgaaaaatcctgatacctggatcttttcccgcaaaactctggttcatttggcttgggattcagtgtgggcattaaggagtttcatcagctctccatgtagctttaaatgtgattttaagctggttaaaaaccacagctttaaaatgatatggcctagacagtgcactgttaggtaaatacttattccataggcgtcagggttaagttgatatgcagagaagatctctaaaggaaaaaaaaa

SEQ ID NO: 400082 - DNA, 549 bp, Homo sapiens
tagaacatttttctcctttctgggtatccctaattcttctatccctgattcacctttcaaaattcatctcagagtattgcagttctgagaacctctgcactcctgggtgacagtgcaaaactgtctcaaaaaaaaagaaagaaaaagaaacagaattgtccaggacatttttcccccttctgggtatctccaattcttctatccctggttcacctcagagtattgcagttctgagaaccagtgcattctggattcattgtagaactttgattctctacttgactgtatgtcagaatcaccagagagcttgaaaaatcctgatacctggatcttttcccgcaaaactctggttcatttggcttgggattcagtgtgggcattaaggagtttcatcagctctccatgtagctttaaatgtgattttaagctggttaaaaaccacagctttaaaatgatatggcctagacagtgcactgttaggtaaatacttattccataggcgtcagggttaagttgatatgcagagaagatctctaaaggaaaaaaaaa

SEQ ID NO: 400083 - DNA, 302 bp, Homo sapiens
ctttgctagtgaacagctaagctgctttaggcatgtaatagaacattccatttcctgttcccttgctgacacagaggagtgttcctgctggcaatgatctaatcatagtgcagtaagaaacatggcagtttgataaaacatggtgagacagcggctgaaatggaagcatatgttctagaagacattcttgaggtagggctaggtttgtaagtgaaatgaaagttgaaatctgaacaaagaaatcttatctgccggaattattttacagatgaatagattagaggagagagcaaagagaagca

SEQ ID NO: 400084 - DNA, 701 bp, Homo sapiens
ccggtcgacttttgggggtccccccaagctttatagggcccaaaaaaaaaaaaaaaaaaaaagacaatgctatctgtgtcattggtttttaggggagctcatattgatgtacgtaacaagaaggggaacactccattgtggctagcagcaaatggtggacacctcgatgtggttcagttactggtgcaagcaggtgcagatgtggatgcagcagataaccgcaagataactcctcttatggcagcatttagaaagggtcatgtgaaggtggtgcgctacttagtcaaagaagtcaatcagtttccatcagattctgaatgtatgagatacatagcaaccatcactgataaggtaatatgttgttcactatatgagcaagggactctattcggttaatatatcttccattctaagaattcctagtttgagtagtaaagtgtaatatgtagccattttcatttatctagtatttgggaatgaagtatgcgatttaagagattcttgcagattatttacttacctaatgaatcaataaaacatcctctgctataggattaccttatctttaaaaataatacttgaggccaggtgcagtggctcacccttgtaatcccagcagtttgggaggccgaggcaggtggattgcatgagcccaggagttcaagaccagcttgggcaacatggggagaccccatctctac

SEQ ID NO: 400085 - DNA, 400 bp, Homo sapiens
ctttgctagtgaacagctaagctgctttaggcatgtaatagaacattccatttcctgttcccttgctgacacagaggagtgttcctgctggcaatgatctaatcatagtgcagtaagaaacatggcagtttgataaaacatggtgagacagcggctgaaatggaagcatatgttctagaagacattcttgaggtggagtctttcattttggatcaggatgatttggaaaatccaatgctggaaacagcttccaagttgctcttatcaggtactgctgatggtgcagacctcaggacagtagatccagaaacacaggctagactggaagctttactagaagctgcaggtttttggatcagtacatctgtagggccttagattcttcatttctgacaagctt

SEQ ID NO: 400086 - DNA, 4385 bp, Homo sapiens
ctttgctagtgaacagctaagctgctttaggcatgtaatagaacattccatttcctgttcccttgctgacacagaggagtgttcctgctggcaatgatctaatcatagtgcagtaagaaacatggcagtttgataaaacatggtgagacagcggctgaaatggaagcatatgttctagaagacattcttgaggtggagtctttcattttggatcaggatgatttggaaaatccaatgctggaaacagcttccaagttgctcttatcaggtactgctgatggtgcagacctcaggacagtagatccagaaacacaggctagactggaagctttactagaagctgcaggaataggaaaattgtccacggctgatggtaaagcctttgcagatcctgaagtacttcggaggttgacatcgtctgttagttgtgcgttggatgaagctgctgctgcacttacccgtatgagagctgaaagcacagcaaatgcagggcagtcggacaaccgcagtttggcagaagcctgttcagaaggagatgtaaatgctgtgcgaaagttactcattgaagggcgaagtgtaaatgaacacacagaggaaggggagagcctcctttgtttagcttgttctgctggatactatgagcttgcacaggttttgttggcaatgcatgcaaatgtggaagataggggaatcaaaggtgacattacacctttaatggctgctgctaatggaggacatgtcaaaattgtgaagttgctgctagctcataaagcagatgttaatgcacagtcttcaacaggcaatacagcacttacatatgcttgtgctggaggctatgtagatgttgtaaaggtgctcttggaatccggtgctagtattgaggaccataatgaaaatggtcatacccctcttatggaagctggaagtgctggacatgtggaagtagccagattgctgctagaaaatggggctggcattaatacgcattctaatgaatttaaagagagtgcccttaccttagcttgttacaaaggacacttagagatggtgcgatttcttttggaagcaggcgcggatcaagagcataaaacagatgaaatgcacactgctctgatggaggcttgcatggatggccatgttgaagtagctaggttacttcttgacagcggtgcccaagtgaacatgcctgctgattcatttgagtcaccattaactttggctgcatgtggtgggcatgtggaacttgcggctttacttattgaaagaggagctagcctggaagaggtcaatgatgaaggttatacaccattgatggaagcagctcgagaaggacatgaagaaatggtggcattacttcttggtcaaggagcaaatatcaatgcacagacagaagaaactcaagaaactgccttgactctggcttgctgtggaggctttctggaagtggcagactttctaattaaggcaggagccgatatagaactagggtgttctacccctttaatggaagctgctcaagagggtcatttggagttagttaaatacttattagctgcaggagctaacgttcatgcaacaacagcaacaggggatacagcactaacatatgcctgtgaaaatggtcatactgatgtagcagatgtcttacttcaggcaggcgcagatctggaacatgaatctgaaggtggaagaactcctttaatgaaagctgcaagagctggtcatgtttgtactgttcagttcttaattagtaaaggagcgaatgtgaatagaaccacagctaataatgaccatactgtactgtccctggcttgtgcagggggtcatctggcagtggtggaactacttttggctcatggggcagatcctactcaccgtttgaaagatggctcaactatgttgatagaagcagcaaaaggtggccatacaagtgttgtttgctatctcttggattatcctaataacttgctttcagcccctccaccagatgtcactcagttaactcccccatcccacgatttaaatagggctcctcgtgtaccagttcaagcactgcccatggttgttccacctcaggagcctgacaaaccacctgccaatgttgccaccactcttcccatcaggaataaagctgcttctaaacaaaagtccagcagccatttgccagcaaacagccaggatgtacagggttacatcaccaatcagtctccagagagcattgtagaagaggctcagggaaagttaacagaactggaacagaggataaaagaagccatagaaaagaatgcacagctgcagtccttggaactggctcatgctgaccaacttaccaaggagaagatcgaggagctcaacaaaacaagggaggaacaaattcagaagaaacaaaagattttggaggaactacagaaagtagaacgagagttacaactgaaaactcagcagcagctaaaaaagcagtatctagaggttaaagctcaaagaattcaacttcagcaacagcagcaacagtcttgccaacacctgggattactaactcctgttggagttggagagcagctttctgagggagactatgcacggttacagcaagtggatcctgttttacttaaagatgaaccccagcagactgctgctcagatgggttttgcgccaatccagcctctggcgatgcctcaagctttgcctctggcggcaggtcccttgcctccagggtccatcgcaaatcttacagaatccaagtcctatcatctctccttcagccatgcttcctatctaccctgccattgatattgatgcacagactgagagtaatcatgacacggcgctaacacttgcctgtgctggtggccacgaggaactggtacaaacactgctagagagaggagctagtatagagcaccgagacaagaaaggttttactccactcatcttggctgccacagctggtcatgttggtgttgtggaaatattgctggacaatggtgcagacattgaagcccagtctgaaagaaccaaggacacaccactctccttggcttgttctgggggaagacaggaggtggtggagctattgttagctcgaggggcaaataaagagcacaggaatgtttctgattacacacctctaagtctggctgcttctggtggctatgtgaacatcatcaaaatattactaaatgcaggagctgagattaactctagaactggtagcaaattgggcatctctcctctgatgttagcagctatgaatgggcatacagctgctgttaagctcctgttagacatgggctctgacataaatgctcagatagaaaccaatcggaacactgcccttactttagcctgcttccaaggaagaactgaagtggttagtcttctgcttgatagaaaagcaaatgttgaacacagagctaagactggtctcacaccactaatggaagctgcctctggtggatatgcggaggtgggccgagttcttttggataaaggtgctgatgttaatgcccctccagttccctcctcaagagatacagctttaaccatagcagcagataaagggcattacaaattctgtgagcttcttattggcaggggagctcatattgatgtacgtaacaagaaggggaacactccattgtggctagcagcaaatggtggacacctcgatgtggttcagttactggtgcaagcaggtgcagatgtggatgcagcagataaccgcaagataactcctcttatggcagcatttagaaagggtcatgtgaaggtggtgcgctacttagtcaaagaagtcaatcagtttccatcagattctgaatgtatgagatacatagcaaccatcactgataaggagatgctgaagaagtgtcatctttgtatggagtcaatagtacaagccaaagatagacaggctgctgaagcaaacaaaaacgccagcattttgttagaggagttagacttggaaaagttaagggaagaaagtcggaggctggctttggctgcgaaaagagaaaaaagaaaagagaagagaaggaagaaaaaggaagaacaaagaaggaaactagaagaaattgaagccaaaaataaagagaactttgaactccaagctgctcaagaaaaagaaaagcttaaagttgaagatgagcctgaagtcttgacagaacctccaagtgccacaaccactactaccataggtatatctgcaacctggacaactttggcaggttctcatggtaaaagaaataataccataactacaaccagttcaaagaggaaaaacaggaaaaataaaattactccagaaaacgttcaaattatatttgatgatccactaccaatttcatacagtcagccagagacggtgcctggcgagtccaagagca

SEQ ID NO: 400087 - DNA, 4244 bp, Homo sapiens
agtatcgcgagacgaggtgagagctggcggagcggcggcggcggcggcggcagtagaggtgaccgaggcggtggcggcggaggcggcaccgattgctgtgtcggccccagtgcggccgaagtcgcggtagagcgtagccccacgcccctcccccgtccgcgccctccctctttccctggggatggagaaggcgacggttccggtggcggcggcgacggctgcagaaggagaagggagccccccggcggtggcggctgtggcgggcccccccgcggcggcggaggtcggcggcggcgttggcggcagcagcagagctcgctcggcctcgtctcctcgtgggatggtgcgagtctgcgacctgctcctgaagaagaagccgccgcagcagcagcaccacaaggccaagcgtaaccggacttgccgaccccccagcagcagcgaaagcagcagcgacagcgacaacagcggcggcggtggaggcggcggtggaggcggaggtggcggcggcggcaccagcagtaacaacagcgaggaagaagaggacgacgacgacgaggaagaggaggtttctgaggtggagtctttcattttggatcaggatgatttggaaaatccaatgctggaaacagcttccaagttgctcttatcaggtactgctgatggtgcagacctcaggacagtagatccagaaacacaggctagactggaagctttactagaagctgcaggaataggaaaattgtccacggctgatggtaaagcctttgcagatcctgaagtacttcggaggttgacatcgtctgttagttgtgcgttggatgaagctgctgctgcacttacccgtatgagagctgaaagcacagcaaatgcagggcagtcggacaaccgcagtttggcagaagcctgttcagaaggagatgtaaatgctgtgcgaaagttactcattgaagggcgaagtgtaaatgaacacacagaggaaggggagagcctcctttgtttagcttgttctgctggatactatgagcttgcacaggttttgttggcaatgcatgcaaatgtggaagataggggaatcaaaggtgacattacacctttaatggctgctgctaatggaggacatgtcaaaattgtgaagttgctgctagctcataaagcagatgttaatgcacagtcttcaacaggcaatacagcacttacatatgcttgtgctggaggctatgtagatgttgtaaaggtgctcttggaatccggtgctagtattgaggaccataatgaaaatggtcatacccctcttatggaagctggaagtgctggacatgtggaagtagccagattgctgctagaaaatggggctggcattaatacgcattctaatgaatttaaagagagtgcccttaccttagcttgttacaaaggacacttagagatggtgcgatttcttttggaagcaggcgcggatcaagagcataaaacagatgaaatgcacactgctctgatggaggcttgcatggatggccatgttgaagtagctaggttacttcttgacagcggtgcccaagtgaacatgcctgctgattcatttgagtcaccattaactttggctgcatgtggtgggcatgtggaacttgcggctttacttattgaaagaggagctagcctggaagaggtcaatgatgaaggttatacaccattgatggaagcagctcgagaaggacatgaagaaatggtggcattacttcttggtcaaggagcaaatatcaatgcacagacagaagaaactcaagaaactgccttgactctggcttgctgtggaggctttctggaagtggcagactttctaattaaggcaggagccgatatagaactagggtgttctacccctttaatggaagctgctcaagagggtcatttggagttagttaaatacttattagctgcaggagctaacgttcatgcaacaacagcaacaggggatacagcactaacatatgcctgtgaaaatggtcatactgatgtagcagatgtcttacttcaggcaggcgcagatctggaacatgaatctgaaggtggaagaactcctttaatgaaagctgcaagagctggtcatgtttgtactgttcagttcttaattagtaaaggagcgaatgtgaatagaaccacagctaataatgaccatactgtactgtccctggcttgtgcagggggtcatctggcagtggtggaactacttttggctcatggggcagatcctactcaccgtttgaaagatggctcaactatgttgatagaagcagcaaaaggtggccatacaagtgttgtttgctatctcttggattatcctaataacttgctttcagcccctccaccagatgtcactcagttaactcccccatcccacgatttaaatagggctcctcgtgtaccagttcaagcactgcccatggttgttccacctcaggagcctgacaaaccacctgccaatgttgccaccactcttcccatcaggaataaagcagtcagtggaagagcatctgcaatgtcaaacactcctacccacagtattgctgcatccatttcccaacctcagactccaactccaagtcctatcatctctccttcagccatgcttcctatctaccctgccattgatattgatgcacagactgagagtaatcatgacacggcgctaacacttgcctgtgctggtggccacgaggaactggtacaaacactgctagagagaggagctagtatagagcaccgagacaagaaaggttttactccactcatcttggctgccacagctggtcatgttggtgttgtggaaatattgctggacaatggtgcagacattgaagcccagtctgaaagaaccaaggacacaccactctccttggcttgttctgggggaagacaggaggtggtggagctattgttagctcgaggggcaaataaagagcacaggaatgtttctgattacacacctctaagtctggctgcttctggtggctatgtgaacatcatcaaaatattactaaatgcaggagctgagattaactctagaactggtagcaaattgggcatctctcctctgatgttagcagctatgaatgggcatacagctgctgttaagctcctgttagacatgggctctgacataaatgctcagatagaaaccaatcggaacactgcccttactttagcctgcttccaaggaagaactgaagtggttagtcttctgcttgatagaaaagcaaatgttgaacacagagctaagactggtctcacaccactaatggaagctgcctctggtggatatgcggaggtgggccgagttcttttggataaaggtgctgatgttaatgcccctccagttccctcctcaagagatacagctttaaccatagcagcagataaagggcattacaaattctgtgagcttcttattggcaggggagctcatattgatgtacgtaacaagaaggggaacactccattgtggctagcagcaaatggtggacacctcgatgtggttcagttactggtgcaagcaggtgcagatgtggatgcagcagataaccgcaagataactcctcttatggcagcatttagaaagggtcatgtgaaggtggtgcgctacttagtcaaagaagtcaatcagtttccatcagattctgaatgtatgagatacatagcaaccatcactgataaggagatgctgaagaagtgtcatctttgtatggagtcaatagtacaagccaaagatagacaggctgctgaagcaaacaaaaacgccagcattttgttagaggagttagacttggaaaagttaagggaagaaagtcggaggctggctttggctgcgaaaagagaaaaaagaaaagagaagagaaggaagaaaaaggaagaacaaagaaggaaactagaagaaattgaagccaaaaataaagagaactttgaactccaagctgctcaagaaaaagaaaagcttaaagttgaagatgagcctgaagtcttgacagaacctccaagtgccacaaccactactaccataggtatatctgcaacctggacaactttggcaggttctcatggtaaaagaaataataccataactacaaccagttcaaagaggaaaaacaggaaaaataaaattactccagaaaacgttcaaattatatttgatgatccactaccaatttcatacagtcagccagagacggtgcctggcgagtccaagagca

SEQ ID NO: 400088 - DNA, 4876 bp, Homo sapiens
agtatcgcgagacgaggtgagagctggcggagcggcggcggcggcggcggcagtagaggtgaccgaggcggtggcggcggaggcggcaccgattgctgtgtcggccccagtgcggccgaagtcgcggtagagcgtagccccacgcccctcccccgtccgcgccctccctctttccctggggatggagaaggcgacggttccggtggcggcggcgacggctgcagaaggagaagggagccccccggcggtggcggctgtggcgggcccccccgcggcggcggaggtcggcggcggcgttggcggcagcagcagagctcgctcggcctcgtctcctcgtgggatggtgcgagtctgcgacctgctcctgaagaagaagccgccgcagcagcagcaccacaaggccaagcgtaaccggacttgccgaccccccagcagcagcgaaagcagcagcgacagcgacaacagcggcggcggtggaggcggcggtggaggcggaggtggcggcggcggcaccagcagtaacaacagcgaggaagaagaggacgacgacgacgaggaagaggaggtttctgaggtggagtctttcattttggatcaggatgatttggaaaatccaatgctggaaacagcttccaagttgctcttatcaggtactgctgatggtgcagacctcaggacagtagatccagaaacacaggctagactggaagctttactagaagctgcaggaataggaaaattgtccacggctgatggtaaagcctttgcagatcctgaagtacttcggaggttgacatcgtctgttagttgtgcgttggatgaagctgctgctgcacttacccgtatgagagctgaaagcacagcaaatgcagggcagtcggacaaccgcagtttggcagaagcctgttcagaaggagatgtaaatgctgtgcgaaagttactcattgaagggcgaagtgtaaatgaacacacagaggaaggggagagcctcctttgtttagcttgttctgctggatactatgagcttgcacaggttttgttggcaatgcatgcaaatgtggaagataggggaatcaaaggtgacattacacctttaatggctgctgctaatggaggacatgtcaaaattgtgaagttgctgctagctcataaagcagatgttaatgcacagtcttcaacaggcaatacagcacttacatatgcttgtgctggaggctatgtagatgttgtaaaggtgctcttggaatccggtgctagtattgaggaccataatgaaaatggtcatacccctcttatggaagctggaagtgctggacatgtggaagtagccagattgctgctagaaaatggggctggcattaatacgcattctaatgaatttaaagagagtgcccttaccttagcttgttacaaaggacacttagagatggtgcgatttcttttggaagcaggcgcggatcaagagcataaaacagatgaaatgcacactgctctgatggaggcttgcatggatggccatgttgaagtagctaggttacttcttgacagcggtgcccaagtgaacatgcctgctgattcatttgagtcaccattaactttggctgcatgtggtgggcatgtggaacttgcggctttacttattgaaagaggagctagcctggaagaggtcaatgatgaaggttatacaccattgatggaagcagctcgagaaggacatgaagaaatggtggcattacttcttggtcaaggagcaaatatcaatgcacagacagaagaaactcaagaaactgccttgactctggcttgctgtggaggctttctggaagtggcagactttctaattaaggcaggagccgatatagaactagggtgttctacccctttaatggaagctgctcaagagggtcatttggagttagttaaatacttattagctgcaggagctaacgttcatgcaacaacagcaacaggggatacagcactaacatatgcctgtgaaaatggtcatactgatgtagcagatgtcttacttcaggcaggcgcagatctggaacatgaatctgaaggtggaagaactcctttaatgaaagctgcaagagctggtcatgtttgtactgttcagttcttaattagtaaaggagcgaatgtgaatagaaccacagctaataatgaccatactgtactgtccctggcttgtgcagggggtcatctggcagtggtggaactacttttggctcatggggcagatcctactcaccgtttgaaagatggctcaactatgttgatagaagcagcaaaaggtggccatacaagtgttgtttgctatctcttggattatcctaataacttgctttcagcccctccaccagatgtcactcagttaactcccccatcccacgatttaaatagggctcctcgtgtaccagttcaagcactgcccatggttgttccacctcaggagcctgacaaaccacctgccaatgttgccaccactcttcccatcaggaataaagctgcttctaaacaaaagtccagcagccatttgccagcaaacagccaggatgtacagggttacatcaccaatcagtctccagagagcattgtagaagaggctcagggaaagttaacagaactggaacagaggataaaagaagccatagaaaagaatgcacagctgcagtccttggaactggctcatgctgaccaacttaccaaggagaagatcgaggagctcaacaaaacaagggaggaacaaattcagaagaaacaaaagattttggaggaactacagaaagtagaacgagagttacaactgaaaactcagcagcagctaaaaaagcagtatctagaggttaaagctcaaagaattcaacttcagcaacagcagcaacagtcttgccaacacctgggattactaactcctgttggagttggagagcagctttctgagggagactatgcacggttacagcaagtggatcctgttttacttaaagatgaaccccagcagactgctgctcagatgggttttgcgccaatccagcctctggcgatgcctcaagctttgcctctggcggcaggtcccttgcctccagggtccatcgcaaatcttacagaactgcaaggagtgatagttggacagccagtactgggccaagcacagttggcagggctggggcaaggaattctgacagaaacacaacaagggttaatggtagccagccctgctcagaccctcaatgacacgctggatgacatcatggcagcagtcagtggaagagcatctgcaatgtcaaacactcctacccacagtattgctgcatccatttcccaacctcagactccaactccaagtcctatcatctctccttcagccatgcttcctatctaccctgccattgatattgatgcacagactgagagtaatcatgacacggcgctaacacttgcctgtgctggtggccacgaggaactggtacaaacactgctagagagaggagctagtatagagcaccgagacaagaaaggttttactccactcatcttggctgccacagctggtcatgttggtgttgtggaaatattgctggacaatggtgcagacattgaagcccagtctgaaagaaccaaggacacaccactctccttggcttgttctgggggaagacaggaggtggtggagctattgttagctcgaggggcaaataaagagcacaggaatgtttctgattacacacctctaagtctggctgcttctggtggctatgtgaacatcatcaaaatattactaaatgcaggagctgagattaactctagaactggtagcaaattgggcatctctcctctgatgttagcagctatgaatgggcatacagctgctgttaagctcctgttagacatgggctctgacataaatgctcagatagaaaccaatcggaacactgcccttactttagcctgcttccaaggaagaactgaagtggttagtcttctgcttgatagaaaagcaaatgttgaacacagagctaagactggtctcacaccactaatggaagctgcctctggtggatatgcggaggtgggccgagttcttttggataaaggtgctgatgttaatgcccctccagttccctcctcaagagatacagctttaaccatagcagcagataaagggcattacaaattctgtgagcttcttattggcaggggagctcatattgatgtacgtaacaagaaggggaacactccattgtggctagcagcaaatggtggacacctcgatgtggttcagttactggtgcaagcaggtgcagatgtggatgcagcagataaccgcaagataactcctcttatggcagcatttagaaagggtcatgtgaaggtggtgcgctacttagtcaaagaagtcaatcagtttccatcagattctgaatgtatgagatacatagcaaccatcactgataaggggaagaaagtcggaggctggctttggctgcgaaaagagaaaaaagaaaagagaagagaaggaagaaaaaggaagaacaaagaaggaaactagaagaaattgaagccaaaaataaagagaactttgaactccaagctgctcaagaaaaagaaaagcttaaagttgaagatgagcctgaagtcttgacagaacctccaagtgccacaaccactactaccataggtatatctgcaacctggacaactttggcaggttctcatggtaaaagaaataataccataactacaaccagttcaaagaggaaaaacaggaaaaataaaattactccagaaaacgttcaaattatatttgatgatccactaccaatttcatacagtcagccagagacggtgcctggcgagtccaagagca

SEQ ID NO: 400089 - DNA, 923 bp, Homo sapiens
cagtcgactctgagatcccccaggttgcagatatcctatgtagtagtggttgtggcacttggaggttctgtcaagacttcaggctcatcttcaactttaagcttttctttttcttgagcttcttattggcaggggagctcatattgatgtacgtaacaagaaggggaacactccattgtggctagcagcaaatggtggacacctcgatgtggttcagttactggtgcaagcaggtgcagatgtggatgcagcagataaccgcaagataactcctcttatggcagcatttagaaagggtcatgtgaaggtggtgcgctacttagtcaaagaagtcaatcagtttccatcagattctgaatgtatgagatacatagcaaccatcactgataaggagatgctgaagaagtgtcatctttgtatggagtcaatagtacaagccaaagatagacaggctgctgaagcaaacaaaaacgccagcattttgttagaggagttagacttggaaaagttaagggaagaaagtcggaggctggctttggctgcgaaaagagaaaaaagaaaagagaagagaaggaagaaaaaggaagaacaaagaaggaaactagaagaaattgaagccaaaaataaagagaactttgaactccaagctgctcaagaaaaagaaaagcttaaagttgaagatgagcctgaagtcttgacagaacctccaagtgccacaaccactactaccataggtatatctgcaacctggacaactttggcaggttctcatggtaaaagaaataataccataactacaaccagttcaaagaggaaaaacaggaaaaataaaattactccagaaaacgttcaaattatatttgatgatccactaccaatttcatacagtcagccagagacggtgcctggcgagtccaagagca

SEQ ID NO: 400090 - DNA, 379 bp, Homo sapiens
ataggaagactccatctccacaagaaatttaaaaattagctgagcgtggtggcatgggactgtagtcccagctactctggaggctgaggtaggagaatcatatgacccctggaggtggaggctgcagtgagccatgatctcaccactgcactccagcctgtgtgacagagcaagaccctgtatcaaaaaaaaaaaaaaaaaaaaaaaagacaatgctatctgtgtcattggtttttaggggagctcatattgatgtacgtaacaagaaggggaacactccattgtggctagcagcaaatggtggacacctcgatgtggttcagttactggtgcaagcaggtgcagatgtggatgcagcagataaccgcaagataactcc

SEQ ID NO: 400091 - DNA, 304 bp, Homo sapiens
gttagttcaggcatagatttactgaactgttagagtctgttttcaatctgacattgatatctattttttagggtcatgtgaaggtggtgcgctacttagtcaaagaagtcaatcagtttccatcagattctgaatgtatgagatacatagcaaccatcactgataaggtaatatgttgttcactatatgagcaagggactctattcggttaatatatcttccattctaagaattcctagtttgagtagtaaagtgtaatatgtagccattttcatttatctagtatttgggaatgaagtatgcg

SEQ ID NO: 400092 - DNA, 4997 bp, Homo sapiens
agtatcgcgagacgaggtgagagctggcggagcggcggcggcggcggcggcagtagaggtgaccgaggcggtggcggcggaggcggcaccgattgctgtgtcggccccagtgcggccgaagtcgcggtagagcgtagccccacgcccctcccccgtccgcgccctccctctttccctggggatggagaaggcgacggttccggtggcggcggcgacggctgcagaaggagaagggagccccccggcggtggcggctgtggcgggcccccccgcggcggcggaggtcggcggcggcgttggcggcagcagcagagctcgctcggcctcgtctcctcgtgggatggtgcgagtctgcgacctgctcctgaagaagaagccgccgcagcagcagcaccacaaggccaagcgtaaccggacttgccgaccccccagcagcagcgaaagcagcagcgacagcgacaacagcggcggcggtggaggcggcggtggaggcggaggtggcggcggcggcaccagcagtaacaacagcgaggaagaagaggacgacgacgacgaggaagaggaggtttctgaggtggagtctttcattttggatcaggatgatttggaaaatccaatgctggaaacagcttccaagttgctcttatcaggtactgctgatggtgcagacctcaggacagtagatccagaaacacaggctagactggaagctttactagaagctgcaggaataggaaaattgtccacggctgatggtaaagcctttgcagatcctgaagtacttcggaggttgacatcgtctgttagttgtgcgttggatgaagctgctgctgcacttacccgtatgagagctgaaagcacagcaaatgcagggcagtcggacaaccgcagtttggcagaagcctgttcagaaggagatgtaaatgctgtgcgaaagttactcattgaagggcgaagtgtaaatgaacacacagaggaaggggagagcctcctttgtttagcttgttctgctggatactatgagcttgcacaggttttgttggcaatgcatgcaaatgtggaagataggggaatcaaaggtgacattacacctttaatggctgctgctaatggaggacatgtcaaaattgtgaagttgctgctagctcataaagcagatgttaatgcacagtcttcaacaggcaatacagcacttacatatgcttgtgctggaggctatgtagatgttgtaaaggtgctcttggaatccggtgctagtattgaggaccataatgaaaatggtcatacccctcttatggaagctggaagtgctggacatgtggaagtagccagattgctgctagaaaatggggctggcattaatacgcattctaatgaatttaaagagagtgcccttaccttagcttgttacaaaggacacttagagatggtgcgatttcttttggaagcaggcgcggatcaagagcataaaacagatgaaatgcacactgctctgatggaggcttgcatggatggccatgttgaagtagctaggttacttcttgacagcggtgcccaagtgaacatgcctgctgattcatttgagtcaccattaactttggctgcatgtggtgggcatgtggaacttgcggctttacttattgaaagaggagctagcctggaagaggtcaatgatgaaggttatacaccattgatggaagcagctcgagaaggacatgaagaaatggtggcattacttcttggtcaaggagcaaatatcaatgcacagacagaagaaactcaagaaactgccttgactctggcttgctgtggaggctttctggaagtggcagactttctaattaaggcaggagccgatatagaactagggtgttctacccctttaatggaagctgctcaagagggtcatttggagttagttaaatacttattagctgcaggagctaacgttcatgcaacaacagcaacaggggatacagcactaacatatgcctgtgaaaatggtcatactgatgtagcagatgtcttacttcaggcaggcgcagatctggaacatgaatctgaaggtggaagaactcctttaatgaaagctgcaagagctggtcatgtttgtactgttcagttcttaattagtaaaggagcgaatgtgaatagaaccacagctaataatgaccatactgtactgtccctggcttgtgcagggggtcatctggcagtggtggaactacttttggctcatggggcagatcctactcaccgtttgaaagatggctcaactatgttgatagaagcagcaaaaggtggccatacaagtgttgtttgctatctcttggattatcctaataacttgctttcagcccctccaccagatgtcactcagttaactcccccatcccacgatttaaatagggctcctcgtgtaccagttcaagcactgcccatggttgttccacctcaggagcctgacaaaccacctgccaatgttgccaccactcttcccatcaggaataaagctgcttctaaacaaaagtccagcagccatttgccagcaaacagccaggatgtacagggttacatcaccaatcagtctccagagagcattgtagaagaggctcagggaaagttaacagaactggaacagaggataaaagaagccatagaaaagaatgcacagctgcagtccttggaactggctcatgctgaccaacttaccaaggagaagatcgaggagctcaacaaaacaagggaggaacaaattcagaagaaacaaaagattttggaggaactacagaaagtagaacgagagttacaactgaaaactcagcagcagctaaaaaagcagtatctagaggttaaagctcaaagaattcaacttcagcaacagcagcaacagtcttgccaacacctgggattactaactcctgttggagttggagagcagctttctgagggagactatgcacggttacagcaagtggatcctgttttacttaaagatgaaccccagcagactgctgctcagatgggttttgcgccaatccagcctctggcgatgcctcaagctttgcctctggcggcaggtcccttgcctccagggtccatcgcaaatcttacagaactgcaaggagtgatagttggacagccagtactgggccaagcacagttggcagggctggggcaaggaattctgacagaaacacaacaagggttaatggtagccagccctgctcagaccctcaatgacacgctggatgacatcatggcagcagtcagtggaagagcatctgcaatgtcaaacactcctacccacagtattgctgcatccatttcccaacctcagactccaactccaagtcctatcatctctccttcagccatgcttcctatctaccctgccattgatattgatgcacagactgagagtaatcatgacacggcgctaacacttgcctgtgctggtggccacgaggaactggtacaaacactgctagagagaggagctagtatagagcaccgagacaagaaaggttttactccactcatcttggctgccacagctggtcatgttggtgttgtggaaatattgctggacaatggtgcagacattgaagcccagtctgaaagaaccaaggacacaccactctccttggcttgttctgggggaagacaggaggtggtggagctattgttagctcgaggggcaaataaagagcacaggaatgtttctgattacacacctctaagtctggctgcttctggtggctatgtgaacatcatcaaaatattactaaatgcaggagctgagattaactctagaactggtagcaaattgggcatctctcctctgatgttagcagctatgaatgggcatacagctgctgttaagctcctgttagacatgggctctgacataaatgctcagatagaaaccaatcggaacactgcccttactttagcctgcttccaaggaagaactgaagtggttagtcttctgcttgatagaaaagcaaatgttgaacacagagctaagactggtctcacaccactaatggaagctgcctctggtggatatgcggaggtgggccgagttcttttggataaaggtgctgatgttaatgcccctccagttccctcctcaagagatacagctttaaccatagcagcagataaagggcattacaaattctgtgagcttcttattggcaggggagctcatattgatgtacgtaacaagaaggggaacactccattgtggctagcagcaaatggtggacacctcgatgtggttcagttactggtgcaagcaggtgcagatgtggatgcagcagataaccgcaagataactcctcttatggcagcatttagaaagggtcatgtgaaggtggtgcgctacttagtcaaagaagtcaatcagtttccatcagattctgaatgtatgagatacatagcaaccatcactgataaggagatgctgaagaagtgtcatctttgtatggagtcaatagtacaagccaaagatagacaggctgctgaagcaaacaaaaacgccagcattttgttagaggagttagacttggaaaagttaagggaagaaagtcggaggctggctttggctgcgaaaagagaaaaaagaaaagagaagagaaggaagaaaaaggaagaacaaagaaggaaactagaagaaattgaagccaaaaataaagagaactttgaactccaagctgctcaagaaaaagaaaagcttaaagttgaagatgagcctgaagtcttgacagaacctccaagtgccacaaccactactaccataggtatatctgcaacctggacaactttggcaggttctcatggtaaaagaaataataccataactacaaccagttcaaagaggaaaaacaggaaaaataaaattactccagaaaacgttcaaattatatttgatgatccactaccaatttcatacagtcagccagagacggtgcctggcgagtccaagagca

SEQ ID NO: 400093 - DNA, 4767 bp, Homo sapiens
agtatcgcgagacgaggtgagagctggcggagcggcggcggcggcggcggcagtagaggtgaccgaggcggtggcggcggaggcggcaccgattgctgtgtcggccccagtgcggccgaagtcgcggtagagcgtagccccacgcccctcccccgtccgcgccctccctctttccctggggatggagaaggcgacggttccggtggcggcggcgacggctgcagaaggagaagggagccccccggcggtggcggctgtggcgggcccccccgcggcggcggaggtcggcggcggcgttggcggcagcagcagagctcgctcggcctcgtctcctcgtgggatggtgcgagtctgcgacctgctcctgaagaagaagccgccgcagcagcagcaccacaaggccaagcgtaaccggacttgccgaccccccagcagcagcgaaagcagcagcgacagcgacaacagcggcggcggtggaggcggcggtggaggcggaggtggcggcggcggcaccagcagtaacaacagcgaggaagaagaggacgacgacgacgaggaagaggaggtttctgaggtggagtctttcattttggatcaggatgatttggaaaatccaatgctggaaacagcttccaagttgctcttatcaggtactgctgatggtgcagacctcaggacagtagatccagaaacacaggctagactggaagctttactagaagctgcaggaataggaaaattgtccacggctgatggtaaagcctttgcagatcctgaagtacttcggaggttgacatcgtctgttagttgtgcgttggatgaagctgctgctgcacttacccgtatgagagctgaaagcacagcaaatgcagggcagtcggacaaccgcagtttggcagaagcctgttcagaaggagatgtaaatgctgtgcgaaagttactcattgaagggcgaagtgtaaatgaacacacagaggaaggggagagcctcctttgtttagcttgttctgctggatactatgagcttgcacaggttttgttggcaatgcatgcaaatgtggaagataggggaatcaaaggtgacattacacctttaatggctgctgctaatggaggacatgtcaaaattgtgaagttgctgctagctcataaagcagatgttaatgcacagtcttcaacaggcaatacagcacttacatatgcttgtgctggaggctatgtagatgttgtaaaggtgctcttggaatccggtgctagtattgaggaccataatgaaaatggtcatacccctcttatggaagctggaagtgctggacatgtggaagtagccagattgctgctagaaaatggggctggcattaatacgcattctaatgaatttaaagagagtgcccttaccttagcttgttacaaaggacacttagagatggtgcgatttcttttggaagcaggcgcggatcaagagcataaaacagatgaaatgcacactgctctgatggaggcttgcatggatggccatgttgaagtagctaggttacttcttgacagcggtgcccaagtgaacatgcctgctgattcatttgagtcaccattaactttggctgcatgtggtgggcatgtggaacttgcggctttacttattgaaagaggagctagcctggaagaggtcaatgatgaaggttatacaccattgatggaagcagctcgagaaggacatgaagaaatggtggcattacttcttggtcaaggagcaaatatcaatgcacagacagaagaaactcaagaaactgccttgactctggcttgctgtggaggctttctggaagtggcagactttctaattaaggcaggagccgatatagaactagggtgttctacccctttaatggaagctgctcaagagggtcatttggagttagttaaatacttattagctgcaggagctaacgttcatgcaacaacagcaacaggggatacagcactaacatatgcctgtgaaaatggtcatactgatgtagcagatgtcttacttcaggcaggcgcagatctggaacatgaatctgaaggtggaagaactcctttaatgaaagctgcaagagctggtcatgtttgtactgttcagttcttaattagtaaaggagcgaatgtgaatagaaccacagctaataatgaccatactgtactgtccctggcttgtgcagggggtcatctggcagtggtggaactacttttggctcatggggcagatcctactcaccgtttgaaagatggctcaactatgttgatagaagcagcaaaaggtggccatacaagtgttgtttgctatctcttggattatcctaataacttgctttcagcccctccaccagatgtcactcagttaactcccccatcccacgatttaaatagggctcctcgtgtaccagttcaagcactgcccatggttgttccacctcaggagcctgacaaaccacctgccaatgttgccaccactcttcccatcaggaataaagctgcttctaaacaaaagtccagcagccatttgccagcaaacagccaggatgtacagggttacatcaccaatcagtctccagagagcattgtagaagaggctcagggaaagttaacagaactggaacagaggataaaagaagccatagaaaagaatgcacagctgcagtccttggaactggctcatgctgaccaacttaccaaggagaagatcgaggagctcaacaaaacaagggaggaacaaattcagaagaaacaaaagattttggaggaactacagaaagtagaacgagagttacaactgaaaactcagcagcagctaaaaaagcagtatctagaggttaaagctcaaagaattcaacttcagcaacagcagcaacagtcttgccaacacctgggattactaactcctgttggagttggagagcagctttctgagggagactatgcacggttacagcaagtggatcctgttttacttaaagatgaaccccagcagactgctgctcagatgggttttgcgccaatccagcctctggcgatgcctcaagctttgcctctggcggcaggtcccttgcctccagggtccatcgcaaatcttacagaatccaagtcctatcatctctccttcagccatgcttcctatctaccctgccattgatattgatgcacagactgagagtaatcatgacacggcgctaacacttgcctgtgctggtggccacgaggaactggtacaaacactgctagagagaggagctagtatagagcaccgagacaagaaaggttttactccactcatcttggctgccacagctggtcatgttggtgttgtggaaatattgctggacaatggtgcagacattgaagcccagtctgaaagaaccaaggacacaccactctccttggcttgttctgggggaagacaggaggtggtggagctattgttagctcgaggggcaaataaagagcacaggaatgtttctgattacacacctctaagtctggctgcttctggtggctatgtgaacatcatcaaaatattactaaatgcaggagctgagattaactctagaactggtagcaaattgggcatctctcctctgatgttagcagctatgaatgggcatacagctgctgttaagctcctgttagacatgggctctgacataaatgctcagatagaaaccaatcggaacactgcccttactttagcctgcttccaaggaagaactgaagtggttagtcttctgcttgatagaaaagcaaatgttgaacacagagctaagactggtctcacaccactaatggaagctgcctctggtggatatgcggaggtgggccgagttcttttggataaaggtgctgatgttaatgcccctccagttccctcctcaagagatacagctttaaccatagcagcagataaagggcattacaaattctgtgagcttcttattggcaggggagctcatattgatgtacgtaacaagaaggggaacactccattgtggctagcagcaaatggtggacacctcgatgtggttcagttactggtgcaagcaggtgcagatgtggatgcagcagataaccgcaagataactcctcttatggcagcatttagaaagggtcatgtgaaggtggtgcgctacttagtcaaagaagtcaatcagtttccatcagattctgaatgtatgagatacatagcaaccatcactgataaggagatgctgaagaagtgtcatctttgtatggagtcaatagtacaagccaaagatagacaggctgctgaagcaaacaaaaacgccagcattttgttagaggagttagacttggaaaagttaagggaagaaagtcggaggctggctttggctgcgaaaagagaaaaaagaaaagagaagagaaggaagaaaaaggaagaacaaagaaggaaactagaagaaattgaagccaaaaataaagagaactttgaactccaagctgctcaagaaaaagaaaagcttaaagttgaagatgagcctgaagtcttgacagaacctccaagtgccacaaccactactaccataggtatatctgcaacctggacaactttggcaggttctcatggtaaaagaaataataccataactacaaccagttcaaagaggaaaaacaggaaaaataaaattactccagaaaacgttcaaattatatttgatgatccactaccaatttcatacagtcagccagagacggtgcctggcgagtccaagagca

SEQ ID NO: 400094 - DNA, 4815 bp, Homo sapiens
agtatcgcgagacgaggtgagagctggcggagcggcggcggcggcggcggcagtagaggtgaccgaggcggtggcggcggaggcggcaccgattgctgtgtcggccccagtgcggccgaagtcgcggtagagcgtagccccacgcccctcccccgtccgcgccctccctctttccctggggatggagaaggcgacggttccggtggcggcggcgacggctgcagaaggagaagggagccccccggcggtggcggctgtggcgggcccccccgcggcggcggaggtcggcggcggcgttggcggcagcagcagagctcgctcggcctcgtctcctcgtgggatggtgcgagtctgcgacctgctcctgaagaagaagccgccgcagcagcagcaccacaaggccaagcgtaaccggacttgccgaccccccagcagcagcgaaagcagcagcgacagcgacaacagcggcggcggtggaggcggcggtggaggcggaggtggcggcggcggcaccagcagtaacaacagcgaggaagaagaggacgacgacgacgaggaagaggaggtttctgaggtggagtctttcattttggatcaggatgatttggaaaatccaatgctggaaacagcttccaagttgctcttatcaggtactgctgatggtgcagacctcaggacagtagatccagaaacacaggctagactggaagctttactagaagctgcaggaataggaaaattgtccacggctgatggtaaagcctttgcagatcctgaagtacttcggaggttgacatcgtctgttagttgtgcgttggatgaagctgctgctgcacttacccgtatgagagctgaaagcacagcaaatgcagggcagtcggacaaccgcagtttggcagaagcctgttcagaaggagatgtaaatgctgtgcgaaagttactcattgaagggcgaagtgtaaatgaacacacagaggaaggggagagcctcctttgtttagcttgttctgctggatactatgagcttgcacaggttttgttggcaatgcatgcaaatgtggaagataggggaatcaaaggtgacattacacctttaatggctgctgctaatggaggacatgtcaaaattgtgaagttgctgctagctcataaagcagatgttaatgcacagtcttcaacaggcaatacagcacttacatatgcttgtgctggaggctatgtagatgttgtaaaggtgctcttggaatccggtgctagtattgaggaccataatgaaaatggtcatacccctcttatggaagctggaagtgctggacatgtggaagtagccagattgctgctagaaaatggggctggcattaatacgcattctaatgaatttaaagagagtgcccttaccttagcttgttacaaaggacacttagagatggtgcgatttcttttggaagcaggcgcggatcaagagcataaaacagatgaaatgcacactgctctgatggaggcttgcatggatggccatgttgaagtagctaggttacttcttgacagcggtgcccaagtgaacatgcctgctgattcatttgagtcaccattaactttggctgcatgtggtgggcatgtggaacttgcggctttacttattgaaagaggagctagcctggaagaggtcaatgatgaaggttatacaccattgatggaagcagctcgagaaggacatgaagaaatggtggcattacttcttggtcaaggagcaaatatcaatgcacagacagaagaaactcaagaaactgccttgactctggcttgctgtggaggctttctggaagtggcagactttctaattaaggcaggagccgatatagaactagggtgttctacccctttaatggaagctgctcaagagggtcatttggagttagttaaatacttattagctgcaggagctaacgttcatgcaacaacagcaacaggggatacagcactaacatatgcctgtgaaaatggtcatactgatgtagcagatgtcttacttcaggcaggcgcagatctggaacatgaatctgaaggtggaagaactcctttaatgaaagctgcaagagctggtcatgtttgtactgttcagttcttaattagtaaaggagcgaatgtgaatagaaccacagctaataatgaccatactgtactgtccctggcttgtgcagggggtcatctggcagtggtggaactacttttggctcatggggcagatcctactcaccgtttgaaagatggctcaactatgttgatagaagcagcaaaaggtggccatacaagtgttgtttgctatctcttggattatcctaataacttgctttcagcccctccaccagatgtcactcagttaactcccccatcccacgatttaaatagggctcctcgtgtaccagttcaagcactgcccatggttgttccacctcaggagcctgacaaaccacctgccaatgttgccaccactcttcccatcaggaataaagctgcttctaaacaaaagtccagcagccatttgccagcaaacagccaggatgtacagggttacatcaccaatcagtctccagagagcattgtagaagaggctcagggaaagttaacagaactggaacagaggataaaagaagccatagaaaagaatgcacagctgcagtccttggaactggctcatgctgaccaacttaccaaggagaagatcgaggagctcaacaaaacaagggaggaacaaattcagaagaaacaaaagattttggaggaactacagaaagtagaacgagagttacaactgaaaactcagcagcagctaaaaaagcagtatctagaggttaaagctcaaagaattcaacttcagcaacagcagcaacagtcttgccaacacctgggattactaactcctgttggagttggagagcagctttctgagggagactatgcacggttacagcaagtggatcctgttttacttaaagatgaaccccagcagactgctgctcagatgggttttgcgccaatccagcctctggcgatgcctcaagctttgcctctggcggcaggtcccttgcctccagggtccatcgcaaatcttacagaactgcaaggagtgatagttggacagccagtactgggccaagcacagttggcagggctggggcaaggaattctgacagaaacacaacaagggttaatggtagccagccctgctcagaccctcaatgacacgctggatgacatcatggcagcagtcagtggaagagcatctgcaatgtcaaacactcctacccacagtattgctgcatccatttcccaacctcagactccaactccaagtcctatcatctctccttcagccatgcttcctatctaccctgccattgatattgatgcacagactgagagtaatcatgacacggcgctaacacttgcctgtgctggtggccacgaggaactggtacaaacactgctagagagaggagctagtatagagcaccgagacaagaaaggttttactccactcatcttggctgccacagctggtcatgttggtgttgtggaaatattgctggacaatggtgcagacattgaagcccagtctgaaagaaccaaggacacaccactctccttggcttgttctgggggaagacaggaggtggtggagctattgttagctcgaggggcaaataaagagcacaggaatgtttctgattacacacctctaagtctggctgcttctggtggctatgtgaacatcatcaaaatattactaaatgcaggagctgagattaactctagaactggtagcaaattgggcatctctcctctgatgttagcagctatgaatgggcatacagctgctgttaagctcctgttagacatgggctctgacataaatgctcagatagaaaccaatcggaacactgcccttactttagcctgcttccaaggaagaactgaagtggttagtcttctgcttgatagaaaagcaaatgttgaacacagagctaagactggtctcacaccactaatggaagctgcctctggtggatatgcggaggtgggccgagttcttttggataaaggtgctgatgttaatgcccctccagttccctcctcaagagatacagctttaaccatagcagcagataaagggcattacaaattctgtgagcttcttattggcaggggagctcatattgatgtacgtaacaagaaggggaacactccattgtggctagcagcaaatggtggacacctcgatgtggttcagttactggtgcaagcaggtgcagatgtggatgcagcagataaccgcaagataactcctcttatggcagcatttagaaagggtcatgtgaaggtggtgcgctacttagtcaaagaagtcaatcagtttccatcagattctgaatgtatgagatacatagcaaccatcactgataaggtaatatgttgttcactatatgagcaagggactctattcggttaatatatcttccattctaagaattcctagtttgagtagtaaagtgtaatatgtagccattttcatttatctagtatttgggaatgaagtatgcgatttaagagattcttgcagattatttacttacctaatgaatcaataaaacatcctctgctataggattaccttatctttaaaaataatacttgaggccaggtgcagtggctcacccttgtaatcccagcagtttgggaggccgaggcaggtggattgcatgagcccaggagttcaagaccagcttgggcaacatggggagaccccatctctac

SEQ ID NO: 400095 - DNA, 501 bp, Homo sapiens
acaaatggcataaaaatagctgtgcctttaatttgtgataaaggctatttgctttttcccatagaaagctgacatatacctatcaaaatggtggggtttgatgcagccagtctgttgcattaataagagcaatgacactgaaacttagaataatgacaaaacatacatgatttaggtttagagaaaaaactatttttgaaaaggttttctaaagactatttaaaaatatagggaaggattgggtgtggccttcctgaaactgctctcaaagtgttgtaacccttggagaggtataaagaatcaagaggaaaccatttgagacataggtatttagcatttatcattttatatttaagaaacaccatagcgtgcttggtgctcaacattaaacatggttttttggagttcttctccaccatctagctatagaaatttgtcatataaatgaatctttaaagcagttggctttatatatcctttgttaaccaaccaaaacaaaaa

SEQ ID NO: 400096 - DNA, 257 bp, Homo sapiens
tttgttttgtttttataaaagcaacttcaacattttaagtacaaatacagttgggattttaacttagaaaaaattattctttatgaagatactgttaaagtgtttgctattctgaagctgcctcaaagtaaactagaaatattcaaaagggctttatttgattttttaaaatgcaatatagcattagtggtttttttgggaggaggacttttcttattggttgtactagaagtatttgaataaaaacttttctctca

SEQ ID NO: 400097 - DNA, 300 bp, Homo sapiens
tttaaagaaaatattcactgctattctattgccaaggtcaggctcagaataggcacttaataaataatgtggaataaataaacaaatgtcccatgctcagagtacaaatgctgatataaatcagattactgtctaaaacttgaatttattcattattagagaaactctctgaagaatttgtgggccgggcatggtggcatgtacctgcagttccagctactcaggaggatgaggcgggaagatggcttgaggccaggagtttgagactagcctagacaacatagtaagaacctatccctt

SEQ ID NO: 400098 - DNA, 188 bp, Homo sapiens
cataagtgagagccagctggaacaaaaaacagaagaggcacacccctgcagtggcttcaggtattggaataatcaggcatagaagttatgtttttttatgtttaaagaaacatagaacataaaccgaacccatccctacccataggggactataaggaaatttaccttgacactgagcaaagtagaaa

SEQ ID NO: 400099 - DNA, 388 bp, Homo sapiens
aaaaaaagcacaaacagccccagagtgatgatgcccaaaacttaaatgaccacagcaaccagtgccatgccagtgagttttggagctgagctttggtcttgtccatagaagcttttaagttgaaagcttataaatagagggtttctatattctgtgaatgatagaggtacacagttccaattgtattctgtattacgtgtatgtgccctctttgcataaatgtgcctgacactgtagtggaggccagcttcttgaaagcaaaaaaacacgcatcccattcatctctgtatttccagggctcagcactagtgggtgctcaataaatatactgaatgaatgaataaaagtattactgcaaagatcagtaagtcccatgccaaaaaaagaa

SEQ ID NO: 400100 - DNA, 546 bp, Homo sapiens
ccaccattccctctccagaaagcacccagatgcctttgggagaaccagcctcctccatggaggaaagcttgggatctgccttcccacctggggaggagagggatctgtggaaaatccttctgacggacttcccctcagtgcctgatccatactcaatagtagaaaaattaagaaatatacaaagatagcagatacacggagacagttccccaaatagctgagcgaatagcgcagaagcaatattgaagacctaatagctgagacatttccagaactgataaagtgcgtccagccacagatcaagcagcccagaaaattccaggcagcatcaacaaataaatagccccacatgcacccgtgaaaatgcagaagaccaaagaaaaaagtcctgtcagcagccagagaaaaagatcagccaccaggggtcggtagtgagaaggacaactgtggaagccaggagagatgacagccctgagttccacaggcaatggaagaaagactgtcagacagaaaggttgtccccaatatacttgcactaaaagaaaa

SEQ ID NO: 400101 - DNA, 418 bp, Homo sapiens
ggactcaaagggcaaagaagtagaaagcttcaagaatgctttcttagttatttagaacatgataggaagtatcagtagggagaaatggcagaaaatttaatgtatatatgtcagtgttaaaacacccgcaaggagaatattaagataaaaaataatagtacatatgaaaagaaacaatcaaatgaataactgaacttgtagtgttccacattaaattaaggatacatccttataagcattttactaaaaatcatggatctcacaaacacctggtgagagtaccctggtctcctgattctcaaagtacccccttccctacaactctaacatgctttgtctcaaaaataaattctttctgtacaggaagctagattaggatctacttgaaatttaaggtaataaattctcatttgactta

SEQ ID NO: 400102 - DNA, 370 bp, Homo sapiens
cctttctgtcttaaaaattcctttacaataatagtttaccttcatgccaaattgttaaattgcatttacgtgaaacaataataaagcataaccaaaatagcaacctatgattgaattacatgaatggtcacccctatagtcccatttccatgcctgacatagtgcttactgtgtatcacaggtgtacagtaaatgtttgttgatctgaaaaaactgcaaagtaattaaataaaacaaattgaagtattatgccctcaaactttatactacccttcaaacttacacaatttctttggtttattaacatggtagtttcaaatacaagaaggggcttgtgtttgtctacgtagtaattaactacatagccttt

SEQ ID NO: 400103 - DNA, 386 bp, Homo sapiens
acaaagggaacaattcttagacaatggcccaagagtttgctataaatatggagatggagtcatttgttggctagggcattgctgtggtctgaatgtttctgtctccctgaaactcaaatgctgaaattttaactcccagtgtattaggatgtggggctcttgtgaagcgatcaggccacgagggcagagttatcatgaatgtgattagtgtccttataagagagacctgagagagacacctcgctcctttgaccaagtgaggatacagcaagacagcatcatctatgagtcagaaagcaggccctcaccagacacagaatctgccttgaccttggacttgccagcctccagaaccatgataaataaatttccgtggtttattttta

SEQ ID NO: 400104 - DNA, 600 bp, Homo sapiens
ggaggataaagttggatctttttctcacaccatacacataaattaaaattgatcacagattaaatataagagatgacactataaaactattaggagaaccttcaagatcttaggttgggcaatattgtcttatatataaaacatgaaaatacaagtgacaaaagaaaatagataagtgggatttcaaaattaaaaacttttgtgcttcaaagagcaccgctgaagaagtaaaaggacaatccacaagatgatagcaaatatttgcaaatcatatagctgataaagaacttgtatctgtattacattaaaaactattataatacacaataaaatgacaactcaaatttaaaaatgtgtaagggatctgaacagacatttctccaaagagaaatatacaaatgaggatatacaaatgaccaaaaagcacttgaaaagattctgaacatggttagccattatggaaatgcaaataaaaaccacagtgaaatatgacttcatattcactaaaatgcttataaaaaaaagagacactgacaaatgttggcaaggatatggtgaaactggaatcctcatatactattgggaacataagattttgta

SEQ ID NO: 400105 - DNA, 361 bp, Homo sapiens
tagagttcaaagtgatttaattttcaatggtaataaataccttaatattatctaccaaaaatattgaataatatccaaataatcaagtcaatttttttatttttagaattaagatttctaatagtacctaaagggatttaaaatgtttaattggagaagagaggggcaggatatatagaaaaagatatttaacctaattattttgggtactttatcttttacttaacaaacatttttgagagactactttggcaggtactattggatattggaggttctgaaaatatagcagtaaagaaaatagacaaaactatcttacctcctggagattacactttagtaggccagattaaagataaat

SEQ ID NO: 400106 - DNA, 348 bp, Homo sapiens
gggctttgccaggtgaattcaacaaaggaaggaaagagcaaaggtattgagtatgtatgcaaacctatatggtatagcctattgctcctaggctacagacctgtacagcatgtaactgctgaatacaggcaattataacacagtgttaaatatttgtgtgtctaagcacagaagaggtacagaagggtgggcatggtacctcatgcctgtaatcccagcatcttgggagaccaggaatttgacctggtaaaataacaagacctcatctctacaaaaatttcaaaattagccagataaaaggtattttccatttaacttttttttttttttttgagacggagtcttgct

SEQ ID NO: 400107 - DNA, 324 bp, Homo sapiens
tgacataaaagcaaaccctcagaggaagaatggacaggatttggtcatcaattccgtgcgagggcaacagagaagggtttaaaaatggtttctaggtttctggcatgggtgatgtgtggtttgaagaaggagcaggtgtgccaggagctgagaggtggccgtgggatgtgcaggaatggaggcgtggggtgacacagctggagatgtgcaggaggcacctgtatgtatgggtctgtttcttagacccaggctggagaaaagttgagaattagtcactggtatccacacagtggagaaagatcttctagggagactgtggaataa

SEQ ID NO: 400108 - DNA, 280 bp, Homo sapiens
cagtcgcgcccgctcctcctcgtcggccctggctcagccccgtcaggcaccaacttccctccccggccaagtgggagtgtccggcccacaaagtttccgctgcgaggtcgggcctcggtctctgcaccgaccgcctgtgctgcccgggaggagtggccccctccctccagcagccgcaaggtggaacggctgcccggcaccccattttgctccgcctgtggcaccaacccagacacgtgagcgcccgagcctctcgcacccccaggctgatccggcaggc

SEQ ID NO: 400109 - DNA, 478 bp, Homo sapiens
cagatgccacccgttttctcagacccgtcggtctcccagaccacattgctttgtgagcagatgcctgtcagggacagctctatcagaacagaccgagtccagcccagtgagccgtgatgttctctcactgctcggtcccccctctgccatctacagcgacataggttgggtctgttcccctggcagacagcaggccttcagagccctgccagaatctcttgtgtctcccctagcacacacacatccctccccacccaccaccgccaggcctggatagccctagttctctcccatttcttggtgtcagggtgttcagaccttttaagcagatgaatgctaactcattcaaggcttttaaaacccagtgccttagcagggtacagtggcacacacctgtagttacagctgtgtgggaggattgcaggagttcctgtctagcctgggcaacatagcaagacctccttgtcttttaaaagaa

SEQ ID NO: 400110 - DNA, 500 bp, Homo sapiens
atgtcataaaagtaagaccaaacattgtatctatacatgtaaacacataactttatacacataacctgaaggttggtaaaagtaaaagatttcagattgaatcaaaaagtgaaacccaactccaagttgtacgtaagaagcccacctaaaacagagatttacaaaagttgaaaataaaagaatgaaaagatatactaggcaaaagtaaaaaataaagtgggacaaaaagcattaaaggaaagcagcagcccactttttcctgccatgatgcacatcagagtaggggcaactggaaaagcagggcatccctggaggggcaggtggagcagcggcgagggcctcggtcatcattcccacaggagacctctacttcgtgggttctgtcacagggatttgttactgtggcttcccagaatacaaattctacaattttgtattttagtgcaatttatttgctatttaataatgagttttcaaatacaaaatgctatttaataatg

SEQ ID NO: 400111 - DNA, 394 bp, Homo sapiens
cgtgccactgcactctagcctgggcaacagaacgagaccctgtctcgaaataaacaaaataaaaataaaacccacaaatggccactaaatgtgtgaaaagatgtttccatttactcaaaagtaacaaggggacatcaaaatggcctccagcgtgagggcaggggtttccagcattttagagttgagaaattctctgatgtcaaacttcctggaatccttcatagtgctgatgactatgtttatttttctttccttgaaaaaaaaaaaagggcaaataacttcattccttccccacccaaagactgtaacttttttttattacaataattgatttcttaacatatagtagagagagttgagaaagtttaaagagctttacaatctttccagagtg

SEQ ID NO: 400112 - DNA, 846 bp, Homo sapiens
gttgcctttagggcagtggacagggagaatgactaggaagggacgtgacggaactttcagggtgatgataagtgttctgtatcttgaatagggctttggatcataagtgaatgcatttgtcaaaactcattaagtggtatattggagatttgtgtatttcactgaatatgcattttttctcaattttagttaatacgcatgctgaattgttctctgatgtttgcaacttgaatctttaaaatgagataaatacagtaaaatgttaattgtagaatcttgatgggtttatgggtgttcacttttaggtttcactcaacttttctgtgcatgggtaaacattcctaattgagtgttggagaatatgaatacattcgtgtgtttctctctacctccttcaccagtctcagagtgtttcctacagatgactatcaggtttcctgtcagtccttttttcagcaccatttttatatatgtatataaacatgtttctgtatatatgtggagtatatagaaataagtaggttcttgtctacctttacctgagtaataggaaactcatatgttctggaacttgattttttttcacttaatatgttttggctgtatatataggtttgtctctttcctttataaattatccagtctctgataagtctttattagcagcatgagaagagactaatacactcacagttccacatggctggggaggcttcaggaaacttacaatcatggcagaaggcaaagggaaagcaaggcacttcttattcttacatggtggcaggagagagagagagccaagggggaagtgccacacaccttcaaacaaccagactcatgagaact

SEQ ID NO: 400113 - DNA, 792 bp, Homo sapiens
gttgcctttagggcagtggacagggagaatgactaggaagggacgtgacggaactttcagggtgatgataagtgttctgtatcttgaatagggctttggatcataagtgaatgcatttgtcaaaactcattaagtggtatattggagatttgtgtatttcactgaatatgcattttttctcaattttagttaatacgcatgctgaattgttctctgatgtttgcaacttgaatctttaaaatgagataaatacagtaatcaacttttctgtgcatgggtaaacattcctaattgagtgttggagaatatgaatacattcgtgtgtttctctctacctccttcaccagtctcagagtgtttcctacagatgactatcaggtttcctgtcagtccttttttcagcaccatttttatatatgtatataaacatgtttctgtatatatgtggagtatatagaaataagtaggttcttgtctacctttacctgagtaataggaaactcatatgttctggaacttgattttttttcacttaatatgttttggctgtatatataggtttgtctctttcctttataaattatccagtctctgataagtctttattagcagcatgagaagagactaatacactcacagttccacatggctggggaggcttcaggaaacttacaatcatggcagaaggcaaagggaaagcaaggcacttcttattcttacatggtggcaggagagagagagagccaagggggaagtgccacacaccttcaaacaaccagactcatgagaact

SEQ ID NO: 400114 - DNA, 6350 bp, Homo sapiens
  misc_feature (19)..(19): n is a, c, g, or t
  misc_feature (640)..(641): n is a, c, g, or t
  misc_feature (749)..(749): n is a, c, g, or t
  misc_feature (2460)..(2460): n is a, c, g, or t
  misc_feature (3019)..(3019): n is a, c, g, or t
  misc_feature (3034)..(3034): n is a, c, g, or t
  misc_feature (3212)..(3212): n is a, c, g, or t
  misc_feature (3554)..(3554): n is a, c, g, or t
  misc_feature (3897)..(3897): n is a, c, g, or t
  misc_feature (3988)..(3988): n is a, c, g, or t
  misc_feature (6069)..(6069): n is a, c, g, or t
  misc_feature (6350)..(6350): n is a, c, g, or t
ctgctataataattccagncaaattagcttcatgtcactgagtattccgggaaataaaagggcattttataataaacaaaggctcaaattgtcagaaagacatgacaaccataatgtgtgagtatataataacagagctccaaaatgctaaaaacaaacatcaacagaaataaagaaaaatacagataaatatatggtcttaagtatagattttgacactcctttctccaaaacttatagaacaaatagaaaaaatataatagatacatagaatatttccagaattgacctcattgatacttataatatagcacacccaataacttagaatacaatgcttttaagtacacagtggaccatagatgaatctaaatacatttgaaggtttgaaatcttatagtacctgttttctgatgataatagaattgaaatctggaatcaataaaaataaggtagttagaaaatcaccaaatatttgaaaattaaatagtagacctatttgatctgcagatcaaaaaaagaattgataaagagaacttagaaaatattcaaactgaataacaactcagcatatcaataattgtgggatacagctatggaagtaattgaagaggaatgtatagttttatatgtttatatnncaaaagaacatttaaagatataaaatcagtgatctaagtttctatcttaagaatacataaaaagaaaaaataaaccaaagtagaaagaaggaaataataaggataaangcatgatcagtaagttcaaaaacaaacagtagaaaaaattaacagggccaaaatttgacttttaaaagattaataaaattgatgaacctgtttcaaaactaattttaaaaagagagagtacacaaaataccaatatcagaaacaaaagtggggatatatcactatagacactagagataataaaaaagatattaagaaaatattatttacaaatttatgtgcataaattcaacaatttagggaaatgaataaattccttataaaataaaacttgccaaagtgatatggaagaaaaagaaaatctgcatagccacttatcaagtaattacatttaaattatcatttaaatctgttccacaaagaaactccagatctggctggttttactggtgagctctatcaacattttaaaaagaaattataactcttacacaaactctttctaaaaatagagaaggaaggctcatttctcaacttattttaggagctaacataactcgaacaccaaaacctggcaatgatactgttcaggaaaaaaacaaaagcaaaacaaaaacaaaaaaaattacagactgatactactgtggatatatatacacaagtatctctaacaaaatattagcaaattgaatctaaactacataaaaaagctaatacatcataatcaaggttataataatacatcatacctaatatatctaaggctgatttcataactgaaaataaatcaataaaatgcaacatattaacagaatgaacaggaaaagccatatgatcttcccagtagatgtgaggtgggaggtaggaattgaccctggaggttgtgcccagacactggaccaaattgaggactagctaaaacagggatagtgtggaagcagtttaccataagacatgcctgtgagtgtgccatgtcagtttaccattgtcatggcaacacccagaagttactaccactttccacggcaatgacccaacaacgcagaagttaccacgcttttcctagaaatttctgcataatctgccccttaatttgcatgtaattaaaagtggctaaaaatacacggccgactgcctctgagctgctactctgggcatgccccctatgggatagccctgctccgcaaggagcagcaactctgctgctactgtacactgctgctttaataaaagttgctgcctaggccaggtatgctggctcacacctgtaatcccagcattttgggaggctgaggcagggagatcacttgaggtcaggagttcaagaccagcctagccaacatggtgaaacctatctttactaaaaatacaaaaaaattagttaggtgtggtggcgcacacctatagtcccagttgggaggctaaggtggacggatcacttgaaccccagaggcagaggttgcagtgagctgagattgcgcttctttagtgttaataagctatggaagagaccaaaataaaactatctttgagttgataaactatcttaactctgtgtctgttttattaattaaaaaaaaagcaaattaatgcagctgtgatgcatgtaactggcaaaagcatctttgaatagaaaaaatacactgcacaaatgaaaatggtggcgagagcaatggggaatatgacttgtgtcctaaacctattaatggtaaccacatttcatgtcagaaacagctcattaaactaattttagatttggtgagggaattcngcaaacccctccacatgtgtgtgcaaactcctcagtgtgtgaacccactgcaaactcctccgtgtgtgtaaacccactgcaaaccctccacgtgtgcatgtaaacccactgcaaacccctttgtgtgtgtgcaaacccactggaaacccctccactgtgtgtgcaaacccactgcaaacccctccacatgtgtgtgcaaactcctcagtgtgtgaacccactgcaaaccccagtgtgtgcaaacccactgcaaacccctccacatgtgtgtgcaaactcctccgtgtgtgtaaacccactgcaaaccccttcgtgtgtgtgcaaacccactgcaaacccctccactgtgtgtgcaaacccctccacacttccttttttgtcctgcctgctgggaaaatgagttccctaggtttagattaatgggtggaacttcttgcgtctggcccacacccagagctggctagagcaacccgggagtggagatgtgtggtttccagccggacactgtcttctctccccagctcaggattttattagcctgtgtggacaaacattttgnaggatcagtgttccnaaggaaccatctgtgacaacaccccaggttcctgggacatctctagggacccaaactcttccttttatttcactagtctgtcctatttatatacaaatgtagtcccttgtttgcacttcttccagcgggaacagactcaaacgcttcccctcaccttgggccttggttggggcctttntgtggctctcttttgagattcttaaagatgctgtgaagggatgggcctggcttccatccccaaacagatgttcttgaccagtctatgtggaattggggtcctgtccccctcccacctcagtcctgctttgtagtccatccctgactctcagcaaatactccaaggcgtctgcacttgtgagtgaagcctgtccattagccttcccccttatccctgtggctggcttcgccttcagcggacatcagtaattgttggccatgaaacccctttgcagaaattgcatttcctccctctagtggcctgtttgcatttgagttctgtgagcccctgcttcatcacttnttacacctgcccctccagggacaggcagccagggctggggtcaccagggtcccctcttgggccctccaacagcaacagtactggcaacagctgggatttgctgagcacagactctgcagcaggctcggttgagctctcttgcctgttccttcataccatcctcacgcccatccatgagatgggtccagctgttttcagatgagaaaatggcacaggaagctggtaagtgacagtcagaaatgaatgctggcagcttagtccttggacccaccgcagtgcaggaccttgctcaacagggatcacccttgtccgccacctgttcatgaggccacccagggtttgngtggtcatttgtctcctttcatctgctgccttcaaccagctgggtcattagggctggggaacccagaccccacacagtcctcctcccagangccagacacagcctcacgccacagcaaggactccagtccccgaagcaaatgtccctgggcgtagaagctgcagggcccccaatccctggtgtgtactgctttgcactggtgattcaccctcattgcaaccttccctcttgccaccctaacagtgcttttggctccttaacaccccctcgcctggcacagagcagggcttggtgaggactcactggacacagcccatgtgtcctcctgccagttagcctccatcgggacttttttgaatgtctgttttttaggcccttggcctatattttctcaaggcttttgataaaatatttaaaaataattcacaaggagcctagaaactgcctggaaaaccaatttctgtcttcagttgtctctaattaatgtcttcatgttgcaagaagttccccttttttaatgctggagcatcgtgcgggggattccatggttttccccgtccccggccacctggactgggctggcttctggccgcccacccacgggcccctccgggagctgtttctgtgcgggtctcaggatggagcctgaaattcctcttcctcctgggagcctttcttctgaataaaaatgatatagtaaccaaaaaatctacgcaatagagatatggaaagtcaaggcttccctccctgaccttcagtcccatttgttagaggtaaacgttgttccatcattcatttgctcattcattcttttgttcacttggcaaatacttcttgagcatctttgattcaccaggcatgatgctaggctctgagcatactgcagtgaacaacacagccaccagtccctgtgcctcctgacattctggtgaggtttaacaggagtaaggctgggctcctggatagctttgaactgcaaagtggttgagactggctgagaatccattgaggagatgtcccactgggttgaataagagcagcaagaatttgaaccaggacagcaacttcagaaatgaaagaatgagaggagctctgtattgattcttaaaggaatgctgtaatcctactgcatgtgttagttatgtgttaattcaatctgatttcatcactttgtttgcgtttcttttctttactaacttgataaataattattggctttgaatttttacaatgcaacattgtattctcacttttagagtgtattgtgcattttatttgcatacaatggatttatatatgtgtgttcttttctgttttcaaatgaaatgggagcaagctacatttcgttattgagactgggttttggatatccttccgttctttttattgatgatctcccatgaggaacttttgtgtatttccaaggggttctgctattacaaaccatgctgatgtacttccttgtgcatacaagtggaagtatacacttgtgggagattgttttcagaataaattactaaaattgagtaatctgccacatgaaaaatgggctcaccactgttttggttacatttctttaatcatgatggcattgagcaccattttcacacttattggtaattcatatttctttttctgaaaactaactattcctgtcctttgttgatttttccatttgggtatttgtgtttttcttgttggtttgcaagagctctttgtatattaaggaaaatcacactctgattttcacacagtgttgtaaattttttttctagtttgtcatttgggagtttttaatggagtctctgctctacaaaaatagaatttagcattctgtttaaggcttttatgttttgtgttttatttaggaaagattataaaataattcacttattttcatgggttctggaactatttgttttaggaaatgacctaaaaatctcaatggcacctaccattcattttctgcctaacacatagtaggggctctacatgattatctgtaattgttataattacaaggaggtgatggttttcctatttgatagttgatgaagttgaggctcagggaaggcaaagaacttacctaagcaacatagttctaagccagtggttctccaacttgagtatgcatcagaatcacttggaggacttgttaaaatacagatgtcngccgggcgcggtggctcacgcctgtaatcccagcactttgggaggccgaggcgggcggatcacgaggtcaggagatcgagaccatcctggctaacaaggtgaaaccccgtctctactaaaaatacaaaaaattagccgggcgtggcagcgggcgcctgtagtcccagctactcgggaggctgaggcaggagaatggcgtgaacccgggaggcggagcttgcagtgagccgagatcgcgccactgcactccagcctgggcgacagagcgagactccgtctcn

SEQ ID NO: 400115 - DNA, 286 bp, Homo sapiens
catgaagtttctaatttaatttttactcttgtagtagaatagcacgtcattttgatcttctatttattcgcttatctctgtgaacttccttttcatctcattttgtttctttcatcatttcaactctgggtactgactttatttacatttctctcccttttttttccaagcaaagtaactttgtggcacatgtcctgctcctgctgggatgccttctattccatttgcttttctgtagactgaagtgacaggacagggatgcagagaaggaagctcagcccaggct

SEQ ID NO: 400116 - DNA, 331 bp, Homo sapiens
cctttatttctagaatgggctatgattctaatgtaatgatgatattccagaccgatgagcaaaacataatgtacccatattttatcacacataaaaatgtttacacaacattgcacatttttttttggcttggagtaaatctctatcagagagctttctttcttgattaatcaaaccatgagattagaatttttaaaatgtcttcctcttccttctcaaatcacttttatttttctttcagtggcatctccccgctgtcagcctcagccctctcctaccaaaatctctttcgaaataagttccaataaacgccagtggccatgtttggaaa

SEQ ID NO: 400117 - DNA, 454 bp, Homo sapiens
ttttatacattaaagtgtagaaagtgtattcatcttaaatgtccagtctgatcagcttttagatatgtagcacacccatattaagatttttaattcgtggaattggagatttagggtattactgaaagcccctttgtctacggcaagttaactatttatttcaggttggtggtgttgagcattgacttcatcatgctatatgtacctgaagcatgaatgaatgtactgttaaaaaagaatatatcatgaacacatccagccacgctgattgaccaggcagcctgtttaatagttatccatacttattttatgcttatttctaaaatggtccttcattctcttcatgtatagtttcaaatttgtgatgaatatactgatggttgttaaggttttcctgcctctagagtttattatgtttatcataaataaacataataaatttcttaacctcagc

SEQ ID NO: 400118 - DNA, 639 bp, Homo sapiens
tgaaaatctaacttagtcttctgtccatgctagtgaatgactccctcaattagtgaattcactatagcaatttgaatttttggtgctgctttacttatgcctgttccttacttcagtccagaacaacctgtttatttccacaagatagtagtatcacaagtgaaaacagatccagctaagtagacttgtatcctgttttgcaacagtttattggaggtggggctagtgttatggtggttggtaaaaagtagatcaggtgtttagattatgtgcatcttattcctgactattgtcggttgtacttttagacatgaatgctactgtgaacaaataaagaaaacaaggtacattgcatgcccattctgcaaatttgatggttttattagtatcacgaaggtggtgtggcagagtggaaaggctctgccattagtagcctgctgtatgaattaggaagttaacctctgtaaaattccagctctgtccttcataacattgaagactcctttctctactaacactatatttttttactgcttttccttgcaaaatatggttttagaagttagaacttaagaataattttcttttttcatacctcaaaacactttaaaagacagtttctaacttaatattaaaaac

SEQ ID NO: 400119 - DNA, 180 bp, Homo sapiens
atgattcctaagctctaatgggaaatgcctcctggtgggtggtatctaaaattcttgtcagcacctaggacagagatattcatagcactccagggatttcagagaggatggaaccttagcatggatagaagcatggatgctgttgaatgcatgtttggattaaaatcctcttttcattta

SEQ ID NO: 400120 - DNA, 440 bp, Homo sapiens
ttccttgggtatggtgcctggtgggtgtgcatgggtgtgccagaccacggcttaatgagtgccgcctctgttcagagaggcatgtgtgcattttgtctatgcgattagcccactgtgtggccttgggtaagaccccatgtctctctagcctcagtttccctaattataaagagttaacaaaagtatttccaagattctctttcatgctaacatgctgtgattctaagtttatttgtcattaaaatgagtctcagctgggcatttatttgtcattaaaatgactcattaaaatgagtctcagctgggcatagtggctcatgcctgtaatcccagcactttgggaggctgaggctgaaggattgatcgagcccaggagttggagaacagcctgggcaacatagtgagaccctgtcactaccaaaagaaaaaaaaagaaagca

SEQ ID NO: 400121 - DNA, 403 bp, Homo sapiens
ccccacactggtaccccgtcctcctgtgccagtctgacttcaccaaaggcccctgtgaaggcagttgagccaccatctgtctgtctttctttatgtgcccctcaggggctcccacctgcacaagtcatcaaggtgtcctcccagccatgagcttctctctgagccaggttctggcaaacccagatctctgtcccaggatggttccagctctgcctgagcctcctgtgtaggcagagccccaagtggctgcctgggggtttgactctcctccgccctcccagcacagcccattgtatggatgtggagaggcaaagtgatggagggagagctggcaggtggctcaggtgagggaagtcatgggggtagggctgggagcaaactggagaaggtgctacaaggaggg

SEQ ID NO: 400122 - DNA, 669 bp, Homo sapiens
cctcctgggtagttgggattgcaggcatgcaccaccacaaccagctaatttctaattttttgtgtggagatagggtctccctatcttgcccaggctgatttcaaacatttgagctcaagcgatctacctgccttggcctcccaaagtgttgggattacatccatgagccagtctgcatggccctttgatctgttccgagcagcagacacaaatttatgcgaccaatcatttattttactctttaaggtaaattcttaaaattctttaaattctttggtgctgattaaggtgagcacaaatctagtgaagtcatattaggatagccatgccatttgtgcagggaggtaaccactgtactgtgcagccttatgatgctggggcagtataaggaatccaaagattttctcttcctaacgagatgtttctttttttttttttttgagatggagtctcgctgtgttgcccaggctagagtgcagtggtgcaatctctgctcactgcaacctgcatctgctgggttcaagcaattctcgggactcagactcccgagtagctgggattataggcgcatgccaccactcccggctaatttttgtatttttagtagagacagggtttcacaatgttggcctggctggtctcgaactcctgacctcaagagatccaccc

SEQ ID NO: 400123 - DNA, 468 bp, Homo sapiens
caagacaactctatttgtaaatgtatgaaagcatttcatcaatgcagccaacattttctgagcagctgcatgtgataaaatggtgaggacagaagaatctagtagaggaagcagcttcaatacagtgccataataaaaacactgtacatggggcataatagaaacactgtacatataaagggcagtttattctgctgcagtgtgggagagcagggagagtggtttcaggtgagttgaatacaggggtggagagccagctacataggaagtaaaatttgaattagtaggcactgtttaatatcttcgatgtgttggggtgtttgtaaaaggaatgtaataagaaatactcaagaaaagtgtgagccactgcacctgacctactttttctttacatgtatttttactgctgagccaagaagaaaaaaaaaagaaaagaaaatccttaaagtgcattttcttctttaaaca

SEQ ID NO: 400124 - DNA, 236 bp, Homo sapiens
tcgccatgttggccaggctggtcttaaactcctggactcaagtgatctgcctgtctcagcttcccaaagtactgggattacaggtgtgtgccactgcacccggcctaaatttccatttttaaaaatgagtatgttgtttgtgtcttttgaggaagcatatcaaagaagtttggccacgtgcacagccgtatcttttttccatgactcaaaagaagatactcagaaggagatggaag

SEQ ID NO: 400125 - DNA, 416 bp, Homo sapiens
tggttccgccgcttttatagcttctcattctggctcctactgcttccttgaagatacttccctgcttgtagtcccctagccagaagttgatgcactgagaagaaaaggccctctgatcacagatcagagcttgtgaattattattattttttttatctctggtaacaagctgatagggtgagtgagaaggatcaaagagacatactttgatttatcactgagtaataatcctttcccaagaaagacaagttaattactttttgtcttagacccagttagggtcaccttacagtgcaggtggaaagaaagcaggactgctgagaggagctcaggacccattttccaggactattgccttctcaaaactttggagagcagtgaaaatagattcccaagtgaaagaggtggcagaaata

SEQ ID NO: 400126 - DNA, 336 bp, Homo sapiens
gaatcttatgggttcatgatggaaaagatgacaagcattaaggccaaaaataaatctgagtttgttcactggatgcaggaaaagttttcctaaccaaataatgtgggtaacatttcattattagcatggaaatatgtccactttcatgtttagagaaggaaatagtaaatgaatgatcaaacataaaagcaaaatacagcattcacagtaggtatccaatgtaacatgctatttagataaaaacagtcccttcaaagtccagtatgtttttaaaagcctgatatttacagttgtatgatttctagggaaattgagaaattaaatatatatccagca

SEQ ID NO: 400127 - DNA, 454 bp, Homo sapiens
aaactgctgctcttctccatctacactcactgcaatctcatggctttaagtgctgtctacacgctgagtattaaatcctaaatgtgtatctttagctgacaacctctcccttgaactctgcactcacataaccaacaatctaaacctctccctcccatatgctaccccatctcagtaaatggcaacttcattcttctagttgctcaagtcaaaaagccttgtaaggccgggtgtggtggcccacgcctgtaatcccaacattttgggaggccgaggcaggcagatcacttgaggccagaagttcaagaccagactggacaacacggcaaaaccgcatctctactaaaaatacaaaaattagccaggtgtcgtgaccctgggaggcggagcttgcagtgaaccgagatggtgccactgcactccagcctgggcgagagagcgagactctgcctaa

SEQ ID NO: 400128 - DNA, 586 bp, Homo sapiens
ccatttttcctgagtctttttaaaaaatagtttttattaaatattgagaggtataaaatatttaaaatatgtaaattttaaagaataaaaatacaatacaaatctttgtatctttcacccaagttttagaagaacctttgcgatccccactgagtaaaggtaacaccactgctctgaattttatcatttcctattcgtcagagttgtatcacatatttgaatctgtaaaaatacattgtttggtttctcatgcttttcagcacgcagacatgtctgtttttttgcgcttcactttactgtgctctgtagagactatatttttcacaaattgaaggtctgtggcaaccctgcatcgagcaagtctgtcagcgccgtttatccacagcatgtgctcactttgtgtgtgtgtgtcacgttttggtagttctcataacatctcatattttttcgttattatatgttatggtggtctgtgatcagtgatctttgatgttactactgtaattgttttggggcatcaagaactacacccgtatgaggcagcagatttaatgtataaatgtgtgtgtgctgactgcaaaaaaaa

SEQ ID NO: 400129 - DNA, 452 bp, Homo sapiens
gggcacagtccttttttagtgttgatatcggctaccataaaggacaaagttactactaatgtaagttggccaaattaagacaaagaaaaactgaggagaacatgttcattttcctatttttttttcagttttgctcaagtctgcttcagttaagccagagactcaacttcctttgcaaaagaaaaggacttttcctgcagtttattacagcctgtcagaggtattaggcaactaagaaactcattttgaaatctagcagcaatatttaatcagacattttgaaacttacttatttgtgagcatgggctgattagtcattagtccatcgagatgtcttatttaaggggaaagagtgggcgattttaggtgagatggtcctgaagtaagaaccagatgcctgttaaagttcatcaatagaaacccccacggtttatgggccccttgcgatatag

SEQ ID NO: 400130 - DNA, 296 bp, Homo sapiens
taatacaaaatttcatttgtgataggactaataaagaaattcagctagtagtgggatctgtcgtggactgagtttgattccaagaacagaagaggcaggaccagtgagaaatagcacagacatatttgcaaaagcagccctcccacgttaggaagaagggatacttttgcacagtgaacagcactacaactgctcatctctttcatgtactatcacacatggaatgactgagatactcctgtgttccacacatagtcctccctgcccctactgaatagagaaacccaatttcacct

SEQ ID NO: 400131 - DNA, 860 bp, Homo sapiens
gcacgagattcctttcatgctgattcgtgtcattgggaatctctcttcttcagcttcaagagagccgaatctgactcaggtgttgagattggggaatggcatttccatttcttcctctctccagtatagccagagcaggaagggcaagagaaaaggggtcctggtacctggtgatgtcaaagtaggcagctcctactgctgtgctagcaagagccatgtggactagtgtgagaacaggaactctcccaagtcccctactgggtaaccagatacccaacagtgtgcctagagatgctttagtccactccaatcctaaatactactacattgtgctaatagtttccctgaaaaacagccatatttcactcatttttttaaaaatcaattacaatttttagccttaaggtttgatattggtattgtgtttattttttcaaagaatctttatcttgtagagttatacactgcaatagttacagatgaaaagatagtgtggtctgggatttgtctcaaaaccagtaggaggtaggagtggtgggctacaggtatatagatgaaacaagattgccttgtttatactattctatctactttgtacctgttttctatgttataaaatgttcatagtaagtggtttaaacttcaaaaatcatttctgaaaataagtggatacccttatttactcagctgtgctataaatttcatattaaccccccaaaactagaccagtctgagtgtttctaataaaatccagcagtaaccgtgactgattttaaaacattcactgcttctcttatctacaatgcctagcttcattagtcatgtagaaaatgcttacattccccaagcttttaaaaatt

SEQ ID NO: 400132 - DNA, 377 bp, Homo sapiens
tcggtacccgacgctctctctgtggggcgggcccgtacggaggtaggagtggtgggctacaggtatatagatgaaacaagattgccttgtttatactattctatctactttgtacctgttttctatgttataaaatgttcatagtaagtggtttaaacttcaaaaatcatttctgaaaataagtggatacccttatttactcagctgtgctataaatttcatattaaccccccaaaactagaccagtctgagtgtttctaataaaatccagcagtaaccgtgactgattttaaaacattcactgcttctcttatctacaatgcctagcttcattagtcatgtagaaaatgcttacattccccaagcttttaaaaatt

SEQ ID NO: 400133 - DNA, 1193 bp, Homo sapiens
tttctccattgtgaattccctgatgttgaacaagtttgtatttgtacctgaaagctttcctggttcactgcacttgtaatgactttttctgctgtgaaaggcctccccacatttggtgctgatgtgtggcttcaatccagttgtgagtggcctatgttggagaaggtacagttgccaggaaaatccttcccaactttcccacaggcgaaaggccttcctgacacttaaaatctgcagcctttcacagagaaagcattgtccacgtctctattccattgtgttccttctggtgctggtgcatgtttgcactaaaccagaattgtttcccacatgcctcacaagtgtactatttctgcccagatagcgttccttgttgctcagccagatacaaaatgtcccttaagaccagaacacacatctcacagggatgagccttctggatgaatggacctagctgtgacactttctactgaaacacttcactgagggtgtctgctttccctttgctccacaccaacaacctggcgaggttatataggcaaagttctctgcatcacggggcacagctctcaggctcatcaaggaaactccattcctctcagaagtcattaaaggtcggctatgttcataaagatcatactgagatggcttctctttctgtaggtggagcgagctgggacttgcaggtgaccaagaagggggatcccggaaccggaattgtctcccctggcgttccggaagtagaagcagagtcattgctgggtggcgccagccctcagacttgcctctttgcagtaggaagaaggcctccccacataccttcccacactcatcaccttaagccagactcggtgtccagtgaatatgaccatctcttgcccattttctaatgagtgttttcattaatgagttataagaatgtggtgggtaaatctatgggctttgaactagtgaatcaacttggtttcagaatctggcactgctacttactagtgaatttaagcaagttatttcacctttcagagtgtcagttccctcatgcatacaaggaagataaaaaataatgtatacaaaagtattggagtaattaatacatggagaactacatgtaaagcgtttagcatgatgtctgacatattaagcatccaatattagttgcttgcagaattattagtaaaagagattgcttctga

SEQ ID NO: 400134 - DNA, 446 bp, Homo sapiens
gatacttttagaaggagtaataattattaatcccaacaaatgacattcttcagtgtctaagcattttcttttgtgattaaagagctgccgtgaacaaacctggaggagaacgtgatgggtaccagagaccagaaatttacacatggctatgttttcaaaggacaggtcaagatgttccagctacttgggaagctgagacaggatatctgcttgagcccaggagttcgtggctgcagagagctgtgatcacaccaccgcactccagccagggcaacagagtgagaccctgactccaaaagcaaaaacaaaagagcaaaaacgagattccaatgtatactcccaccaattaatttgaaggtgaccatatccctcctatcaaatactgtcactcatttacatctttgccaaatgtgggtaagaaaagaaataaatagtttttttattta

SEQ ID NO: 400135 - DNA, 1025 bp, Homo sapiens
gatacttttagaaggagtaataattattaatcccaacaaatgacattcttcagtgtctaagcattttcttttgtgattaaagagctgccgtgaacaaacctggaggagaacgtgatgggtaccagagaccagaaatttacacatggctatgttttcaaaggacaggtcaagatgttccagctacttgggaagctgagacaggatatctgcttgagcccaggagttcgtggctgcagagagctgtgatcacaccaccgcactccagccagggcaacagagtgagaccctgactccaaaagcaaaaacaaaagagcaaaaacgagattccaatgtatactcccaccaattaatttgaaggtgaccatatccctcctatcaaatactgtcactcatttacatctttgccaaatgtgggaaaacataaagtttcgcaaccctatattgactccaccatgccttgggaaaggcagcccgcatcagtggcaggaaatattggtggagcgagctgggacttgcaggtgaccaagaagggggatcccggaaccggaattgtctcccctggcgttccggaagtagaagcagagtcattgctgggtggcgccagccctcagacttgcctctttgcagtaggaagaaggcctccccacataccttcccacactcatcaccttaagccagactcggtgtccagtgaatatgaccatctcttgcccattttctaatgagtgttttcattaatgagttataagaatgtggtgggtaaatctatgggctttgaactagtgaatcaacttggtttcagaatctggcactgctacttactagtgaatttaagcaagttatttcacctttcagagtgtcagttccctcatgcatacaaggaagataaaaaataatgtatacaaaagtattggagtaattaatacatggagaactacatgtaaagcgtttagcatgatgtctgacatattaagcatccaatattagttgcttgcagaattattagtaaaagagattgcttctga

SEQ ID NO: 400136 - DNA, 416 bp, Homo sapiens
gccagcttgtggattgatacattcaaatgaatgaattgaggttccaaatgtgtaatgtaaacaagtcagcagaaagtaggagctacttggagcagggtgctggtccgggagggctgtggctgagtagggagataaactttggatccaaacagatgggttggcaaaactaatctgtggtcaatcagttcacaaaataaacgctttgctacaggaccaaatccctgaaatcgaacataattcaattcactgaaatcaatttgcaagtttatcagttgggtgaattacctatgttctaaaatgtgtttcggttaacttaataaagtgcctagcaatttcaggtgcagggactggttttaacagcctctgaggatattcccaagtgtcttgaaagaataaaaacatcttgcgtactttga

SEQ ID NO: 400137 - DNA, 455 bp, Homo sapiens
agttcctccacatcttttcatggcttcatagctcatttcattttggcactgaataatattccattgtctggatgtatcacagtttatccattatctactgaaggacatcttggttgcttctaaattttgacatttataaataatgctgctatatattataaacatttgtgctatggcagctataaagctgccatgttatatttttataaatgctatagatatatataggtgattgtatgtacacactatatatagcacatctgtgtgtacatttgtgtgtggcataaaatgtcaacactccagaatgtttacatcaccccaaaagaaacctgtaacctattagcagtcacttactattcctctcaccttttcccccaacccctggcacctacttatctattttttgtctccatggatttgcatattctggatatttcatataaatgaattcacac

SEQ ID NO: 400138 - DNA, 226 bp, Homo sapiens
tagtgcataaatatgaatacacatggttcaaggaaaaataaaacttcatcatgttggaagtacacttggaaagctggttgttaaatatttgtaaatactgcaggatggcaggtcaaaaagataattaagaagaacctcagtagctggaagaacacacagaactttctagtcgtccttacctgaacaactatgggagaaataaactcctagactatttggatcaaag

SEQ ID NO: 400139 - DNA, 443 bp, Homo sapiens
cacatagaaatacagatagacccccattccatggaatccaatattcccagacattatcctcaatatgtgtcctccaaccacaacatattttttttataaggaagaatttgtaactgaagtgctgcccccatgcacacaatttcacctgtagtcctctaaagttgcttgaatattcttacagattccaggtgcctcagggatgaaatacagattgctgtccagggcaccagcgaatgctgcacccgttcttggcatatcatccttctcgtaaaaggcaatcatggcaggaaaactgagaccaatggctttttcattctccacctctcagctctccatagtaacggcactggttcttctcattgtgtattccttttcagatgcatactttctccctttaacaacttttttatatataatttaaaaaataaattattcccagaaag

SEQ ID NO: 400140 - DNA, 557 bp, Homo sapiens
cattattcagatatacacaccacagaggatgtcagtgatgaattgggcaatctggatgatataagacaaatgagtggtctgagtgtgcaccctcctgcaggaggcaaatccacgaaaaacagcattggaatcttcagaatatttactgggtcaagaaagaatacaaaagagacatactatcagaaacattggtgcaaattgttttaaaagtcaaatcagtctactaaactaaccaccaagctagttattcatacattcaaagagtatgaatataatctaaaaacattactgaaaagatttatcacatcgctttataactgaaagtaaaagcctggttattaaattcaaagttgactttggagacaaatgcaaatcattatattggtcatatatgtaaatatttctccctactttttttcttatgaaatcaattattaaaatatttgacttattttctgttcctagatttaactgtaaagatcgactgctcaaagttccaaacaccctgaagattatactaacaataaaagcataagtttcctaacacaagttattca

SEQ ID NO: 400141 - DNA, 444 bp, Homo sapiens
acatcacagagggaaatcgcccatctggcaatcccattcgctccaacagctccgggggaaaaaaagctgtgctctctcctccttaaaacatttctcagggcaaattatgtgcatctaaaataaacagtcttcttattgatcgcttcaaagtcaacaagttccaaatgcaaaattcaatcaaatctttcctatcgtgtaagtgtggtgtgtatttagctcaatagtcaccagagtccaaccagacgtgtatgtcgcgcaacgggtcttgtagttcctctcttcgtattcacatttgtgttaggagagagcagtgaccacggccacactacagacccctggcagctttgccccactgttatttcttttttcatattctctctttccttctttctctcttttcaggaggaattaacggtcatggggtaaacatagcaacaaccaaaa

SEQ ID NO: 400142 - DNA, 484 bp, Homo sapiens
aattcaaactttcagttgaacccattgaaagcctacattttaggagtaagggtgagtaagaaacatgagtcctcagtgactgaaacccagtctccaagtatttcaatctttgatctatctttactctgattgcctaccaaaagtaaaagtaaatactctgtggaggaagatattatccagagtcttaaaattatctaaagtttgtatacacgatatgtggcatgcagtaaaaaattaccaggcatatcagcaagcacaaccaaatcattgaaaaccaagagaaaaattcaacagcaaaaacaaaatcaaaaaagggaaaataaaaaccaggcagtcagtagaaacagacccgcaggagttcgcagtatgaaatttttatgaatggactttaatcgtgtgatttgttcaagaaagtagacatatgaaggatttcagcaaacaactggaatctatacaaaactgtcaaatagaatttccaggagca

SEQ ID NO: 400143 - DNA, 1138 bp, Homo sapiens
gatcactgcgatggtcttctagcagcctcctccccatactcaagtccctgccccgcaatcagttttgcagatgcagccggagtgtaagcaccccaaactacctcctgcagtttctgtttcctcttcccccaccatctcctacctaggcagaggagctcagtaattcctccactgcttatggactaaagttcaagttccttattatgctgggctcttcctaaagaattcaatgcagtgggtaacagcttggcattggagttgcagagtcctgtgttcaaatggctctgcccccaagagctgtgacttcaggtaactacatctttgagcctcatttccccatctataagtaagagctgcctcgtcgtaagagttgccaagaggattaaacgacacaagtccacactcccttctctgaaacccctggagccagatgtgctttggaatccaagacattttgggttttagaaaggtaatactgtgcagataacattcccgaggggttttgtacaataccctgtaatcaaatacatgaatactctactacatgtatgagtaatgtgagtagtacaggtgtccctcagtatccatgggagtttggttccaggatcccaggggatgccaaaatcctcagatgatcaagtcccttatataaaagtggtacattggtaagaattaaagatcatagcctcatgccacttcaagtcaagttgtgtgacaaacaggttcctaaaaagcttttggttgtcagagcttggtagatttcagggtcatgggtaaggactgtgggtgtggatttacccatgctcatcccaatgcccaacagacagcatcctccgcgtggccagatgagtggctcttgtggaaactcagggcagagcttctcttgccacctcggctttactgcaagaatgttctggcactgcagtgccatatatacctccctcttaagaactgggacttttcttggtgccatagagctcagagaaaaccagaaatgagagactgtcaaaactggcctggccctgtagaagtgtttttttggatggactcaataataagcatatgttaaaaatgtaaacttacaaggcaggtttctatgaataaactaccaattttagtgttttatccacagaagatt

SEQ ID NO: 400144 - DNA, 347 bp, Homo sapiens
gcaatctgtagcttgagcagcttcccaggtggttctcctacacagccaactttgaaaaccactgctggcctggagcggtggctcatgcctgtaatcccagcactttgggaggccgaggcgggcggatcacgaggtcaggcgatcgagaccatcgtggctaacatggtgaaaccccgtctctgctaaaaatacaaaaagttagccgggcgtggtggtgggcgcctgtagtcccagttacttgggaggctgaggcaggagaatggcatgaacccaggaggaagagcttgcagtgagccgatatcgcgccactgcactccagcctgggcgacagagcgagactccgtctc

SEQ ID NO: 400145 - DNA, 440 bp, Homo sapiens
tgatcagaatggtcagagccagacaaccccacagaagtgcagcacgttgatttctgactatttatacaaccccataggacactccccattcactgaggctggctggtgggagacaactcttaagtgtaagagaaagatgcacgttggctagcagggagcacttcatcatcatgatggaaggaagaccactcattaacttgttggacttgtggaccacttcttgcctcatgttgaccaaaaccatgtgaataggtttttagctgtagctgctccttagccctcagagttctgggaatagtagagaccctggaactagtgttgaaggaagtgccctgctttccatcccctatgcactcagaccatgagagcagctcttccatgatataaaaatgtgaagacgttacatatgtactccattaaattgaatcagtgtcctctta

SEQ ID NO: 400146 - DNA, 943 bp, Homo sapiens
tgaaattttttccgtggcttactttaaaaaacacacctctttttatttgaaataactgtaggttcacaggaagttacaaagacggcctatgtacctttatccagttgctccatcataaaattcccctgtcagaaccaggaatccacattggtacagtgtgtgtggtccagggtcattctgtcacacaggtggactcccacaaccctcactgcaatgatacagaactgtttcctcacccggagggcccttgtgctgcctctttctagtcacacctcctgctttcctctactcttccccagtccctgaaaccacgactctatgattttgtttccatctctgattttgttatttcaagaatgtcatataaatggaatcacacggtatgtgaccttttgagatgggcttttttcatttggcatgatgccttggcttatgcttctctattaagtctcttacactgatcgtccccagataaaagtggattgcattctgatagctcctcaatgatctctgaatgccagtattttatgattcactacatattctatattctgtacgcctttcttaattcaacatagactcttgctaagaatggctttgtgtacccaaacaggatagaaggctttttattacactgctcattcagctctcagtgaccttgcaagaaaggctggaagcccattttatagagggagaaatataaaaagtaatttgctcagaccccatagctgttaagtagtagagtggaaatgagacctctggtctgcatagctccaagccttctgctcttttcatgacagcagggctgcaggaacacagtggtacaggtgtatgccagtgactttttcatgcactcgagcgtttattaagtaccacttgtatcaacatcagagttggtataccagtatacttaaatatagaaggtaaagaaatggagagagtc

SEQ ID NO: 400147 - DNA, 344 bp, Homo sapiens
tttagtggcattaagcatattaagaaatacattgttaatatggaactgatggcacgggtatcaatttgagtcagatagatctggatttgaaccacagatgttacaatcatcagaaaatataaggctattagccctatgaaataatttaaataacatgaatatgaaacatagggtggatggtaaatttgccttttcctgtttagtaatataaagtgagttacactatattatttttcctttaaaaagcatattttaggcagggtgtggtggctcacatctgttaagtccagcattttgggaggctgaggtgggtggatcacttgagcctgggagttcgagaccag

SEQ ID NO: 400148 - DNA, 338 bp, Homo sapiens
atgggggtagggtggggaggacaattgctttgcttacatttaagagagatgtccaggggaggcaagagttggacctcagcctgctggggtttgaccagtatagtcagcatgctcacatggtagactctcataccagcaccaatgttcaatgtcagttcaagtgtgaaccccttttgaggacctcttaaacactgtatgatacatgaatcaaaattcagctattaaaattgtgaatagagatatacaattgcatatgttaattgatcattgtcatttgtgtacagtttgtcttaactattttaaacttgcctaaaaacaagaatctctagaaataaaaa

SEQ ID NO: 400149 - DNA, 450 bp, Homo sapiens
ccagctttgctgtgggagtgtgtgttctggtggctgagtctccccatcttatgctctggagattcagagttttccatctggttcacagtgtaggctgctgccaccacttcttttaaaggatctgtggtttttttcagttcttctgttaaattcttgtgttgcttcttgtgaaaaaaagttcacagtgtgaatctctacacatactttgtttttccaagtaggagaggtatgctaacactgtctccagtccaccatcatgtcttggtatcctccctacagtactcccagtatctgcaggtcacagagccacagaggctgtggcagagccacctggatcctctaggattggaggaaacagagcaatggagataggacctggagttgggagggcagatgctcagaaattattattaactgttatcactctgttacttatttttgaggttgttc

SEQ ID NO: 400150 - DNA, 340 bp, Homo sapiens
tcttatttcatagtcatgcattgcaggaatgtgcgtactgcataaagtgacttgctttatcaggtttgaaattcataatacagtcagaagatgattaacagatttgttcaaatttttatgctacgatatgttcttgtccccatgtgaataaatgcaacagattgtttgtaaccattttaattgctctgattttacatggacaatagttttgtataagaaaagacaaaaaaggccaggcccggtggctcacaactgtaatcctagcactttgggaggccgaggtgggtggatcacttggggttaggagtttaaaaccagcctggctaacatggtaaaatcc

SEQ ID NO: 400151 - DNA, 623 bp, Homo sapiens
ttcagatgatccgcccgcctcggcctcccaaagtgctgggattacagacgtgagccactgcccccggcctcaaatttcatttccacaataatgctaaatatttatcattattttttaaagttgaactttatttgaattattgaagtttgtagaatggtcagttcctcagtaaactgagtaaaatatttaaaactcatccccaaaacggttggcaggccaattttagtacttagctttccaaaacatacccttcttcaaaggtcactttatagttaaccactgtaaagtaaataagcattgaaattgatgttaatgattgttttcaacctctccaaaagaaatccattgtcaaacaggaagaagggattaccaataccttctgtctctaacttaattcttttatgattttgctggttgtaattcatttagataggatcttaaaaagcaatatcgggcagatgggattacttaatgacagctgaggggtattttttttttaattatctggtgataaaggtgaggctgttgttttcacactgaatggccagttaacaacttatctcttcctttttcaaataaacagactgataaaagacagcaacctaacaaaaagtgagaaaaag

SEQ ID NO: 400152 - DNA, 396 bp, Homo sapiens
tgaacgtggtctggtatacaacaggtgatccatatttcttgaatataaggatggatgaatgaatgaatgaatgggtgaaacctggggaagaggaatcaagaactttgttaaaatgagtactagttggccgggcatggtggctcacatctgtaatcctagcactttgggaagccgaggtgggcagatcaaggtcaggagttcaagacaagcctgaccaacatggaggaacaccgtctctactaaaaatacaaaattagctgggcgtggtggcacacacctgtaatcccagctacttgggaggctgagggatgagaatggcttgaacctgggaggtggaggttgcgatgagccgagattgtgccattgcactccagcctgggcaacaggggagaaact

SEQ ID NO: 400153 - DNA, 492 bp, Homo sapiens
taatcccaacactttgggaggccgaggcaggtgcaccacaaggtcaggagttcgagaccagcctggccaagatggtgaaaacctgtctctactaaaagtacaaaaaaattagccaggcatggtggctactgtaatcccagctactcaggaggctgaggcagaagaattgcttgaatccaggaggcaggggttgcagtgagccgagatcgcaccactgcactctagcctgggtgacagagaaaaactccatctcaaaaaaaaaaaaaaaaaaaaagatttaatcttcatcatgcctaattatcattcttttatttttaaaaattgtaacaatagttacacaagtaatccatgaatacaattatcttttttgaaaaaaatcagaaaaatagaaacaatttcacaaatttttattattctttcttagaaaccctactaatctctgtatacaccaccaccatcagctaccttttattttaactttttattcttact

SEQ ID NO: 400154 - DNA, 380 bp, Homo sapiens
tcagtccctaaaaccacacctggcacatggtaggtagctggtactatttgttgaattactaagtgaatgccattgttatgcttaaaatctttggatggaggctgggtgcagtggctcatgcctgtaatcccagcactttgggaggccaaggtgggcggatcacgaggtcaggagttcaagaccggcctggccaatatggtgaaatcccatttctactaaaaatacaaaaaatagctgggcgtggtggtggactgctgtcatcccagctatttgggaggctgaggcaggagaattgtttgaacccgggaggcagagcttgcagtgagccgagatcacaccactgcactccagcctgggcaacagagccagactccatctta

SEQ ID NO: 400155 - DNA, 451 bp, Homo sapiens
cagaatgcaccgccgcatttggcgaatgaatgaacgaccgaaccagtaatcactcctaagaccaagaaggccacatccttccccgtggggcctccttttccgaggccaaaccttcagcccaggcccgagctccggcctctaccgcctaagtcgactctcggccggcgcgttccgctctagaaggctctggcacaggcgggcggtgccgggcgccagcttctgcgggcgtgggccggccagggcgcgtgggcctggggactcggggccacggtcgtcacgtgagctcatccccgaggcggcagcgtggccggcacccgcccgctggcctggtccggcgagcgtgggcggcgaacgggtccccgccggatgcacgctggtgggatccagggccagagggcgccgccggggaaggtcacctagacgcgcggcccgccgggcctccacgcggccg

SEQ ID NO: 400156 - DNA, 669 bp, Homo sapiens
gttcttataaaatgactttcttccctgttgctttagtaactgagaattgaaaggcactttcccaatgggccattactgcagaatcagtggccccagacgacaactctccctgtggcggggttcttagagcagatggtataggcaacatgggggatattacagagatgatgttagaagcaattattgcaccattgggtgtcggtattctgtgcttcctgacgcatgggaacctatattgtacagcacttcagaactgtaaaagcttatgcagctaaaccagtgagacattggtaagaagtctgagcttcattcttgattatttgacaaaggtgaattattttctgatcattttgaaatttgccaagatctctgattaggattttttaaaacagaaagaattctggattattttttccatctggctatgaatccagtggtatttgccttaagttttctaccatctccaattaccggccaaaaaaaaaagaaagtctattgttttagagatgtcttcgaaaactggtaataatattgtatgcaaatcagttcaaaaagatataatagtttcctattgctactgtaacacattgccacaaattgagtggtgtttttattcttttatgagatggtcagtctgatgtggccacagaagaaacagggagactcagg

SEQ ID NO: 400157 - DNA, 419 bp, Homo sapiens
ggagaccaggcaagtcgccatagagtgggtggcattgcacaaaagtctaaaggaaggaaggaggcttggggctgtgtatcagaagagcgtttcaggcaaggagaacagaaaagacaaaggcccaggagaggccagcgtgcctggacactagtgaagactggggctttcagccagaggtgaggttgcagggtgagggcacatttaactgccgacttccaggtcaaacctaaagaatacccaaacttgtcttaattttaaaacgagagatgtgggctgggcacagtggctcacacctgtcatcctagcacatgggaggccaaggcaggcagatcacttgaagtcaagagttcgagaccagcctggccaacatggcaaaaccccgtctctactaaaaatacaaaaattagccaggtgtggtg

SEQ ID NO: 400158 - DNA, 114 bp, Homo sapiens
tgtaaagacagggtctcactatatttcccaggctaactgaatgctcctgtcatgaaagggtgtcagactttgtcaaatgctatttttctatcgagatgaacatgtagtttttat

SEQ ID NO: 400159 - DNA, 439 bp, Homo sapiens
acagaccctgtcctcacctgcatcacaccaatgatggcgtcacagcgtgggttccggtcaccagtcggcctcccccaccaacgtggactccttacaagcagagccaccaacgtggacacgatcccatcaggaaccacctacttttgcatccccagcactgtgctcaggtcccagggaggccccagcaaactgtggaacaaccaaactcgtgactgaatgaacaagtatgttaagtcgttaagtaaaaatagcagaagacttagtagaatgtatgagtaacaattacaattatatgaaaatccgtatccacgtgaaggtattatgcaaaaaaagcttaactttgtttcagtgcctttccagttaaatgttgttaagcagtatttcccccaaaaggtgcatcttttataaaacaagaacgcaaggctttgaggcaaaaaaa

SEQ ID NO: 400160 - DNA, 459 bp, Homo sapiens
gtagatacagagttttgccatgttggccaggctggtctcaaactcccgacctcaggttatctgctcgccttggcctcccaaagtgctgagattacaggtgtgcaccactgcacctggccagaaataaattttcttctacaaaacagatttattattttttaaagacacaggggaaaagatgatctttaactgtttttccaaaggtatcttttggtgcgtgtgcgtgcgtgcatgcgtgtgtgcgtgtgtgcgtgtggtgtgtgtgtgtgtgtgtgtgtgtgtgtgtgtgtgtggtttaaaccttggctatattgtgagggtgctgttggatactcagttagcccagggatgctagggcaatcatgattcagaaggaaaaaggaagcaaggtgtttgggttttgactgtcattaatacttagtccagagctttcacagtgaagcccctggctgacatgac

SEQ ID NO: 400161 - DNA, 283 bp, Homo sapiens
ccgtctcaaacaaaacaaaaccaagtagcagatatgcatgatgaacaagcctagagatctaatgtacaacataaggaccacagtataggtaataaattctactttatttgggattcctccttcactgtagtaatctttttttaactatgtatgtatctcataacatgttgtataccttaaatatattcaacgaagcttattttaaaaaatgaaatgtataatgatgactggaaagggtggtagtcacatggaaataatgaagcagaataaaagttccagatat

SEQ ID NO: 400162 - DNA, 320 bp, Homo sapiens
tgtgtatgagcatgggttgtgtgtatatggacactgttcatgtctgtttctataacaggtaaccaaagtctgtatatggtagggtggtgtatatgcaggcttgtgaatgtactccagttgcatgtcccaggctctgcatgtgtagggggtagtagtatgttttcttgagattttattttattttattatttatttatttatttttgagatggagtcttgctctgtcacgcaggctggagtgcagtagcggtgagctgagatggtgccactgcactccatccagcctggtgacagagcgaggctccctctaaaagaaaaac

SEQ ID NO: 400163 - DNA, 590 bp, Homo sapiens
tttttttttgtgagatggagtctcactctgtcacccagtctcaggctgggatgcagtagcacaatcttggctcactgcaaccgccgcctcccaggttcaagtgattctcctgcctcagcctcctgagtagctgggactacaggcccgtaccaccacgcccagctaatgtttgtggttttagtagagatggggtttcccaatgttggcaaggctggtctcagactcctgacctcaagtaatctgcctgccttggcctcccaaagtgctgggattacaggcgtgagccactgcgcctagccaaaaatctcctttcttaatccccagtgccacctgtaatccaatcaacaaataattattgagcacctactatatgccagattctgtgctaggtcctctacacacattttctctaattcccacaacgaagctgtattggaggtataattatccttattttgggtaggtcacaaaattagtgggtaagccctggcatccaaacacaacattactggctattggccacatttcttgcctattagtgacttctgggtggaagtggcccttctccagaagtactccatccctacctt

SEQ ID NO: 400164 - DNA, 367 bp, Homo sapiens
agctgattacatggtaatagaaatttgtattacttaggatttatgacaattactttgcagcttaaaagataaactcaaggcatttgttctacaaattcaccacctattacagtttctcctgtttatgaagtttatatacatggaatcatatattcttttgtcttttgcttctctcagtcgactaacattgtaagagtcagcttcaagagtggctgggcttgtgcacaagtcattcacggtcctgttgatacgtttctggcttttactatacaaacgatgctcctgtgaatacttctgttgagtgtctcacgtaaggtctatagctaggagtctcactgttgtgtcacagggcacatcttcattagtt

SEQ ID NO: 400165 - DNA, 586 bp, Homo sapiens
ttacagatgtggaatgctgaggctgagaaaggttaaggagcctgcccagggtcatgtgctgaagaagtggaggagctggagctgggctggagctcatgtctgcggtctgttctgagccaagacgagcactcaaggtagggcatcgagctggagggggaggtactgcccgacgccacccactgccactgctgttccaggctgtgctcactctgcctccctgtccggcatgtctgtgccttccctggggctggaagcagggtatcttatgtgacaaaagccttctttccaaagccttagaaataacagtgtgtagccaagtgtggtggctcacaatccagtgctttgagaggccacggttggaggattgcatgaggccaggagtttgagaccagcctaggcaacataatgagacctttttaaaaaattaaaaattaattagctgggtgtagtggcacacacttgtagtcccaactactcaggggcctgagacaggaggatcacttgagcccaggaggtcaagagtgcagtgagctatgatcatgccattgcattccagcctgggtgacaaagtgagaccctttctcta

SEQ ID NO: 400166 - DNA, 384 bp, Homo sapiens
aaatctcttttcctcaccattgattccagtctgaactaatgatccagatgtgttgtgcatgtccttcctcttctacaaagtgactcgggaagcagtttttatgctatttgtagaaaggaagcattttctggagcggggccttctctgcttctgctacaccttaactccctagattagaggagagctgtgaggccgcaaggaggggggcctggagaggggcttgggctgagggtggtagaggtctctgaggactgtccttgtcttctgcctcctgtgtttatttggagaaaagcccatttaacaaatgtacaggtctttacctctatccctcttggggctgtctgccatgtatctttcattgtaccaactcagatggaccaagtg

SEQ ID NO: 400167 - DNA, 468 bp, Homo sapiens
caggctcaagcaatcctcccacctgagcctcccgagtagctgggactacaggctcaccaccacacctgactaattttttgttttgttttgtttttttgagatggagtcttgctctgttgctcaggctggagtgcagcggtgcaatctcagctcactgcaacctctgcctcccaggttcaagcgattctcctgtctcagcctcctgagtagctgggataacaggtgtgcatccaccatatccggctaatttttgtatttttagtagaggtggggttttaccatgttggccaggctgggcttgaactcctgacctcaaggtaatcccagtgctttgggaggccaatgtgggaggatcacttgtgcctagcctaggttacagagcaaaccctgttttgttactaatttttatgagatggggtctggttctgtcccccaggctagagtgcagtggggccatcacagcttact

SEQ ID NO: 400168 - DNA, 1016 bp, Homo sapiens
gtcacataagagacagagcaagtaaaatattacgctacagtgctactggcccataatcaggcaactgcagagtcttagggggttatctaatgtagtcttggggtggctggatagacttcccaaagaaggtgatgccgaagctgaggtcggaaattacgaagatcagctatcaaacttggaaatcatgtcttagagatcaaggagccaagagatgagacaagcctgggttcctaggtgatagggtgtggctgtgtccccacccaaatctcgtcttgaattgtagctcccataatccccacatgttgtggagggaccctgtggaaggaaggcctgaggagagaagacacatagtcatgctgactaaaccagatcacctagaattaccaaatggaaagattgtgcctgcagcctggcctgttgcccacagcggtctacctgccacactgggaaagatcgagcagagacagagaagaaaaggaggctccatttttcaggctgctctcccgcaggctcatgttttgtgttcatgccaggcagagaacacaaaatgttccaataaataagtatcaaaggttagtggtgaaaatgaaggaggaagaggcattgcgtgaaaaactaaacatgcaaaatattacacacaaagagaaccaaaatgcaggttcactggaaatgatagacaatatgttaaaacaagaggagagaagagagctgaaataatcaaatggaaacacacaatttagggctaagatcttgttgtgttcagccacaaatgatgggcagcagtgaggaatctgtgtgttctccacactcttcgctcctgggaagtcaactcacatggaccatgatatcaatatctggtccttcccctaatatctgtttgaccttgggtcagttacttaaacttcctaagccttagttctttgtctggaaacatagggatagttatacctacaacacaacactttgtaaggaatatgttggaaattatatgcaaattggcttccgttggtgtttgg

SEQ ID NO: 400169 - DNA, 862 bp, Homo sapiens
gtcacataagagacagagcaagtaaaatattacgctacagtgctactggcccataatcaggcaactgcagagtcttagggggttatctaatgtagtcttggggtggctggatagacttcccaaagaaggtgatgccgaagctgaggtcggaaattacgaagatcagctatgaaggcctgaggagagaagacacatagtcatgctgactaaaccagatcacctagaattaccaaatggaaagattgtgcctgcagcctggcctgttgcccacagcggtctacctgccacactgggaaagatcgagcagagacagagaagaaaaggaggctccatttttcaggctgctctcccgcaggctcatgttttgtgttcatgccaggcagagaacacaaaatgttccaataaataagtatcaaaggttagtggtgaaaatgaaggaggaagaggcattgcgtgaaaaactaaacatgcaaaatattacacacaaagagaaccaaaatgcaggttcactggaaatgatagacaatatgttaaaacaagaggagagaagagagctgaaataatcaaatggaaacacacaatttagggctaagatcttgttgtgttcagccacaaatgatgggcagcagtgaggaatctgtgtgttctccacactcttcgctcctgggaagtcaactcacatggaccatgatatcaatatctggtccttcccctaatatctgtttgaccttgggtcagttacttaaacttcctaagccttagttctttgtctggaaacatagggatagttatacctacaacacaacactttgtaaggaatatgttggaaattatatgcaaattggcttccgttggtgtttgg

SEQ ID NO: 400170 - DNA, 945 bp, Homo sapiens
gtcacataagagacagagcaagtaaaatattacgctacagtgctactggcccataatcaggcaactgcagagtcttagggggttatctaatgtagtcttggggtggctggatagacttcccaaagaaggtgatgccgaagctgaggtcggaaattacgaagatcagctatcaaacttggaaatcatgtcttagagatcaaggagccaagagatgagacaagcctgggttcctaggtgatagggtgtggctgtgtccccacccaaatctcgtcttgaattgtagctcccataatccccacatgttgtggagggaccctgtggaagattgtgcctgcagcctggcctgttgcccacagcggtctacctgccacactgggaaagatcgagcagagacagagaagaaaaggaggctccatttttcaggctgctctcccgcaggctcatgttttgtgttcatgccaggcagagaacacaaaatgttccaataaataagtatcaaaggttagtggtgaaaatgaaggaggaagaggcattgcgtgaaaaactaaacatgcaaaatattacacacaaagagaaccaaaatgcaggttcactggaaatgatagacaatatgttaaaacaagaggagagaagagagctgaaataatcaaatggaaacacacaatttagggctaagatcttgttgtgttcagccacaaatgatgggcagcagtgaggaatctgtgtgttctccacactcttcgctcctgggaagtcaactcacatggaccatgatatcaatatctggtccttcccctaatatctgtttgaccttgggtcagttacttaaacttcctaagccttagttctttgtctggaaacatagggatagttatacctacaacacaacactttgtaaggaatatgttggaaattatatgcaaattggcttccgttggtgtttgg

SEQ ID NO: 400171 - DNA, 474 bp, Homo sapiens
ctcgtgtgtgtatgcatgtgtgtcttcttgcacctgtctaccacagccagatggagccttctgtgaacagacttcttcagccacagaaaagtactggggatctctctggagtttgccctagcactggttcccatttttgaacacttttgaaatattagggtatttttgtcctgaaaaacacctgctacaattgcatacatgagtagttttgggccctttattgaagggtggatgcagaaagtgaatttgcttaattctggagcatagcattcaatgccatttttgttttctttggctttaggaaggcctgaggagagaagacacatagtcatgctgactaaaccagatcacctagaattaccaaatggaaagataagaaaaatcacccacaaatttgtaataatatttactcacttttcaaaggtttctccaactttttgagtcaggactaatcatctttaaattaatttcttt

SEQ ID NO: 400172 - DNA, 417 bp, Homo sapiens
aacacagggattgggaggagtggggtagcattaggccaggttcatggcccagtgctgctgtctctggactttctgctctctctggacctgtttgctagctgagctcatccatttgcataattttcagtgccatttctcagctgatgagtcctgaacttttgtcttgagtctagacttctccttcaaacagcagtcttaaacactcaacttctttcttgttttttccacttgtcaacccatgaacacctcaatcttgttacatcgcgaggggtggggtggtggggggggggggggtgggggggagggctggtaaggcccaggtggctattattattgttcgagtgtgggaggattacttgaggccaggagtttgaagccagcctggaaaacacagtgagactccctgtctaccaaaaa

SEQ ID NO: 400173 - DNA, 104 bp, Homo sapiens
agcaaaaaaacaacttgttaaatgtcagggctttgtgtttttgcctttgggcttttgccatgcctggttattgggcaccttctggtaataaacagttgaaagga

SEQ ID NO: 400174 - DNA, 647 bp, Homo sapiens
aaatttcagttttaaaaaatgtgttaaggcttcatttttggcctaacttgtggtctatataggagaatgctgtatgagctattgagaaggctgtgtatcctgatgttgttgaggagtgttctctataccttcattagaaataattgttttttactgccttctagtcctctgttcccttattaatattctgtcttgttttattattacagaaaatgaagtattgaaatatcctactataattatattgctctctgtgtgtattcaattttgtatttgctttatatatttgaaactctaatctgagacacacacatgcaaatacatacatgtataaacaaatttgtcatagattcccagtgaaagaatacatatattgtttaaagcccttctttgccttcttgaagttttgacttaaagtacattttataaaatatgacattttcttacttaagatgcagcttgtgtaatattattttgagctcttttgctctaatttggttaatatttacatgaaatttctacttccatcttgccactttcagtctttttttatcattagatctcaactgactcttgtaaaaaggcaagttgaatcttgatttttaaaattttttaataaacctttttatttaaagtatgtctcttga

SEQ ID NO: 400175 - DNA, 906 bp, Homo sapiens
  misc_feature (763)..(763): n is a, c, g, or t
  misc_feature (770)..(770): n is a, c, g, or t
  misc_feature (775)..(776): n is a, c, g, or t
  misc_feature (786)..(786): n is a, c, g, or t
cgcctttgcggccgtgattcggtcccgctgtcctaggcgggatggtgccgctgtgccaggttgaagtattgtattttgcaaaaagtgctgaaataacaggagttcgttcagagaccatttctgtgcctcaagaaataaaagcgttgcagctgtggaaggagatagaaactcgacatcctggattggctgatgttagaaatcagataatatttgctgttcgtcaagaatatgtcgagcttggagatcagctcctcgtgcttcagcctggagacgaaattgccgttatcccccccattagtggaggatagtgcttttgagccatctaggaaagatatggatgaagttgaagagaaatctaaagatgttataaactttactgccgagaaactttcagtagatgaagtctcacagttggtgatttctccgctctgtggtgcaatatccctatttgtagggactacaagaaataactttgaagggaaaaaagtcattagcttagaatatgaagcatatctacccatggcggaaaatgaagtcagaaagatttgtagtgacattaggcagaaatggccagtcaaacacatagcagtgttccatagacttggcttggttccagtgtcagaagcaagcataatcattgctgtgtcctcagccacagagctgcatctcttgaagctgtgagctatgccattgatactttaaaagccaaggtgcccatatggaaaaaggaatattgagagtctcatgggaaggacacaaaggntttgggntccannggaacacttntttgagcatgggactactggtaccatttctgcccttgggtttcccctcggaggtctggccctcttttggaaggggaaaacaacgggggggtagcacagggggcgagagacggccttccag

SEQ ID NO: 400176 - DNA, 1513 bp, Homo sapiens
  misc_feature (48)..(48): n is a, c, g, or t
  misc_feature (59)..(60): n is a, c, g, or t
  misc_feature (224)..(227): n is a, c, g, or t
  misc_feature (229)..(229): n is a, c, g, or t
  misc_feature (231)..(231): n is a, c, g, or t
  misc_feature (233)..(234): n is a, c, g, or t
  misc_feature (237)..(238): n is a, c, g, or t
  misc_feature (242)..(242): n is a, c, g, or t
ctctccgagaactcttgtcagctcacggcagcaaggacggactcgttntgaaggcgccnncaccttttatgaccacctctttcccagattattcgttttgatgaagctaaaattttaatctaaaaagaaatgcacctcatggagaattcttgtgaagaactgtgcttcatctgtggatttctacacccttgatcatttgcaaacctgtaattatttcgtaaagnnnngntngnncgnngtgncaggttgaagtattgtattttgcaaaaagtgctgaaataacaggagttcgttcagagaccatttctgtgcctcaagaaataaaagcgttgcagctgtggaaggagatagaaactcgacatcctggattggctgatgttagaaatcagataatatttgctgttcgtcaagaatatgtcgagcttggagatcagctcctcgtgcttcagcctggagacgaaattgccgttatcccccccattagtggaggatagtgcttttgagccatctaggaaagatatggatgaagttgaagagaaatctaaagatgttataaactttactgccgagaaactttcagtagatgaagtctcacagttggtgatttctccgctctgtggtgcaatatccctatttgtagggactacaagaaataactttgaagggaaaaaagtcattagcttagaatatgaagcatatctacccatggcggaaaatgaagtcagaaagatttgtagtgacattaggcagaaatggccagtcaaacacatagcagtgttccatagacttggcttggttccagtgtcagaagcaagcataatcattgctgtgtcctcagccacagagctgcatctcttgaagctgtgagctatgccattgatactttaaaagccaaggtgcccatatggaaaaaggaaatatacgaagagtcatcaacttggaaagggaaacaaagagtgcttttgggcatccaacagttaatcacttatgttttagagcatgcaatcttaactttgttaaactattattattgatcacattttgattttttctctccacatcaggatagttactgaagcacaatctcttatactagtgggccacaagggagaaaaaggaagcaagataaatgggtatgtaggatgaagggttatttaaaatggaactaaagatagaaggaggactgtaggaagaaatggaataatttaaatgtgaggaaagatatctgtggtagacatgtccttccatgactaatttctaattgtaactcaacacacattgaggtatgggccctcctcagtgactttaactagctcagaaacgtactcccccaccaaccccacctcaccgccccccatcccggttctgggagagcattgttattaaggatgcatgacaggaatgttggcagaactggaaagtattaaaaaagcattatcagacagtcttgatattatacattttcagaaatatattaaaaataataaactaaaacccatgatttcaaaagttt

SEQ ID NO: 400177 - DNA, 1327 bp, Homo sapiens
cgcctttgcggccgtgattcggtcccgctgtcctaggcgggatggtgccgctgtgccaggttgaagtattgtattttgcaaaaagtgctgaaataacaggagttcgttcagagaccatttctgtgcctcaagaaataaaagcgttgcagctgtggaaggagatagaaactcgacatcctggattggctgatgttagaaatcagataatatttgctgttcgtcaagaatatgtcgagcttggagatcagctcctcgtgcttcagcctggagacgaaattgccgttatcccccccattagtggaggatagtgcttttgagccatctaggaaagatatggatgaagttgaagagaaatctaaagatgttataaactttactgccgagaaactttcagtagatgaagtctcacagttggtgatttctccgctctgtggtgcaatatccctatttgtagggactacaagaaataactttgaagggaaaaaagtcattagcttagaatatgaagcatatctacccatggcggaaaatgaagtcagaaagatttgtagtgacattaggcagaaatggccagtcaaacacatagcagtgttccatagacttggcttggttccagtgtcagaagcaagcataatcattgctgtgtcctcagccacagagctgcatctcttgaagctgtgagctatgccattgatactttaaaagccaaggtgcccatatggaaaaaggaaatatacgaagagtcatcaacttggaaagggaaacaaagagtgcttttgggcatccaacagttaatcacttatgttttagagcatgcaatcttaactttgttaaactattattattgatcacattttgattttttctctccacatcaggatagttactgaagcacaatctcttatactagtgggccacaagggagaaaaaggaagcaagataaatgggtatgtaggatgaagggttatttaaaatggaactaaagatagaaggaggactgtaggaagaaatggaataatttaaatgtgaggaaagatatctgtggtagacatgtccttccatgactaatttctaattgtaactcaacacacattgaggtatgggccctcctcagtgactttaactagctcagaaacgtactcccccaccaaccccacctcaccgccccccatcccggttctgggagagcattgttattaaggatgcatgacaggaatgttggcagaactggaaagtattaaaaaagcattatcagacagtcttgatattatacattttcagaaatatattaaaaataataaactaaaacccatgatttcaaaagttt

SEQ ID NO: 400178 - DNA, 289 bp, Homo sapiens
ttttcttttattgatttagtcatctgcaggtatcagggcattaatacatgaccccagttctcctctgacctctgtgcacccaggtatcaggacaaatagtctgcacacttacacccactcaaggtggtttagttaagaagtgtgaccacccaagtcactgaacttgaggatgccccaaagatgtcaagtcatcctcttaggaagatctggcctcggccataatgggaaagagaacagggaaacacccaacattttggagctctgggggaagtcaaagctctgtgctggg

SEQ ID NO: 400179 - DNA, 357 bp, Homo sapiens
agaaagatgcccgtttggccaggctggtggcttgatgggtgtacctggagagggggtctggcttcctgcccaagatgcctcccagccctgccagggcccggtgcagcgggcagggcctcatctgtgctgtagtggtcgagtggttgctgcaaggagcgtagttctgccatgtctgggggccaggttccactctgcacatgaatatgcagtctgggaggccccactgctctcactgggaaggaccaatgttgcacctctgttaatgcctgacttcagctgctggtgttctgatggagccagaggcttggggaatctggaacttgcctgctaaataaggtcgtggtggactctcagcca

SEQ ID NO: 400180 - DNA, 612 bp, Homo sapiens
gcccggtcagcaggtgaccctgccgggtattgtgtttccttgtaatattttccccctgtttctgtggtaaccttccctggaggccccaggccttagggctacaggaaggtgcccccagacagccctttccttagaggcctgagtattaggaggagtccccagatctagccacctccctaacccttttggctccctaggatcaggggcctgggaatctaggcgagtggcctgagtgagcatggactcgcgggctgggggaaggccctttggcgtcttctggggggaagggagagggaaagaggggagctggacgcccggaagggccctgagcaacttgagtcgctggcctagcctcttgtttcctcccaacccatccccactgccctcctccagtctccctcctcctacaagggagaggtgggtagcatgctgcctggggcaaggggcaggggtgggggtggcagaggtgggagggatgttttcatcagcagagcatagctcctttggtcctggaccagttcccagaggcaaaataaattcaggacagcgtctgtttagtgtgggtctgcatttccgctcccccagaaccctgtgtattcttgatgtgggggg

SEQ ID NO: 400181 - DNA, 445 bp, Homo sapiens
cagtagatatagccaaagacctatccctccagggaaacatctaaaaagaaaaaatcaagaaaaattgtcaaaatcaactttgtcaaaaccccggaaaacagtcaaaggtttatatcaattgtctgaacattaaatcaagaaaaaagaaactcaaaaccaggaagaaagttttgcagctttttgacttgccttggccccaccctcctctccagctcagcataggtcttgaagacaacagcctgccctctcagtatgacacctcattttttgatcagattcttattctaaaaacaaagtgtgtctgttctaacttgtctggtggctacctgaaggactaatgcaagtcactttcccttgttcctcacctagtctgaactcactcagaactgaaaagcagctaacaaatgttcaagcagtaaggcaaacaaacaacccagagccacct

SEQ ID NO: 400182 - DNA, 166 bp, Homo sapiens
gcatctggatgatgtcaaaagtccacgttgtgtgctggcctaacctgaaagaccctatctagttctagcctttaaattccttctgtcaccaaatctagagttacatggcatctgtacaagctaggtagctgaggcatgggatcagccctataaaggagcttttgga

SEQ ID NO: 400183 - DNA, 432 bp, Homo sapiens
acagttttttgtttttgtatttttttttttgagacagagtctcactctgtcacccaggctggagtgcagtggcggtatctcagctcactcactgcaatctccactcccctgggttcaagcgattctcatgcctcagcctccccagtagctgggactacaggcatgtgccaccatgcccagctaatttttgtattcttagtagagacagggtttcaccatgttggccaggctggtctcaaactcctgacctcaagtgatccacctgcctcggcctcccaaagttctggaattacaggagtgagccactgcacctggcccaaaagacagtattttgttcctttttatggctgaatagtattccatggtgtaaaaatctattgtaataaaatttttaaaaaatcttggtttacctgtaatccatttgtaccatgc

SEQ ID NO: 400184 - DNA, 433 bp, Homo sapiens
gctactcacaaactccctcttatgcattctctgttctacttggacttggctatctctcccagagattataatctctgcttttaacaacttagcttctggctgacatttgaccaaccaggaatatgttcctctcaccacctgtccaattgtgctctttttacaacaaggcctagtagaatgagtgcatgagatccagtcaagccacaccatgcaacacttgccatccccagcacaaagagccattcatgagtcactacttcatatggatagctcatgtcaaaccctcttgccctatttagattgtaaattccacgatggtaaggaatctggatttgtcttctttgcaaccctaaaagacatgtggatagacagaacatattttcaaagactcatagaactctaagttggtttaaaataaaacagaactttaaag

SEQ ID NO: 400185 - DNA, 267 bp, Homo sapiens
ccaggaggcggaacttgccgtgagcggagatcacgccatcgcactccagcttaggagctcgcagtgagtggagatcacgccattgcactccaacccaggaggcggaacttgccatgagcggagatgacgccatcgcactccagcctaggagctcgcagtgagtggagatcacgccattgcactccaacccaggaggcggagcttgctgtgagcggagatcacgccattgcactccagcccgggcgacagggcgagacgggagtctca

SEQ ID NO: 400186 - DNA, 653 bp, Homo sapiens
ctgcactcagcctgggtgacagaggaaggcatgaaaagcctggtagtgtgatgacgagtcttgaagtatgatttattaactaaaagctaatgtattgccttagaaacgtaggcatgtaaaggaagtaatgtttttaaaaagttctagtatttcactgatttttttgtgtgaaatgcaggaatttcagttttattccctggaggtgggaagtagtctcaaggctggggcttttttgactttggatctgccagtgaaacctagacagtacccacttggttaccaagacagaaaaggaaactttgattgattattcaaattcaaagcaggatgctagggaacagcagatttaaggttagttggatgactggaatttagcatataaagatgtgtgaagacacccgtgtggaaaggacatttctattcccagaagcatcactcccttctcagagtgagcagccacacgtaaaagcagaaggaaagcaagagaggtaggataactgagatggtagatataaaatccttagcacaggccaggtgcagtggctgacacttgtaatcccaacactttgggaggcgaagtcaggaggatccctcaagcccaggagtacgaaaccagcctgggcaacatagcgtgtctctacaaaattaaaaaa

SEQ ID NO: 400187 - DNA, 724 bp, Homo sapiens
attgaaccagcactaataaagagcttctagaggagtgacagatctctaatgatgtagctctgagacaaggacaggaagatactaagaaccatggccttgaaaaccctggggtaagatgtccatgctggactgtggctgagttgttcactttgaaggggccaattcaaagttgaacatgatcctgaggtttgcgcacgatcctgaaggaaggagtattctcaaacatagaccagatgaatttcacatcagccgggagagttgtgagcttagaagagattaactttgatttagagaaatataggaatataacatatcttacatcacaaaggtttctaaaaggttacacataatgcaaatagaagacatagaggtgactacttaaagaactaagtgaaaatgaactaaagggaaatgaaaatacaatttatcaaaatttatgggatgtgacaaaagcagtgtttacagagaaatttatagcattaaaatgcatatattgattaagatctaaaatcaataatctaagcttccactttaggaaactagaaaagaacaaattaaatccaaaataagcaaaaaaaaaaatacttaaaattagagcagagatcaatgaaattgaaagtaagaaaatgatagagaaaaaccagtgaaaccaaaagctggttctttaaatagatcaataaaaattaatagagtcaataaaatagatctataaaattaataaggc

SEQ ID NO: 400188 - DNA, 620 bp, Homo sapiens
agactccatctcaaaaagaaaaaaaatatatatatatatatttataatataaatatcatattatatattatatttatataaatacatatatttataatacttatatattatagtatataaatatataaatgtatattaagatatacttttaaaatatatatatacatataaaatgtttgcttatatttggaaatctttgccagacatttcattgcttgtcatatggacaaatgatgaaagtaaataattttgtggagtggagtgctgaggctagcttataccggctcacaagaggaaattgttaagttttaaggactgttgtgagctgacagttgaccaccaaaatgagtgatttagacctaagtcgtgaatcatcaaagtttattcagccaagtagagggtatgcctgggaaaacaggagtcacagaagcttctgtgactgtattttcccaaagaggtttattatttatacattttcctttaaaaaggttggggggtgcgccaggagtggtggctcatgcctgtaatcccagcacttaaggaggctgagatggactgatcacttgagcccaagagttcaagaccagcctaggcaacgtagcagaactccatctctacaa

SEQ ID NO: 400189 - DNA, 570 bp, Homo sapiens
attttaagataaattgatgaatgttaacaatattacaaacacatacacttatatctctgttgcccaaacatgataaccctgcctcacttgtccctttgtgccccgtgtttccacacctctgactgccttttgcttctttttcacagctcacaggttctctccccagtgggccttcctcaaccaggtaaggcagcattggtctctcctacttctgtgttcccatagcaacctgccctcagtgtctaaccaatgcacccaccacactgcaatgtaactattgcttacttattagaaacaggctatgagctcccagagggcaagggttgtatcacaattgactataagccccaggtactcttcatcagccctggtaatgggttagatgctcaataaatgctcatcagatcaacaaggcagctacttggccattgctgatttgagctgcacttccatagtttacagtgttgtgggaagtagctgcctagccagggaaaacatttcctagcatcccttgcatccaggtgagtcctgcccaaagttcttcctaaagaaaattggacagaaaataac

SEQ ID NO: 400190 - DNA, 401 bp, Homo sapiens
tcatcataatattttctgacatgtgaacattatatgaaattcaattttaatgtttatcaataataaagttttattggaacacactatgtaatgtctgtttaagtagatatttatgtaggctactttctctctacaacattaaaatggagtagttgtgacagatcgtatggcttacaagcctgaaatatttattatccggccatttacagaatcagtttgctgacccatgctctaaggcagtaattctcaatcctagctggacactggaatcacttggggagctctatagaatactgattcctgattcccaccctcagaaattctgacttaattggcctgtagtacaatctagagaatccttaacgtataaacttacctaatttgtcctatctaaagaaaac

SEQ ID NO: 400191 - DNA, 613 bp, Homo sapiens
gcctttgtctctggctgcagtcgtagctccaggtcttttcttctctgttctgtgtcttctgctcctagaggcccagcttctgtgtccctgtgacctgtaggtattgggagatccacagctaagatgccaggaccccctgggaagcctagaaaaatggttctgcctgcaaagaagattgtgacatattgctggttgcaacaccacggtgatgttactttttgccttctcactgccctcagaaggcattgtgatatgttggtggtcccagcttcaaagaaatacttgtctgcagcgcagattgctacatattgcttggcccagctcctatgtgatgtgactctcctgtcatacctgagtgctccccactgcggtaattgtgacatatagctgggctctggccctagtttatgtaacttttcttcctgactgctactcacctgggggcattgtgacatatctctgaacctctcacctaagtgatgtgaatctcctgcttgagcccacttctcagggagtattattatatattgtcacacacagcaactaggtgatatgactctctctacagcttggactctgcccaataaaaaactgtgatgtatcactggaccca

SEQ ID NO: 400192 - DNA, 725 bp, Homo sapiens
gcctttgtctctggctgcagtcgtagctccaggtcttttcttctctgttctgtgtcttctgctcctagaggcccagcttctgtgtccctgtgacctgtaggtattgggagatccacagctaagatgccaggaccccctgggaagcctagaaaaatgattacaggcgtgagctaccgtgtccaggcttttttagatattaagattgtctttgcccaacccagcttatttcttggagacacattgctggtcagccaatcagatgctgccattgagggtgaagcacagaaataatttctgccacctgtattctctaagatttgtgaaagaaaaagtagtatccccaaagacaaaaaacccaaacatgaccccagtgaaatggtgcaagaacttgcaaagtaaaaagcatctggggcactcactgaggcatagggcagtgtctcctgagagggtggtctttgagaacttaaataagtaggatggggtgggagaatctttcaagtgattagatggcctgatttgacacgtgagtcagacacatttgttttctcatcagtactgccactctttaggtttgttaccttgaaaaaatttgttcacttattttgacttcagcttttaaactgtaacttgcattttattagtgggacttaaaaggtaagaaaatgttcacaaagggtatcaaagaggtgggtttcagagtaaattaatacctaatttcatactcc

SEQ ID NO: 400193 - DNA, 551 bp, Homo sapiens
gcctttgtctctggctgcagtcgtagctccaggtcttttcttctctgttctgtgtcttctgctcctagaggcccagcttctgtgtccctgtgacctgtaggtattgggagatccacagctaagatgccaggaccccctgggaagcctagaaaaatggttctgcctgcaaagaagattgtgacatattgctggttgcaacaccacggtgatgttactttttgccttctcactgccctcagaaggcattgtgatatgttggtggtcccagcttcaaagaaatgtaagtatcctctctggacccttcccacaaagggcattgtaacatatctctgcacccatcaactatttgatatgactctcttctctgacctgggctctgcccacaggagtcattgtgacatgtttctgggcccgtcacctagttgatgtgactctcctctgcctaggccctgtccatgatggggattgtgacatactgcctgatcaagcacctaaatggtgtgacccttttctcatgcctggaccctgcccaataaagcaattttaacata

SEQ ID NO: 400194 - DNA, 326 bp, Homo sapiens
tctgtccggagcctaacctagaggaaaaaggggagcagagaccagtgaggccagggctagttgggagaggggcaggggctgcctattgaaaggttttgaattttgcgggtccccaggcttcaatgaccttctggtcccaagtgactgattattctgaccaatgctgacacctcctgccttccgtttatgatcatacaaacgttccaattatgaaaataatatgtgttgcgtataagaattcaggccatacagaaagggaaaaatgaaaatccttcctaaacctgtgagagaaactaaccaatgttaacattccatttgtagtcttc

SEQ ID NO: 400195 - DNA, 774 bp, Homo sapiens
gcccccggacttaagaaagacccgcagcctcaaggggccccagcccagggggaggcacacacacattacagcgccggatgcagggtatgctgcaagaggagctgcagccggtgtagcctgtgggtagcctgtggacagcctggggccgtgattcgtggttggccgggtagttggcaagggcgccaaccgggcaggtgagcacaagcagggctttgtaaaacgagtaggaagctacagcaagggccaagtggctcaggcacagaaacgaagcagccacatgcaaaggtgtgggtattcccggtgtctaacttatgtccctcccgcggttcacagaaggcccctgacactgggactacacggagcagaaagtggcacccctttgcctcaggcacctcagtctcctcggggcttgggggcattttcagaagccacccgcagaaccagcgtcccgggcggcggctggttttcccctctttcccgggggcccccctctgtcgctgcggggtgcagcggcggcgagagatatccgcagctggcacccggtgtcccgggagggagaatcggggtctgtcgcgggccctgcgaccaggaggcgactgtgccctcagcagctgccccgcgcccgccccgccctcaggccactagaggcaacctcgcagcgactccggtgccccaagtctccctggcagggcgggctgtccccaccggccagggcaggcagcgggcggccgcttgctctgcacccgcagactccgcgccagccgcgccttcccg

SEQ ID NO: 400196 - DNA, 376 bp, Homo sapiens
tttttttttgcataaaacaaagttgttcatacctcacaaactgaatggaaccaatccctcattatggttatgtattggttaagaatactgggtctatggtcaggcgcggtggctcatgcctgtaatcccggcactttgggaggccatggcaggtggatcatttgaggtcaggagttcaagaccagcctggccaacatgttgaaaccctatctctattaaaaatacaaaaactagccgggtggtggtggtgcatcctgtaatcccagatactcaggaggctgaggtgggagaattgcttgaacctgggagggggaggttgcggtgagctgagatcacaccaccacactccagtctggacgacagtgagaccctgtct

SEQ ID NO: 400197 - DNA, 346 bp, Homo sapiens
agcattagtgaagtttctggtccaaggcacaggcttcctaaaagactgagacttaatcataggagtataaaatgctccccctcccctacataatacatcacattactaaaggcttatttatcacagttctgtttagctagtgcatcatgtcttctatcaaaaagaaattacaaggcacaccaaaatgaaaaaaaaaaaaacaaaaaacagagcaaacatcagaaccagatacggcaaggatgttggaaccatggttagtgggtgcagcacaccagcatggcacatgtatacataggtaactaacctgcacaatgtgcacatgtatcctaaaactttaaagtataat

SEQ ID NO: 400198 - DNA, 627 bp, Homo sapiens
aatgatagcattattataatccagaaaataaaagaaatatccatccatctgtattgatataaatacttaaacacctgggagggaaaggacaggtcttccttacagtagaaatccaattataaattaataagtaaatatggaaatggagactcaccattaggcaaatatcatggtaataattgtttaaaagaactatcaatggatattaaaataagtgggtgaaagtgtcatgagaaaaaagattttttgcataattttgaagtattttcccagaagataattaataattgctaagagaaacatcacaactggtgtggaaaaataaacctggcaggcaccaccttaaccagatgatcaattacagatgataatatcaccagtaataagacatagtgacataccatgtgccactagtgtggtatattgacaagggcacctattgctttagttctgtttttgctcaaaatacatcacctcaatctaataattagaaaacatcagagaaatccaagttgaggggcatatgacaaaatcagtgcccagtacgcttcaaaagtgtcaatgtcaaggtcataaaatacaaataaagacagaagcaacttgtcaaagacaaacagattggattat

SEQ ID NO: 400199 - DNA, 527 bp, Homo sapiens
cggggaggagaagaagttattatcagggtgggggtgggctgagggcatggttcaaggcctgatgtctttgcctcctaatgccgggggtcttgctggctgggtcaggccactcacaggaatgggccataatccttggttgacaataaatggacaaagcagctgggtgcggtggctcatgcctgtaatcccaacactttgggaggccaaggtgggtggatcacgaggtcaggagttcgagaccagcctagccaacatagtgaaaccccgtctcaactaaaaacacaaaaaattagctgagtgtggtgcgggcacctgtaatctcagctactcgggaggctgaggcagaagaatcgcttgaactcaggaggcagaggttgcagtgatgagagaatgtgccactgcactccagcctgggcaacagagtgagactctgtcaaaaaaaaaaaaaaaaaattagctgagcgtggtgcgggcacctgtaatctcagctactcgggaggctgaggcagaagaatcgcttgaactca

SEQ ID NO: 400200 - DNA, 468 bp, Homo sapiens
aaattcctgatctgcagaaactgtgagagataatcaatgtttattgttgtagtaagccgcgaagatttgaggtaatttgttgtgaggcaatgaataactaagattttccttctgcccattgtccctctccaagctccctacactccagccaaactgaaccactgaccaaagcaacaaattttaggcccggtgcggtggctcatgcctgtaatcccagcactttgggaggctgaggtgggcagattacctgacgtcaggggttcaagaccagttggctaacatggagaaaccccatttctactaaaaatacaaaaaaatagctgggcgtggtggcgcatgcctgtaatcccagctactcaggaggctgaggcaggagaatcgcttgaacccggtaggcagaggttgcagtgagccgagatcatgccattgcaccccagcttgggcaacaagagtaaaactctgtctcag

SEQ ID NO: 400201 - DNA, 409 bp, Homo sapiens
accaaacatagaatattaaaacaatcaccaaatgtaattcacagtattacaaaaataattctaaaatatagcaatgaatcatcaccccaatacatctcctttcaccaacaaactcacggcaagcaggtcctaggaacaatgtccaggacattcaaaagcaaccaacacacggcataactgacaacagaaggatcagagttctagagtattacctacatttcctatttaccatttagatggatgacaactacacgtcatcctaaaaatgcaattagcttaccacttcagaagctagagagagagatggtatggctagcttttgtaagagttgaggaacagatggaataaaaagcagaaagaaattcagcaacgacagtctgccccataaaatgcataactcacaagtaca

SEQ ID NO: 400202 - DNA, 428 bp, Homo sapiens
tcccacatgtgtcttgctcgttcactaaacaaatatttgtgcttggcaccagttgatatgttggcattgtgtttcatctgattgtgtgttatttaaaaaactcctattactaaatccattaagcaaccaaactgctagagtcactagattaaaatgcatgacacacaactacaggaaaatgtcaggaaatgcaaatctaggcaggcgtcctcagacatatcagctatgaggaaactctctctaggagatctgtgttttcctcccaaaagaagatcatctttccagaaaaagaggattttacagtcaatttgctaacataatataaatttgtctccttccggggacttatatatgttagtacataattggtgtctttattgatggctgtaagaaccaatacctccaaaataaacagaatttgtacaata

SEQ ID NO: 400203 - DNA, 569 bp, Homo sapiens
gccatacggtttgagaatatagatatgtattcattaaaagtaccttacacaattgtactgatgattcttcctattactgagaagtaacaaacagaattaccataggaagaattgctaccatagtggaatggcagtgaatgaaaaatggtttccattgcttaaagcttcctaattcataggcatattctttttaagtctgtatatattacccttacaatgtccacacaaaatggaacatggttaaaaagagtatatttagaagcataagaaacatctcatttaggatgctttagactaaaacagaagaactaactccagatggtccaaatataacccaaagcccagaggtagagaagtcccagggaaggttgattcagtggtccaaggatgctaccaaagattcttttttcttccccctgtattgctaaactaccaatcctttgggctgatatccaaatagctctatcatactaatataccataccctcaagaagtctgcacaaactaattatgacattcccaaaaggaactaaaggactagaagatagtatattcccctatctcccacc

SEQ ID NO: 400204 - DNA, 462 bp, Homo sapiens
ccacattcagcgggtgggaattatgatgtctattttaatataaggaaatacagggacggaagttagaaccttcccacagccatgtagctatcaatgacagatccagagttagtgctctttcaagttggccgcatcacttgctacctccctgtgacagaataagttagagaaaaacgactggaacctctttcttctgccaccattccccaactctcctcagaacccccagaatctactccttgcctagttttatcaataatgacatagtgaagaaggaaaaaaaaaggctcttgagagaatgtaggaggtttaaatccggaaaaggcaaagggaaaaggagagaagaacagatttccaaagccaaagtatccattccccagtgcaagtggcctgcacactcccagacctcagagatggaagagaagctggcggtcgagaagctgtggcggtcggggtaccgag

SEQ ID NO: 400205 - DNA, 196 bp, Homo sapiens
tccaccttcaagcctcagtcatcccatctgaacatggagggtcggactgcatctgagctttgcaaataatgacccaaggaatggagatactccggggtttccacatcaggaattatttttcatcaaataaaaaaaatctcagctgcttgagggaccccttttccatgaaatattttatgtgtaaaaaaattttatt

SEQ ID NO: 400206 - DNA, 340 bp, Homo sapiens
atttcaaacacacacacacaccccccaggatgagcatagcttcaaaaacatactagagaataaaatcccatttgcattctttcccaagagataaccctggaggttgagggttttcttttaggaccatagccagagacatgggaagatgcaacagtccttgttcctggctaaatgccattccaggattgcatgtgctgtagagcctggctgggtaccaccagcccttttaatgtaagaatgaagcaacctggtattatttagttttgagttacatgcagagtgaccagcaaaatctgtatacttcttcaaacagctcaatgtgacagtattcctcttggta

SEQ ID NO: 400207 - DNA, 427 bp, Homo sapiens
ccccatttctcttctttttctaatcaatcctttccataacattctgttaaattggggtaatagaacttaaagctcagatctcagcttcagtctggactgtttaacattaaattacataaatacaaaaaaaactttcatatttatttttcctctttgtcctaaaatgaatgtctgtgagtcatagttctgtcatgttaaaaattcatcagtataactaggtcctgtttcaaaaaatacaaacaaatgtaagataaggagcaatttaaaattttacatagtctttaattcccagaactcctatatattttaccttcttgtcccagatgggatcactttggctgcagagtagaaaacagagtggagggaggccaaggagctgccagggatcagcaggaggggactgctctggcctagggaggggcggccg

SEQ ID NO: 400208 - DNA, 406 bp, Homo sapiens
aaaagcagtgtaatgaattttatatgtttgaggtatgtatttaatgtctaagatttttcttaggtgttgtggaaagtgaataggtgaggcccagtgtggataagaaaaaaaataacttaaaaggctgcacgcctataatcccagcactttgggaggccaggtgaggcaggaggatcacttgagtccaggagtttgagaccagcctgggtgacatagtgagatcctgtctctacaaaaaatacagcgaaatgagtcgggcttaatggtatgcacctgtagtaccagctacttgggaggctgaagtgggaggatcaccctgggaagctgaggctgcagtgagctgaaatcgcaccattgcactctagcctgggtgacagagtggtgagatgctgtctcaaaaaaaaaa

SEQ ID NO: 400209 - DNA, 538 bp, Homo sapiens
cccgcatcggcgtaaggcatggtggtgtgcacctgtatcccagctacacccagctatgtttgggaagccgaggcaggaggatcacttgagcccaagagttggagatcagcctgggaaacatcgtaagactccctcttaaaagaaaaaaaaagatgaataacaacacacatcttttacctggattttatattagtttattaggttagtttcccagacagggattgaccatgtcaaatgataaaattaaaatacttttaaagttttcaaagccgtactgctaaattactttccaggaagttacaccaactttttaagtttactaatagtgaatgagaatgcctgtatcagtacacccttgctaacactgagtattaatattacgattattttagtatgctaatttaaatattttaaatggccaggcatagtggctcatgcttgtaatcccaggactttgggagactgagctgggaggattgtttgagcccaggagttcaagaccagcctgggcaataaagcaagaccctgtctccacaac

SEQ ID NO: 400210 - DNA, 467 bp, Homo sapiens
cttaaaattcaaaatcttttaaggaaattaaaagacagtagaatttttcctctttgccttctgacttgggtgttgatgttctagcaattagaaacttcattagtggccatatggccaaatgatctcattatggacctttgaattaatttgcatttttattatgcttctgcttctaaattgtatgtactgtgtttgatcatttgtgtacttttcagagaattggagaattcttattttattgaagaatatatatttttagatggaacataagtagtatgtgcattccaaatttaaaaattttttaatcactagattattaacaaaaacaaaaataaaaccaagttatttgtttcattggatatgcctcctaacaatttccatgcacttttatgagaaaacctctaatatgataacattatttgtttagtacgtcagtttggtaaaattaaaagaaaagaaaactataa

SEQ ID NO: 400211 - DNA, 453 bp, Homo sapiens
ggcaagaagaaacaatttgacttatagtattgttagatatgagctgtaaatttctcttcaaaaaatcagtatgtatgttcaattctttgctttctacttttaaacttaacatccttgtagcacaacgtttttcgattacctgctccaccctgactcattccgattacctgctctgccctgactcattttccaccctgactctttctgatttcctgctctgccataaccatttttccagccaaaccactcacccgtacactatctttaaattagccaattggaattagtttagcctgtgcatctaaccctagccaataggggaacacagcagcagggtccacgtggatcgggaataagaacctcctctcctcccttgtccaggtgtgtgctcactattgctccaaatgtaagggggcacccttctatagaattacattgccttgctgagaatta

SEQ ID NO: 400212 - DNA, 437 bp, Homo sapiens
tttcatcattattttccatgttcctaagtggccttaacatacattcgttagaggactaacaccaagttaaattgaacataaaacattcatctccaatatattgttttaagctgaaaataaggattgttgaagtttttccgttatattttgtggtgtaggtctaatgaccaaattaaaattttaatattccaaaatatgattaggacctgagcctttgccttctgtatttaatgtctggaattttttatagtctgtgtgggtatggctagttcctgcaacaacgtggcacttgcttctcacatgggagtttcccctgtaatttcctgacttaccactctatcatgttgcatctctgcttataactatctgtttcgctgtttttccttcaggctacatacatagtgccttgtacttgcttttaaatgtactcagattct

SEQ ID NO: 400213 - DNA, 416 bp, Homo sapiens
tcttgataaaatataaaatctagttttttagacaaatcaccaaaatggtaaagaaaaatcttctgcagtatgctcattatttctttttcccatttagagctttccattaaaaaaattaccaatcatctgaaagttgattgagtacttgaatttaatcagacacaggaagaatgtgtccagggttattgagtgtacactgtgttatagaaaaatatgaacaagaagaggactatcttgagcagggaaatacatggctctcagtaacagcatgagaaatttcctggttacatgaaataatacagacataccaagaagagccaagaatacagattcaaattatactgaaagaaaacttcgtttttctaggcctttaagataaacgtttctgcatcaggccataacaaagttcaaactga

SEQ ID NO: 400214 - DNA, 649 bp, Homo sapiens
gctgattctcttatggattttagtgtcaacaaggtcatcagaaattatgatcaagacctagtaacaagttgagaaataagtttgtgtgtgacttctgagtattgctaacagatatattttttaaaattccaattcattttgtgagcttgcaatctgcaattggtgttgaagaagccattttatggagcattttatcatctggataccagatgttctggagtatatgctttttttttttttaaatgacccattttgtggaattttttttttttttacagtctagggataactcattttcatagtctgcagaaaaactcatgttaggtgcatagtgatttctctctattcaaactattaatgctttgtatcgtatagttttatatattctcattaaatcaattcatatttactgttagaatgaacccatatttactgatagcctactgtgagcaaagcacagtactacaaattgtggagagttatgaatgctgatttcaaaaaaggttataaacatttcttttgatgatgtgataagacagcatgtaaatttgcaatagaaaagttaaggtactgcatgcacaatgctatttaggacaaagtccacccactatagaccgactgtaggatcagtgtcctcccactatttaaa

SEQ ID NO: 400215 - DNA, 392 bp, Homo sapiens
gggcatggtgttgtgcacctgtaatcccagctactcaggagcctgaggcaggaaaatcgcttgaacccgggcggtggaggttgcggtgagccgagatcgtgccacggcactccagcctgggcaacagagggagatgctgtctccaaaaaaacaaacaaacaaaagtgtaaaattgaagcagtgggtatttaattcatggcttaccctcaagacttttgccttctagaaagattttttttttttttaaagacagagtctccttgtgtcacccaggcccatagcttatagaagatacgaagttacaactaatgtcggtgtgtgtcatgagattcttttttttttttcaagaatagttttgggtgttgagcaaagtatgtataaacaattaatgc

SEQ ID NO: 400216 - DNA, 460 bp, Homo sapiens
ccacgtggtcaggagctgtcgatggtgtccggccaacagttagcaagaaagcagagaccccagaccccttataaccacaaacagctgaattctaccatccacttattgaacttgagagactaccataagctacaaatgagatccgtggcatgactaatacctgactgcaccttcgggggaccctgagcagaggatccagctaagccatccagactgctggttggcagaaatgtgagctcatacatgggttttgttttatgccactaactttatggtactttgttactataatgcactttgtttgtatagtgataaataactatacaaaggggaaaaaatctcagcctcataaacagatagttactttgagttccctaaaggggtactattttttgggtgaaagtgacagttccagtgagtaaagatgctccttggcaagatgcatattaaactattttct

SEQ ID NO: 400217 - DNA, 590 bp, Homo sapiens
gggccgtcgcgttttctgggaagccccaggccttttcccgctcctgaagagcctccccgaagcgctgtcgggaagcgctctcctcagggtcctgcgggtcaggcccggtgtttcggtccacgagcaccagcttcttccaccgggccgctaagtctctggcaaagtcgcccacgtgctggtgcttccgcaggcgcttcaccgtctttctgattccagtctccgccaggatgtctgcggtcatgggcaaggcggagagtttctgcaaatatttctctagctttttcggctccgtcttagtggccagacgcacctgcagcttccccactgcgcgcagcgtagtggaccctgccgccatctcgccagagctgtgcaggcgtcgctgtcctcgcggtcgcggctctgtccgagctcggggcggcggcacaggcagtctggggtggccggtcctcgctgcccggtcgccaggcggcgacctcgggatgtggagtcacagcctggagcgagctgggtcctcggagcagcgggccacttggtctggaacgccggtccttgcagacagctgagcaggcccgcttctgttcctcgggatg

SEQ ID NO: 400218 - DNA, 552 bp, Homo sapiens
cccatcacttgtacttggagcagctcaagtgtgggctccttgcagaggctggaaagcccccacaggagcagttgccctgaagttgttacagctgctccctgctgacatcatgtggtctagaagggcccagaaatgggcaccacctcaggcaggttttgactttctgtggttaaagaaagaacaccagttctctcagataaagcagagagagctctcagaagcctgctggtgactgtgagagcaaagtcacttgcacctgaagcaagacagccgagaacaccgagccaccggcagcctggtgggtttggagggtagtgcgtcagaaccagatgtttataaggcttatgtattttatcacctctgctgtacagtttatggtttacaatggctgcaaggaaatcggatcagttttgttttacttgccaaataaaacaaatgtcaaaatagtcaatataaaatgtattctaatttggctgagttaagtcagccaatatgcaacaggataattgaatgttcattaatgcttccaagtaaaagccatttgtctgtcaa

SEQ ID NO: 400219 - DNA, 585 bp, Homo sapiens
gtatttcagtagagaccaggtttcaccatgttggccagactggtctcgaactcctgacctcaagcgatccatccgcttcagcctcccaaagtgctgggattacaggcatgagccaccgcacctggcttgaatcgtttttttgtgttctttagaagtggtgtaaggcaggcatggtggcatgcacccatagtcctagctacttgggaggctgaggtgggaggagcgcttgagcccaggagtttgaggttacagtgagctatgatggcgccactgcactccagcctgggtgacagaatgagaccctgtctcagttaagcagttagtcaatcaatcaaataaatggaagtgttgtaaagttttctttaaataagtttgtacatattcttagtggcaatttctaatatttttttcctttttattgtaaatggggtatgaaaactttaaaatttttaaattaattttgtgctactcatttaagaatcttaatatatattcaaagccgtagcttctgctttgttttgttcagtataccctctttctatcaacaaaactctttcttagaagagctgacaaaaagtatttcga

SEQ ID NO: 400220 - DNA, 464 bp, Homo sapiens
tttcaatcagttttttgactttcaactcagtgttgtgacatcatggtggacacaactttcttagaggtatcaataccatcatcatgtccatgtttgatttgacagacaaatattgcaattttattctgttggacattttccaaagaagttggttactgatttattaaataaatatacatattttagggtagtggaagaagaaggtgaatagaaattaatgggtgagcaaaggtgagggaaaaccaaatcaccagttttctttctgattatattttaatctaaaaggctatgtttttaatcaggttatatgtcttgataagtggcgtttctacttaaaaaatgttggttgtatttgtatcccaagtaggaaatgcaaacatacttgtataaagcaaacaagtttaacttgtgtgtttgtattaatgatatgtgatcaaggcacaggaaatgttagtaaagaatca

SEQ ID NO: 400221 - DNA, 400 bp, Homo sapiens
atttctctatcttatgtgatgtttagaaaggcctttaaaaaattcacaatgaagtccaggcatggtggctcacacccctaatcccagcactttgggaggccaaggtgggtagaccactgacagagtgagaccctgtctcaaaaaaaaaaaaaatgaaattattttaaaataacatttgcagtaggacttatttgtacatgttcaatggaggttaggataatatctgtctaatgtacttgtatacttgaagatatataataattggctggacgtcgtggctcacacctgtaatcccagatctttgggaggctgaggcaggcaggtcatgaggtcaggagttagagaccagcctggccaacatggtgacaccccatctctactaaaaaaaaaaaaaaaaaaa

SEQ ID NO: 400222 - DNA, 479 bp, Homo sapiens
tttttggtgaatatactaagagtatcagccgaggacagaatataaacaatctgctcaagagtgccatttttttctaggaattcaaaagtattactctatctgtgtcccttagaagaaggtgacaagtaactggatgactattttaatagacaatgtgaaccatccagaattgattcctagtcagcaaagacgacagtgctgaatggttctgagagagaagtagcatgcctatttgtgactatagaaaaatagtacagtggaattatcagctttctatcctaggtcataaataaagttacaaagtggaagagacaagggggagaggtgaatgataacaatattttcaagaaagtatagatgataatccttgaactgggcaggtccacttataatatgtgatttttttccaaccaaactcacatagaaaatacagtattcatgggatgtaaaacccaagtacacagaaggctttttgtata

SEQ ID NO: 400223 - DNA, 482 bp, Homo sapiens
agatggagtcttcctctgtcacccaggctggagtgcagtggcatgatctcggctcaccacaatctccacctcccaggttcaagcgattctcctgcctcagcctctgagtagctgggattacatgcacttgccaccatgcccagctaattttttatttttagtagaaatgtgttttcaccatgttggccaggctggtcaagaactcctgacctcaagtgatccacctgcctcggcctcccaaagtgctgggattagaggcatgagccactgcgcccagccaagaaacttttttgaatagttttgggttttcttggagtttctgaatgctattcctctattccttttttttcccccttcatgtgctgttatcattttcttagtttattatttttttctcaagctctcagttacatcttgtattttattacactcctttttttcctggcattttccctccccaaaccacccatctggactggttc

SEQ ID NO: 400224 - DNA, 392 bp, Homo sapiens
agcaggaatagaatcgagagagcacgggaacgggcaggtgatctggattgagatggtttagggctggttagcataattgcttaaggacacctgctcaggaggctggggtttggtcttggcccagtcatttgctactggttgattctgggctagttaagtaattgagtctcagtgttcatgtctctgaagtggaattaaacgagacaacataggaagtgtacttagcctggaggccagcacagaataagtatgtaatggatgttattgctgcagctggcaacagggaatcattgagaagtgcgctggactgtttctttggtaattaacaagatctccctctctgtctctctcctctccttttctctccctttcccttcctccatcttctccct

SEQ ID NO: 400225 - DNA, 471 bp, Homo sapiens
cttcacttggtcctgccaaagatttccagcagagggcatctgagatattgacaccctcacttacagcaggaggagaaggcctggggcagctgaagtccctgggccagttacctgtggctgtgaacagcttcatctgagaatctaaatcctttccagtgtgttgcacaaagttcgttttctcttttggccttaaaaagaaaaacgttgggaagtgctggcctagagcaaacttttcaagaaaacagaggctatggttacaatatagcacccttcttaagccatttcattaatcactactttttttagttcatgctgaatcttagcttagaatcaagaatgttctgggcacattgaaaaacttcacactaacttgactccagaaggcaatacagtctcccaacttgaacctcaggagcactttctgcagctgcctaattctgaatatatatatatatatatcttttccccata

SEQ ID NO: 400226 - DNA, 425 bp, Homo sapiens
gcaaggaataaaaacaagacaggcatcaagtctggtacagcttcatttatttcttactcttcctaccgaattgagtttgcatccaggtactcctcatgcctccgttggcagaatgatgatgtaatgaacgaacagcatttacagtaaatgacagcaaattgctctgtaattcaagggctaacccatgtgccacacaatgatcttttgatgtctgtgaatttcttcaaggtgggtggggaagctttttgcttgtagggaaggctctggatggactgagcctctgacatatcaactgtaaatcctggagtcctggggctttattcggaggaagaaagcaccttctacaggcagcagtagagtggactgtcccagaatcgagcccactgccctgagaattggactccacaatggccagttggacattg

SEQ ID NO: 400227 - DNA, 480 bp, Homo sapiens
ctgtatctctagaacagaatattccctggagcatcaggcaggtttatcaaacccagaggagatccacattcaattcgttatgtccagagccaatgagctcattccccaagaccaggtcttcctgtgctccctcttgtatgatgaagggcatcacagactccactttgcccaagcgccaacctgagcatcatcctgaaccacactctcctgcatctagtccatttacaaatcttaccagttgtacctcttgtttgcttcttgctaagtcaagtgccccaaagatgaagggctatcaagggccaccagtaccaactccagaggggaggatgaagcccactctctttctatgcttgacgtttagcatggtgcagtgaaatacacatcaaatcaggaaccatccacaaaacagggatttgaggtaataaggtggtattgcttgaatttttgtcccttttgaaactcatattaaaacttaatccc

SEQ ID NO: 400228 - DNA, 143 bp, Homo sapiens
ttttattttttaaagagattaagtctcgctacattgccaggctagatttaagctcctgggctcaagagatcctcctgtagcagcttcctgataggtgcacatcactgtgcccagcttcaataaattatttctcttacagtttc

SEQ ID NO: 400229 - DNA, 302 bp, Homo sapiens
catactgtcttcctctaagaatcccttcccatgggcaagcccagcccccagtctgagacggccccacccagctagccatgctggtgtgcaactatccactcccttggtgaagacccagcccaccaaaccagagtcctcgcctcactttcaaactacagaactccaggctgttagagcctcgcagagcagaggatgcctgcgtgaatcccagtctcaacaccagctttgttggggtgggagtggtggtggcggcgtctgtcatcagtggttggccttttaatgtggacttgaggtgaaaaact

SEQ ID NO: 400230 - DNA, 418 bp, Homo sapiens
cctggggccttgtcaccagtcatactgcctgccagtcaccatctttagcatgtgtatgtacttgagtggataagataggcttttatttcttttatgatttgcctcaggacaaatcaaagagagcttcactaataacttgtaatgttactcggaaaagagaccagggcttctagcccatgtaaagaagtagaactctggccttgggataggtaaggtaggaggctacagtgggagagagtttaagcagagtgacatcagccattttactgtatgcatagctgggaggcagatcaaggacttcaaacttcaagagtaatggaacttgctgtccaaagcacctgctgaacaacagtttcaaaaacaaggcgtgcctattgcagggttcctaggtgctaaaacttccacttattttataatg

SEQ ID NO: 400231 - DNA, 148 bp, Homo sapiens
cacaagcgtggccagatgaaagttcatgggaatgcaagcagagggcctgattccaatttttacttcttctgttactagttgtgggaaactgatataattcctttgaggcttgttttctttatctgtaaataaagacaataatataata

SEQ ID NO: 400232 - DNA, 336 bp, Homo sapiens
caggtttacgtaagaggctcatcaagaaggaaaggaaaaaatggttgcaacttaagtgattttccccttccacttagtcctccgttcatagggcccaatagcttcctatcaagcatctcaaaatctttctgacacctggatttcaagattttccattacttaatgcatcctcttgaaagtatccccacacttttccactacccatcagcgggatgccattcagtaatggaagctacattccatgagagcaagaacctcatctgtatctctgtgcctgaaggagcctgacacatagtatttaataagtactcaataaaaatctgctttatgaaaata

SEQ ID NO: 400233 - DNA, 624 bp, Homo sapiens
tttcaaagaaaactttcataccaaagcaagctaaggggaacaaaaccatcacatttctagaaaaaaaaaaattaccttaaaacccacttcctcagttagcaaatatagtgtggagaagaataattacataatttcactcaaaaactaatctttgatataaaacatgtaaacaggaatggattattaatcatagacacacctgaccgagtagggtgaatgctgagtttgctaaacattaggcagccaaaaccaattaaacatttagttggtagagtcatatcatgaaaataaattacagatatgaagtcttctgctataatgcttgttttgaaaatgtgatttgattcaacatgattgaaatactagagaactgcatatacagcaaatttcacatttgcttatgtacaatttaatccacagaatactactaggtaaacagagataattgcattgagctgtttaaacgatatattctattccttcctattacctgatctcagtgcaaaaaacatttattttactaattttctcaacttttgaactttcactactaatcatatgtaatttccttttgcagttcttttggtcatccataactatggtaattcttcaagttcttatgct

SEQ ID NO: 400234 - DNA, 501 bp, Homo sapiens
tgatggagtctgactctgtgaaagaagaaagaagatgatgatgatgacacagacactcagaggaaaatgcaatatggagatgtcggcagagattagagtaagacaactacaatctaaggaaaacaggattgcaggcagccaccaagagctggaaaaagtgaaaaatagattatcctgtagagccccttgagggagtacagtcctgccaacactttgatttcagacttctggtttcccaggctaaatgaagatactcctctatgccattcaccactgtgttaaatccttgcaaggaatcttccaacaggtggtgtcagacaaacacaggtgcacatacactaagacatccaaggtatctacaaatacctacacagcagggactgggagatggaaggtgtgttaagtgtgttgggtgtggtattactcaagtctcaccactacagagaatcagttttccagaatttctcaagcaaattttattattaattgagcaggaaagga

SEQ ID NO: 400235 - DNA, 465 bp, Homo sapiens
agacccaaatccacgaattctgttcaatgagggttacctgcaaaatgacaatttagagcaatactaattatttgaaggacctctgttcctatcttttattttagcctgtgtgtgaagtgggtttttggtgtgtttgttttgggaatagactgactagaaatacatcactgtccaaaaggaaaacatttttttcatctagggatttgaggcttaactagctgaaaggaaaatataatttcattttgttctcatagtctcatttagaaaataaccttaagagattcaaaggacatcaggctatgtgagcactttccatgctctgtggggtggggggatttggcttgggcttcaactttatgagtatgttctgaagtgcttcttaagaaagtttttgcctttagctctttcctaaccactagagctttaagaaacttgaaaaaaaaagtcgacgcggccgcgaattta

SEQ ID NO: 400236 - DNA, 404 bp, Homo sapiens
aagaaaaaaggaaggtgttggcaaggatgtggagaaattgaaacccttgtgcactgtgtgtggaaatgtacaatggtgaagctgctgggaaaacagtatggcagttcctcaaaaactagaaataccatgtgatccaataatttcacttgtgggtatatacataaaagagttaaaagcagacttgaagcaatatttgtacacccatattcatagctgcattattcacaatagccaaaaagtcaaaacaactcaagttattcatccaaaatgctgggattacaggcatgagcccccactcctgacccccttgggagtttttaagttctccaagtacaaataagtccccattaatagtcattttttttggatcttcacacccattgggatggctgctacccagaaaa

SEQ ID NO: 400237 - DNA, 924 bp, Homo sapiens
gtccagatgatccctcaagcaatcagtattttgcccattcctgttatcagaatctgtggagctcagatgtaatctgcaattgtcttcaaggttatacgggtactcagtgtggagaatgctctactggtttctatggaaatccaagaatttcaggagcaccttgccaaccatgtgcctgcaacaacggaacatagatgtaaccgatccagagtcctgcagccgggtaacaggggagtgccttcgatgtttgcacaacactcagggcgcaaactgccagctctgcaaaccaggtcactatggatcagccctcaatcagacctgcagaagatgctcctgccatgcttccggcgtgagtcccatggagtgtccccctggtgggggagcttgcctctgtgaccctgtcactggtgcatgtccttgtctgccgaatgtcacaggcctggcctgtgaccgttgtgctgatggatactggaatctggtccctggcagaggatgtcagtcatgtgactgtgaccctaggacctctcaaagtagccactgtgaccaggcaagatactttaaagcttactagtgcactcaaagtgagcatgatagtgagacatggtttctaaatgtgtaaagaaagtttcttttatgtactgttgttaattagtgcattgaaacaggattggccttacaggggatggagtcagcctctatcaaggaatgaaaaccaaaaaaagagaatgagcatctcaaagttcagcttcgcctacttcagttttctctctgtgactgaggaagtcagaattcatacacagtgaaacacagacatcagcctcacctttcactatttcatacatgtaaccatagggaagacctaagaaatagttaatcagaagagattatgaatcagaatgaaaataaacagataccttcaaaacc

SEQ ID NO: 400238 - DNA, 1025 bp, Homo sapiens
gtccagatgatccctcaagcaatcagtattttgcccattcctgttatcagaatctgtggagctcagatgtaatctgcaattgtcttcaaggttatacgggtactcagtgtggagaatgctctactggtttctatggaaatccaagaatttcaggagcaccttgccaaccatgtgcctgcaacaacggaacatagatgtaaccgatccagagtcctgcagccgggtaacaggggagtgccttcgatgtttgcacaacactcagggcgcaaactgccagctctgcaaaccaggtcactatggatcagccctcaatcagacctgcagaagatgctcctgccatgcttccggcgtgagtcccatggagtgtccccctggtgggggagcttgcctctgtgaccctgtcactggtgcatgtccttgtctgccgaatgtcacaggcctggcctgtgaccgttgtgctgatggatactggaatctggtccctggcagaggatgtcagtcatgtgactgtgaccctaggacctctcaaagtagccactgtgaccagcttacaggccagtgtccgtgtaaattaggttacggcgggaaacgttgcagtgagtgccaggaaaattattatggtgatccacctgggcgatgcattccatgtgattgtaacagggcaggtacccagaagcccatctgtgatccagacacaggcatgtgccgctgccgggagggtgtcagcggccagagatgtgatcgctgtgcccggggacacagccaggaattccctacttgtcttcaatgtcacttgtgctttgatcagtgggaccacaccatttcttccctctccaaagcggtgcaagggttaatgagactggctgctaacatggaagataaaagagagaccctgcctgtctgtgaggcagacttcaaagacctcagagggaacgtgtctgaaatagaaaggattttgaaacatcctgttttcccatctgggaaattcttaaaagtcaaggattatcatgactctgttaggtaag

SEQ ID NO: 400239 - DNA, 348 bp, Homo sapiens
ggagtcccaacatctgcatgtatgtctggaatgatctgagcctgtagagttcctacacactggccacattatagggtggtgtctgtggtcacacagctcagggcaggtattagtacatgaatagcttagcggtgtcatagtctttatgtgaaaggctcataaaagcccaaatgcttttgaactggttgcggattttgagttggaggaacacttgggacaaccggtcacattccttcagtgcgcggccactcctcagcacatatcccaaagccggtaaataatgggaagaccctgtactgatgtttgatggtgttatgaacttcaaatgacccctatagaaatgttaaa

SEQ ID NO: 400240 - DNA, 788 bp, Homo sapiens
agcggagcccagcgagggtgcctacaagaggagtcaaagggcaaaggatgaaaaaattgaggctcaaagaagtccaccaaattgagagtgaagtaggggaaacagcatttaacgcttacattctaatgatttgtgtaagagcagcaggacaagctatacaaagaaaaaggtggaattatcaggatggaattaaagatgcttccaaacagaggggatatctcaagccatgactcagaggtaagagtaagagactatgatgtgcacaggagctgtttaaaaagttcactcacctctactcattcatagagacacatttcaaatacgacctcctatcagaagcccccataaattatcaccataacattctctccattcctccttgagggaggtaaaatgtaacaattatcagataaaaagatctttaggaacctaaaactcaaaagatagttcattttaggaatgaaaatgggtctgcagcctgtgtgaacccataaatcatggtattataggaccagtgctcttcctgccaacattttccctaactgccagcttgtgggtgccaagcactctcttgcattataggatttaacacaggacctgacttaatatagcaatgttttcttatcatgtctcatcatttcttctttcttctggatacaccaacgttttgtcctcctttttgtttattctgtggtaaatgggaaaaagcttgaaaaagactcgatggctatcatttcaatacctagaaataaatagttccattcaatttatttcaattgaatagacag

SEQ ID NO: 400241 - DNA, 445 bp, Homo sapiens
ttcacttcaacatacaagttgaccatggcatgctctgggctccagtcctctacaaagatgtagggcaggaactaccagttgtcagcacagcaccatcccacattgctcttctaatggagactttcaccccagatgttctttctcgtctgatgggaaggatccaaatgaaaaaattgaggctcaaagaagtccaccaaattgagagtgaagtaggggaaacagcatttaacgcttacattctaatgatttgtgtaagagcagcaggacaagctatacaaagaaaaaggtggaattatcaggatggaattaaagatgcttccaaacagaggggatatctcaagccatgactcagagagatccaatcgagtaccaggtccagcggtaatctattcgcagatgtagtggaacatctcagaagaataaaaaagaaaataacctaaacaaa

SEQ ID NO: 400242 - DNA, 392 bp, Homo sapiens
agagaatggagatcttcagtgaccaaataatcgagtagtaatctgaaataagaataataaataaagccagaagctctggctgacctggaagcaaatgctgattccagaaaacaggggctctggacgttaacatttgtgaaaagccaacccttaggccccaacaaagccaaatgcccaaagaggccataacttctgggagaaagggtgttctatggatcgtaagcctgctagttaaagaatctaactaggaaatctgtctgtctatgctggttacaggttgagaaataaagtatattagtttctcctgaatctttacaatagtagctctgaatttatgggcatagagttcaaatttaaattactcatccaattgggaagatactcaaccaata

SEQ ID NO: 400243 - DNA, 1892 bp, Homo sapiens
  misc_feature (800)..(800): n is a, c, g, or t
  misc_feature (1169)..(1169): n is a, c, g, or t
  misc_feature (1886)..(1886): n is a, c, g, or t
  misc_feature (1888)..(1888): n is a, c, g, or t
  misc_feature (1890)..(1892): n is a, c, g, or t
gttttttccctacctttaaacttccctgttacttctgtgtagtttattcctaaatgtagctagccttggcatcagaagttttagtttcttgtctccagatacttgctagacattttcacttagctttttagttttcatttcaataatgaaattcctcatatttatcttttccccagaccacacaaaacattgacttttctccttggttttttattttgttaatagtggtatcatttccacctaattttcccaatatctaaaccctgatttctttactactctcccttcccttacctacctgtacccgagatgtacttagtcaccacataatgctgattttgtatttttccaatattttactatgacaatattcaaacattcatccaagttgaattttaaaatgaagtcatatctatcacttagattctatcattaacatttatactttatcacatatctatccatcttcccctccatccatctctattaatccatcttctttttgatacattaagtaaattgtagacatttgtacacttccccataaaaacttcaggatacatatcattaagtagttttttccttttgatgtgcagtttacatataatgaaatgtacaaaacttaaatgcacattagcttacttttaacatatgcatgcatgcacttgtgtaacccaaatccctatcaaagtataaagtattaacattgtcccacaaatttccctcatgctccttcccagtttttcccgtgctctccctagaggcaaccactgtttggacttttttctaccatagattanttttacctgttttagaattttatagaaatgtaatcatatagtatataatctttatggaaagcttcttaaacttggcataatttgagatttgtctgttgttgcatgtgtcagtagtccatttgttttcatggccgagtagcatttcattgtatgactgttccacagtttgtccattctcctgttggtgatagatagctggactgtttccagtttggggctgttacaaaaaaagctgctaacaaaaaaagctgctatgaacattcttgtagaagtctttgtaaacagatgtttttatttcccttgggcaaatacctagcagtggaattgctgggtcatagagagatatgtgtttacttttataagtaactnccaaacatttttccaaagttgtaccattttacacttccaccagcagcgtatgagaattccagtagtttctcttgctcaccaacgtttattgtcgccacactccttaactttatccattctggtgactgatcatgttgtaaaaaaatctattttatagagcagttttctgtttcttgccaaattgagaggaaggcatagggatttcccattttccaccggcccccacatgtccgtagccttccatattatcagtgtcccccaccataccagagtgtggaatatttgatacaatgatgaacctaccttggcacatcattatcatccagaggccatagtttatattagtgttcattcttgctcttgcactttcatgagtttggaaaaatgaatgatgacatgtatccttaattatagcatcacatggatgctataatggagcatttctaccccagaaatctgtgctctgcctattattattcatcccccaactcctgtcaatcactgattttttactgtctccatagttttgacttttccagaatggcatataggtgcagtcatgcaatatatagccttttcagaatggctcttagcaatatatatttaagtttcctcaccaaatcattatctgaatgtaccacagtttatagatccattcacctactgaataacatcttggttgctcccactttggttacagttgccctaaactccatntncnnn

SEQ ID NO: 400244 - DNA, 993 bp, Homo sapiens
tcactcatctttatagcatagctcaattgtcacttcatgaagccttccataacctttgtagctccattaattatattcttctgagtgtttaaaacacttgccatatgaaacactatttactttggcttacattcttactatctaatcggccatttctgttactaaatctttttctcagagcacctgggatagtcttgtgtcttagtaaaatcagttgattgatttaactcggtagagtagaggctgattaaagtaaataaatctggttgatgccaacaaaattttggtcccctcaattttttgctctcattacctgcaaattctccctggccttcatatttggcaaccattgaggagaacaaggctgtaaaagtagttcatgtacttgatattctgaattggaattaagcagagttgcttaagtaggacttgcttttctgggatttcttatgcaacaaataatgtagtaactggaaatccaagttcaagacactggcagattcgatgtcttttgaggacccttggcttcatagatgatgccttctccctatatccttacatagcaaaaggggccaggcagctctggcctttttttgtaaggccaataactccagaaacctcatgacctcatcacctcccaaaggccccacctctcaatactatcacattgtgaggctaggtttcaacatatgaattgtgggagacaaaaattcagaccatagtataatatttcaagattacttaaactcttctctaccaaactcattaacttttaggttagcacagtattttcattgatattttggtttctggagttattactaattttcttgatctgatgttataattaaaaaaaaacaggactttgtacgtgaaatgagactgagataaggaagctgattcagagatggagatttaaaaaaagagagatgagagattgagatctgcagtgtcaaactgacaatagccaggagtcaggagatattaagagac

SEQ ID NO: 400245 - DNA, 462 bp, Homo sapiens
ttttattgaacctttaaaatggtaatggtttatgtaaaaacttctttatgttaaatttgtcacacattgagtaagaagagcaagttacaaaatagtatagataatacactttcccccaagctggacccatcttaaataataataataaagagaaaaccccaacctacgtgtgcatgtgtatgcatagaagaaggtagggatatacagcaaacgctttaatagtgcttacttctggcaagggacttatgttttatctttgtttttttaccttatatacctttgtgattttatttttttaagattatggacttaagtaatttttttaaaaactgataaaattttagatagagtattataaaactatgccttctcagaaatatgtaaaaatcatgtatttgttttgtattactttggctctttgtaatgttcttcttaaagagtaaaatcttttctgtttcaagg

SEQ ID NO: 400246 - DNA, 189 bp, Homo sapiens
ggcagcatatggttaaatcctgttttgtttatacattcagccactctttgttttgattaaataatttaatctatttacattaaatctaatgattggtaaataaggacttactattgccattttgttaattgttttctagttattttagagatcttttttctttcttcctctcttgtttctttcttcctc

SEQ ID NO: 400247 - DNA, 2250 bp, Homo sapiens
  misc_feature (370)..(370): n is a, c, g, or t
  misc_feature (2016)..(2016): n is a, c, g, or t
ctataaaacatcctgctatctgacccgaggctggagttattcatggcatgcaatgaatctatcccagagagaggcaaggcccagatagcattgtctctcgctgcacaggcccagctgggcaaagcgccaatgtggcgggagggaaggaggtatttctcaactcaggcaaggacttctggggaacaaccccacctccgcgtagatcctcccagatcattcgctgggtgggtcacctttacccagctgctgggctttctcatttttcatctccttggatcgtgcaacagagcagtggttctcagactaccaggcatcggaatcccgcagagggctccttcaaacacagcgtgctgggctgccacccaggtcncttccgattctagggcagggcctaagaagccgcatctcaaacaagctcccaggtggaggtgatgctgctggtcccggagcccacgctgagaatcaccacaccgggggaaccctcactcaacagaatcaaacatggcaatggctccaggtggcctgcagactgggctgaggggggactcacagcatggcacataaattgactgagttccacctgcagtgagcctccaggtgggcttcacgaaatcgccatcgcctgtggaaaggggaaggtgccacttagtgtaagctgcctgtgatctggctggcctgagctggggatgctcagatggaggaaaagcagcctgctctgcacagacctgccagcctgctcacgagaagacagtttgcttgtggaccatgagtgagcaggtgttacctcttggcttatcctgctagtctatcatgacttgagctttggggacctcacagcaaattcagggcattggtagggagctcacgagaggctgagcaggcgctgaaactcccagccaggcccttggtgtggatggcacaggaaaacagctggttttagtttggccacacactgacagttctccattgtgtgaacacttggggctttctggtgcgtgaggctagagtgaagaaagggagagggtggctgtggaccaccgaagctgaaaaatgatgtcctgtgtctacacaacgtgcaattagattactgtctgcaagaatgctgctgtttgatctggcagtggccaagccaaacccacaaggacatcccagttggctcgcaaagcagtggttcctttctctcctgtttttcttttattatgctttacagaaactctattataatggcaacagatctcgtttcaccacttgtatttcatttcaggagcttgtaagcacgttaggactgaggttttgtagaattccactattcggttgggaactaagtccttcctttctctcaaagcacatggcctttttctccgtgggtactggatggatagggatggacagagggcactattcccaagctgggtattctaggcagaaggaggtgggccatgttctggaaagacctaagctgcagagagtgcacttctcccgtggaggtgtctgcaagatagtcaggggccacaaaggtaacagcccacaagttctagccaaagagtaatatttgacttacgtaacttccccttggacttgacttcaagtggcatgtgcactacaggaaagcccattatgcataagctaagaggagggacaattagaagaagctattgggccaggggccaggagatgggctaactccctggcacagctggcctggggcttccgagtctggaaggatgcaggtgcaggtagtggagcgttgaggagctgcactcctggcggggctcctccagaggcaggcagccacacactgctctgcagcatctcatctgtgagcccctccgtggcagaatctgcgtctccgtgaaccctgcctctgccctggcccctcgagctgggctgacacagcccggtgctggttcacggtgtccaaaataaagcagagtgaatcacgcccatgttcccttttatggagctgcacctgacattcgtaaagagcccatagtgaggccgggcatggtggctcangcttgtaatcccagcactttgggaggctgaggcgggtggatcacctgaggtaaggagttcgagaccagcctggacaacatggtgaagccccatctccgctaaaaatatgaaaactagccactcgggaggctgaggcaggagaatcgcttgaactcgggaggcagaggttgcagtgagccgagattgtgccattgcattccagcctgggtgacaagagcaaaactgtctcaaaaa

SEQ ID NO: 400248 - DNA, 542 bp, Homo sapiens
ctgggggctcccggcttttctctgtctgcagtgtccatgctcgcatctcagcctgccggattcctaccctcctgccaagactagcacaaatgcagtctcctcgctgaaatctctgtggttcctgccacctgtaacccctcctttagcatttcgtcacctgtagagcgtttgtcactgttcatctggtattaaagattccacattctcatccatttcatctttgcatcccccacgaggctaagtgcagggcttggtactgtgtagatactgcttatgaatgtgtcttgtcttgtcctttttgtctgtttccatcatctgaggatccttcctctggggggttgacatgccttatttctaaaatggccgaccggatgcagggcagagccagattgcaccaggaccctgccatcgatatagtccccctcacccacccccggtgttttgaggattaaataaattaatgaattaaacgagttagtagttataaagtgttagcacctattaagcattataaaaataaatttgaaaatgaccagcaaaaa

SEQ ID NO: 400249 - DNA, 827 bp, Homo sapiens
agatcccccatacagagtagaaattaatggtgaatggcatgaggtaacttttggaggcagatggaaacattctaaaacagagttgtggtgatggttgcacaactctatgtatttgctaaaataactaaattttccagttacaatgggtgaattttaggatatgtaaattatgcctcagttaactctaaaaaagaaaagcctgtgactcgaaaagttaaggaaaaaataaaatctagggatagggctgaaagttatactcagaatgaatacgtggctttaaattcttttattattaaaaagcaaactaaaaataagtcaactctctattcaacttaataaatgaagaaaaggttaaaataaaagacataggataattaaagataaaagtacagatgaataatactgaacacaaacagaacagtcaaaagaataaatgaacttataaggagacataaccgccactgataaggaagagattaaaaggtgcattaaacaatgaccatgtactagttaacagacccccctttctaaatggacgcactgtgctaagaagctacagacgtttcatagagaaaagcaacaggcccactgagttccaagtcaacctttcaaccctatttcatggacacattccacattttattgtttctgaaatccgggtccatctcattatccctgtcataaggtggcagtgtgagggagctgcgggaaaagctgctgcaggccaccccaggaaccttcacaaagtgctggtgacaacgaatcttttaaggatggtagtttttgaagttctctattattgcttgcactaaaccttgaagaatttt

SEQ ID NO: 400250 - DNA, 334 bp, Homo sapiens
acctggaaatattgttgctaaaaatatactgcctggcttccccctcagtttctggttccctctatcttgggtggggtcaataaatacataatgctcaaacatttcttgggtggttcagatgccttttgtgagccctcttgaggcataacacaccttgttgcctttaggcttttgtacttactgtgtctggtatgtgtaccccttttactaagaataaggtgcctctgactttcccattctggatttggtactgtaggaagtcaccaccactgcagcagatcagtgtcaaattatctaaaatgtaggaagaaaaggagcacatttcaattctggc

SEQ ID NO: 400251 - DNA, 472 bp, Homo sapiens
cctttgagtcaggtctgggacagaaagtaagaacagcccagaaatcctaacagcacaaaacagaggaggggtttcacccagtgagaagttctaggtacatgagcaggactcttctcacactgacagctaattcaggatttttatgcttggtacaatggcagaaacactttttaaaaatctttttgtaggccgggtgcggtggctcacgcctgtaatcccagcactttgggaggccaaggcgggcggatcacgaggtcaggagatcgagaccatcctggctaacacggtgaaaccctgcctctactaaaaacacaaaaaattagccgggcgtggtggcgggtgcctgtagtcccagctactcgggaggctgaggcaggagaatggcgtgaacctgggaggcagaggttgcagtgagctgagatcacaccactgcactccagcctaggcgacagtgtgagactccgtctcaaaa

SEQ ID NO: 400252 - DNA, 385 bp, Homo sapiens
cttcatctaatttctcttttgcactgctagagttttgccttattgaaccccttggtgggagcagggccagtcaatcttccagtgccaggggttgtaactgatgctctcgcatttttggcaggggactggcaggggcttaatatagtcctttatccaattctcgtttttcttgcatttgaagcaagagtctttgttgtgcagattatcagaggcaagccaaatcaaccaaattccaagtggctggtgtgctccatcaattcctgcaggcctgaaataggtagcctaggaattccaaataaatagaacacatgatgacttgttggaaattcgcaggaaacaaaataactattctcagaaccaaataaaagccttccactagaaacta

SEQ ID NO: 400253 - DNA, 377 bp, Homo sapiens
aggctattatcataatcaaagacatgatcctgagttccagtgagtttccagtgaagggcaccggaaaaggttacaaagaaaaacaacttttggccgggcgtagtggctcacacctataatcccagcactttgggaggctgaggtgggcggatcacaaggtcaggaaatcaagaccatcctggctaacacggtgaaaccctgtctgtactaaaaatataaaaaattagccgggcatggtggtgggctctggtagtcccagctactctggaggctgaggcaggagaatcacttgaaccagggagacggacattgcagtgaaccgagatcatgccactgtactccagcctgggcgatggagcgagactctgtctcacaaa

SEQ ID NO: 400254 - DNA, 405 bp, Homo sapiens
cctggctaattttgtatttttagtagagatggggtttctccacgttggtcaggctggtctcgagtgtgtctattttttaaatacacaaatatcactggaagaaatagtattataatataggctgcctgtgagaaatagaactgagaagctgggagataggggaggatggagatttttccctctttatacttttgggcattttgaaatatgaacaacatgaaagtaagagtattctgaaaatgtcaagaaaatgagaggatttatacctcgagctaaaatagagggacagggacaggacttaacctcccacctaaacaaccaaaaataaccaactaaataaaacaactgtttaagacttcagacatcaggcaatgaaggacagtggtgcctgagtgataagggaca

SEQ ID NO: 400255 - DNA, 271 bp, Homo sapiens
atggtgagtagcagctataatttgagagagggtgtgcgtctagttcatgtccagaccccaatgttagagtctgatagctccaacaatgatctggatttaagattggatttaacaggaacctatgtgtaaaagatagataggctcatgacccatatttctagatatcctgcctgaccttatttcccataaagtttgtttgctaatcctgcagttattaatcttggttgtggatcagaatcactgggagaacctttgaaaatgtagattacca

SEQ ID NO: 400256 - DNA, 553 bp, Homo sapiens
tgaataacccactgcttccagactagatggctttctgtgtgaccccaagagagactcccagcctctgctgattcctatgtaaagtatgggttggaactggatggtatcgtaggttcctttagctccgtatgattctcatgtaaaattccacccagcagtcaggcaagaggtgcactggggagaggaggtggaacccccaggttgttgataaaatcctgaaatcccttggctctgtgcttcaaacagccaccttcccaacatctatgactctttgaactgctcataaagagcgctgattaatgtgacacttcacatgcccaccatgaaattaggaaggcccttagatctccttcaaacccgcggtgccggtgccttcgccccatcaatcagagatgaaactgtgattgtgctgcaaggagacgaggccatcctggagttctgccatgaaagaatcgctgggactcaaaggaggggaaaacaagggaaggagagagggggaaagggaaagagaagctgcttccagaaggaataaatttgtgtgtgtactttgatc

SEQ ID NO: 400257 - DNA, 374 bp, Homo sapiens
aacctcaccttcctcttcttcggggtcacctgggcctggtggacaggtgtcccaggtgttctaaagacctgctgctgagcagcgagtcacctgtttgttcgtcttatctgatgtcatctgagcatcgggtctgctgttttaagcccccaccccagctccctatttgacagccttccctcaggggaggggcaggggaggaccttggctcccagctgttcagggtgggcgacacccccctattatcttgcccggaccccaagttcttttgttgtcgtcttttgggcttcgggacccctgtgtgagtctctgatgcaccccatccatcctcctgggcctagacccccctggcctggagccacctcacacctggctcc

SEQ ID NO: 400258 - DNA, 470 bp, Homo sapiens
gatatcaaatagtgaagggcatgatcccttcatggagctttaggcaggtaagatataccgcatggaaaataatttatacataatataataatcctatgaagtaagtattatgctttcttaaaacaaatgaggaaaacacattcaaaaatgttaattgctgcatgtgttatagtgaaatgattgttcagccgggcgtggtggctcacaactgtaatcccagcactttgggagaccgaggtgggtggatcacctgaggtcagaagttcaagactagcctggtcaacatggtgaaaccccatctctactaaatatacaaaaaaattagccaggcatggtggcgggtgcctataatcccagctacttggggggctgaggcaggagaatcgcttgaacccaggaggcggaggttgcagtgagccgagattgcaccactgccctccagcctgggcaacaagagtgaaactttgtcc

SEQ ID NO: 400259 - DNA, 335 bp, Homo sapiens
gagaatttgagtggaagacagaaaagttacagatacagcttcccaaaagtgagtgatacttgagctgattctttaaaaatttgcctgataataagaggaacgaggacagctcagaaagtacaagtcaagaagccctgagaggggagtgaattcaggaaaccggacatttcaggtttgcctcagcattgcatgagtttgaggaacaagaaaagatgaggatggattgtgaatgatctcgaatgtgttttgaaggtttttggaggtatttggattcaccctaagaattggggggaccagtgaaggattttcagccaggagagtgacaaaagcaaatt

SEQ ID NO: 400260 - DNA, 176 bp, Homo sapiens
ccctcctgcctaggagccacacttgtgagtggagcagcctccagataattccagtgcccaatccttcaagttatggggccccagacatgaggagccctcctaactccgccctgagtgcctgatcctcagaacctgtgagcataataaaatgggcctgttctgtgtccctaaatgta

SEQ ID NO: 400261 - DNA, 547 bp, Homo sapiens
tgagctgcaaggctccattagaagagaaatgtggcatgaccctgtgggacaattgctggtccctgccctacattttcttagaggactggagcccactgtgggccatggtcaacttatgagttgaggtaaaggcctcatcctaggagtgcatgtgcttattacacatatgccaccgtgcaaagtacccagagaaaatacatgtaaattgcccatctcgagcgagttgtgctcacttccttttacaaatttgctaaaacactccttcgttttgtactggatattgctaaaacaacatttgggcctgagactcttctccaggtcattcaggtggcagtggcccagccaggctgtgaacccgggctgtgtgattccacagctcacgctctggcctgtgtgcctccttatcgtggagacatggtgttttctcattctttcctgtagccggatggaggttcattgccttgcttctgtccctcggtggagatgggcaatttacttcacacgtttcttctctggtctgcctgcaggctctcgggccagcggccgc

SEQ ID NO: 400262 - DNA, 489 bp, Homo sapiens
ctgcctttaatctctttaattttctcatttatttactgctgcctattttccaaaacactgcttctcgaatattcctggctcaaaaatcatctatgtcttcatgacatatgaaacccctagaatccagcctttccccagcttttaatatctcctaattgatttctcaattccagtgaaatgattccatttatttttttcccaaacacatcacaaatattcctaactcttgtgagcaattttctctcattcttctcaacttatctaaatcctaacttttcaaaagatctagctcaagttctgtcttatcatattttgagttcctttctttggcattgtattattttgtatctttccatgtacacatgtgtgcattatctccctgataaaactaactggctagaggataggagtaaagactcaattctaatatccttgttacctaataatacacaaacgtgaaacatgtttgaataaatcactgttaaataa

SEQ ID NO: 400263 - DNA, 1310 bp, Homo sapiens
attggtgcaaggcaaagtgtgaactttgtcaagggaaggttattttaagggaaaatacaacagagctccagctgaaaatagtcacagggcttcatatatcacttgggctacaaattatgtatcgcatttgtcaacctgccaggctgtttcttgatttcagaggtggctggtgttggctaatactgactgtctcactctgactgcatcttcctcatagaaggacttctatttttgaccctcatcctccacagagaagcctggtaattttcagtcaagtacttggattaagggctttatcgaaaattactaggcctcaaccaaacacaataagacagacaattcagagcatcttcagaaaagaacactggtctgccatgataaaaccaaacagaaggcttttggggcacactcaggcgggcggcaagaatggaatggaaaaagagcaaggagtcattattagctcgggaaggaggaaacgtaaaagaatgaaaatggaaacagatggaaatgacattttgcagagagaaagaaaaagattaagaaaccaagagctaggctgaaagacattcaaaactttaaaaaacggtggaaaggcaaaaacagaagaatgattccgtggggaagaaatacagaaagataacagaacatcattcaaaagcccgtgtccaatataaaacagcagcaaatccattttgccttgctggtttccaagcacaaaggcagagaaactttaatatcacccgattcccgtctctccctgcccccgcccactctcccggggagcacagagagatgccatcgcagggggcctgggatggggacccctgctcccttaacagcctgctcagccttgtccagaggcaagcttgtcctggattctggaagcccctatttcccgtaggaagctgtagacatttcaaacagtgaatgagctctagggtgtatatccttcccacagagtaagtacgtaatgaagatttccttaattgcatatggaaagccagactgacgtcccacctggcttccattttatcatcttgcaagccccggtaatcactggtctccaagcttaactgaggtcttaagtctccttaccccaatacatttgtaaaactggaattgcgttgtttcccctaaaatgaaatacatgtaagatcgaaccaaggaaattcttgtaaacactccaagggctgtgggcacacgctcaggacgtgagcctggtgcacgtggcgctctcagtcaggtcggtaagttctgtggatgctgacggccctccctgcatgcttgtctgcccgttcggtcacttaata

SEQ ID NO: 400264 - DNA, 498 bp, Homo sapiens
tccatctttgtcatccacgttgtcaactggaaggcaaaaaacccttccaaccattgagagaaaataaaaaaggccactggctttcacaaggcaatttcctctgtcggcaaggaaagaaaaagccatttaggtgtggcccagaaccggggaactctttctgtctgggcgtgtgaagctgtgggattccagttctgggataaagtgcatcatcgaaagggtccattcttcagcgactgcccctctttgttctgctcgggcaccccgaggaagccccatgggaagtctctgtgactccacccactgagcggctacagcagagacgtggcatggagagtgtttgccttggccaaggatgaagatatttctccctagggtggtggatcgtgggctttaacttcagaaggacctgatttctagctttccctgtagcactgatgaatcagttaactgttccgagtcttcacgtggccatcttcagaataaagacactgatgacac

SEQ ID NO: 400265 - DNA, 460 bp, Homo sapiens
agacaggcttttcaaatttgaatgtctcgtcacaagggataatattaagctgtttctaaactgttcttaggaatgcaatggataggatgtgtaagattcatctagtgctgttaaatagcttgttatctaataggtgagcatgagttttaaatattttacaaacctaatattttagtaattcattgagggaagatactcctactgcaagagtcatcattgatccacagacgaaatacaggtctacaaacccttaaccacgattctaaattccaaaaaattttgaaaaccaaaatattttttaaaatataacttgttcagtgcctgtattggaactggccttgaacatatgtagaaattcggtaggtagagactaaaaaggtagaaaaacaggcattttaggtagatactacatcttaagacccagatataggaaatgcaaaagtatttatttcggcatctc

SEQ ID NO: 400266 - DNA, 692 bp, Homo sapiens
gtgcaagctataagccttggcagtttctatgtgatattaagcctgaaggtaaacagaatgtaagagctgtggcttagtagcctcctcctagatttcagaggatgtatggaaaagcctggatgttcaggaagaagcctactgcagggaggagccctcatgaataacttctactagggcagtgctaaggaaaatgtggggttggaacccccacacacagtccccactagggcactgcctagtcgagctgtgagaagagttccacagtcctccagaacccagaatggaagatcaaccagcagcttgcactatgaatgtggaaaagccataggaactcaacatcagccctgatatcagccttggtggcttaaatctgcagtcacaggaacagagctgcccaaagccttgggagctcaaccctggtattaatgtgccctggatgtgagacatggagtcaaaagagattattttaaagccttatgatttaataactgccctgctgggttttagattagtatggggcctgtagccccctttttttgtttgatttctctgttttggaatgggagtatctacccaatactcatactcccattgtatcttagaggtaacaaactttttttgtttgtttgttttacaggctcataggtagaaggtacttgccttgtctcatttgagactttggacctgccttt

SEQ ID NO: 400267 - DNA, 334 bp, Homo sapiens
gggcttattcgaagtaacttggccagtcccttaggtataggcccagctcattcacaggttggagtggaggcacatttagcaatggtaggggtgatacagaaaagacagttgtaatgaaggtcttgggacacaccttaatactgtcaccaaatgtccccagggcatcaacttgcactagcatgcccaccatgggtgcacagtcagtgtctcacgaggcatgcctctcctctctagactgcaagctcatgtctggacttggctaaacctctttcttccatgtttcaaagtgttacgttcattttatgtgtgttataaaatattatgaactgataag

SEQ ID NO: 400268 - DNA, 1180 bp, Homo sapiens
cgcagtggctaacgcctgtaatcccagcactttggaaggctgaggtggacagatcacctgaggtcaggagttcgagaccagcctggccaatatggtgaaaccctgtctctacaaaaacacaaaaattagccaggcatgatggcgcatgcctgtaatcctagctactcgggaggctgaggctggagaatcgcttcaacccgggaggcggaggttgcagtgagccgagatcgcgccattgcactccagcctgggtgacagaacaagactccgtctcaaaaaacaaaacaaaaaaaattctcatggaatactctgtatggttttaagaaattccctgaaaacttactatagagtaataatgtaatctaacagcaaacataatgtataataatattacattatatttatagatctaacttaacagatctataaatattagctaatattatgactcttctgttatttggcttctttctattctactttctcagtgcttttatttgtttaattcaggcccttgttttgacactaagtttttgcatttttttttaccttgccaattatgctctttgtataaaacacagttacacaatattgttactgttatcaaaactaataacttttagaactagagcatatcttaaaaatttatcagggcctttatttcacaagttaagaaattccaacaatgaaagtgaaagacagtgcttgccaaaaagcactcctgtggagaattagagaagagaaggaaatggactgcccgggaaaagattctaacacgaaaataacggtagggggcattccaggccctattcagagtaagtttagtgaagagtgagagaccagtggcgtgaagaggaagaaaaggagaaaataacatgtgagaattttggttggggaagctttttcgaattacaaatgtccttaccaaatacaagctgagatcactgacacaaacatattggcagacaagtatttcaaaacctaatgagacgttaaatagcactttagttgtctgatagatcttacaagaaaaataaagatggtcagaagattaaataactataactgatcattgcttttaaaaataagaaatgttccttccgtatatgtaattacccattacaatactacccaagtgttccttctattttctctacaggatattttcaaagaataggga

SEQ ID NO: 400269 - DNA, 353 bp, Homo sapiens
gactagcaatgaacagtgaatctttctgccgcggttattattattattttttaatttataaagaaaagaggctgggcacagtggctcactcctgcaattccagcactttgggaggccgaggcgggcagatcacctgaggtcaggagttcaagaccagcctggccaacatggtgaaacctcgtctctaataaaaatacaaaaattagccaggtgtggtggtgggcacctgtaatcccagctactcgggaggctgaggcaggagaatcacttaagccggggaggcagaggtagcagtgagctgagattgcaccgctgcactccaacctgggtgacagagtgagactccgtttcaa

SEQ ID NO: 400270 - DNA, 861 bp, Homo sapiens
caccccacacccctagcccagggtctcttcatcgatagggggtgatctgtctgcccctcactgttttctccaaatagatcaaaacctaaaaaggtgggaatgaaagaagctcctaaccctcctggcttttttcccaaagccaggaggcagctcctgaatggtggattttggactactggtgaggctgtcagcaaagggcctggcccagagagatgctcaagagtaggatgaaaagaccgtgggcttcttcctctgcaaaaggaaaggtttgggactgatggatgctgaaaagtctagatcttcataatcctcaacagcttcactgccactgcacacacaaaatgagtgtgccctatatttccagccctctgatgaatacgaaaagagcctgaagaactcatcttcctggtcgcaaagtactttaaaatatataatccctcaatcttaaacatacacattttattgctttttattatacaataatacatatttactattgaaaatacagataagaaaaaagaaaatggttcataataatactacccaggtttaaaaaatactattcagccttatgttgaagaatctgactcttttcctatgcaagcatgtatttcaagcaaaactggacacttcatgtgtaccttgttttgtgatctttttttcccaaattaatatataatcaatatctttttgtatcaatcttcaatcctttcttctgtcacttatttttaatggttaacagtcatctactatatagatattctgtaatttattaaagtgatccctcattcttgaaaacataacctccccaacgcatgcatgccaattcctcaccccccgccccccacttttcgaccaccc

SEQ ID NO: 400271 - DNA, 806 bp, Homo sapiens
caccccacacccctagcccagggtctcttcatcgatagggggtgatctgtctgcccctcactgttttctccaaatagagataagatctcactatattgccctggctggtctcaaactcccgtgttcaagtcatctgcctgcctcgacctcctaaagggcaagcgggattacagccttctccacagcccagccacagtgagggagtcatcagcactggaacccggggtccacggccttggaggatccggaccctccgcatttgaggaacttggccttcagtcagggagccaagaagtccctgccaatcaaggagggggtgtgggctggtggggggggggcagccttggggcacgggagctgatagaccagactcaagagttctactcctgacttctagattgttccacctccatatggaatatgttccttccatctaacactgtgtgatttggggaccatccaactcaaatgaaagaagccaagccatgcagcgagccaccccctccccaatgtggggtaccccctgcccccgcccagctcccctgccctcccagctgaggggggatcgccgcctggtgatctcagcctcccctccaagtgggctgtgaagtgtctaatccaggctttcatctggcatccacaattataatgtcaagattgaataatctgcctttatctcccgggtgacagccatgtagaaacttcaaaagaaacagttttgctggcatctaacggcttttgttaattactatatcccaaagaaaatgaaataaaggagggagaaaaatgatatttctctgtgacaa

SEQ ID NO: 400272 - DNA, 517 bp, Homo sapiens
agtcttccatttagctttagaataaccgtatgaaagagctactttttgtttttgcaaaccagtttttaacaccaattagtttgaaggcaggtttgctgtgtgacatttttgtaccacagaatcaaattaggcagttaagattcaggtttctttaaaccaagttagtaactaatctcacaggtttaatacattttttcccacaaaatacataatttgtatggattttgtgaaccatacaatagaacctaaatttattcaatgtagattgaagttttggttttgtaaaatgtatccactgtgtctaatcagaaaaaaaagtttacttttgcttctgtatcagacaactaagtgatttatttaccaaagctaattagagcagtagctggtgaaaatgggtacttagaagacattgttgtcgttaaaagttacttttctttaagcagcggttttacttgtgtatcatttgcttatcttgttacatgtttgttcttcatttttaaaagtatctttggaagca

SEQ ID NO: 400273 - DNA, 498 bp, Homo sapiens
ttttcctctcctatatttaggcactataagcatttctgctgtatacctgtcttcagggtttatgactaaggcatataaatctattctcatccaacctggatatatcaagattgttgttttctgactgaaaattacaattttaattctgtatttgtcttccttcccttatcatagccataagaaaatatttagacttaaaaattcctatgcgaggccgtgcgcagtcactgacacctgtaatcccagcactttggcaggctgaggcaggcagatcacctgaggtcaggagttcgagaccagcctggccaacatgataaaaccctgtctctactaaaaatacaaaaattaaccaggcatggtggcgtgcgcctgtagtcctagctactcaggaggctgaggcagagaattgcttgaacctagtaggcggaggttgcagtgagccgagatggcaccactgctctccagcctgggcaacagagtgagaccctgtctcaaaaa

SEQ ID NO: 400274 - DNA, 824 bp, Homo sapiens
acggtggaggtggcgccaaggcccagcagtggagctggagataactggatggcttggagatggggtttggaaatagagtcattcagaactggtgatggattgagtgtgggctgggagagacagggagacattgagaataactcccaggtttctggcttaagtcattacatggcatgtgatgccattttctgtgtacttttgtagtgaatacgaattacttgttcaattaaaaaagtaaaataagtttggatttgcagatgaagaaggctttggtgaccaaacaaacaaaaccaaagcagttgcagtgaaagtgaagaggtggagatagttgctacagactactgcagttctgcatcttcaaagaagccagaaagtagcaggcaaggtagggtcgggctgtaggacaaggacatgtgttttgtttacagagtaggatagatgtgagcaactttcattgggagagagagctagaccatagagggaagagaaggcattcgttaactcaacaaatatttgaatgtctgtatgacaggcaatactctaagctcttggaacatacaaaacataaaaaacattcctgtcttctggagcttaatgttctaaagtggggacactgaaaatcaaatcatgtgccgagtgcactgtaaaaagaaaaaaaaagcctattaatggggagatctagggatgttgaggtgggacggccagaaggatgtaattttatgttgtgggtggcactgatggatttgatgccactagaatgcaagatatgccagggcagagattttagttttactcactgctgcatctccagtttagaatggtgc

SEQ ID NO: 400275 - DNA, 780 bp, Homo sapiens
attttatggatgccatttctgcaggctactggtactaggagaacttaacaaacggtgccaggaatgtttgctgcgtttgctcagctattcaggttgatttcctggggtccttgctacaggagattccagtttagaggtgatcctcctgggctgaggtctcttatgaggtctctatccctctaaatctttgttcaaagcttacctctcttaattaggtccacccagacaaccctattcatactcaaacctgctccagaatcccttgtgttactgatcctcctatttctgctgtattgctaaatcagtgaattattttttgttaactacaagtggaatgcaagctctataaggacagaggttttggtattttatttcactgatgtatctaacacagtgcctgaagctccagtaaatgtgtggaataaataaaggaatgggtgcatctttgttaaggcactttatttcactgatatagaaatctcatcttctgaatgggaatgattatttttgttttcaggacctgttacctgcatagtcaaaaatggttcagtgcaagtccagttcatgttgggtgagacccaaggaggtttgctttacatatacaggcatacttttgagatgttgtgggtttgtttccacaccaatgcaataaagtgaatatggtaatgaagcaagtcgcaggaattttttttcccaatacatataaatgtagcctattaagtgtgcaatagcattatgcctaaataatgtacatttcttaattaaaaatactctattgct

SEQ ID NO: 400276 - DNA, 597 bp, Homo sapiens
taaacagatggaattaataggcatatatcttttaaaatttttgctaaatataaatgcagtgagatagcatgtggtctatgtgacaaaaccctgggctataggagtgcagtgggaagaatcaacacttctttgtaatatcagagaaaacctctagttttggaggtgacaatgaagcccttgtcttcttttgattttgtttttctatctacagagtttggaaacactgtaatgctagatgacagtcccatacttcccataggtgcttagtatatgttagtgatcctgtgaacattaaggtagatgaagcattttgaactcaccaggagagtctgttgttataagtgctgagatttgtaatgcttatcccccctgagataaacccaagtaggaaagctatggagatggtttgttgggttttaattccatcttaatttagttgagatactcaaattagtcatttagtctccctttgcttgagtcatttcactagtgggataggattagtagtatttattcgcggcaatttacagcatactgaaatataacaaatcaagttccaaatctcactctacagggatttctctccaagatgaaaat

SEQ ID NO: 400277 - DNA, 2497 bp, Homo sapiens
  misc_feature (972)..(972): n is a, c, g, or t
gcagaccacgttagaacctcggctcctggagtagcagaacctcggcttcaatgggaccctcatttcataaatgaagaaactgagattcaaagaggggaactaccgaaggttacagagcgagttcgtggatggggaaactgagcctcacatgtatgaattccagcatataagcaacagactccagatttggacatgtatatcttattccaggcttcccagatgaccaccaaggtggaagggatgatgatgtccaggcagaagggagctaggccggcccaggcttttcctctaggcacagcggactccaggttcagccttcccggatggtaatgttgcattctgaagagctactttcccgccaactcatctctggacttctctggggcccaactctggtttcctgcctgcaggaggtcccctctgacttccgacagtagatgacccttctgactcacagttctactgctgggaaatgcctccagagctgctgcccaccctctctgcatccctccaggtcactgggtgttgagtcaggggaagcagggatacacacgggcgggaaactcaggtctcctaaatgtcagagcctcaggacttcggctactcagaagtagctccctcctgggccaccagggagcagcagggcagccagcatccagacatcccccctgggttctgctgctcagaggctagatggagaaccaaggtgggaaaaaggcttaaaccacagcgtggggagatttaggttagatgggtcagaggaagtttaggacaagccttgcccttttcagtttctgtccagcttcagcacagccactgcttcctctctttggtttttacccatccccctctctcccatcacctctatccccttccagctttcctttccttccctccttcccaaaccccagagtttctcaggattagctgcccgtgtgcctatctcccccacccccatgctttcctcactgnctcacagaaacaggcaaacacacacacatgcatacaaccatgagctggccctgagagttctctgactggactggggttggagccccagctcttgtcctgagctgaggcccttcccccaggtatcttggggcttccatcatttctcttgacaggagctgtgggcgtctgggcagatgggaacctgggggaggtgtggggagccctctctgaggcaggaagctcccacgctactgtagttaaaataatccggcagcaacttggggcagccatctgggatgcccagatcttccaggacacccagctctcaacaacaaccctataggaacaaatcaaaaacctaagagatacttataggccctggaaatgtctcccaaaagtggcctgaacttgagccctgtttccttttatcttcttcaggttagcactgggcattggcatttgcaaaaaaactctaagcattaagcaaaacttgtaggagtggaagatacagcgttctggacctccagtcctaatacccagccacaccccagcagctatgcatggttccatgggagagcaggcatagcccatcctgctggcatatagtccagccatatcttccaatgcccacctggagactaagccgagttctgcccagcaacaggagctcagagctccagagagcctctcctggggtgcagactcaggagatcttagctcaggagcagacttagcctgacttcctcttttataggaggagacagacttagttacagaggaaaccagagttgttataaatagcaaggaagggagaaacctgctatggattacaaacacgccatcaatcttaaaacaaactatttttagtttcaaataataacgagagtctaattaatgctctgtataacttcaaatgtgggatctttatctgcctttctactttgtgatgctttctaatacagtattagggccaaaggcaggaagagatgtgggcaattctcaatgttaccaaatcctagatatggaaagaacctgagaaatttagtccagccctttcattttcagtgaagaaactcaggcccagagaggtaaaaggacttgtccaaagttgcatagtaaggtagggactgagcagtgactaaaagcctagtccctgtactccagaagcaggacagtttccacagcagcacaatagaacccaaaggctaaacatctgtggttgggcagttggtgagtttatagcctggataaaagtcaggtctaagccaggtgtggaggctcacgcctgtaatcccagcactttgggaggctaaggcaggtgaatcacttgaggccaggagtttgagaccaacctggccaacatggcaaaacctcatctctactaaaaagtacaaaaattagccagatgtgacggcacatgcctgtaatcccagctactcaggaggctgaggcacgagaatcggttgaacccgggaggtggagatttcagtgagccgagatcgcactactgcacttcaacctgggggacaaagcaagactctgtctc

SEQ ID NO: 400278 - DNA, 319 bp, Homo sapiens
gccagagggatctttgtggtgacgggacagttctgtatcttgattgtggtggtggttatacaaatctacgtgtaataaagttttatgtgtgcatagaactatgtacatactcaaacaaatgcatgtaaccctggtgaaatctgaataaggtctgtggattgtgccaataccagtgacctggttttgatactgtattatagctatctaagacattattatcaggagaaaatgggggaaaggtacatgtacttttctgtactatttttgcaacttctcgtgaatctgttactatttcaaaattaaaagtatctgaaaatcc

SEQ ID NO: 400279 - DNA, 400 bp, Homo sapiens
tgggaggatggcttaaacctgggcggtctaaactgccccattgaaacttctctgttttcttacatctgttttcttctctgttttcttacatgcagtgagacgagatcatgcctctgtactccagcctgggtgacagagcaagaccctgtctcaaaaagaaaagaaaataaacagaattgttccactgacaagccagagaacatcacttccccagagattgtgtcccaccaaattacaaaatgcttttgcaaccaccagcacagaacatcccatagaaagcattaaatgacagtgggccagccagatgcggtggtacacacctgtattcccagcactttgggagcctgaggagggaggatcacaaggtcaggagtttgagaccagcctggccagtgtgatg

SEQ ID NO: 400280 - DNA, 629 bp, Homo sapiens
cacaagcctgtaatcccagctactcgggaggctgaggcaggagaattgcttgaacctgggaggtggaggttgcagtgagcccagatctcgccactgtactccagcctgggtgatagagcaagactccatctcgacaaacaacaacaacaacaataacaaaaaaagagtgaaccatatgaggtccagattgaaggctaagaccaacttcacatcaatttctggtctcctggctctcaggccagggctgtttgcaccaggtggattgcgctacttccttaacacctattctgcaggcagataggtacagtcattggctccagcctttcttcctggagggcttcctcctgtccttcaactttgaattccttcccatctttagaatctagtgcaattcccacatagcttcttcatgaagtgtttcccaattattccagctacaagtccttgctctaagttttgctggcattcattttcttcacaaactgtaattgactttctctttatgaaatttaacctttcccatgtctctccaactagacttgtagttccttggggcccagccccagctattgctcaggaccaggcacataagagctactcaataaatatttattgatggatacatttaa

SEQ ID NO: 400281 - DNA, 356 bp, Homo sapiens
caaataagcacatgaaaagatgttcagcatcattaatcatttgggaaatgcaagttaaaatcataatgagatactacttatatatccatcagggagggtatccttaaaaaaaactggtaataccaagtgtttgtgaagatggagagaaactggaatggctatttcttataaaggtaacacctaccttcttataaagaaaggtacacttaccatacgactctgcaatcccacttaaaggtatttatgccagtgaaataaaaacctgtgtccacacaaaatcctgtacacgagagttaaaagtagctttattcataattgccaaaagctggaaacaactcaaatctcaaatgtctttc

SEQ ID NO: 400282 - DNA, 1196 bp, Homo sapiens
ggtgaccgggccgcggcgtgtttcacaagtcgctcgctcgctcatccactcgggcggcggccgggcctcaggcgctgcgacccttttcccgctcctcccaggctgacgcgcccgtctcggcgccgccctcctcggcaccgactgaggcgctggcccgggagcggatcgcggggccgcggtggctgagtcacattcccggagccccgccacccaggacaccgcggccccggcccccagcgagcccggcggacccagcggctctgaacgcggacgcacagccttgttctttcacagccgccctttacctcactcccatggaaaccccaggtgttttcccaagctgggggcttttagtgagttcaagattcaagcctaagtcgtattaaaaattgctggctaggccgggcgcggtggctcacgcctgtaatctcagcgctttgggagcccaaggcaggaggatcacttgagcccaggagttccagaccagcctgagtacatagctgggactacaggcacacgccaccatgcccagctaattttgtatttttagtagagatggggtttcaccatgttggccaggatggtcttgatctgttgacctcgtgattcacctcaggtgatccacctgcatcagcctcccaaagtgctgggattataggcatgagccactgtgccaggccaaaaaaggctttttaaggtatgacatcaaaagcattagtgacaaaagaaaaaaaacagataaattgaacttcatcaaaattaagatactttgtgcttcaaaagatgccattaaaaaaaaaaaagaccacctacagaatgggagaatatgtttgcaaattatatatctgataaatgacttctatctagaatatataaagaatgcttacaacttcatactaagaaagcaaatacccaattaaaaaataggtgacggatctgattagctacttctccaaacaagatgcccaaatggctaataagcacatgaaaaaatgctcaccattcttagtcatcaaagaatgcaaatcaaaatatgagatagtattatacttcacacgcactgggatggctgtaatcgaaaagacagatgataacaagtattggagaggaggtgaagaatttagaaacagtctggtggttttccaaaagataaacatagagtcatcatataacctaacaattccaatcctagatat

SEQ ID NO: 400283 - DNA, 693 bp, Homo sapiens
ggtgaccgggccgcggcgtgtttcacaagtcgctcgctcgctcatccactcgggcggcggccgggcctcaggcgctgcgacccttttcccgctcctcccaggctgacgcgcccgtctcggcgccgccctcctcggcaccgactgaggcgctggcccgggagcggatcgcggggccgcggtggctgagtcacattcccggagccccgccacccaggacaccgcggccccggcccccagcgagcccggcggacccagcggctctgaacgcggacgcacagccttgttctttcacagccgccctttacctcactcccatggaaaccccaggtgttttcccaagctgggggcttttagtgagttcaagattcaagcctaagtcgtattaaaaattgctggctaggccgggcgcggtggctcacgcctgtaatctcagcgctttgggagcccaaggcaggaggatcacttgagcccaggagttccagaccagcctgagtacatagcgagacccacgtctccacaaaaataaaataaaataaaataaatagtggagcatggtggcccgcgcctgtagtcccagctactcgggaggctgaggtgggagaatcgcttgaggccgggaggtgaaggttgcggtaagccgagatcgcgccattgcactccatcctgggcgactgagtgagaccctgcctaaaa

SEQ ID NO: 400284 - DNA, 455 bp, Homo sapiens
attcagagctgcacagctagtgcaaacttttcttcaatatttctacataaatcctccttcctgactcacgttccattctgactatgaaaaatcaataagaccttgaccttgttgctttcatgtttcatgcactaattcataactagaattaaactccccccaaaaaagtcaatcaccgtgaacgggagccaggactagaatgcacctctagacagagcagccggcagcggctcgcattgtgaattttagctccagattgactacaagagcaaactaacaatcccaagaggacacacagaccctctgacggaagtggactgctcctgcaggacctgggagacaccgcaaatactgtgagcgccccaactgcggaagcgggctgtttgcctgagaaatttctgactttacctggagctgagtcaattaggagagccaagggaaatacagaggtagag

SEQ ID NO: 400285 - DNA, 744 bp, Homo sapiens
caaatcacctgtcaactaaggacctgtatttggaatacacagagaactcttaaaactcaacagtaagaaaacagtccaactaaaaagtggaaaagacctgatcagacatgcaccagcaatgacacagcattgactgttgggcacaggagaagaggcttgacaccaccagccaccaggaaatgcagattcagccaccacgcaggacacgaggcacctgcaccacagccgcagtgcaagagaatgctggtggtgccccaagctgccagggtgtggacctgctggaaatggaagacggcatggtggtttcctataaagttcaatgtacacagccacatgacccagcaatcccactgttgggtatttagagaatgaaaaacttaagtccacataaaaactgtacgtaaatgtttactgatgccttattcataatcatcaaaagctgaaattcaaatgcctttcattgggtgaactggtaaactgtggtatatctatgcagtgaaatactcctctgcagtgacaatggggagagactgacacattgggcaccatgggggtgggaagaggtgaaggaaggttgggggaaggcgccgtggtcaggtgtggcactaaggagatttgggggtggagccattctgtgtgtggactgtggtggtggtcgcgtgactgtacatgtgttaaagcttcaaacaaaaaagttaaaaattttagtttaaaatattaaaacatttttaaaaatgaaacgta

SEQ ID NO: 400286 - DNA, 435 bp, Homo sapiens
gctacctcaggatactgagaggtgctgctttccagctagagaaaggagtgataagcagttagcagctttgctaaatttgtttcacagtccttccaaacagctacatactgtacaatttttctctgacagtgccgcctcgctccagagaaaagtatgctgatatactttggaaagattttcaataaaaagggctttctaaataacttttagtttaaccaggaaatcattcaaccagaacccccttcccccaagtattctagttagtcaaagttttactgaaacatgtcagcattgaaaaatgcaaaaggcagctaagtaggtctgactaaaaaggtgtaagaaatcccacatctgtgcacagagcagcagtgtcgagtctcttcaactgttaggcatttcaaacctgccatctccaatgcacgactagtggaaaaa

SEQ ID NO: 400287 - DNA, 421 bp, Homo sapiens
ctaggctggtctctagctcctggcctcaaacagtcctgcttccttggcctccaaaagtgctgcgatcacagacgttagccagtgcacctggctagcaacttaatttgttatggtttgcttttttcccccagcgcttgttttcttttctttctagctgttttttatttccttttcaatttaaaagagtgaattcaacattccagctgaagacaatgtgatagccatgaagtctttgtgtgagaaagttaagagggaagttagtctactacagagatcagtagtgaagaggggcccagtgggatggctcacacctgtaaccccagcactttgggaggctgaggcaggtggatggcttgatctcaggagttcaagaccagcctgggcaacataagtgagatgccatctcaattgtgaaaaatca

SEQ ID NO: 400288 - DNA, 449 bp, Homo sapiens
taaggggctcttgcgttagtacagataagagatgaagatggtttgggctagggtttaccagtggagggagagagacggactaagcagaactggcagcatacttgctaatgaattaaaaggggatgagaggggaatgtgggaatggaaaaataaaagaaagaaaataattaagaaatgactacaaggtttgtggcttccatagcaaatagtgacactggtagtgacttttactttgacagcaaacaaaaaatcctgatcagaagcagtaaatactttccataaagttaaatagattagcaaggcaaataagatgctaaactttaaaagtataccaagctctgaaaaatagtttctcaatggtgaggtgcccacaatattttgctattattctaagtaagtgctttaaggacctgagctactgcatatttacagaatgctggcagccttca

SEQ ID NO: 400289 - DNA, 522 bp, Homo sapiens
tgagagatgatttttaaaaattaattatttacaatttaaagaaatgcaaattgctgaagagaagaagtttgataagttactgatagagagcaagtgttcaacaaataaactgaattgagcagaatggtcttttaaaaagctatgtgttctgggcaaatgtaaactggttaaagtaaaataaggcatttcactacattgttctttgggcataaagaacttaatgagctttaaaaatatgtctgattgctgggcatggtagctcacgcctgtaatcccagcactttgggaggctgaggtgggcagatcacttgaggtcaggagttcaagaccagcctggccaacatagtgaaaccttgtctttactaaaaatataaaaattaggcaggcatggtggcatacgcctgtaatcccagctactcaggaacctgaggtgggaaaactgaacctgaggggtggaggttgcagtgagcggagatagtgccactgcactctggcctgggcgatacagtgagactctgcctc

SEQ ID NO: 400290 - DNA, 447 bp, Homo sapiens
atggaagatcgctgacttgctaactgttagttggagtctggcctcttggacaagtgcttgatacaaatccagtggaaaccaactgcagtagcttgtcttggagacagtaactggcagcctctgactaaaatatctccatctcctcctctctgagcagcgtagacacccaattctgttgggaagtgaatggaaaataatatgggctctttcccttctttggattaaattcccatcgagctatttcccaaggctttaggccttccagtcaaatctggcttggaaatttgatgtaagaattcacttggacactcacttcagcaacatgattcaatttaggattatatgcacataagaaaaatctgcacagaagtgaccagcaggtcaaaaaccagagaagaaaaaatgttgaaaaatgccagttaataaagttagttttggtaagaacta

SEQ ID NO: 400291 - DNA, 875 bp, Homo sapiens
tgtctaaaataaatttctaacaatgtatcctttaatagttagactcatactttattttgacaaatttaagatagaaaaatatcataatgtgaatatagcagttgctctttttgtaacatggtttgggatgtgcagtgaaacttgaaaggacttgctttacaggtggtccctcttctggctgggtttcagttaattctgaattatattccagccattgcatttgcttgaaagaatattggacacagtaaaaaaaagaacaggtttggcattcaataataaatattataaagcaatgaaccaaaacaacttttaaaataattactgaaagcaaacttcagacttcatgattaaagctaagaactcatattttcaaaatagctttaacagtttctatcaatatataatacaataataggacacttatttttaaaaaacaagtgagtagaatcagagtaaatatgatatttcagatgactataaacagtaaacatcaattcaatatatttatatatcatttcagcaatatactctttgcccagctggcgataaaaactgtagttctatcatcaaaaaatgcatccctgaatgtcatctttgaacttactaagtgctgtcatcatttctacactccatctttggagggggtggcttagggactcttggtacatgcagatatttagttatggttataatgacaaaaagtaaatgtgccaggagtctgaagcagaaacgttgccttactttgttaagtagcttcacattcttttgtctctgtgatgcctcaggtgaagtcacactaaataattcacacaggtgctaattttgttgctctgtgtcagtacctttcagcttctttcttttcttcccttccccac

SEQ ID NO: 400292 - DNA, 727 bp, Homo sapiens
ggggagctactgtatttagatggtccctgacttactatggctcaacttaaaatttttcacccttactgtgagtttattagagtattaaatgcatttttgacttactatatttttggcttacagtggctttattgggacataaccccattgtaggtcaaggagcatctgtatatatattaattcaaatagaagtaaattaatgaaaaagagtcaccgctttgtaatacagtacaagttataaaaactgcatgcatgatccatagtaccccagtaagaatgatcccttattcttacatgaagtaattatagattttaaagtgttcacttacatgaagtaactatagattttaaagtgttcagtctcaggacttttttttttttggcccaggctggaatgcagtggtgcaatcacagctcactatagccttgacttcctgggctcaagcaatcctcttgtctcagcctcttgagtagctggtactacaggtgagtgccaccatgtctggctaatattttatttttaatttttagtagagacagggtcttgctccgttgcccaggctggtctccaactcctggcctcaagcagtcctcccatctcagcctcctaaagctctggtattacaggtgcgaagcactgtgcctagccaggattctttttttaaagatccaattcaagcttttcttcattttcttaggcagttgtcagttgattcagcctctgatc

SEQ ID NO: 400293 - DNA, 344 bp, Homo sapiens
cagaagtgaaacatctctaccgtttgaaacccgaaacttcggcagaattaaatcttcatgctccagagctgcttataacaactgatgcaaaagacaggcgatcaagtgcccccgcgagcagtgcccagccaggctgggccgcgaacgcttccaggaccagcgcctgcagaatggaatgcacgcttttttcttcctggtctttctgggggtggatatctctgcaagccaacccacacatttttttaatctccggtaacaagcagaaagacacctggactattatgctgtaaaactattttttataaagacattttaggaccagacattaaaagttattagattga

SEQ ID NO: 400294 - DNA, 232 bp, Homo sapiens
gtaaggcttaggaggtgagaaaaaaaggaaaaactcatctttataaaagaatgccaattaataaataaataaggcataaatttttaaaatcatcattttgcatcttccaattctgaaactgaatcgggcaagaatcaaaaatggaatgagccgggagcagtgcctcacacctatatcccagcactttgagaggcagaggcggatggatggcttcagcccaggagtttgagac

SEQ ID NO: 400295 - DNA, 572 bp, Homo sapiens
ttgacataatgcctcactgcctgagatcccatgagctttcttcccaaccctgttaggtggtccttggaccactaagaactatgtggttatggcccattgtctcctctttcccttcagtaaggaccatgttttacccagtctagcctgagactgaatgtatcctattaaaagtgtgtgttgaatgagggtgctccaggtctcagaaggcggtggggttaattactgctctgagcttaagcagggcagccagaaggatgtttttcaaaaagattatgattatgggccttctggttagaatactttgggcatcagacaggggtagcaacccaaatttggggaaggaagagaataaaatgacaagaatctcaaattggataagtatatacacaaaagccgccttctttccctctataatctctgttcctttcagtatatcctgggtgttcagtgaaccaaaaaatatacttacagtttttctctgtgcacttgcaagaaggcgaggatacttctaaccaaaatagcctttcccaggaacacctgtcagcaatgattttttttaaaaaacaaattga

SEQ ID NO: 400296 - DNA, 406 bp, Homo sapiens
ctcaacaactagtagtttttttcattctttccaggaaatcacatagaagaaaagaaaatgtgtaaaaatacattgcgtttatctgggttagggtttagaaagacaaaaagaactttggatatattcacaatagaaagagagttagtcaaacactgaaaagacattcctgtcagatcacctgcctcttcggttcactaagacacagacacatcaataagtagcaaaggatccatgcccttcttgactaggagagcaaaacctaattctctagctattctttgcctgattgacaatttttaaaaagatgaaccttcaatgattttgcaagttcctaagatccagcaaacaggtcaaaatacagatgacacagtgagtagtggtgccatcgtggtagtgtaaaatcctg

SEQ ID NO: 400297 - DNA, 1025 bp, Homo sapiens
ataaaacatctatttcaatatgtctgcaaaccaggagaaaacataatttataagttaccatttacaagacttcaagacataaatgatagggaagagcttcatagagaaaaacaaaattgtattgagatataccaaagaaagtgtataaaataggacaaagaaaccttgttcatggattggaagattcagtaactgttgatttggtgcaattctagtaaaaataatttcaaaagatttttaaatggaatttgataagctattgctaaaatatacatgaaagggcaatacatgagaaataaccatggcatttcacatgctttaaaatggaaataattattattaaactttaataaatttatactttggggcaaaagaatgggcaagttggtcagggagcccagaaacagcactgtagatatacagaaacctgatttatgacatagattacactctagaagagttgagaaatgtttggctcttcaataaagagaatatagtgaagttgagcccccatataatccatacccaaaattccatctcaagtggactgactacgtaaatgtgaaaagcaaaaatataaaatttggaagatagcatagaagaatgcctttatgacctcagtttttagcaatgtttcttacagctgggtgtggtggcttatgcctgtaatcccaggactttgggaggctgaggcaggagaatggcatgaacctgggaggcagagcttgcagtgagccgagatcacaccacggcactccatcctgggccacagagcgagactctgtctcaaaaaaaaaataaataaataaaaataaatgtttcctaaatgagccactaagaaaactgactacattaaaacttaacttctgttcatcgaaagaatacttttaagacagtgaaaagataaaccatacgctggagtaaaatgtttaaaaaatacacacaatattattccatttatataaagcataaaatcatgtcaaaatgacacatagtttggatataaaaatatagcaaaactaaaa

SEQ ID NO: 400298 - DNA, 558 bp, Homo sapiens
tgcctggccaatcagatgtgatcttttgctggcacttgctcctttggcccccactgcagtaaacactttcccttggatgttggttttctgttgtgtctggcagccacacagggctgcttgaactttagccagaggcaaatatttatacatcagagtgtgcagtgttcaactggtcaggcctgagagggagagggagagacctccgtgccttttagccaaagaggatatgtcctttttttccccttccctttccaccgtgacatggtaaagtgggaccatactggatgtcatttgagcttgctgcatgtgcttctctccaaaacgtacacgtgcgcaaacttgggatgtgctttcaaaagagaggacgtcctgacatttctgcctgctcctttaattcctcttggaaagtttacggttaatattttccctggaacattgtcaagcttttgacagtgcctgagtgtatgccgaactgtgaaattgagccggagaagcaagttgtgagaaatctgtttctactcagatccgtaaggtttatgggggggggaaaaaaaacca

SEQ ID NO: 400299 - DNA, 110 bp, Homo sapiens
cagctccaagggcctcaccttcctgccgccacctcctaggacagccagtccagggccatgaagaccaagaaccggcccccacggcgccgggccccggtgcaggacacaga

SEQ ID NO: 400300 - DNA, 655 bp, Homo sapiens
gtgatctgtggcagtgacttttcttgattaactaaggcaacaaacaaaatgaataaaccttcattttcaattaccaataatcacaccctggagaaacctcattgattacgatactgccaatgtacaaagtggtatgcagccttttcagattggcttctttcacttagcaatattcatttaatgttccccatgtctttttgtggttaaatagctcatttgttttgatcatgcaattatattacaacatattaatgtatcacagttggtttatccattcccctacttaaggacatcttgattgcttccaagtttggggaattaagaataaagttgctataaacagtcattgctgggttttgtgtagagataaatgttcaacacatttaagaaatagcaaggagcatgactggtggatcacatgataagagtgcatttacttttgtaagaaactgccagactgtcttccaaaaacgttgcaccgttttgcatcgccagtagcaattaatgagaattccagctgctccccagcatttgggatattcagtgttttttcttttttttttttttttttttttaccattctaatagatatataatggtatctcattgttactttattttgcaattcccataatgacatatgatgttgagtatt

SEQ ID NO: 400301 - DNA, 948 bp, Homo sapiens
tcagctcggtactgggtaacctatcatttctgtaatacgtatgtatcctctataatacatagagaatgcaaaaggaaaataatttgaaagctatcctattttatcttgaaagcaatcttttaaaagcgcattatacatttatttgaaagttatttggaattgtctttttccattctcttttcctttaaagaaatggtaggggaaaaacatctggtataccctatagtgttttactgtagtcaaggtaatataatagaaagaacacacgtaccctgggtttgaatcccaactgagccacttaccagtgttaccttaaggaatgtaattcttgtgaactcattttcctcctttatgaaatttgggatcattctgactctgagaggggagaattaagtcaaatgacattgtaaagtgtcttgcacagagcttgacacataggagaactcagttagtagtagctattactctgttatattactgttagacaaaagccagggctgtcatcagttacttacacttactcaagatcccctattcacctagataaggaaaaaacaattcctttatgtgtcattaattgcaatcgtcactctcttgaagtgggtcccctgcttggaccctgtaaagctttgccactaacatgttacccaaggcaggagactgcatcattccctgtaggtggacctataattgctgcttccctgacccgaagttgtattctagtgcactctctctacaatggaccactatcttttccacacgttacttacctaagtccctactgacttaccccctaaggtgcttcaggaattctgtacttctaacctgcagcctctacctcccaggttcaagcggttctcctgcctcagcctcccgagtagctgggattacaggcatgtgctaccacacctggctaatttttatatttttagtagagatacgggttag

SEQ ID NO: 400302 - DNA, 551 bp, Homo sapiens
taggatccccacccctatcataataccactgacattcttcacagaaatatgaaaaatagaatcatgaatctgttatattactgttagacaaaagccagggctgtcatcagttacttacacttactcaagatcccctattcacctagataaggaaaaaacaattcctttatgtgtcattaattgcaatcgtcactctcttgaagtgggtcccctgcttggaccctgtaaagctttgccactaacatgttacccaaggcaggagactgcatcattccctgtaggtggacctataattgctgcttccctgacccgaagttgtattctagtgcactctctctacaatggaccactatcttttccacacgttacttacctaagtccctactgacttaccccctaaggtgcttcaggaattctgtacttctaacctgcagcctctacctcccaggttcaagcggttctcctgcctcagcctcccgagtagctgggattacaggcatgtgctaccacacctggctaatttttatatttttagtagagatacgggttag

SEQ ID NO: 400303 - DNA, 626 bp, Homo sapiens
ttcactggtattgagtgttaagtaacaggtaaaaaggcacagaaaaccaataggaaattagagttttgtaactgggtgtctccaccaataatatttctctgactctgtatttttgggtaatgttgcatcctcctggttgaaaatgtattcagttatgtgatttgaagtgtttatgaattaagacaaattatcattactagttagaaatgtctcttccaaaagtagtacactatacaactttagtttttgtgctacttaggagagaaaagcagatattgccttattttgtgtgccctatccatttaattagaagctcaatgaaaatttttatcattatattatcacctctatgtggaatattgttaaatgttttagaaagtttgaaattcatttttaaatgtgaatcattattgtttgtgtggggggaggaatgtcaagttggaattatgaatcaggctttgccttaccaagtacttttatattaatagggattattttgaatttctgtaatacgtatgtatcctctataatacatagagaatgcaaaaggaaaataatttgaaagctatcctattttatcttgaaagcaatcttttaaaagcgcattatacatttatttgaaagtt

SEQ ID NO: 400304 - DNA, 1541 bp, Homo sapiens
  misc_feature (342)..(342): n is a, c, g, or t
  misc_feature (1310)..(1310): n is a, c, g, or t
tctcagttgaatgcaccaactggtttgagtcctgtgagcattcagtcagttgaaattaaagattcctcatttctcctgatttctattcttgtctcaatcttaaatttagagaccagttgtttttatgatatcagccatttgatttttttcattttctatttaagaaatatgaagaaaaaatacaccaagatggtcaaattactacacaaatcagcaccagcacagtctgatagctgcaaatgtccattcatctgctgtgtatgtatatccagaatcagcgtaggaagtcgttcaggatatcagtatataatgcacagaagtgtgggttgtttgaaagccaancaggagaatcacatgaatccaggaagtggaggttgcaatgagccgaaatcctgccactgcattctagcctgggcacagagcaagactccatctcaaaaaacaaaatggtccagcaaggtggctcacgcctgtaatcccagcactttgggaggctgaggcaggcggatgacaaggtcaagagatcgagaccttcctggccaacatggtgcaaccccatctctactaaaaatacaaaatttagctgggcatggtggcacgcacttgtagtcccagctacttgagaggctgaggcaggagaatcgcttgaaccggaaggcagaggttgcagtgagctgagatgcgccattgcactccagcctggcgacagagcgaaaataaataaataataaaataaaatactcattcacttattcaaccaacaaatatttaccacgcacctatcgagtgttagacataggaatgtaataatgagcgagatagacggagactctgtcctcacgggatttgcagaccagtaatagttggaaggacacagctggtgtcgtgatcataactcctgtcagtgctgtgaggaatcctggtgccatgggaacattcagcagggatgtgtagcctatcagggaaacagatgggatcaagaggaagtgacgctcgggccagcgggagggtggggagtggacgttcagtttgagtgaactaataggtgaaagccctgagacaggaaagactgcatcatgtcagaggaactgcaaggcaggagtgtggcctgagggccaggaagggtctggggtgaggcctgaaggtcttctggacctatacacaaggtgtggatttgggcctattacctaagggcaatggaaaaaaggaacatttttaagaaggggagagagataatcagatttgcatgtttaaggccgggcacggtggctcacgcttgtaatcccaacattttgggagtctgaaggggntggatcacctgtggccaggagttcgagaccagcctggcctacatggtgaaacctcgtttcgggtaaatatacaaaaaattagtcaggcatggatggtgggtgcctgtaatcccagctacttgggaggctgaggcaggagaatcgcctgaatccaggaggcagaggttgcagtaagcctagatcacagcatttaaccccagcctgggcaacaagagtgaaactccatctcag

SEQ ID NO: 400305 - DNA, 577 bp, Homo sapiens
caataaattatataatttttgtcaattaaaaatattagaaaaaaatacattgggccaggcatgatggtttatgcttgtaatcccagcactttgagaggcggaggcaagaggaactcttgaggccaggagttcaagtccagcctgggcaacatagacccagtctctacaaaaattaaaaaactaggtgagtgtgatggcatgtgcctatagccccagcttactcaggaggttgaagtgggaggatcacttgaacccaggcgatcaaggctgcagtgagccatgttcatgccactccactttagcctgggcagtacagccagagcctgtctcaaaaaacaaaaacaaaagtaattggttacctcagaggggtaggtttggaagatgtggggtatggacggggctgattaagttttttttttttttaatatatccctgtattgcttcattttgtgcacaatctttaatacttttataatacaaaaaagagaaattttaaaaatgtgtttgctctatctccaatgtctagaacagtgtttggcacatatttggcattcaataaatgttggttgcataaata

SEQ ID NO: 400306 - DNA, 369 bp, Homo sapiens
taaaccccagagccggaggttgcagtgagccgagaccgcggcactgcactgcagcctgggcaacagagaaagactccatctcaaaaaaaaacttacgctctatacaaaaattaaattaaaatttatcatgtgtttaaattcatcctgtatttaaagaaaaaaagcttaatttttaatacacttgggaacaaaaaatattcgataaaatctttagtatctggaactaggcaaatagttcatagaactgacgccagaagtatgaatgataaaaagaaaaatggataagttggaactcttattttaaatttaggttttgcaaaatgcaaaatagaagataaaaatgaaaactatagactgggagaaactatt

SEQ ID NO: 400307 - DNA, 432 bp, Homo sapiens
tgcctgcataataagaaccttggtctccacaacctcttatttcaacctaaacatttcgattccaggtctgtagataaactctttcaccaattgccatcagaatatctttgaatccacctatgacctggaagcctccacttcgagttgtcctgcctttccagaccaaaccaatgtgcattttacatgtattgattgatgtcttatgcctccctaaaatctataaaatcaggctgcaacctgaccatcttgggcacatattctcaggatttccagaggctgtgtcatgggcatgtccctagccttggaaaaataaacttctaaactggttgagatttgtctcagatactttttggtttacggattcaaaacaatggcaaatcaggccactatagaaaaagatcacaaaacattgtacataacagaaaaaaagaa

SEQ ID NO: 400308 - DNA, 495 bp, Homo sapiens
atttctgaagtgactggcgttgttatcatactgcattattcacctactagaaagagaaaatagcccaaagttttccatttccattatggctccagtaattctcattctgttccgctgacttctacatgggaataaaaaatgttgtagcattctacacattgcagaaaatagcttacactcaaagcccttatcaagagaagaaagttttaatactattgctaccatataaaaagagacagcagtcatttaaaaagatagttttcatttcatgtttaataattatctccttaattattatgtttttgtaaatatataaagttagtaagtatttgggaaacactatgagtttgtttttttttttttttttttttttttagcaagggaagtttggtagttaaaaataaccacgattgggaggctgatgcgggcagatcacacggtcaggagattgagaccatcctggctaacacggtgaaaccccctctctactaaaaa

SEQ ID NO: 400309 - DNA, 274 bp, Homo sapiens
gcacctgtaatcccagctaatcgggggactgaggcaggagaattgcttgaacctggggggtggaggttgcagtgagctgagatcgcaccacttcactccagcctgggcaaaagagtgaagctctatcttaaaaaacaaaaaacaacaacaacaaaaaaccatctggtgctagaaggcaggattggtaggcaaaggggaagtaagtggagagagattgggattgaggacccagtcttgcagcaagaagaggaagcaagttattgaaggagatgtg

SEQ ID NO: 400310 - DNA, 326 bp, Homo sapiens
ataggatggtcaaaaaagacccatctaaggaggtgatatttatgcttagatctttatccctcccctgaaaatatgtagaatcaaaagaaaaacttttcaggaaggcaaagcaatttgaggaggcaacaagtagaacatacctcagaactgaaattagacaagtgaggctgaagtttaaatgttattcaagagtaagcaagaaagtcacacattatgttttttaaattatttccaattaagggaaccaaataaaaatacacagagggatactgaacagttaagaaaagaaggttgcagccaaaatgctagtcaaagtagtttcaggt

SEQ ID NO: 400311 - DNA, 921 bp, Homo sapiens
caggctagggagaggagaggagcctgaattctgctaaactgtagacatgaacaattgccagccattattccagaggtcctgcagataacatcactattgtagaacctgagattggccttttgagaatttttttctcagattttttgcatgtctgatacccatggctccacctggatccaccaaccagtggcttctgtgcccccacccagaagcaactgagtgcaagagaacagcttcagctcctatgatttcacctccaacccaaccaatcagcagcaagcacccactgcctagccacccccaaacttcctttgtaaaatccctaacctacgagctttccatgatattgatttgagtaataagtctatatccctgcgtggtgtggctggattcatgtcaattaaactctctctacagcaatgctgtcatctttgtttgtgcaactggcagggaaactaattgggcagttacaagtatgggatacttatgttccataattattactaagagttttaaatgagatagcacatgtgaagcacttagcaaaatgactggttcacagttaataataaatgggagtggtaattatcagtatcattcacacatatacacatgctttacatataatcacaagcttacatataattcttgtctttcagcatgtagaatttaagatgaactcaggcaagtaaggaaattgacattctagtcacaaaaaactgaaaggggtcaatgtaaccctatgaagtgcagtgtcagaatgaccagaattaccactgttaagatgataataatttcagtcatgcagtaaggtgatggttgtttggatgaagtcacaatgtaagtaaaggatgacgagatccttttttattagcaactggatctttttcccaaaatgcactaaattgaagccatcacatt

SEQ ID NO: 400312 - DNA, 811 bp, Homo sapiens
ggaaactgaggcctgcagagcttaagtaacctgcctgaggtcactgactgtaaagtggcagtgccaggactgaacccaggcagtctgagcacacagcacactctcagccctggataccagactgtgagcaacactgggggcaccctggccatgaggagtgtcactgatgccctgagaaggcactaaacctggagtcagacgctggggtttgagccgcagccctactgttgtctatgtgactttcggagcctgtccctctctgagcctgtttcctcacctgtgacatggagcagaagtttctacattgtctggcctcaggggtctaggcaaatcctagcagtgactgaatgggaagccaaggaagtggaaatgggacatggcccctacttcaagtagaatgaaacccttgtgacctgctgtaagcggaaggttgtgtagcatttcaatggggcagaaagaaatctgatactgaaaagcctgtttgggaacccttggactaaatgtctcagaagccactccattttgagcattacttctgtctaatcttaaatggtatgtgtgtgtgtgtacatgtgtgtgcatgtgtatgtgtgtgtgggaatgaaaagtcaaaatgacagcagggtgtctgagccagggataagctgagaggctataaagagggctaacagcccataaggtttatttgctcaacaaacagtgcagaaaggtcaaaaccaggtgctacaaaatccctttcttcttctagaatataaccataaaacagataacacaggcagttcctaatttgtagacaggatgtgctccaaat

SEQ ID NO: 400313 - DNA, 424 bp, Homo sapiens
attattttcaaatttttcaaattaaagatgaaaggaaggaaggagccaaggacggttctaagaatttgggtcaggcactttctgggaagtttgatgacagctatgtgggcctgggatcatccccgatgactatgtgttggaacaactttatgggtccaggtaactgggaagaagtaatttatctgagaagaaacaactaccaaaaatagcaaagccaggaaagataaacactaagaacaatttaagtcatttaagactagcttgggcagcatggtaagaccctgtgtttacaaaaaatcgaaaaaaattcactggatatggtggtgggtgcttgtagttgcagcttagtcagaaggctgtggtagaagaatcgcctgaacctgagtagttgaggctgcagtgagccatgatcatgccactgaac

SEQ ID NO: 400314 - DNA, 725 bp, Homo sapiens
gcagaaggatcacttgagcccaggaggtggaggctgcagtgaactgtgttcatactactgcactccaacctgggcgatagagtgaggttttgtttaaaacaaaagagagaaaagaaaattacattcaagtaaagtgttttcctcctgtccaaaatctccacataacaaaaggttaatatatatgatttgcaagttcatataaatcaaaaagaaaaaagaacaaacacaggccagatgcggtggctcacatctattatcccagcactttgggaggccaaggcaggaggattgcttggggccaagagtgcaagaccagcctggtcaacacagcaagatcccatctctgcaaaaaattttaaaaattagctgggcatggtggtgcacacctgtagtcctagctactcaggaggctgaggtgggaggatcaccagagcccaggagttcaaggttacagtgagctataatcctaccattgcactctagcctaggagacaaagtgactctacctctgtaaaaataataataaaaaaattaaaaagaaaatgacaaataccaaaaagaaaaccaaggcaaaggacataaggcagtttacaaaagaaatacaaatgaccaataaataggtgaaaggaaatacaatcacattagtaatcaaagaaatacaaatacattgaaatatcatagcattctctcctctaagacaagcaaacatgaagactaatgatgcc

SEQ ID NO: 400315 - DNA, 672 bp, Homo sapiens
gcagaaggatcacttgagcccaggaggtggaggctgcagtgaactgtgttcatactactgcactccaacctgggcgatagagtgaggttttgtttaaaacaaaagagagaaaagaaaattacattcaagtaaagtgttttcctcctgtccaaaatctccacataacaaaaggttaatatatatgatttgcaagttcatataaatcaaaaagaaaaaagaacaaacacaggccagatgcggtggctcacatctattatcccagcactttgggaggccaaggcaggaggattgcttggggccaagagtgcaagaccagcctggtcaacacagcaagatcccatctctgcaaaaaattttaaaaattagctgggcatggtggtgcacacctgtagtcctagctactcaggaggctgaggtgggaggatcaccagagcccaggagttcaaggttacagtgagctataatcctaccattgcactctagcctaggagacaaagtgactctacctctgtaaaaataataataaaaaaattaaaaagaaaatgacaaataccaaaaagaaaaccaaggcaaaggacataaggcagtttactaatcaaagaaatacaaatacattgaaatatcatagcattctctcctctaagacaagcaaacatgaagactaatgatgcc

SEQ ID NO: 400316 - DNA, 459 bp, Homo sapiens
acagagtttctaatcattttcctgctgcatggaaacatttgctactgttggacatattacctctaatagcagaccctattctactgcctcagctccactggagtctcactgagcctactctggctttggaggtgccaagtcaccaagagagattctcagaggcccattgcatctatttctctcttgcatcaactgggcatcatgcttagctaggtctgagttcttatctcacaaccaggaagacttaggtgcacagaccctggagagtgagtggagtaaaaattattcagcaagatggaagctctcagcaaagagggagtgtggggtgtggttcccctacccaaagctgccaatgaaaaactaatacttcttcataatcagctactaagaaatttgatagatgaaaaaagataatgaaagctggtgtaagcaatcaaaataaacatgagttaaccaaaa

SEQ ID NO: 400317 - DNA, 369 bp, Homo sapiens
gcttcactcatttgaagggccaaatcttatttcattgtatggatataccacactttggggtttgtttttttcattttgaaacaggtctttctctgccacctaggctggagtgcactgctacaaacacggctcagtcctgcgcttaaggaggcctcctgctttcagcctcccgagtagctgggaccaccgttgcttgctaccacacctggctaattatttcattttatcgtagaggcagggtcttgccatgttgcccaggctggtcttgaactcctggcgtcaagcaatcctcctgcctcaacctctcaattactcatcccaggctggagtgcagtggtgcatttgcattgggaatttgcattgtttcca

SEQ ID NO: 400318 - DNA, 884 bp, Homo sapiens
gattaaatctttcacagcacttatagaacaaaatcctcactccttcttgtggcctgcaaagacttggatcctatgattccagcctctgtgtcctacctcttcttatgccatctcctcctcgtccattgtcctctggccacactggtcattcctccttgaatggctggcttcttctcttttaggtgtcctggtggttaatactgagtgtcaatttgattggattgaaggattcaaagtattgatcctgggtgtgtctgtgagggtgttgccaaaggagattaacatttgagtcagtgggctgggaaaggcagacccacccttaatgtgagtgggcacaatctaattgctgccggcaatatgtgcaggcagaaaaatgtgaaaagagagactggcctagcctcccagcctacatctttctcccatcctggatgtttcctgcccttgaatgttggactccaagttcttcagttttggaactcggactgtctctccttgctcctcagcctgcagacggcctattgtgggaccttgtgatcgtgttgttgtggtggtattactactactcagcaagattctggttttacttctcatcttgggagttaccatcaagacgttaggtatggctgtgtgacccactttggccaatgaaatgtgaacagaaatggcatatgtcacttgtggacaaaaacatttaagcaagaatttcccttgctgtcttccttgactggagcgaccatggaagcctgtgttgagatgaagaggctgccaacagatcaaaacacttgaaaacttgagcagccacatggactacaactgtgctggagacttgcctggacccacagcaggcttggtatgcatggggaatagaattttgttgtattaca

SEQ ID NO: 400319 - DNA, 1008 bp, Homo sapiens
gattaaatctttcacagcacttatagaacaaaatcctcactccttcttgtggcctgcaaagacttggatcctatgattccagcctctgtgtcctacctcttcttatgccatctcctcctcgtccattgtcctctggccacactggtcattcctccttgaatggctggcttcttctcttttaggtgtcctggtggttaatactgagtgtcaatttgattggattgaaggattcaaagtattgatcctgggtgtgtctgtgagggtgttgccaaaggagattaacatttgagtcagtgggctgggaaaggcagacccacccttaatgtgagtgggcacaatctaattgctgccggcaatatgtgcaggcagaaaaatgtgaaaagagagactggcctagcctcccagcctacatctttctcccatcctggatgtttcctgcccttgaatgttggactccaagttcttcagttttggaactcggactgtctctccttgctcctcagcctgcagacggcctattgtgggaccttgtgatcgtgttgttgtggtggtattactactactcagcaagattctggttttacttctcatcttgggagttaccatcaagacgttaggtatggctgtgtgacccactttggccaatgaaatgtgaacagaaatggcatatgtcacttgtggacaaaaacatttaagcaagaatttcccttgctgtcttccttgactggagcgaccatggaagcctgtgttgagatgaagaggctgccaacagatcaaaacacttgaaaacttgagcagccacatggactacaactgtgctggagacttgcctggacccacagcaggcttgactggtctcgaattcctgggctgaagtgatcctcctgctttggcctcccagagtgcagggattacagtcatgaaccactgagcctggcccatcttggcacttttgatcgtggacttctaaccttcagaactgtgagaaaataaatttctgttgtttaa

SEQ ID NO: 400320 - DNA, 1014 bp, Homo sapiens
gattaaatctttcacagcacttatagaacaaaatcctcactccttcttgtggcctgcaaagacttggatcctatgattccagcctctgtgtcctacctcttcttatgccatctcctcctcgtccattgtcctctggccacactggtcattcctccttgaatggctggcttcttctcttttaggtgtcctggtggttaatactgagtgtcaatttgattggattgaaggattcaaagtattgatcctgggtgtgtctgtgagggtgttgccaaaggagattaacatttgagtcagtgggctgggaaaggcagacccacccttaatgtgagtgggcacaatctaattgctgccggcaatatgtgcaggcagaaaaatgtgaaaagagagactggcctagcctcccagcctacatctttctcccatcctggatgtttcctgcccttgaatgttggactccaagttcttcagttttggaactcggactgtctctccttgctcctcagcctgcagacggcctattgtgggaccttgtgatcgtgttgttgtggtggtattactactactcagcaagattctggttttacttctcatcttgggagttaccatcaagacgttaggtatggctgtgtgacccactttggccaatgaaatgtgaacagaaatggcatatgtcacttgtggacaaaaacatttaagcaagaatttcccttgctgtcttccttgactggagcgaccatggaagcctgtgttgagatgaagaggctgccaacagatcaaaacacttgaaaacttgagcagccacatggactacaactgtgctggagacttgcctggacccacagcaggcttggggcagctgtagctatgattccagaggtggcatctggcaggctgaccacctaacactggtgaggcttggggcaatagtacaaatggaggcccactatctaaatatttaaaaggtaaaaatcaagcgaacaagttgtcaaataaaaaatgtgtctgtcttcctta

SEQ ID NO: 400321 - DNA, 960 bp, Homo sapiens
gattaaatctttcacagcacttatagaacaaaatcctcactccttcttgtggcctgcaaagacttggatcctatgattccagcctctgtgtcctacctcttcttatgccatctcctcctcgtccattgtcctctggccacactggtcattcctccttgaatggctggcttcttctcttttaggtgtcctggtggttaatactgagtgtcaatttgattggattgaaggattcaaagtattgatcctgggtgtgtctgtgagggtgttgccaaaggagattaacatttgagtcagtgggctgggaaaggcagacccacccttaatgtgagtgggcacaatctaattgctgccggcaatatgtgcaggcagaaaaatgtgaaaagagagactggcctagcctcccagcctacatctttctcccatcctggatgtttcctgcccttgaatgttggactccaagttcttcagttttggaactcggactgtctctccttgctcctcagcctgcagacggcctattgtgggaccttgtgatcgtgttgttgtggtggtattactactactcagcaagattctggttttacttctcatcttgggagttaccatcaagacgttaggtatggctgtgtgacccactttggccaatgaaatgtgaacagaaatggcatatgtcacttgtggacaaaaacatttaagcaagaatttcccttgctgtcttccttgactggagcgaccatggaagcctgtgttgagatgaagaggctgccaacagatcaaaacacttgaaaacttgagcagccacatggactacaactgtgctggagacttgcctggacccacagcaggcttgactggtcatcgaattcctgggctcgtaagtgatcctcctgctatggcgtttccagtagtgcagggatcactagtgctagtgttatccacctgagccagtggcacaaatac

SEQ ID NO: 400322 - DNA, 522 bp, Homo sapiens
aatctgcgcatggctgagctgagtcctgagcgtctctccaggctgcagtccatgtctctgcaggctgcagtgaaggtgtgttccaggcttcactgggggagggcctgcttccctgctcactcgtatagttgttgcaggagtcagttcctcacagactgtcaggctaagtaaggatcttggtttcttatggctattggctaaagatcgccctctgcccttcatcatgctacggagtagtcctcagggcagcctacgacatggcagctgtctccatcaaaggtcacaagcaaggacagctggagagaacgagagcaagacaaaagccgcagtctctcataacttcatcactgttgcactctgtctgttaggtgccagtcactagttccagcctattctcagggagggaattggtggggagcatcttacaaggctgcccaccttgtcacctgtcacactgagacttacatggaaggtgacaactgggtcctgtattcccaagcctcgcattctccaggcccttgc

SEQ ID NO: 400323 - DNA, 456 bp, Homo sapiens
aattattaactctgtagagataggtattgagcttattccctctgcagctcctgtaagtgttttgcacatagcaagtgctcatcaaagattggttggataaattattgttagtagatgagaacttgtagtacatgaattttcgataattctacagtgggtgtcataacccctaaatattttggatttaggaaactaaaaattgtcctaattggttttttgttgttgttgttcttttctaattggattttgatggacaatttgatcagtgaatgtctcgctctgttgcccagggaggagtgcaatggcacacacgatcttggctcaccgcaacctccacctcccgggtcccagctactcgggaggctgaggtgggaggatcatgtgagcctgggaggtccaggctgcagggggccgtgatcctgcccctgccctgcagcctgggttatacagcgagac

SEQ ID NO: 400324 - DNA, 415 bp, Homo sapiens
gagaaccatggtccacatggcgcctgtgagcagagatgggggaaagaggagacatcactgggctgcagaggtcaacagggttgtggaagtgtcttttattgcaattaagttttctagtcatgaaacctcttcgaggtatagaatcagctctgaaattctcaaagtgttttgatcatagtatttaaggatttatttttttaactgagatttacattactatgtatttgcagtaatgtttttgttaaaagttgtatcgtaatgtatttagccagaacttagtgtctgtgagaaagaaaagatactagaacttcttactaccttctaagatataaagtttaaaattatataatgtaaccagtgacttccctgttttaaaaaatcacatactcaaaaaaataaacttactgtctgtata

SEQ ID NO: 400325 - DNA, 513 bp, Homo sapiens
ggctgtagtgcaatggccctcatagctcactgtagcctggaactccttggctgaagccttcctcccacttcagcctcctaagtagtgcaccatcacacctggctaatttttaaatatttttgtagagagagagtctcactgtgttgcccaggctggtcttaaattcctggccttaagtgatgctcccagcttggcctcccacagctttgggactgcaggcatgagccactgtgcctagcctgtttgtctgtttgtttgtttgtttgtttttaatagagttggggtctcaccatcttgcccaggcaggtcttgaactcctgggctcaaacaatcctgccttggcctcccaaagtgctcagattgcaggtgtgagctagtgcaccaggccttaatttcttttcttttttttttttctttttctgagacggagtcttgctctattgcccaggttgcagtgagctgagattgcaccactggactccagcttgggtgacagaacgagacttcatctca

SEQ ID NO: 400326 - DNA, 488 bp, Homo sapiens
gcaaaaatattgcatctaccagcattttcagttccaattgctaatccagcatttgtggatagctgcaaactgtgatatatgggccaaggttgctcgggtgattggtttactggcttcgcacaaaactgatctccaggaaaatacacctgttgttgaggccttccctaacagtcccagaactcctacattgcctggtgtgctgacctaaagccctcattaagaccagtaacaaatcaagcctatcttatcaactgacaacacattctggaaccatggcgtgtccatggataagacatgaagtccttctttcaagacttggttttctggtactggaaaataccaatatggataaaagaccttcaaagctgctacgatgggtaaggaacaatgcacacagtataccattaaggcaaagaagatagtcttaatcctgtatgaaatgccaatgaagatgtaattaatgaatagacatttcattgaaatgaaat

SEQ ID NO: 400327 - DNA, 454 bp, Homo sapiens
gaaataggcagtttgctgtctctgcccagtagctgcagcacagggcagttgagcccagaacggccaaacctctgttgccacagaacccaggtcccaggtccccagcctcccttgctccttgccgcccacatcactcaccagcctcactggccttggaactcatcagtcccggcttgagagacacaaaggggatttcctttcgaagtacggctggacaagggggacctctgagaagaggggctgcaagcaggggttgcgccaaggccatgggtacttctaggtcaggccgcaccctccatagttagctggtcatgcagcaggaaggcaaaaggtcagctccctgggaagcaccggatctctgggcagtcactggggactcgccaatgcactgtattagttttctgttgctgctttaacaaacttggcagcttgaaacaacagattctcttatagc

SEQ ID NO: 400328 - DNA, 251 bp, Homo sapiens
ggggttgcagtcagccgagatcgcaccactgcacttcagccacctgggtgacagagcgagactctgtttcaaaaataaataaataaataaaatagaattctgaattttatttttaataattattttgtaaaaagaatgtcttgttttttggagttgttgaatttattgaattgacaaaaattatgtacaagagggtacaacatgatgtgattgaagtatgtatacgttacaaaatggctaatcaagctaaa

SEQ ID NO: 400329 - DNA, 315 bp, Homo sapiens
ataccttttcttaaagggggaaggcattgtagaaaaaggggcaggtaggtggtaaagcaaatttacggggtttttgtttgtttgtttattgagaaagagtctcaactccagcctgggcgacaaagcgagactccatctcaagaaaagaaaagtggattgcaggccaggtgcggtggccctcacttgtaatcccaacacttggagcggccaaagctggaggatcgcttgagcccaggagtttgaggctatagtgagctgtgatcataccactgcactccaggcagggcaacagagaccctgtctcaaaaaaaaaaa

SEQ ID NO: 400330 - DNA, 467 bp, Homo sapiens
tttttttgatgagctatttgccaagataaaacgtatggttttttaaaaaggaagttttaaagtacctatatcgagtcagcttacattgaaaaaatgtcaagcttgttaaaatgattatgtaacaaaatgtattctgatttgtatttcagaaactaaaaaataaaatgttgaaagaaaaaaacatcattcttgtatttgtgcattttctttccttcctgcctttacctcagcaacatatttaatacctgtctatatcactcattgagtcaaaaactgtggtcacggtaaaaccctatttcttcttatagccaataagcccttattcttcctattttaggatttgcatctgaagtagtgaacatactttatttgctttacatgtgccattaagccctacatttaaatcaaaccagttgcaaaaaggtttatatatttgcattttaaaaaattaatcttacacagcttta

SEQ ID NO: 400331 - DNA, 499 bp, Homo sapiens
attttctatatatttcatggagctcctatgaatgaaattgcttagagactttcagttttacaaagatactttttgaattctgtttcatcccagctacagtgcatactaaaactgttttcaaggagcttacagacaactgggcagaccttttttgttacttccttttaatctatactcctccaaaatttacctgggtgaattttgtttttgctcaactttagttatttgctcaactttattccttacattgcagtaatttgtttgaatgactgtctagagacatggagagacacggagttgcttgagggtacagtgcctgtagatactcaataaatatttgtttaattaagaaaatttctgttatttgtgtgctcatacataccatttcagtctggtgagtattgttctttcctagagtttacttttaatcttaagtattttccaggtcctttgttgacttctgtttaaaccacagtacacacacacacacacacacaca

SEQ ID NO: 400332 - DNA, 199 bp, Homo sapiens
gaagctaagttgtttatctgaacttctgagaaaccaggagagtaataacagccaaatccccaaacaggctgatccttgccggtacaataaggagttctcttctgctttcacccttacaagaaaagcagcttcgaagtgagcgatccgtgttttctgtttccgctttcctcagcccttccgtctagaaaaccagcctcct

SEQ ID NO: 400333 - DNA, 359 bp, Homo sapiens
gatcacatctataaatatgggaaaataataacaataaactaaaagtaaattttgaatcaatttcaaaggattgttgtggggaccaaatgtgataatatatgtatgagttctttgtaaacccataaaaggctaacaaccagtaattttagaccaaataacttaaaatgtaatttattttcaaataagaataaaaagttttcatttatattaggcatttatgtgctattataatttttccccttaaaaatgctgataatctaaatgtaaaaagtatcaaggcttcattcagtcaaatgttaaaggattttaattcattcttatgtgtatattaataaaatgtaatatttgtaaaatgcata

SEQ ID NO: 400334 - DNA, 313 bp, Homo sapiens
ccagaggctgcctgcattccttggctcatggctcctcttccatcttcaaagccagcaaccaaccaggtctttctcacattgtgtcactctggtttcctcttatacctttctcttctacttgttatcacacagtcctgcctcaagatgggtttgggcaagaacataattgccccaagtccctgacataaacgggtgtagtatgcgcatataacctgcatcctccacattgtcatcaatagtgacagaacccttgggataacactgggcccacccagataatccaggctaatctccccatctactggtatgaaac

SEQ ID NO: 400335 - DNA, 562 bp, Homo sapiens
ctcggctcattgcaacctccacctcccaggttcaagtgattctcctgcctcagcctctcgagtagctgggattacaggcacccgccatcatgcccggctaattgttgtatttttctgtagagatggggtttcaccatgttgtccaggctggtcttgaactcctgacctcaggtgatccacccgcctcagcctcccaaattttgggcgattacaggcgtgagccaccgtgcccggccggggtccctgtttttaattgcagagaaacctaagcttgccttcagtagttactcagagttcaggtcttttttaaagattcttcacctgtagatgaagaagagttgcattatgccttccactgattagagatcaaagatgaattctctttgtttttgtggggcagatattctttgactatttgacaacagactctgaagttacatgtatgtgactgctgccctgagtattttattgagcactgctttgttagatttgcctgggaaactctcccccatgtttgggtgagagagagatggggtgaaatttttccaccttgactacagca

SEQ ID NO: 400336 - DNA, 314 bp, Homo sapiens
aaacctcaaatcatggagctagaaatgttaaagaatactcaatgcattcttaaccccttaatggttataattaataagtgacagaaatcttcctcaaccaaacattctaagttcctcaggaattattggggaataagatatgtcctcataatgatttttggtgatgcccaaagtctttcagtcatacatatgattattcttatttaatatacaacttacctgtcttgatgtaaaagttgttagcttccccattgaacatagataaattccttatggggagaaatccttgcctagcaattaatagtccatattga

SEQ ID NO: 400337 - DNA, 328 bp, Homo sapiens
ttggcgggtctctaggcttctccgccgacccctgctcatgctcagggccccactcacatcgcttgaggccccccgccttgcctctgccgccccgcttacatctcgagcctctgagcagtagcgtcagtgcgttaaagccggggtgtaactttgattactcttttcccgccttggtagacttccgtcctctcccatagagaatgaatattgtgcctcgagaataatggagcggattcaaagcctctgtgcttggatctttagggcccggtacctgcctgtggggattcccagatcccaaggacttggttctgaatcagagacctttgat

SEQ ID NO: 400338 - DNA, 125 bp, Homo sapiens
gggaaggggcggagctagtgcaaagcaggtgattacgtgtcacttccgggagatgggatgacctcattgtgtagttagacaacacccccccccaatcaaaatgtctatgtctcacctctttggct

SEQ ID NO: 400339 - DNA, 718 bp, Homo sapiens
gcgcagcatagcaagtcaactaaatctttctgatccaatgaggtttgctcattagattaagtgaaaatgaacttgcttcactgtcacaatcacatgaatagctgggtaggttttccaataatcaaatggtccatcattggtcacacatcatagatagggctggaattaaccattgcagaaagtataagatcaaatacatgaagccagtaatacaaaataataccagacattaacaccagtcatcatagaaaactacactcctgagagatttcattagcttccagggaatacagaactgcggaatacttgctcaaagtagaaaaaatattgggatgaaatgattatcttggaagtcatcaattgtagaacaaagtaagatttcaaaattatggttcaaaaatttaaaaagttcttaattaaatatagatatgtgtagaattaagacttcttgaccatttgtcattgaaggtgcaattataccttaatgtctacctggtaactagctattactatttttttaatgtactcatcagtgtgttttatttaagttaatcattagcttgaatttgaattgaggtcagcttaaatcttagaataactgataggttcctaattaatttctacttgaattttaaatctaaaatatctcgaatctaaatatatgcctcaagcagaaatccactgggtgcttcttgctaggagatgtaggagacacatt

SEQ ID NO: 400340 - DNA, 483 bp, Homo sapiens
caagggaaggaactcctggggctcccagaagctggaagaaacaaggatccttcccctataggctttggagggagcgtggctctgcaacaccttggttttggacttctagctccagaagtgtaagagaataaatttctgtgatctcatattcagttcatggtgctatatcatggtagccctagaaactaagatacacaggtatgttggatgtatgggtcaggcccacacccagggtgcatacggcctttggttaaaaaaaaactctcatttctgtggggaatccattgccagtggtctggatgacatggccactgcctctcttcagggatgtgcacaagaccctggcctggccaatcagaatacctcatgcccaggaccacagtaactgggtcaggggttgtcaagatttatataaatgatttacataaaatgtttaaatgttttgttaaaatatttaaaataaaaaatgtttctaagatttca

SEQ ID NO: 400341 - DNA, 508 bp, Homo sapiens
tgtgtgtgtgtgtgtgtgtgtgttagaagggtgtggacgggaatgtggatggattgatgaagggtggtagctgtcagtttacataattttcatctcctggtcctgaagtttccttgaaatcaattctactgcaggcagcagccttgagcttacagagctgatataaaacaaccattacagtccaatatcttgcctgtttgcaaacttcatttaaaactggggaaaaaaaagacccaggaatggttttgtaagaaaggaaaaaagaagaaaagaaaaccacagtgaagctttaaactagtttggataaatctctaatcttttatttgtaaccttttacaagctttatttcccgtatatgaaaagcttcttttatatgggcacgacagacttttcctttggatttttaattagagtccatcaattgtagccatatttaagaatcaatataaagtaatccttcgagatgggataaggttttaatcgaaaatctaatttcccactctttgca

SEQ ID NO: 400342 - DNA, 625 bp, Homo sapiens
cattatcataatgggagtccactcctattaatcagaacttagagaccacatgttgtgttcattatccagaaaatgtatcaagttgcaaaacttaagtagaatgctaaaaattgggatccacagtattaatgagctaaaaattgacaagtgcatcttagaaaatgcttctgtgagcaaaaaaaatttgcaggctcatacgcaatgaattggagtgttcaacacggtttaattggcggctgtggatgtcttgtgcataattgaggttgtaaagatggatgcatgtggtaggcatggggggtctaaatgggtgagtgtgtattgtaagggaatccgtcccttccgacatactgcaggctgggttgcagatacagtgatccatgtttatgtaagcaaggtggaaacttctgatctagaagggaaaaaacaggtgcttttgtatgtttttctttcaggaaatagttcacattttccagaaagaaaagtttttttttttttttttttggagacggagtcttgctctgttgcagtgagctgagattgtgccgttgcacgccagcctggatgacagagcaaaactccgtgtcaaaaacaaaaagacaaaaaaaccctgtccttacaaagaaag

SEQ ID NO: 400343 - DNA, 300 bp, Homo sapiens
aaatagagaatttctagtgacaaaaacttggggtaggctctaaatctcctacagtattgaacaattcttggtctaactcaaatgtatgtaatagtaaataatgaaaatgaaactttgctatatttattcaagctgtttgccagctagaaaattaatatttggaaattcaaaaataaatctaaagaatattcattgggcagggcacaatggctcatgcctgtaatcccaacactttgggaggccaaggtgggcggatcacctgaggtcaggagttggagaccagtctggacaacatggtca

SEQ ID NO: 400344 - DNA, 413 bp, Homo sapiens
tagataccaggtcttattgtgttgcccaggctggatctcaaacacctgggctcaagtgatcctcttgcctcagcctcccaagtgctaagattacaggtgtgagccatcatgccaggtcaattttgacatcttaacaatattaagtttttcagtccatgaacatgagattctttgtttctctattttcttttatcagtgctttgtagttttcagtactggtataagtctttcactttctcggctaagtttatctctaagtattttattctttttgatataatcgtaaatggaattaattgttctcatatcttgtttggattattagtgtatatatcgttagtgtataaaaacacagctgatttttgtgtgttcaatttgtaccccacaactttgctaaatgcatttactggttt

SEQ ID NO: 400345 - DNA, 422 bp, Homo sapiens
catgagccgccatgcccggccatatgtgcacaatttttatgtgtccataaaaattttaaattaaaaaattaattaaaaacacttcaaagcccaagaccttaaatgtgatcactggttaaaccagtgagtatcttctattgtaaaatataaatgtgaattagagaagaatctagaccaaggatagacaaactatagcctataggccatattcagccacaccatctgtccttacatggaccataagcaaggattagtttttacctttttaaatggttgaaaaaatattttgtaaataaagttgtattggaacacagccacaccaatccattttcaagctgcccaaggctgcttttgtactacaagggcatccttgagtcatgacagcagagatcacagggcctgcgaagactcgaatatttact

SEQ ID NO: 400346 - DNA, 397 bp, Homo sapiens
  misc_feature (3)..(3): n is a, c, g, or t
  misc_feature (45)..(45): n is a, c, g, or t
acncctgtaatcccaggactttgggagccaaggccggtggatcanctgaggtcaggagttcgagaccagcctggtcaacatggcgaaagctgtctctactaaaattacaaaaattagctgagtgtgttggtgcgcacctgtaattgcagctactcaggaggctgaggcaggagaatcgcttgaacccgggagtcagaggttgcagtgagccgagatcacaccattgcactccagtgtgggtgacagggtgagacttcatcaaaaaaaaaaaaaaaagatttgataagaaacgtttaccatctattctctgaagttggctacctgaagacctcatctacatatctacataacaagaaacttggcttccacaattctccttatcttcaccccaagcaat

SEQ ID NO: 400347 - DNA, 651 bp, Homo sapiens
ccaaattacaatagggcggtagagctctttaactagggatcaggttgctacccttggagtgctggtaaccatgtcagacgatgctgtttgaacaatggagattcatgcccgtgtttttctgttttaatttgggtgtgaggtcaacttagtcggactagcttttaattctaagtttctctttaacctgtgattgatatgccacattgcagtatgttctttgctctaatcctttactatgctagcgcgtgtccaaacagaaaacagtttctagtctcaaggaagggaaagaaaaccacgaattccaaacaagttttctgatgtagaatttccaccagatagctggtgccctctgctggtcatgtaatcgccaacatgctctattattaaactatcaattaaagccggtccgtgatgaggaacaggagagatcactggaatgcagctgttcaggcctgtgaccccagcattctgtgggatgcagcatcttctcatggagctaagccagaggaatttctctttgttcctcaaatttgagatttctttatgaagactagcgtctctacttagatttcagagggctggtgaaagtggtttgtgttctttatccaggtgaatattccagtctgacgtctgtaactgcggccatccgag

SEQ ID NO: 400348 - DNA, 134 bp, Homo sapiens
tgttttttttaacttctgctttgaaaaccttttgtgagaagctaataaaatgtatgtttaagaatttgttatttttatgttatttgaaaattattcaaaattctttttaaaaattcctttccatcacccccaga

SEQ ID NO: 400349 - DNA, 537 bp, Homo sapiens
acctcctgggctgatcttttgccatcttttctcatgcacttcagtgttcattcactaaagggagggaaggccttccgcactcacgctttggcccggctcacgctgcccccgcagcacagccacagcacacctcaccttcaccaccttcctcccgataaactcagccttttgttaggacctgtctcatgtgttaattcctctgctttctctgtaaagtctttctagacacctcccttcctactaaaaagccataattaattaattgttccctgtgtgtttatgtcactccagcccttatgacaatgtaagtggcatcagtgttgcctgtgccccatctcccttctcaagtgtgaaccgtttaaggtacaagctgtatctgagccagcttgatgggagcatgcctctctctaacaggtgctcaattagtatcaatatttccatctactaaattgaactcttataaaatgtccatgcttcttaacttagactcctgcagttcagaatggaagactagaggttaggggcaacaaaaaaagc

SEQ ID NO: 400350 - DNA, 687 bp, Homo sapiens
caaaagatacaaatacaataaccaaaatagggtttaaaagaaatccttttcatctataactatataatctacatatataaattgttctacaaaaaaaaaaaaccatggactacttaaaaactgaacatggctaaagcaataaaaattaccagtgtgaagaagattataatgttttaaattaaaatataaatattcattaattcaagaaataattactaagttcctactgtattataagccctggatacaaagaggacaagaaaagcaaatactctgttatgccaatagatgagcagaaagtcaaaagaaacaaatgcacaaaatagttccagatcattacagatactgaaaattaagaataaggacagctaaatggggtgatgtgatttaagacaatgactggctaggggacttctaaagattcagtgaataaggaaagctctctgaggaggcaatgttaaagatggtacctaaatgaaaatagggcaaatagccatacaaaaatgtgctggctggaacatggcttatttcagaacataataagggcaatgtcgatgaagagcaatgtgcaagaataaagtagtacaggataaggtcaaaggctaggcaagggtagaccatgtagagcttaggttttattctaaacatagtaagaagccactggaaggttttaagcaggaaagtaac

SEQ ID NO: 400351 - DNA, 314 bp, Homo sapiens
catacaaaaattagcagcattactatacatcaataagaactagctgaaaaagaaatcaagaaagcggctgggcgcagtggctcatgcctgtaatcccagcactttgggagggtgaggcaagtggagcagttgaagtcaggagtttgtgaccagcctggccaacatggcgaaaccccatctctactaaaattacaaaaattaaccaggcgtagtagcgcatgcctgtaatcccagttactagggaggctgaggcaggagaattgcttgaacccagtggatgcagtgagccaagatcgcagcactgcactctctag

SEQ ID NO: 400352 - DNA, 435 bp, Homo sapiens
agctcactccatggaggttcctggctagcctatctggattgcggtgggccttgaaggctttcttggctggcaataattgctttaatgaccgacggccttagtagacatctacaggtttcggcctctgttttcgtggtaagaaggctcagggccaggcatggtggctcacgcctgtaatcccagtactttgggaggctgaggcaggtggatcgtctgagctcaggagttcaagaccagcctgggcaacataacaaaccccatctctactaaaaaaattacaaaaattagcctggccttggtggcacatgcctgtagtccaagctacttgggaggctgaggtgggaggatcgcttgagtccgggagactggggttacagtgagctgagattgttccattgaactccagcctgggcaacagagtgagagtctgtctca

SEQ ID NO: 400353 - DNA, 315 bp, Homo sapiens
atttggtccaaagaaaggttagtagatgcagagaacagccaaagggactgaatctggagacaactctaccccagcaaggtgtttgtcctgtgactggtgggttaaaatgggaatgcaacaggcaagttgtttgtgatgaataggtattgctttcataatcagaaaaaaaattaagaccatctttcagaaatgttctaaaattcgattgtgtgatggttgcacaactctgagtatactaataaaaaccattgacgtgtacattttaagttagtgaattttatgacatgtgagtcatatctcagtagagcagttaaa

SEQ ID NO: 400354 - DNA, 359 bp, Homo sapiens
cattgtctctattactagaatctaggcgaatttgctttctgctgcaaccaaatgggcagttgtccagttaatgacggtttggatattgtgaggcatgttttgtaaaaaaacacattttcttttttctttctttttttttttagagacagggtcttgctctgttgcccaagctggagtacagtgggtgatcataactttctgtaacctcgaacccctggactcaagtgatcctctcacctcagcctcttgagtagctgaggcaggagaatggcgtgaacccgggaggcggagcttgcagcgagaggagatcgcgccactgcactccagcctgggcgacagagacagagaatccgtctcaa

SEQ ID NO: 400355 - DNA, 489 bp, Homo sapiens
aattcatttgacaaaactcaacattccttcatgataaaaactctcaatgaattatatataaaaggaatatacctcagcacaaaaaaaggccatatatgacaaatccacagctaacgtcatactgaatggggaaaagctgaaagctttccctctaagatcaggaaaaagacagggatgcccactttttaccacttctatgtaacgtaatgttgaaggacaacatagtcctagccagagcaattagacaagagaaagaaataaaaggcatccaaattaaaaaggagaaagtcaaatttccctgtttgcagacgacatgatcttatatatagaaaatcctaaagatgctaccaaaaaaaacctattagaactgataaattcagtaaacttgcaaggtaaaaataatcaactgcatttctatatagtaatagtgaagtatctgaaaaagaaatccagaaaacagtttcatttacaataatataaaaaaaggaa

SEQ ID NO: 400356 - DNA, 490 bp, Homo sapiens
gtgtgtgtgtgtgtgtgtgtgtgcgcgcacgcgcgcaagtacttgacactctgtgtgtgtgtgtgtgtgtgtgcaagtacttgatttgtgcatacaaaacagggaatgtggatgagaaggcaaagaaagatggagaatggcaataatccctattccaacctaacccataaaattcaaaccctttgaaaatatattcttaaaatcattacaaatgtatgctcccactgtagcatcctagttataatctcttccttaaagaagtttggagcccagttgtatgcctaaaaattaccattaacttacacaatactgaacaagccagggctggtttaagtagtatgcctgcctgttaagtttcttactgagtcattcacaatgaagctgattcaggaaatatggagtgagacaaagtaaaggaaatggtgaagatatttctttatttggaattttcctgtgttctattcttcaggaaaaatttgacctactttga

SEQ ID NO: 400357 - DNA, 265 bp, Homo sapiens
caaagcctgagagggtcatcgcagacttgagaaaggtaaccaagtgaggaaacatcaaacagagttaaagcattctgaaaaacggaaagtgttaataatcactgacaggaaagaatattcttcgatagcgatgacaacaacaaaacaaaacaaaacaaaacaactaaaacaactggaaatacatatctccagaggcaaactatgactacttattaagcaagaggagaacctgcttctttgtcattccctttggaagcctagcttt

SEQ ID NO: 400358 - DNA, 323 bp, Homo sapiens
ggccatgagtgcacatgctgaggctatcaagtccctcataaagcccaaggaggttaagccgacttgcctacactgcccaccccaagcttgagaagcatgcttgtgcccacaatgccaaggggctcaggctgtgccagccaaaggccaaggatcaaatgaagggccaggctgcacctccaccttcagttccagctcaggctcccaaaagtacccaggcctgtacaaaggcttcagagtagagatctctctctgccagcatgaggtcaggactggtgtccccttgcactatttgtacaaataaacctgaggcaggatttgtttca

SEQ ID NO: 400359 - DNA, 537 bp, Homo sapiens
tgctggtgtttattagctacactggcaggcgcacaactccgcgccccgactggtggccccacagcgcgcaccacacatggcctcgctgctgttggcggggtaggcccgaaggaggcatctacaaatgcccgagccctttctgatccccacccccccgctccctgcgtcgtccgagtgacagattctactaattgaacggttatgggtcatccttgtaaccgttggacgacataacaccacgcttcagttcttcatgttttaaatacatatttaacggatggctgcagagccagctgggaaacacgcggattgaaaaataatgctccagaaggcacgagactggggcgaaggcgagagcgggctgggcttctagcggagaccgcagagggagacatatctcagaactaggggcaataacgtgggtttctctttgtatttgtttattttgtaactttgctacttgaagaccaattatttactatgctaatttgtttgcttgtttttaaaaccgtacttgcacagtaaaagttccccaac

SEQ ID NO: 400360 - DNA, 411 bp, Homo sapiens
cgatccacccgcctcagcctctcaaagtgctgggtttacaggtgtgagccaccatgacaggcctcaagtagttatttatagcagtgtgataacagactatacaccagccccagaggagcactgaggcctggatcatctttgggcagaacacacagcttcgatgcaggatcctcgtgtttaaaatacaaggctggatctggggctgtcagttgccagaacaagtccagagaaaacacaaagagaacaccacccagccctgacaatgttcttggctgagccagagcccctgaggcagccgagtgaactccatgacagaaacttctctgaaggcttgagaggaggggagaaaggtggagggctctggcccatgacaaggccaacaagtccactccaagccaggtggagggggcc

SEQ ID NO: 400361 - DNA, 426 bp, Homo sapiens
gatctttgagcttggggcctaaggcagttcaagagacccctgagaaagaacattgacccccgaaaaaagcagctttaaaaaattgtatattttgtcgagacgggttttgccgtgttgcccaggctggtctcgaaatcctgggctcaagcaatcctcccgcctcagccatccaaaagtgctgagattacaggcatgagccatcacgccccgccaaaagcagcttttaagaaagggaagaaattccagggccgggcacagtggctcaagcctgtaatcccagcactttgggaggccaaggcaggcggatcacctgaggtcgggagttcgagacgagggtgaccaacatggagaaaccccatttctactaaaaatacaaaatgagctgggcgtggtggcacgcacctgtaatcccagctactctcaaag

SEQ ID NO: 400362 - DNA, 474 bp, Homo sapiens
ctggataccctctaatacttctctaaatcctaaagggattaaaaataaatctatacctggacacattgtcatgaaactgcagattatcaaagatttttttttaagagctcctctagaggaaagacagatcacgtacaaagggacaatcctcatcctaatagtggacttctcattagcaacagctggtcaatgaagacaatgaaaggagagattctaaaacccagggcaaggcatagaacacaagaaacaaatgtgggcctatcaaatgatacaatgttatacattaacttaactgtgaaatactgaggaaggagctggtaggccagtgagtttggagttacaagaggaagagcagctgggcaccccgtggctcatccctgtaatctcagcactgtgggaggctggagaaggaggatcactttatcccaggaactcaagaccagcctggacaacatagtgagaccccatctctac

SEQ ID NO: 400363 - DNA, 545 bp, Homo sapiens
cgattcaatttatgggtgtattttaattattgaacaaaaaaaatgaataattagaaaggatacctaagaaaaaatgtccatcttctgtattgtcctgttagtgaggaactatgaattgatttttccccttttatgaaatacaaatatttgcacatccacaagataaagagaaagaacaagaaaatagaggaatgagacactctgtctttaggcccataataaatgttccgttcgcccccatgccggagccccaacctctaccttacagagctgcagtgatcacatgtcctggcatgccgttctccctctccaacagtgtcttcatatattatctaaacagctggtttcatgtgtatattaccctacacagcctcatcttttatgacgttggatataagttataaataaaagatcgtgaatttagcctgttttgactgagctcgttggactttaaatgggaatcattgagacctacaaatgtacatttccattgttttgacgccaaggtataatgcctggagttcataaataaaattatataaatg

SEQ ID NO: 400364 - DNA, 216 bp, Homo sapiens
gaggtggagtctcactgtcgcccaggctagagcaagattccttctaaaaaaaaaaaattatatgaatttatgcagaatgaaaaaaatcaaattttcaagccaggagtggtggctcacacctgtaatcccaacactttgggaggccgaggcgggcggatcacctgaagtcagaagttagagaccagcctggccaacatggtgaaaccctgtctctac

SEQ ID NO: 400365 - DNA, 1140 bp, Homo sapiens
caaaatcatgtggatatattttaaaagatccagcttacttctgtttctgtccatgaaagattaactaccacaagaattgccctctaacagcaggtgattagagaactggacaaaaatctaggaaacagctgttttcagacttcaggtaacagtagaagactgtaattcttaactgaaaggaaacagatgaagtgagccctgggattgcactgtttgcagtatgaggagaaggacccaaacatagtctagtggtgtgcatgagttgatgagacagaagagaaaagttcattggcggagaagtggctaggatatataggaaataccagagagaagggagctacagagatagaagagagcaagagcaggcaagtgccagtctagagatttctagtagggtctcctcaaatctttgactgaatactgattgagtagccatggtacacaataccatgaggctggagaaagaaagtgatagggcagttctcagagctcacatagggctgggaatagtttgtgtttccatcagccagcatagagacatagaaccttgaacagaaacatcagaagggtaatgccatagtagtgggaccaaattagtctgaggctagtgctgcattggacttcttctaacaaaaattgaaagcaaacattgaaaggatcaaattgatttaaaataatttatttgtgtgctagaacaaagtccaggatcctttaagataatacagtaaaatccagcaccaagaatgtaaaattcacaatggccagtatctagtcagaatttttcatgtgtattggggatgagagtagtgtggaggggcaaaagagggcttaccaagagggcatcaggaaacctttgggagtgttgggtatattctaaaagtgtattgacagttacatgtgtatatacatgtgtcaacacttatgtatgtagtttaaacatattcactttattatatgctagttatacatcaataaagctgttaagaatgatcaggtatgcaaagaagcaaggaaatatgatccacaacaaaaagaagaaatgacaggacaatttaattagcagacaaacatgttaaaacatgttatacatatgctcaagaatgtaaaggaaaatgtgaaaatggggagaaaaaatatatt

SEQ ID NO: 400366 - DNA, 657 bp, Homo sapiens
ccactacagtggctgtacttgcatctattttgcccttcagatttaaaaaagaagttctaacaggtttgcacacatgtccaaggcagaagcaaagagagaaagttgggagcataggtgaaacaatgaactggggtaaaaagcaaatccttaatcccaaggcaagtactccatttagtaaacaattaccaaacttaaaatatgaatttagaactctgtaggtgactgggatgctgaagtagaaacagagcaaaaagacaatccagactcgtttctcttgacagatatacaataaaatgttatgctgtaaacactcttgagaagtatgttcagggatatagcataagaaaggaagtcatttgggggtcagggaatgcttcattgaaaggcagtccttaaaataagtaacagcagatgagaatttgctaagcagacagtagaatattggcgggggtgaaaggaaagtgatggaacaaagatttctagtttgaattcacatagcctggctttggggaaaatagtcctttatttaaccttttttctttgaaattggtgattctctctgcttggagaagtttctgaaaggaattacaaatcatcaaaatgctgaaaagtaccctcgctgaaactgtaaataaaggcgaaacatttttcatgatg

SEQ ID NO: 400367 - DNA, 878 bp, Homo sapiens
taccttgaacatctgtaatgaaggtggtcatctccttactaatggatgaatgtcagttatctccagcttttgcaattatagcagtaaatgtagcaaatacaaagccatattgggcttgttgaaaatatctgtaagataaattccttgaaattaaaatgattacgttctcttctgtggatcttagctggcacattccccttacacacattttggcatccttgccttctttctgcctctcattttctgttcctactacttaatgccattttgcttccatcttctgtcactactgcctctacttccacttaagctgcagaattgagggtgggccttagacctggtatgtggaggagagaatgattaattatacctggttcatgctttagattgaaagagctacctttcaaagtcaagtttattgaggtataattaacctacggtgaagttcgcgtttttaaagcatccagaattttggcaaatttatacagccatgtaaccagtgccacaatcaagtaataggacatttctgtcaccccaaaattcctcccacctctttgtagtcaattttctacctgccaaccccgggtcttcacaactgctcatctgatttctagtgttacagttctgtcttctccagaatgtcatacaaatgagatcatataatatatacccctttgtgtctttagcttagcgtaatgcttttgagattcacccatgcttgcatgctgtaagtagttgatacttgtttattgctgatacttgtttattccattttatagatgtaccaaaacttgtttatcagtttaccacttgatggatatttcgattatttctggtttggggctaatgtgaataaagctgctgtaacaattcacata

SEQ ID NO: 400368 - DNA, 1829 bp, Homo sapiens
gagtggggacttttgtccctttttgtcagtgggaggctgggctgggagaggaggcaaggaacagcacactgtagaaatggagagtgaggaatgggagaggcccagagctcagtatgcaagctgtgtacagcggaggttgccggactgtctctgatgggctgctagtggggtggtgctggggaaggttgactcgctaaaagaaaggctgctgcagtcacatgttatagggtacatctgtgagaattagggaaaggaaattgctccgtgtcaatgcagtcttacccagggcacatggcttggggatgatgtatgaagtggactttagttccctgggtttagttcccttgttgtgcagtgcacggcttggacaaatacatgggtggccttgactaaaaggctttggttcaaccaggtgcttttctcatcgcagcttaactcctggcttcctaacactccccatgcgaggcagccccaattcacctctaaccctgggaggtgccaggaaacagagttggagccgcatctactgcttgacttctcaatgcaaacttaactattttaaagtgtacagttcagtggcattcaataaattcgcaatgtcgtgcagccaccacctctgtctagttccaatacgttttgttattgcctcaaaggaaaccccgtacccacgaggcagtcactccccattcctcctcctccagcacctggaaactactaatttgttttcttttcctataagtttgcctattccgaacattttgtataaacagaatcagaccagatgtgacctgttgcatcttgtttctcccgcttagcatagtggtggaagattcacccatggtgtagcatgcatcagtacttgactcctttttatggccttaggacaggccagggcatatgtatcccacattttaccacattttgtttatccatttatctgttgatggacccctgtgctgttcccatcctttggctgttgtgaatagtgctgctataaatatgcatttacaagtttttgtttgaacacctattttcagtcctttggggatacagagccaggagtggaactgctgagttacacagtaattcaacatttaactttttggaaaactgccaaactgttttccacgacatctgcaccattttacgttcctgtcaacaatgtgcaaaggtttccatttctccacctgtgtcaacacttgttattttccattttaaaacattatagccacccttgttagagtgaagtagaatctcattgtggtttttgatttgcatttccctgatgacaagtgacattatacatattttcatgtgctcattggccacttgtgtgtcttcttcaaagaaatgtctattcaagtcctttgcccatttttaaattggttgtttgtctttttttgttgagttgtaagtgctctttatatattctggaggctgactgacttttattcttctaagtcaaaggtgctttagcccaagtcctgtcactcaaaaagaaggctgggtgcagtggctcttgcctgtaatcccagcactttgataggctgagtcaggaggatgacttgagcccaggagtttgagaccatcctgggcaacagggtgagaccttatctctataaaaaatgtttaaaaaattagccagggacggtggcatactcctgtagtcccagctactccagagattgaggcatgaggattgcttgagcttggaaggtcgaagctgtggtgagctgttgattgcaccactgcactctagcctgcgtgacacaaccacactgtagcctgtctcaaagaaagaaagaaagaaaagaaagaaagagagagag

SEQ ID NO: 400369 - DNA, 145 bp, Homo sapiens
gtttaacttagtcttgaccaaaatgctaatttaaaactttacagcaagaaacttactttaaagcatgtctgctgttcatgtcagctgattgcaaaatcttctgtgggaaaattttcatgaagtattaaagtcctggggagcagag

SEQ ID NO: 400370 - DNA, 368 bp, Homo sapiens
tctcaccatgaatcacgtctgcagtgaagggttctgacatctagcaaggaactgacaagtaacccttttgtttttctctgtctcaacagtctggccaggtcacagggggacacagtgccaacaacatggatttttaaattagaatttgaggagctccccgcaggcatactggctcagttgcccacacagtccaagaacacccacctgaggaaggctttatggagctctctcattttgtttattccagttaatgaaagacaattcttacattcctaaaacaatgttcacacacatcagccatgatgtgatatgataaaggatggcttaaaaagctcccaccccattcgaatggtgggaatttaaatgca

SEQ ID NO: 400371 - DNA, 393 bp, Homo sapiens
cacagccaaccaaagcaaaaatggacaaataggatcacatcaagtttaaaaagcttctgcacagcaaaggaaacaatcaacaaagtgtaggaaaccccacagaatgggagaaggtaatatgctgggactgatgaattaatccattgtcaatctgacaatggattaataaccagaatacataaggagcttaaacaactctataggaaaaaaatctaatgatcttatcaaaaatgggcaaaagatctgaatagacatttctcaaaagaagacatgtaaatgtccaacaggtgtatgaaaaaatgctcaacttctaatcactggggaaatgtaagtcaaaaccacaatgggatatcatcttaccttcagttagaatggctattactaaaaagacaa

SEQ ID NO: 400372 - DNA, 220 bp, Homo sapiens
gaatattaaaaagtgcatgtgcaaaatagtactggaatatattcacgtattttaatgttaattctatatctatctctaatgccagaattagtggtacttttctgaagaatacatcttcgttcaatgtggtcgtattcttaattttttctataatattgcttgtaatctttagagttatggtttcattttttgactattaaatttgaaattgttgacatca

SEQ ID NO: 400373 - DNA, 548 bp, Homo sapiens
gaactgatgcaataatggctttccaacccctaaggctaaacgcagcaccctaaggaaaggctcaggtgagaggaggttcaaggttaaaagtcattcaaggagtacccactgactatttataatgtttaactggtattgggcagactgtcatacctagggactatatggccaccatctgggtactaccagcaactgctttcacgtgaaaaaaagatttccagaagaaacgggaagaattccaagacagcattagaaagcgtctcaacagtaggcatagggattctgcggtagctctgtagagacttctgttataaccactctgatctttgcacatcaaaaatccaagataaatcctgataaaatgaccagttgatggttatacaaataggctctggggttctaggcttggatttaccatgattttactgtgcattcatgggaacatgactcaaccctcagagccaaatcccttaaggtccaagaaggagactttttctccaaaaggaattcttccaaaagagaagccaattcagtgctttgctctaaat

SEQ ID NO: 400374 - DNA, 479 bp, Homo sapiens
cagataatgtgtaaatgcattcaggagataaggagaattagaaacaaggacattttttgtgtatttcttaggaataaaatggtaccttctacacatctcaattattaaagtacaaatagtgattgaacgaaatttttagaagaaatgttttaattgaatcttcacactagaggttttaccattcaatcaattaggttctgagaaggatggattggtacatcttaaaagacttgtaagatagcgaaggataggcagtgctaatgaccaacagcaacactcagcaggactttgtggaccaaaaaacttcaagttagaattgtgggtaaaggctgggcatggtggccctcacctgtaatcccaacactttgggagcctgtggtaggagcatcacatgaggccaggagtttgaggtttaagttacctgcagtcataccactggactcctgcctggttaacagacgctgtctcttaaaacaaaa

SEQ ID NO: 400375 - DNA, 610 bp, Homo sapiens
cagagcgagaccttgtctcaaataaataaaatgcatttcttgaaagtagcctatttaacaaagaaatggaatcaatgtaggtgctcatcaatggtggattggatgaaggaaatgtgctacatacacagcatgaaatactacaccgccataaaaagaataaaatctagtcctttgcagcaacatggatgcagctggaggccattatcctaatcaaattaatacagaaacttttttactgcatgtgtttagaatctctgttaataaggggcatcaacttttaggattgttatgttctcttgatcaattgaccccttatcagtatggaattactatcttcatctatggtaatatttgttcgtctaaaaaccaatttttgtaatgctaatgtagataatccagctttcttttgattactgttagcatgctatatattttagtttatgtttttatattaaaagtgtatttctttggagcagcatgtagatgtttgattttttaaaatcaaatctgacaatctctgtcatttatatgagtttaaaccatttacatttaatgagatttatgacatagttaaatttaaatatattatctttgtactttctgtgtgttt

SEQ ID NO: 400376 - DNA, 468 bp, Homo sapiens
ctccccggaaggtgcagtgctaattggctccccagagactccagtaagcatcttgtcagcctcagcaccagctccagcctggggggtctcgctcagaagcaaagtcactgagtgacctgtcctcctgacacccacaagactaaaatgatctctcagaggggacctcacagaaaccagcaccttgtccatgccagctgggtatctgagagaaactgctttgttttcctgaagtcatttgaaacagcgtgcagagacatttaaactcggcgggaaataggagaagcccaccttgacccttctaattctctggccccaggtgccttattaacaagagacagtatcagacacaccagacaaaagccctcctgagcccaaagagcccaaatgtctggaagctctctgctgagatgccaaaatgcatgcctttctgataaagagacagagacagatgaggtaccatgatatgga

SEQ ID NO: 400377 - DNA, 301 bp, Homo sapiens
ccattaaaaagtaggcaaagggcatgaatgggtgttttttgaaagacatacaagtggccaacaaacatatgaaagatgctcaatatcactaattatcagagaaatgcaaattaaaaccaaacaatactatcttacaccagtcagaatagctattatttaaaaatcaaaaaacaacagatgttggtgaggatgtggagaaaaaagtaatgcttatgcactgttagtgggaatgtaaattatcacatttatggaaaacagtatggagatttctcaaagaactaaaaatagatttctcaaagaa

SEQ ID NO: 400378 - DNA, 404 bp, Homo sapiens
catgttgtgaagatggaaattttgaaagaagtgtaaatatagtgtaaattataggacgtcaagtcaaggttatgaaacaaactatttttttatgtaaataaatgtgttaaaaagtaagcctgggccaggcacagtggctcacacctgtaatcccagcactttgtgaggccaaagtgggtggatcacccgagctaaggagtttgagaccagcctgactaacatggagaagccccgtctctactaaaaatacaaatttagccggacatggtggcgcatgcctgtaatcccagctacacaggaagctgaggcaggagaattgcttgaacccaggaagcggaggttgcagtgagccgagatcacaccattgcattccatcctgggcgactgagtgagactctgtctca

SEQ ID NO: 400379 - DNA, 467 bp, Homo sapiens
agcttgacgttggtggcctctggtcagcctcatggttgggactgcgtggaaatgctagacctgagagacctcatttcccaagcagtcttagagagactcaaaacaaaaaatggtctccgggtcccaccgtggtgtgtggccgctgtgcccgcagaggccaggtgtccataggctgagtccccacgtggacctgctaggtgggtagaaaggagttgaagatgttgtgctgttggttggaggagcttggaggtgtctgggaacattggatgttactcatatggaatcagcagaattagtagagccaagaacagacggcagtgccacaccccatggctggactgaggctgctccaatgatggcaggttgtatctgcgggcatctccaatttgctcagggaactctttccagattggtcagtggtataaatgaaggattaggaaattgggtaaaaagccagggaggaggga

SEQ ID NO: 400380 - DNA, 428 bp, Homo sapiens
cacattctgatcgattaagaactgtgaaattcagcagccagaatgattttggctgcatctagattgtgtttgtgctctttattccccagtgaagattaattttagtttgtagggtagaaatagtgcagattcttgggcttgagattttcagtcttcatgttcctaaagaccaaaggccaggaccagattctgcagtaattttcttttgtccccagctttgaaaactcaaattcctgtatctttccttgtcagctttttgaagcagatacaatctcctagttggagcaagggaaagaatataaaaagaattttccaatacatgtgttcaagtgagaaccagacacataggggtcattacaggtgtagaaggtccatttgaaaaaatccgcatagaagatgccacattttttcttcatttcccacctcct

SEQ ID NO: 400381 - DNA, 622 bp, Homo sapiens
gtgccttgtgtttattttagcctctctgagcttccccaccatccacacagggctcctcttcctcattcccacatggtgacatgctgggttccttctttctccaagacttgagtcagtggctgaacacgcactctcagggatgctggccagggactgaggcactgcctgtttctgtgttgattggtcctgggcatcagggttcatttgtgggagacccgaccacttcagggagttttatcctgtaattctttccagttctttcttcttgtcctgtgactgctttttctcctcccagttcctcagatttgttttcgtccacagcagtactttatggcggtttggaaggccattgactctccaagcacctgtgccacctgagtcgattttctctttcccatcccctctgccctggagattgtattcaacttccgcttgttttcattcagcatttcctgagtgcttgctctgatatatgttcagggcagcctccgggaatagcagactgagactccatccttatcctctgggggccttcaggccaacaggaaacaggggtcaattggctcacctctttatctctctgtgtggagagagagagcaaagagagaagaggcttcctgga

SEQ ID NO: 400382 - DNA, 421 bp, Homo sapiens
ttacatgtagacatataggttagaaggtatataagcactggaaaactttctaattttgagttagtctggtgatattttccaggtcttctccctgtaaccagttacccaaataaaaattccctcctttcccagttcatctgcatgttgttattgggccactggaataagcagcccgaccctcagtttggtctgggaacatttctgctgaggaggcaactactcttaccagttgggtatattttcttccaggcttttcagggcagttatcggtgtagaatcctgacagattgctctcaaggcttcaccactccacacttccaacagagaatggcgtgtgccttccccatcactggttttttattgtcaataaagtgaggcaaaattttaaatctgatgaaattctgtgtctgtgtcagagatg

SEQ ID NO: 400383 - DNA, 500 bp, Homo sapiens
actttttacattaatgggccaagtatagaatattttgagattcagtaagaaatattttaatggtggcaggccctggtccccttcattctgtcagactgcccagatactgcttccttcttgtccgttttgtttaaactttccattcatatttttttcttcctgaaatgtttctttattttgaggaatgcccccaaagcttataacctgtcagtgtgcattattttaccatgaaggtcaaatgctttattttctacctttctcttccccatcctattatcccttagcattgaaaacatttttatagtactatttttgttattgtttcccagtggtttttgaggaataatggacctgtttgaggaaatgtgtgttgcctgatctctagaaaaatgtggttacctaagacattttgcatgtgatttggatatgatttcaggggcttatggacccactaagtcccatccatggactcctggttaatggcctaaatgaaaaaaaaa

SEQ ID NO: 400384 - DNA, 405 bp, Homo sapiens
ctttccacctagagctaatagctaaaaatctccaatctcactctctttgtcttctattacgcattgctaacttaccctcaaactctagcagggggttctgtcttctctcagcattcaaacccaccaggcattctagcagcaccatgtttttctgggggacattcctctcagaacccatttccctgcctcaatctagctgactacttcctctgggtacagcacacctgtaatcctgggatctccttcctaatcatcctggagattcccagcacctcattcttgagttaggtcatctgttcttacatcccatatcttcctatttttttaatctgtgaccttattttaaaaaaaaaaagcccccttttgtggctttctgagaaaagatggggagtagaggtgttgaga

SEQ ID NO: 400385 - DNA, 462 bp, Homo sapiens
catgtcaggtatgaaaatagcctgtcctgtggattctgtcttctcagatgaagtgaaagtctttcatggtggttcgtgcaccaggagaggaaacaaacagcaatagggatttctccctgaaaagccacttaggaaaaattctattacccttttaccgtaagagaagagttgtagagtctacctgcagtttcacaatccacccactctggacctcaatttgtggcaaaaagaacagaagactttcttccgcttatgtagtttgggcaaactaaatgtctaaaaacagacaattagaaaaaggaattagaacagacaattagaaaaagtaattatactcatccataaaatagaatgttgtttagccggtatagtaatggaccatctaaaaatgtgggaagatgttaaaattagaatgctgaatgaaaagtataaaactgtgtctaatacggccatatttataca

SEQ ID NO: 400386 - DNA, 427 bp, Homo sapiens
tggagcagcagctacaagaggaggctgagcacctgagggaggagctggagagtctggcaggacagctccaagcccaggagcacctggaagctgccagccagagaaccagcagctacaggcccagctgagcctcatggctctccctgaggaaggtacgggagatcactcagaggaagaggagggagcccaggaggaaggggggactgttagcagataggagtgaggagtttagaacagctggtcactatgccgaccgggtttctgcgttaagttcggcatcaaaacggtgacctgggagtagaggggccaccaggttgcctaaggatgggtgaactggcccaagtcagaaatgaagcaggtcagaactcccctgccgggcagtagtggaactgagcttgggcaacatagtgcgactttggttctcaaa

SEQ ID NO: 400387 - DNA, 904 bp, Homo sapiens
agtttaacccactttactgaaccaattggaggcatccagcagaaactccttcaacattattttcttcatatgggctctcatttctctgcctcattgctgataaagtaccctcctttatcttactgattccactttctctcctgggccttgctttatgatttatttgtattctgcctcctttgagatatcctttcatattgattattttccctctaccttaaaaaaacctgaaaaatatctatgagcagtcttatagtaattggtgatctcagtgagagccatttcaggagagaaatgagtacagattccagaaggcagaaagctgataactgagtaggaaatatggaagttgaaaatgatgagggcagacttctttaataaaggcttacgatgaaatgagtaggggctgtatgatcaaaggattgtttgtttgttttttttaagagattgggtagatttaaacacgattacatgctttaaaaaagagaaaaaagggagaggtttgtagagtaaataccccagagtggagattcaagggattagcctcaaatgcctttatatacagactgtatccatctttataagcccagctgaaatgacacctctctgaaactccttttgattggctcagaagcaagtttttctctgatttcctgtagcagcttatacatctctcatggcatttaacacatattgtcttgaataacagtgtagttattatgagctttactgtctgggtttgattcctggcttcaccacctactagctgtgtgattttgggcaaattgcttattctctctgtactcagtttccttatctataacatggggataatattagtagctacatcgttgttatgaggatcaatatctgtaaagctcttagaacatgcatttttcttcta

SEQ ID NO: 400388 - DNA, 515 bp, Homo sapiens
cagtgtgatgctggattctgtgtcctcattagtctaacgagtctactctgttgcccacatcacctcccattaggaccactatgcccttttaaaaagtggtctttataagatgtaagtattatgacacccttctgcatacaactattcaatggcttttgattagccttaggataaaaatcccgtcctgccgcaccgacttgtccatcttgtgggtagccacttgttactacctctctcagtgtccttcccagacatgctgcttccactcctctcccctcagatccccgttttgcttagttacttcctcctcatctttcaggtctcaaagtagttgtcccttcactgaatgcaccgacaacctggcccagtaaagttactttgtcgtctgcgcccaaataatcctacccttccatctgctacattccttaaatctgcaatcccttgttcaaagcctgcaaaagagcatgagctccttgaagcaaagacagtattagtcatttttaatgtaaagtata

SEQ ID NO: 400389 - DNA, 473 bp, Homo sapiens
cctttgcacacgggaatgcctgtgctgatgcatactcactttggcacctgtaaaatctcatcactcaacgaaggtcctcaggcagaagggcgagctggcctggggacacacggacattacaggagatatattctcagtacggatttaatttagataacacattttatttaaaaacaaaacaaaacacatgacgttcaaatgccccaacaaaactaaagtgatgaactggagtcagctttctgatgatggtgagatggttctgtcggccacactctcccggttctattatcaaattctttgccatatgtttcatgtaaggcatgttttcttccattagtatagtttattaatgtttaatattttctagtgaattatcatgaggttttttttgtttttctgctttggatgaaagaaacatctgttatgcatgtcaaaaatagagagacattaaacttctccaaaccccttaaaaa

SEQ ID NO: 400390 - DNA, 1272 bp, Homo sapiens
  misc_feature (152)..(152): n is a, c, g, or t
  misc_feature (395)..(395): n is a, c, g, or t
  misc_feature (1120)..(1120): n is a, c, g, or t
  misc_feature (1123)..(1123): n is a, c, g, or t
  misc_feature (1125)..(1125): n is a, c, g, or t
agcggagggggcgtcgtctccctggtgcgcatgctcgcccccgctgcgggctagctgttgtgtttttttttttcccccgggcggcccggcggctgcgtactggctgtgggatgggaagtgaagccccagcgagcggctgcagcggggccggnggagcagccagcgggaggcggcggcgagtcggtgagcagctgggaagagcagaaccggggcggagcacctgcaggcgcgggcggcggccccaccatggcgattcgcaagaaaagcaccaagagccccccagtgctgagccacgaattcgtcctgcagaatcacgcggacatcgtctcctgtgtggcgatggtcttcctgctggggctcatgtttgagataacggcaaaagcttctatcatttntgttactcttcagtacaatgtcaccctcccagcaacagaagaacaagctactgaatcagtgtccctttattactatggcatcaaagatttggctactgttttcttctacatgctagtggcgataattattcatgccgtaattcaagagtatatgttggataaaattaacaggcgaatgcacttctccaaaacaaaacacagcaagtttaatgaatctggtcagcttagtgcgttctacctttttgcctgtgtttggggcacattcattctcatctctgaaaactacatctcagacccaactatcttatggagggcttatccccataacctgatgacatttcaaatgaagtttttctacatatcacagctggcttactggcttcatgcttttcctgaactctacttccagaaaaccaaaaaagaagatattcctcgtcagcttgtctacattggtctttacctcttccacattgctggagcttaccttttgaacttgaatcatctaggacttgttcttctggtgctacattattttgttgaatttcttttccacatttcccgcctgttttattttagcaatgaaaagtatcagaaaggattttctctgtgggcagttctttttgttttgggaagacttctgactttaattctttcagtaactaaaggcagatcttctaaaaaaggaacagaaaatggtgtgaatggaacattaacttcaaatgtancanantctccccggaataaaaaagagaaatcttcataatgaattataaactaattgattaatgtccccaaagaaatctgctttttactatatctttcagcattagagatttttctgttcttgaaaatacagtctgtgctctttgaaaaaaaa

SEQ ID NO: 400391 - DNA, 1485 bp, Homo sapiens
  misc_feature (152)..(152): n is a, c, g, or t
  misc_feature (395)..(395): n is a, c, g, or t
  misc_feature (1189)..(1189): n is a, c, g, or t
  misc_feature (1204)..(1204): n is a, c, g, or t
  misc_feature (1214)..(1214): n is a, c, g, or t
  misc_feature (1218)..(1218): n is a, c, g, or t
  misc_feature (1223)..(1223): n is a, c, g, or t
  misc_feature (1244)..(1244): n is a, c, g, or t
  misc_feature (1252)..(1252): n is a, c, g, or t
  misc_feature (1255)..(1255): n is a, c, g, or t
  misc_feature (1262)..(1262): n is a, c, g, or t
  misc_feature (1264)..(1264): n is a, c, g, or t
  misc_feature (1333)..(1333): n is a, c, g, or t
  misc_feature (1336)..(1336): n is a, c, g, or t
  misc_feature (1338)..(1338): n is a, c, g, or t
agcggagggggcgtcgtctccctggtgcgcatgctcgcccccgctgcgggctagctgttgtgtttttttttttcccccgggcggcccggcggctgcgtactggctgtgggatgggaagtgaagccccagcgagcggctgcagcggggccggnggagcagccagcgggaggcggcggcgagtcggtgagcagctgggaagagcagaaccggggcggagcacctgcaggcgcgggcggcggccccaccatggcgattcgcaagaaaagcaccaagagccccccagtgctgagccacgaattcgtcctgcagaatcacgcggacatcgtctcctgtgtggcgatggtcttcctgctggggctcatgtttgagataacggcaaaagcttctatcatttntgttactcttcagtacaatgtcaccctcccagcaacagaagaacaagctactgaatcagtgtccctttattactatggcatcaaagatttggctactgttttcttctacatgctagtggcgataattattcatgccgtaattcaagagtatatgttggataaaattaacaggcgaatgcacttctccaaaacaaaacacagcaagtttaatgaatctggtcagcttagtgcgttctacctttttgcctgtgtttggggcacattcattctcatctctgaaaactacatctcagacccaactatcttatggagggcttatccccataacctgatgacatttcaaatgaagtttttctacatatcacagctggcttactggcttcatgcttttcctgaactctacttccagaaaaccaaaaaagaagatattcctcgtcagcttgtctacattggtctttacctcttccacattgctggagcttaccttttgaacttgaatcatctaggacttgttcttctggtgctacattattttgttgaatttcttttccacatttcccgcctgttttattttagcaatgaaaagtatcagaaaggattttctctgtgggcagttctttttgttttgggaagacttctgactttaattctttcagtactgactgttggttttggccttgcaagagcagaaaatcagaagctggatttcagtactggaaacttcaatgtgttagctgttagaatcgctgttctgggcatccatttgcgttactcaggcatttatgatgtggaanttcattaattttcancttcgaaggngganggaanattctgcttttcaggcaccanttgtgaanaanaaaccancngtactaaaggcagatcttctaaaaaaggaacagaaaatggtgtgaatggaacattaacttcaaatgtancanantctccccggaataaaaaagagaaatcttcataatgaattataaactaattgattaatgtccccaaagaaatctgctttttactatatctttcagcattagagatttttctgttcttgaaaatacagtctgtgctctttgaaaaaaaa

SEQ ID NO: 400392 - DNA, 1220 bp, Homo sapiens
caaactcctgagctcaagcgaaccacctgactcgttctcaaagtgttaagattagaggtgtgacccaccttgcccagcctgtttttttaaaggtgtcactttttgagcatctcacatactaggcaattcgcatatcccatttagtcctcacagaggcgtcatgagggatgtgtcattgtaacaatttataatgagggaatagacttagaagggttaagttactggtgcccaaggtcatagagacataatcaaattggtctgaattccaatgtatgactaccacacctgtaacctgctatgctactctgtctccctaaaacccataaacttcttaaatctttacagtgatattccttcattttcccaatgcacttttataagtctgcaaaagtacgtaatattaacaaagtgtaaaactatgcccactctgcttataaaagcaggaggtagaaagacaggagtattaggaaactctgggcaatcaaaacattctatctatgaagttctggttaatgccaactcaccggtaatgacaggtagtaatctgagaacaagcatagataattggttcattttcttgctgtcactatggtagctcacattaggaagataacttggttcaggggcaggagcactggaggcggggcacctgcaggtcttcattttaatactcacataatggtgaaaattgtttgaaaatatttggaattaacaccaacactaaagtattcttgctgtcttggaaagggaagtcattgtcttgaggaatcttgtgtaagttcaatttggattcagagagctaatttctggaaagctgtattaaatgctaaggcttcagcattccactgggtgtgccgtcatctaacataaaataataccattttgtgagaagcgtatggtaaagagagaaataatcgagttgtagcacccacagattgagatcatcctgacactcagcagtgatgctgcaacgggataattgagggctaggcatgggggaagctctcgcaacttttgaaagctattatgaattttttagttttctcttgtagattcttgatttatctgcctcttgcttgtttttctatctcgaaagtatgtctgagaaatgctgttttagagagcaggtccttaattttctattgaattttgacatggagcccttcctcaattaatataaaatatacctactttcactgcccagttcttgcaatacaaaa

SEQ ID NO: 400393 - DNA, 222 bp, Homo sapiens
ctgaggacgatatcttcagctgagacttaaaggagaaggagccagtcacatagttcttgttttcctcgatcctggacaagatgggttgcaactgaaaaatcagatttagtgggtgaagtcacacaaaactgaagaccctctgcctggtgtacctgtggcttggctcgaggcactcagtctgtgccccgagtcctacgcaggaataggaggtctgaattgtgt

SEQ ID NO: 400394 - DNA, 1797 bp, Homo sapiens
acagtgtctttgggcgtcttcttgactgaatctgactccattggaggctgtgatccatggaacccagtgacatgcctgctggctaccactgccccttagactctgccccctgggatgagaccagagacccccagagcacagagctgatccccaggagagccatcagccgctctccaacctgcgcccgctgccgcaaccatggtgtcaccgcccatctcaagggccacaagcgcctctgcctcttccaggcttgcgagtgtcacaaatgtgtcctcatcctggagcgccgcagggtcatggctgcccaggtggccttgcgtaggcagcaggaggcgcagctaaagaagcacctgatgaggagaggggaagcctctcccaaagctcccaaccacttcagaaagggaaccactcagccacaggtcccctctggaaaggagaacatagcaccccagcctcagaccccccatggggcagtcctgctggcaccgacaccccccgggaagaactcctgtgggcctctgctgctcagccatcccccggaagcctcgcccttgtcctggactccggtgcctcctggcccttgggtccctggacactggctgcctccaggcttctccatgccaccaccagtggtgtgccgcctgctgtaccaagaacctgctgtctctctgcctcccttccctggctttgaccctggcacctccctccagctgcccactcatgggcccttcaccacctgcccaggatctcacccagtactgacagctcctctttctggagagccccaagggccccctagccagccccgcacacactcaactctgatactccagccctgtggcaccccagaccctcttcagctacagccacaggcctctggagcctcgtgcctggcccggacatctggtccctcagagtggcagctgcagcaagaggcagctgaagccctcgtggggctgaaagattcatcccaggctcctcgtgtgaccccttctgtgccccccaaccctgcctggatctccctgcttcacccctgtggcccaccagctcctgctggaggaagaggattccagcctgttggcccctgtcttcgacccagcccagccccctctgttgctctgcatattggccgtctggggtccatctccctcctgagctagaaacccagagatggaggctgtcttgctatggcagggaggtgacagcctgctggcactgtatatttagtgtcttacttaaggatttatgcatggaatttaatgtagtacaagcttcgggcttttttgtttgtttgtttgtttgtttgtttaagctttcaggtgcttcattagctttcagttcctttggtagtgtgggcatttccttggctgacagtggatattcttgtacccttcttgggtcctgggatctcttgaaatccccaataaagagagagttgtgctatttaagctgaccagtatctataaacgtgtttgcatgagtttacatcccaggattccatgattctgtaaatgcctatgcattcatgtctgtctccatgcatgtgaaaacaggagagtgttttcattttgtgtctaggtttgtgtgagtaagcaagaaataaacctttgttgttgtaagccactgagatttggagagtgttaccacagcctaacctagtctatcctgactgacagaaaggacttgttcatttcgcttctcaaagtgaaaaatctgttatccaatagctaccatagatgaaaacaaacttggatttttttctttgtccaaataaaaaaaaatgatgtaaagaaataa

SEQ ID NO: 400395 - DNA, 1111 bp, Homo sapiens
ggtacccgttcgtacgagaatcgctgtcctctccttgctcgagatccattgtgctctagatctcacccagtactgacagctcctctttctggagagccccaagggccccctagccagccccgcacacactcaactctgatactccagccctgtggcaccccagaccctcttcagctacagccacaggcctctggagcctcgtgcctggcccggacatctggtccctcagagtggcagctgcagcaagaggcagctgaagccctcgtggggctgaaagattcatcccaggctcctcgtgtgaccccttctgtgccccccaaccctgcctggatctccctgcttcacccctgtggcccaccagctcctgctggaggaagaggattccagcctgttggcccctgtcttcgacccagcccagccccctctgttgctctgcatattggccgtctggggtccatctccctcctgagctagaaacccagagatggaggctgtcttgctatggcagggaggtgacagcctgctggcactgtatatttagtgtcttacttaaggatttatgcatggaatttaatgtagtacaagcttcgggcttttttgtttgtttgtttgtttgtttgtttaagctttcaggtgcttcattagctttcagttcctttggtagtgtgggcatttccttggctgacagtggatattcttgtacccttcttgggtcctgggatctcttgaaatccccaataaagagagagttgtgctatttaagctgaccagtatctataaacgtgtttgcatgagtttacatcccaggattccatgattctgtaaatgcctatgcattcatgtctgtctccatgcatgtgaaaacaggagagtgttttcattttgtgtctaggtttgtgtgagtaagcaagaaataaacctttgttgttgtaagccactgagatttggagagtgttaccacagcctaacctagtctatcctgactgacagaaaggacttgttcatttcgcttctcaaagtgaaaaatctgttatccaatagctaccatagatgaaaacaaacttggatttttttctttgtccaaataaaaaaaaatgatgtaaagaaataa

SEQ ID NO: 400396 - DNA, 434 bp, Homo sapiens
tttataatacatattttccatgaaaatttagaagaacacttatatagatgaatgatagattatcaaagttttcccagatttgtcaggctttgttcttcacggttttcaaatgaaagggcctggagaaaccgaagaactaaaagggttgcagaaagagtcctaaggggaaagaaaaactgatatactcacatcttcgacctaggcaacaaaagttatgagtcaagatatttggtcacataactaaagataacttaggttttatgacatttttgttttttgttttgtttttgtcagttaaaatagggaaattttaactgaaatatcaatgaacagtcccattccctatcctcaccattggtacagcggatcttgtttttcttaatgtggtacatattaataaaatttatgagacctaaggtctactgcatttgaaa

SEQ ID NO: 400397 - DNA, 407 bp, Homo sapiens
acatgtcctcaaaatacagattaatatgtatgtatgcatatgaagatgtgggaggagaatatgaaccaagggttacagtggtgatctctgggtggtgacagagatattttattttttgttttggctggttccatattctatgatgctcatgaagtgcttttgtaataagaaaatattatttaaaatttaaaaataattttctttgctatcggtaagtgaatagcagatttttaggaggcctaataaatccataaatccataaatgaaatctccagttattaggctcctcaaggacagggtctgcagtggagttggctctatgttcttgatatttaccagaatgcctagcagctaattcaacaaattaatacatttaatgcaagagaataaatggaagaactagatct

SEQ ID NO: 400398 - DNA, 446 bp, Homo sapiens
ttctccaaatgaactaggaaactagtttctggaagtgattacgtttcccactcctgccttccaccagaagacctcatcccattccactcttcccctctttcaatccatgctgcctacatgtggggatagtttaaatttgacaaactaaagctaattcctgctataagagtaataactgctcattttccataactcattcttaaagttttagtaatgtaaaagttatttttttgcagtaagttataatgatagaagcttacatgttttttcatgcctcatctgtttccccttaaaactataattatcagtaaagtcctgtggtatttttcaatttgtaagaaactaggctatatatacattgggaaaaacagccttcatttgtcaatgcactagtgttccaaaggtttctggtaactgtgtgctattgctttttgttgacttgcaaa

SEQ ID NO: 400399 - DNA, 528 bp, Homo sapiens
agccaaggcctgaagacctttcctgcaaggtcgcagaggaagaggcagaagaaggaccagaacccagctcccctgactccctatccagtgctcttctcatagattacattgcttcagcatccacctggctattgctccatccaggggttacaggagtcactgactgttttggttgcttcttggttggaggatgttgtgcctcaccgatgagagccggaagcaaaggtaccagttcttagaggaagcataggaatgtgtcccttcctgctcgggtctctcaactgaactcaacccttccttgattgattgacaagcatgttatctctcataatccctgcccggtaagggctgatgtccccattttacagatgaggatattggagctcagagaagtgaaatgattgctgaaggtcacacagcctggcttcaagcctctcgggctccaaaaggcatcttctgttctctccgtcaggaagcctcttttggatgattaactgagattaaaaatgaaaagacacatgaaagaaa

SEQ ID NO: 400400 - DNA, 452 bp, Homo sapiens
ttcgttgcccccctttttggtttttggctctgtgcccccccccaaaaaaaaaaaaaaaaaaaaaaaaaaaaaaaaaaaaaaaaaaaaaagccaatggtccctccgcttggaggatgttgtgcctcccccgatgagagccggaagcaaaggtaccagttcttagaggaagcataggaatgtgtcccttcctgctcgggtctctcaactgaactcaacccttccttgattgattgacaagcatgttatctctcataatccctgcccggtaagggctgatgtccccattttacagatgaggatattggagctcagagaagtgaaatgattgctgaaggtcacacagcctggcttcaagcctctcgggctccaaaaggcatcttctgttctctccgtcaggaagcctcttttggatgattaactgagattaaaaatgaaaagacacatgaaagaaa

SEQ ID NO: 400401 - DNA, 457 bp, Homo sapiens
ttgcaaaactgaacttctatacccaatgaacaactctccattttccactccctaccaccccgttaaccaccattctgttttctgtttctattaatttgactcctttagataactaatataagtggaatcatatggtatttgcctttgtatgactagcttatttgatttagtgtattgctgtcaagattcatccatgttgtagcatgtgtctgaatttccttcctttttaaaggttgaataatattccattttatgtatgtgtgtgaaccccacacaccacacacacatatagcacattttgtttattcatccattagtggacatttggattgcttccacctctttaaatgaattttttcttactgccatttggtgggtacatggagaactcacacctaatttaaaaacccatcccactggttttccactacacaggattccctactaagctggcttg

SEQ ID NO: 400402 - DNA, 434 bp, Homo sapiens
tgcacccccactgtatgtttttcttgccacttggttatgtcttaaaatcagtgtgtggaatctgtaaatattatggaccccattagggcagaaaaggtgagtggtcgcattttgcccctctgtgagaggctccttagaactccttgcctggccggcacggtggctcacgcctataatcccagcactttgggaggccaaggcgggcagatcacgaggtcaggagatcgagaccatcctggctaacacggtgaaaccccgtctctactaaaaatacaaaaaatttagccaggcgtggtggcgggtgcctgtagtcccagctactcgggaggctgaggcaggagaatggtgtgaacccagcaggcagagcttgcagtgagccgagatcacaccactgcactccggcctgggcgacagagtgagactccgtctcaaaa

SEQ ID NO: 400403 - DNA, 118 bp, Homo sapiens
gcagcactataatatgtaattataaattatgtacctataccccatgtttattgcagagatacctacacccccatgcttattgcagcattataattaataaactatgtacctgcacccc

SEQ ID NO: 400404 - DNA, 394 bp, Homo sapiens
cgaggggcgcgccacgaacccagcgggaatccctgcgcttcccggcaccgtcgggctgaaatcggggttcctagcgttggcggcctcgggctgggacctccccactcccggggctccgcagggcgcgcacgtggcgctcgggggtcaccgttgcagccgctttcccgaggaggcccggattgaaaacttctttaaaaaaaaaacttaaaaaaaaaattccgtcgccctgggcgcagccttaggtacctggtgccgctcgtggggtcccgacgcccctacccccgggtccggaggagcctgcgccgggccgggacccccagggcacaagaggccgggggacccctgcggtcgcgcgcgcgcgagggggcgggggcgggggggacacgagtttatt

SEQ ID NO: 400405 - DNA, 443 bp, Homo sapiens
gataagaaagatgctgttgatgtctaattgattttatgtcacttatgtgacaatatgtttgactttgacgtaatcagttatgatttagtaaaataacagcaattttttcttccatggcacgaatagttttcttcctgaaatttcctgcattgtgaatttggggtttcactatgttttcctttgctttcttttatgccatctccttttttaaaaaaattgtggtataatgtatagtaaaatgaacagatcagttttgacagttatgtatatttgtataatccatacccctgttaagacaggttacattgccatcaccccccaaaggatgtttattcccgataaactacccccataatcaacaactgtttggattttatcaccatagactagctttgcttattctagaatttcaaataaatgaagtcatgcattatgaactccct

SEQ ID NO: 400406 - DNA, 418 bp, Homo sapiens
agctaatttttttgtatttttagtagagatggggtttcactgtgttagccaggatggtctcgatctcctgacctcgtgatctgcccgctcggcctcccaaagtgctgggattacaggcgtgagccaccatgcctggtgccttggacacattttgaagttagctgattatcacacttaggaatgtaagacctagatttgagtcctatcttggccttttgctactatgggacctggagactgaattcatcatatgtaaaataggatcattgctttttgcttttttgtttcatgcagtgaagaaaaaaagatgagatagtacatgtgaaaatgctctgtaaatggaaaaagtatataaactcataagatatgctgtcagagttgggttagattcctgattctgccacttactacctgggta

SEQ ID NO: 400407 - DNA, 605 bp, Homo sapiens
tcacccctgtggagatagcttcagtgtttcccagtgacctagaagcaaagtccatctgttggcaagcatttattgagcatctattattatgtgctaggggctggggagcccaagatgaaccaggcataggcccagccttcaatcagcctggcccatatgctgccttggcctggcattcacatttccacctgctcctcctgcctgctacaccgacccaccactgcctcaagcagcctacatccacagcgggatgcctgcactgctgcttccgcgtgtgctggcctgttggccctgtgtgtgtagtatcctggccccgtcaagagcttgtgctgtcttcagtgccctgaagtcagcccctctgcatgcacgcccttctgcagccctctggcctccgtggccaggtggcgagtcctgtttctgtcctgggttaactgaagccttggcagctgcccttgctgcctcatggggtgttttttggcctctatccctctctccctccactccaccctccctttttgctaccgcctgtctcttctggtttttgctattgcctggaaggtaggggacgtcacggtgctttgtgcagtagagtagccctgattcca

SEQ ID NO: 400408 - DNA, 374 bp, Homo sapiens
acacaccctcggctccagccctgagcccaggcccggatgcagttccttcccctgccccgtcacgcactgtgtgtggcttttggacaatcaaggggagctaggaaggagcttctggacgtactcagaacaagtggatgccggggtgcccacagcacagaaagaaaaagcaaaacaaaacaacgcagtgtttggccctttgctatcatttcatcacagcatcccccatcgccacttctccatggtctcactttatgctgtttaggttacctgcggtcaccctcggttcaagaataagtgagtacagcacaataagacattttgagagacagaggaaccatattctcataacttttattacagtatattgttacgac

SEQ ID NO: 400409 - DNA, 433 bp, Homo sapiens
tgagacagagtcttgctctgtcgcccaggctagagtgcaaatgcacagtctaggctcactgcaacctccacctcccaggttcaagtgattctcctgcctcagcctcccaagtagctgggactacaggtgcatgccatcacaccaggctaatttttgtatttttagtagagatggggtttcaccatgttggccaggctggtctcaaacccctgacctcatgatccactcgcctcggcctcccaaagtgctaggattacaggcttaagccaccacatctggcctgagctagcatccctaacgagttcccaagcgatgctgaggctgctggtctggggaccacacttttagatctctggatcagattatttcagggttcctttccagtttaaacagtctaagattccccagtaacatccaacagatgcagcactca

SEQ ID NO: 400410 - DNA, 468 bp, Homo sapiens
ataatgacattgtgttttcattcggttgtgcagtggggctttgaaactgtgggaaattgagagacaggcccttgttaggggaaacaaaaatggtttctaatttcaaggttgaatatgtttcttttcataaaaatacctcatcatttctaatagtctgaatgacagtcttatttctcttcattggtaggtaaaacctaacgttttctagacaataaaaagcagtctgagagatatggatgacatatttaaaaatactaacatctgaaaatatatcattttatagatttgactcgggaatcatgtaagtttcttctacaatgataaaaagtcaaaaagaaaatgaaaattaattctttaaaactgaaaggaaaatgaaacaaatgaacctaactgtgttggcttagtgacttaaccacatatatgtgactttaagcacagcaatttgactgtacaaaataacaataaaaa

SEQ ID NO: 400411 - DNA, 415 bp, Homo sapiens
aactttcttttttgttgattcattgaaggcatccctaaaagctcatttttatcaaattcaaaaataagaattgtagccaggtgtggctcacgtcaaaatcctacttcgggaggtggaggcaagagaatcacttgagcccaggagttcaagcccagactgggcaataagtgagaccctgtctctattaaaaacaaacaaacaaaaacaactaattgcatgctaatgccaccacttatccactcaagaaaaggcaactctacttgtaagctcgtaggctatgcataaagcaatcacaggttgttagtaaagagtacctaaaactaaggctagacagaaccattagccctccacagaggttgaatcttaaattttgtgaagataaaaattgcttcccattccaaatcaacatttatta

SEQ ID NO: 400412 - DNA, 386 bp, Homo sapiens
aaaagttattaatgataataacaaaaatttaagtacctcagaacaaatctaacagaacttatgcaagacctaaataaactaaaattgtattgtttaatatgctcaggtcaattgttctcaaaattttggtttcagaatccctttatactcttaaaaattaccagcctgtaaaagcctgtaatcccagcactttgggaggctgaggtggatggatcacctgaggtcaggagttcaagaccagcctggccaacatggtgaaaccccatctctactaaaactacaaaaattagctgggcatggtagtaggcacctgtaatcccaactacttgggaggctgaagcaggagagaatcgcttgaacccaggagatggaggttgcagtgaacc

SEQ ID NO: 400413 - DNA, 409 bp, Homo sapiens
gcagaagttcctaccatgatgcctagatctctggatgtcatagataatgcacaagcggatttgaatccaatccatgtcaatagatttatttgaaaatcctaccgatagtgacagagacctgttcatgctcagcatgtagaggaagtgggtggagttaataaacaggctatccatagatgtgagtggaaacaaagggaaatacatatggaacacacaacgagtagaaaggaaaaccagggaggcagaccagggcaatgctctctcccctgcctgagggatttcctcgcctctacttgctgctttctgtgccttccaccacagttatctctgcttcttccacttccgaatgcctaaaaatggccatttcagcacccaagaataaatgaatcttagtccaatttccccaaga

SEQ ID NO: 400414 - DNA, 691 bp, Homo sapiens
ggcatacacatagaatcctgtcacatccaggtagaacctacaactactcttcagtttcctccaagagtttcttatgaaattagctacaagtaatcaataactagctagagaacacaagaattaaactctctttttatctcccctggctccagcatttacctagggctcactcagttcctagcacagtacatacacataggaaagtatgtcaataaacaagtgctgagctaaagtgacagtgtttaagtttccaaccataagcagttcacataaaagacttatgggccagcaaactactactgaagaaaaaataatggcatgtcagagacacagttaaggataaagatatttatcttgccttgaaggagatttcagttttacctgagtgacctttctataaactaaaagataatctcctttgttgggaaggcataggggtcaggaagattactgaattctctcagtcactaagctcttataattatcaaagaaggtgcctgctgaacacaaaataaaggccccacatgtgacaggcaggcattcgttaacttatttcactagtaaagaacaaccaccagtaacagaataaatgaacagaagtccatctaggcataacttaatactagatgctggccttagatatcatctttactcaaattaaagggcattaccaaccaagaataattaattc

SEQ ID NO: 400415 - DNA, 499 bp, Homo sapiens
ctttttggggcctcattttttttttaatctcatgaggtgtaaggaatacaatgagttaatacttacagaattcttagaatgataccagcacactctaagtcttcagtaaatgttaatgggcaatattgattactctgtcacttgaagcactttacatttatctcatttaatttcttataacagccctttgtggtgggtgctgcttttttttctcttcaatagatcaacatatgggggctctgagaagagaagcagcttaccctaaagtcacagagctagtaaatggtggagtctgacttgagatccaagaagggagcttctgggatctttggctctaagctacaatgttattctaggggaatgtactttcttatgagagaaaaggacaataaataagttaattgaattttcggattgtcgtcagtggagctgaaatagggcaacatggtattaattagctactctggacatagaattgagcttggcaagcagagcaggc

SEQ ID NO: 400416 - DNA, 666 bp, Homo sapiens
cggtacccggtgtttatcgatgccacatttctctggctggaaccctgagagaaatgtggctggtttcccagagagttgggaaaggttgttttgaagccgtgggtagaagtcttaatgttgttctaagtgtatctctggattctattttgctctttttcttcttgtcatttcagatattgaggaaacagagcaggcaatttcaaatttctctttcaagtaggtaatcaaataagcaagtgtgttcagaacaattaaccttcagtaataatacctttcatttttgtggtggtacagtttacaaagcactttctgttgcactctctgtagcacgtaagctatgaccaggccaccctccttctgatttgtatctgcaaatgtctgggacgcagctaagaaagcattgagagtctaaagatcctgggtacaggcccggctccatcaactaactcgatttttatggtgtaagacaaatctctgggtctcattttctcatcagcaaagtaagtttggactaatgtctgcttccaactccaaaattctatcattttaagtctagtttatcttcctctaaaatatctgaatatatagaataataaacagaggtgttttgctttgaaaaaaaaacaatacatctaccatattattttcttataaataaaaaaaaaa

SEQ ID NO: 400417 - DNA, 550 bp, Homo sapiens
tctaaaaattttataatagcctattatgtacactttcgtcccagttctaaattcagagactatcttagacaaaagctcagtgatgagatgacaaggtgttagtcattattaacctactatagtatctaatagtataaagtgaacaaagcttaagattcaggttctgtagaagtatgtagttaaacgattggttttttttggatttcttccagaatcacaggaagatgaaaaggttctgaagcatttacaattttataagctttcttcggggtaaaacttatgtttaaaacttgccatgcaggatgtcttgcagccccaccacaaagaagattcagtggagctgaacaagctcactaccaagccactgaaaagaggaaagaaagtccatctgagatcaaaggtcgcacttcccatttttttcaagttctgcaaaggtgatctgtttccctttagtgcacaggaaataagtgagatgttctctaaaagcctttacctgtttcaccttatactgtaatcactaaatccagaagactaacgcaaactcatactt

SEQ ID NO: 400418 - DNA, 444 bp, Homo sapiens
attttctgataaattgctttgtaaaaatgctttttgaggctttcataatgtttttcaaaatcagataacatacctaaaggaagatatgaatgtcttttttaaaaaaatccctcctccccacaatcttctacacaaatatataggtgaaataaaaatacatgtagataaacacacacagagacacaacacatatgtagatacatataaagagaacatacctattgggataaacatactggtagccttctacattatctgctaacatgaacatgcatggatgtgtgcacacaggcctaaatatggaagagagaaagagaaagcaagggagagtgcaagaaagagagaggaagcctaaaattcatccctgaagtccacctattagtactttacccaattgcccagctatgcacatacttactttcacaaaataaagattccattata

SEQ ID NO: 400419 - DNA, 455 bp, Homo sapiens
gtaacttgatctatgaagcatccttcatagatatatacaataataaatcttatatacagagagtttttacatgaaagaggacgtacttagacttagtaaatgtaaattcatttcaaagtgttgctgatactgaattcatagtacttttgtcattatgaattttttcaagtagtatgtgctatgaaaataattatcacaagtggaggaagccttgtggtttttttaaaatataaaaagagctctttcatacttgaaaaggttggaaaacatttgtctaggccagtggtctccaaactcaagagacagctcccttatcactaaaagaaacttaagcaaacaatcaattactttttatacatgtattttaaatagattgtgtacaacagtattgatgtgttatgtaatattataaatagtaataaaaatagaaaaaggcttcagataaaaaaaaaata

SEQ ID NO: 400420 - DNA, 617 bp, Homo sapiens
ttacaatgaggtcgtgagggtaggtcctaatccaacgtgatgggtgtccttataggaaggggacatttggccacaggcggctgtgaagggagaacttcatgtgaacgtgtagacctgcacgccgaggaggggcctggaacagatccatccttcacagcctcggaaggaaccaacctgctggcacctcgatctcaaattcctgcctccagaactgggcgacaaggcgtttctgttgttgaagccacccaggctgtggcactttgttatggcagccctagtgaaagaattcagtcacttttatttccaagggaagccgagttaaatgagctccctcaagagatcttcctgcaatatttgggacgtgtctgtgtgtgcgtggacagggccgtctgcaggcggaccagcatgcggcgctggcaggcacctcctgtgtcacccttcaggcatccagggaaggaagcagatcttcccagctgttccgtgttcaggcctggctttcgagaggcttcaggccggaggggggaaggtggctgaagctggtcctcggtctcttcgagcccctcaaagaactctctgggtgcattagaaaccatccttgtgctgctggcagcagttgc

SEQ ID NO: 400421 - DNA, 484 bp, Homo sapiens
tgaaagccacaatctgccctggaaacccagctccaccctgcttccactacatcaggaggtgaaggaggaaattgaaagtgtgaaacaccagtgggaggaaaaggttcctgtaacaaatgtggttatcaatgggaaagaagctttctagagcttatatacggggccgagtcatgcacacttcatcatactcaccaggggacgacccagaccatcattcttctctggtctgccaccttcatcctccacttgcagcctcctttgcagtgaccatacaggtgcagagcatgagcaggatgcacaggggtttatgtggtcaggcctgcctggagttggcacatagcatttctgcttccattcttaggtctgaaatccaggtcacagagccctaacataactacaaaggatcctgaaaagtgttgtattccagtgtgcctcggaaaagaaaataggattaataaactttgattagactaaatcattgaga

SEQ ID NO: 400422 - DNA, 585 bp, Homo sapiens
tgaaaggaaaacatataaaatgtacaaggcactggagagaagttatacatgatcgctgccttcataatagattcattgatatacaatgtgaataagggttgacaaataccagttgaataaacaattattaaaaagtttcaagtggaagcctcccatatttctccactatatttttgcaagtgcttaacaaaacaaaacaaaacaaaacaagggtttagggtggggaggggaataaaacaataatcaaaagtctcccctaattatcacagtcaggcctgaattagtaaccttgaatatcaaacacaaactctcaaagtataggacagaaacaacaaaacaagtaattattaagcacctactacatgccaactacagttctaagaattgaaacaaaacaaaacaaaaagggcaaggagaaacgaaaagataagacaatgaaagagaagtcgaagtcaggcccggcacggtggctcacgcctgtaaatcccagcactttgggaggccgaggctggtggatcactagagcccaggagttcaagaccagcctggccaacatggtgaaaccccacctctgctaaaaaaaaa

SEQ ID NO: 400423 - DNA, 706 bp, Homo sapiens
  misc_feature (580)..(580): n is a, c, g, or t
tgaaaggaaaacatataaaatgtacaaggcactggagagaagttatacatgatcgctgccttcataatagattcattgatatacaatgtgaataagggttgacaaataccagttgaataaacaattattaaaaagtttcaagtggaagcctcccatatttctccactatatttttgcaagtgcttaacaaaacaaaacaaaacaaaacaagggtttagggtggggaggggaataaaacaataatcaaaagtctcccctaattatcacagtcaggcctgaattagtaaccttgaatatcaaacacaaactctcaaagtataggacagaaacaacaaaacaagtaattattaagcacctactacatgccaactacagttctaagaattgaaacaaaacaaaacaaaaagggcaaggagaaacgaaaagataagacaatgaaagagaagtcgaagtcaggcccggcacggtggctcttccttcatttttaaccaatgaaaaaagaaggaaaaaaaatatccaaatgtatatgtttccttggtagtgacctaagacagactcaggacttttgatttccagtccnctgttatttctttttcttttcatttttttgagacagagtcttgctctgtcactcagggtggagtgcagtggggcgatctcggctcactgccctctagtctgggtgacagaatgagattttgtctca

SEQ ID NO: 400424 - DNA, 600 bp, Homo sapiens
ataattgctgtggttttcattagggattgataattttacttgagatagggagcagctggagatgaggcacctctaaaccaccagagtgaaatgtgtagtcagggccgggtgtggtggctcatgcctgtaatcccagcactttaggaggctgaggcgggcggatcacttgtggtcaggagttcgagaccagcctggccaacatggagaaaccctgtctctactaaaactacaaaaattagctgggtgtggtggcaggcacctgtaatcccagctactcaggaggctgagaccagagaatcacttgagcccaggaggcggagactacagtgaactgagatcacaccactgtactccagcctgggcgacagagcgagactccatctcaaagaaaaaaaagtgtagtcaggaagtgttttggatatgaaacatagcagagaagtgtcttctgtattaaaaaaaaaagttggcaggatataagggggctggtatgtaccattcctgtcaaaaagaaacacatttatgcaaatgactcaagattaagatctgaagaaaataaagacataagggaaccagctgcagaacaaagagtaaaaactgagc

SEQ ID NO: 400425 - DNA, 525 bp, Homo sapiens
tgactactaacctgaagtgggcattcgtactcccaagtctattcgttttcttctaggcaattatttcacacctatcctctgctcataacaccatgaccttcttcccaaactcactctcagttaaaggctttcccttcctattgaggaaacagaagcagacagaagagaactttcaactgccccaagctctatatttacctgcactagttgcatctatgcccatacatacactctgccttttttttttgctactgtggataaactgtccatgttctgataaagccatctcctccccgtgtaccagatcacgtactctcttacctactaaaggcactgctccaacaactgttccctcttccttctgcagcatcagcttttccctctctgatcattcctactcaatatagacacacataatgctgcccatcttaaaagaaatacattatgtaaattcatcatctctaatctctgtcattccattttcttaaaaacctattcctagcaggcttttgcccccaccatctc

SEQ ID NO: 400426 - DNA, 581 bp, Homo sapiens
ggtagtaaataaatgtgtatagagaaacaataatatagactgtcatatttgagtacctttaaaaaaacaatcccaatgtgtaagtgaaaaaaaatactagtaactaagtattaagtagcaattaaattaaaactaaaaggaaaggatgcatgcagtgactagagaggggagaaagggtcttgttcaaaatttcagaaatagaatgaggctttgtgataaaaaaaaattcaagttagagattgttagaatcaggtactaaagttatcagtgaagacagaaattggttcactgggaaaatgagtactaacagcagtaatccgacataacagattttctcagacagataagcactaacttcagatgataaaattacacacagagaagaatcatacatagccgaaaacaggaaaaataaaaactgaggccatttttatttcctatgaaagtgtgtgtatacaggaagcacccagtgaatggactgcagaagcgacagtcgtgagtgtagttagggaagagttacatttcaattaatgtgaggaagagtaagaaataaaagtagaatagggctaagtattactcag

SEQ ID NO: 400427 - DNA, 496 bp, Homo sapiens
cggatcgtggttccaatcacagcctgagggccaggaggctgggacctggtttgggccagaacttcttcataaggattaagccctctctcccctttacctccagaggttggaaacatcttcccctgtagcaaggcagtcaccttaaagctgcctctacttcccgttactcctgctacttctccgacccttctcactaccctctagttgttttaactcagtcatggggatccttgacacatccagacagagagagagagaaggcctaaatttccacaagcagtagcgacttcccaggtacataaagtcccatccttcaaggaagaggatgtgtggttccaacctgaatacaggttcctaacttggtaagttgaaaacagcatgctgcactctggctacctccttaaaacaataaccatatcctttgtggaattattatagaagtaatttaacatggaaggaaaatcattgcattaaaaagataattcatttaaatatt

SEQ ID NO: 400428 - DNA, 444 bp, Homo sapiens
caggcctggcatatactaggtccccagcgaatgcttgacttaatttaattattcattaaacaaatgtatatgagtacctatcctgttttctacattgaactaagaaaataatagatccaatgtcagcataacctaagacaaagtaagaccttggaagtttcgtaaataaaaattttgtctgaccatgttgtggttcacaagcatgataactctgtttttacgctcacatgtgagacatgcctccttccaatcttgttatgtcagcacattatccatctgatgcgaaaaaatttttctgtttcctttagctttcagagagcattaatatccctattttatttacctcagactaagaaaataatctccacttaccaaatgcatgcatgtttgtgatataaaaagaaataaaatgaatattttactattatgcattaataaaagata

SEQ ID NO: 400429 - DNA, 404 bp, Homo sapiens
tctaatcaatagaatatagcagaggtaaaagggtgctgcttctgtgattacattgcacaagattttaacttccatcttgcgagaaaactctctattgacttcttccccagttgtctttgataacgtaagtcaccgtatcgcaaggccctttggcaaggaagtgagagcggcctcctcataatagtcagcaagaaactaaggccctcagctcaacagcctgcaaggaagcaagcccagcccacaaccctgtgagcttcaaagtggattcttcttcagtcaggcttccagatgacagcctagcccttgatcgcagtctgtgacagacactgaagcaaagcatccaactaaactgtgtctggattcttgtcccactggagttaaaataataaatttgcattatttaa

SEQ ID NO: 400430 - DNA, 236 bp, Homo sapiens
ggggggcggcgggcgcgaccgtcccggataggagcgcggcccgggtccgggctggacagggcccaggaggcgaagaaggcctcccacagccatcaaccccacccaccatggccggcgcagcaggccagggacaagccccgctccttccgaagctagagacagagaaactgaggagctgaacgcagcaatttcctcgccccgacccccacactcccgacagcggaacaagccagact

SEQ ID NO: 400431 - DNA, 398 bp, Homo sapiens
cactatcctcaatatcctcacataagaaacccaacaggtttatttcttatcttggtccaagcctaccacttgccttcctacttgtctattctcaaggaaaaaaaaaatcacacaatcatcattacaaacctcatgtggcactgagctttctgtatgaggctattctgctttgagactgatgacaatacctaagaggatcatgcatgctctattagtttacttctctgtcttatatctcaatttttcccttaacatatccttatgttttacctacaatccctttgttttcctctctattgctctggagtcaaaggatatgttattacagatataagacacccgtacacattcagtgcccactgaacactgatcaacctactataggttttctttaaaaa

SEQ ID NO: 400432 - DNA, 280 bp, Homo sapiens
tcactcttttaaaatgaatcataaaatccagcattttgctctgcttgtcccattacttatccataaaaactagatttaatttctactgtaattatttttttaaaatacacatttagtgctttaagaatggaataattacaggtcgggcacggtggttcacttccgtaatcccagcaatttgggggggtgtggcaggaggatcacttgaacccaagttcaagtggagtttgagaccaggctgggcaacaaagcaagatccagtctctacgtaaatagaaat

SEQ ID NO: 400433 - DNA, 873 bp, Homo sapiens
ctgcgcaggcccagcagctaagatcgggtccggcgctccagaacagaacgatccctgaggctcccttgctcgaactgtgggacttaccctactatggtccgagcctaccctatttcattatactcaagtaacgccccagaaattccagagaatctcacacaaagaggttgagtcttgccgtggtgccttcaggggaatgtcatcccgggctagaagagctgcaaaaggctgtcaggcttctcagaactttgcttctccagcagaataatcctgcggaagactgagcagttcttgtgagtgtaaaaccatggcccatgcattggtgacgttcagggatgtggctatagacttctctcagaaggaatgggagtgcctggacactacccagaggaaattgtacagagatgtgatgttggagaattataataacttggtctcactgggatattctggctcaaagccagatgtgattaccttactggagcaagggaaagagccctgcgtggtggcgagggatgtgacaggaagacagtgccccggtttgttatccaggcataagaccaagaaattatcttcagaaaaggacattcatgaaatcagtttatccaaagagagtataatagaaaaaagtaaaactcttcgtctgaaaggatccatttttagaaatgagtggcagaacaaaagtgagtttgagggtcaacagggacttaaagaaagatctatcagtcaaaagaaaatcgtctctaaaaaaatgtcaactgatagaaaacgtccctcttttactctgaatcagagaattcacaatagtgagaaaagctgtgactcacacttggttcaacatgggaaaatagattctgatgtgaaacatgattg

SEQ ID NO: 400434 - DNA, 650 bp, Homo sapiens
ctgcgcaggcccagcagctaagatcgggtccggcgctccagaacagaacgatccctgaggctcccttgctcgaactgtgggacttaccctactatggtccgagcctaccctatttcattatactcaagtaacgccccagaaattccagagaatctcacacaaagaggttgagtcttgccgtggtgccttcaggggaatgtcatcccgggctagaagagctgcaaaaggctgtcaggcttctcagaactttgcttctccagcagaataatcctgcggaagactgagcagttcttgtgagtgtaaaaccatggcccatgtttgttatccaggcataagaccaagaaattatcttcagaaaaggacattcatgaaatcagtttatccaaagagagtataatagaaaaaagtaaaactcttcgtctgaaaggatccatttttagaaatgagtggcagaacaaaagtgagtttgagggtcaacagggacttaaagaaagatctatcagtcaaaagaaaatcgtctctaaaaaaatgtcaactgatagaaaacgtccctcttttactctgaatcagagaattcacaatagtgagaaaagctgtgactcacacttggttcaacatgggaaaatagattctgatgtgaaacatgattg

SEQ ID NO: 400435 - DNA, 384 bp, Homo sapiens
caccatgcacagcctattcaatcatttagtatggactcctggactttgggttacaatgtaataatactttattttgttgctcaaattgctttggccactgggtgttcatgtgtccttttcacacatccccatcactgtgtgtctggttttgttttgttttgtttttgagcacttttttactttctgacactgcaagatgccccaagctcatcttcttttaaatgcctgtttcatgacaaacacatgtttaaaatttttaatacctattttcataactgatgtgtcttattagaattaattactgtttcataacttaggagctgggacaaatcagttcacttagggatagtagaaatagatgttaaataaaactttcccaaagca

SEQ ID NO: 400436 - DNA, 529 bp, Homo sapiens
ggtcattggaatcatgaaagaaatagtgtttatataacctctctcttgcagagaacttgaaagtgatttcctttcgttttatgcaaataatatatgggatttatattacccactttgtcaaactcatcttccttgtatgtgtttggaaagcttattcactggtggtcaggcttcttgtttttcttctgggtagactgccttttagacaataaattctgaagtctttgttaattccgagctgggaggatacaaatggcggtccatcctgagtgtgggaaggagaatcagtttgaaagagctcttttatctgcactccttagactttttagtgttgtttcggttattttagtgtattgccagactcacggagaacttcgtttgtccaaagctccacaaaggctgcaaagataaaccaagctgtccatgtccttactggcagggatcacagagtctagtgggtgagagagtgacagataccataatacaaggcaagtaagtactgggtgcatgcaaagtgctttgggattgt

SEQ ID NO: 400437 - DNA, 668 bp, Homo sapiens
ttctataaaaagagaaaagtttaagattagaactttaaataacataaataaatctttctttaaacaagcctctcttctcccaaattttacatttaaccattactattgtatttagtgtaatatgcactatatattatatgtaagcactcagccgtctaataagaagtctttcactgggaagagagtctcaatggatgaaatgccaacttttcactctcttctactgttctaaagacccattcagaaatatgaataactactgggattagggtgactttgctggttttagcattgaaagtctcctgtcccaggcaaaacaggacaattggttactctggtccagtgttctcctcacatgacttgataataagaataattctttctaaattctcccccatggagacggttaatcagtcaaaacatttcagcctttcctgtcataaaaataaaaaacactggcagcatgtcagggacgggcaatgtcttaccaagttattttctaagtactgattaggtactgtagtattgaagaccccattgaagatgccttaattgtaaagagtagcaatcaaaattttaaaaagtaaaaaagaagacattttaagaaaataaaaggtatcagaaatgcaataaagttatatcagaaagttgtagttcgtaatctattt

SEQ ID NO: 400438 - DNA, 271 bp, Homo sapiens
ccagctactagggagcctgaggcaggagaatcgcttgaacctgggaggcggagcttgtggtgagccgagattataccattgcactccagcctgggcaacaggagcgaaacttcgtctcaaaaaaaaataaaataaaatataaataaccatgccctataacataaaaggaaagtaattgatagtaaaacaaaatatgtttcaatatgtaagtttctgggcacaatagtgctggaagttgcagtgaagctgtcccttctgtgtggaccctcta

SEQ ID NO: 400439 - DNA, 629 bp, Homo sapiens
aatgataaatgctttacatatactttatgaaattatatatgctttagataaaagcagaggtttcataaaactgaactgtaacatgcatggcatttaaatcccattgaagtgaagggctgggcttgagggtagcgtcaccctccctgaccgtcatacccatatccatttccccaggaaggaccaggatgctttgtttaagcagcacgtttgaattgctggcattgcctgtggcctccctgtggcgagggatggtgaacgacagcgttttccctcctccttcctcaccttgcaaacctcacttcgttggatgcataattgctgactcatccccatggatcgccttggactgtgtagcaatcactgctcttttcacagtccctcttgaatttctttcctttttttttcttttagtcggaatttcgctctgtcacccaggctggagtgcagtggtgcaatcttggcccactgcaaccttcacctcctggattcaagcaattctcctgcctcagtctccccagctatttgggaggctgagcaggagaatcgcttgaatccgggaggcagaggttgtggtgagctgagatcgcgctattacactccaggatgggcaacaagagcaaagctccatt

SEQ ID NO: 400440 - DNA, 465 bp, Homo sapiens
gacatatcctcctggaaggagctatagccaatgacccacaaaggtagaaatctatcttgcctataaataatagaaaacccaacctccaacagtttcagcaaataggcttgtttgttttttatgtttcaagaaggtcagagattagggctgctggtatttggtttggctgcttaaagaggcccttagggaccagacttttcctgcatttctacacttccatcctgggcatgctgtgttttcatcatcacgtttatcacctcatggtcacaagatggctgtcacgattccagtcatcacatctgcattcaaggcaagaaggagggagcagatggcaccaccaccaccaccaccaacagtcgtagcagtaccactgataagaagaaaaataatagatacttattgagcacataataatagtaataacaataatgacaataacaaaaatagatatttattgatcactta

SEQ ID NO: 400441 - DNA, 306 bp, Homo sapiens
tcaggcaatcctcccacctcggcctcccaaagtgctgggattacaggcgagagccaccatgcctggccaagacagccctttttttctggacaatgcctggacacatgaagcccacagacatcccccctccagggtactgggtagacacacttgccgttgggcccaccttgcgaaagtgaggcagctggggcaacatttgacctcagtgagactcatttcttcactgggggctctccaggagcctgcggtgaattgggccctaaaacatcctgtgtgcgcctttcctggcaggttctgcgacagcaa

SEQ ID NO: 400442 - DNA, 891 bp, Homo sapiens
cccggtaccttaacctaagccagacggatgtacagcatgctgatgagctcatttagtcctgttgtccgcaacccagtggactgcagcgtgtaacagctctgtcagtcccttgcctcactctggctcatggctccggggctggttcggccttgctgctgcttcccatcacaaggggtcgcaacccttctgccagcggagggtagaggaccacagttgttacagcctttggtgtacccatgttcagtggatccctacttctggtcctgcatccaagaacaagatcatgctgacaattgaagggtgaggagggtggagaaatatcttattgagtgatgaaatagctctcactggagaggggatgcaagggtggtcctctacccgaagttgggtggtttctctccatgtggctagtccggagcttttatgggctcagaatggggagtgtgtgctgactggtttgtgagtatgcaaaaaatggctaaaacaaaggcaccacttagaggtgggcacaacagtgtaaaaaaccaattaggaaaggttaggtgtatgtaaaataggtgaagggtggggatcaatcagaaaagcatggcaaacaggaagacgggttttcaaaccagtccatggatttaccccgggacttgtagctaggctttaaactgtctttggctggaaggtcaggtttcatcagggacccatccctgtctacttaggattcatctgctttctggccaccattacaatgaactaacgaggtccaacccagtgctggcaaaagtaaagtgagaaaaacagcaagtttatctattctatagaaatccacaagtggacggggttttcagtgttgttaatgtcaattataaagtcataaaagaggctatttatgctaagggg

SEQ ID NO: 400443 - DNA, 804 bp, Homo sapiens
ggttcctattgtgtgcgtgctagtgacccaatcacacgcatggaagcgcacgcatggatgccagccataccacctcttcaggcagtctgtttccattaggtcacaagcatgaaggtgaaagaaaaaagacaattattccacgtgaacaggtgaaagaacaatcttcgaccaccagactcaacttgagttgtcttatgaatctgtactgctctcagttttcttgtacccagattcttcaagggcacatggaatggtggctgccgatggaagtggcgagacctcaacggtgcccaccccagctgcacttgcttcctggggatctgcatcgctgcagcctaaccttgaggggtggcagggcaagtgctgtttcccagctcactctcattcaacaattaagatacaactgctacgttttcatctaacaatactgggagaacaaaatacgactcaatggtgaaatgtattctgggttatctgatgaagttttatctttaaatattttgttatccatttttggcattgctatgaatttgggactgttgccaccaactctgagggattttaaactgcttttagagtttgtgagaaccaagcctcaggggatgcatgagtcagttgaagcactgtagtcttgttggtctctctttgacatttcatgtctctggcatatctgaatttaggttgggaactggaggtttggtacacttgtatctattactacccttcataatctggccagttccatactcatggaaaacaatttgtttgttcccagatggctgcagcatttcatttagagttggg

SEQ ID NO: 400444 - DNA, 1467 bp, Homo sapiens
  misc_feature (691)..(691): n is a, c, g, or t
  misc_feature (832)..(832): n is a, c, g, or t
  misc_feature (878)..(878): n is a, c, g, or t
  misc_feature (904)..(904): n is a, c, g, or t
  misc_feature (1017)..(1017): n is a, c, g, or t
  misc_feature (1024)..(1024): n is a, c, g, or t
gggacatgtggaactccactccaaaagcggcggcttgcggcggagctctctctagtcaggcggccagctggcgttcgtggcacacttgctgtcggctccgctcatctgttgggaatgcgtcctgtgggcctagtcctccgctggaagaaacgcgctgttctccccaaccaccgtttatcattcttattcaccgtctccggaatgtccgttcagtttccgctcctgagagacttagtgactgaggccaggcaaagatttcaccttggggagggggaacgttaaacctttcctccagcagctttcgtgttttaaattgtattcatccgccatggaaagacatcagaagcccaggatctaagagacagactgaaatgaagaaagtagataatattgtgagaataatgaacaagctggtcactgaacagcagaaccgtaatggagtcccagttaaagggttttaactttatttcgtcactttttgcaagcatgatacaaagaaaacaaacacctaactacgctacggtttatagttaaaaggaaggtggaagatcctgagtcattacagcaatcacaaaacatgatggatttcttcatttaaaaacacaaaagaggtcttggcatagttttcaagggcaaagcatgacaagactctccagtgctttctttcatccccctctgtgtgcctttttcngcctgactcacagcctggctcaatcctaatctttctacatgcaaagatgcagcatttaaagcaatttttcctgtgcagtatttgtagaatgacagatcctgccagaagctcttggaaacattttggaactatcttgctttnctgtatgttatgatccatctagcaccgttttcctcctgtggtagcnaatgacacttttttcaagcatcagcngcagaaatgagtctaccagatggaataagatactggtaaagggaaagatttgtttctaagactgcatcaaatgaatgcacccaaatctgtgagttgattaatctgtgaagaantacaacnggcagtatttacatatctcaatgagtctcaaagtgtggtcgaggaagcctgggggcccttgggaccctttcagaggttccacgagctcaaatctattttcataacctgctaagtctttatttccttttccactccagaggctatataatgtctgatgacatcatcgctttataggatgagagaatacgtgcttgtatattcttgtgtttgtaggactttccaggtttatttattaccatatggcaattttcaataagtataacccacaaaacccaacagatttttggggcacctctaacaagggtcctaagaccaaaatgtttgaggactgctaatcgatattattcaattgtctagtcccctaaactccaacccttcttatcaggactacagagagaaaacaggtggtcttcttgacaatcgctttgtatttacattcagtg

SEQ ID NO: 400445 - DNA, 300 bp, Homo sapiens
aaatcttaattagcttatgtcattggacgatttattagaagtaggccatttatgcctttctcaactctttttttttgagacggagtctcactctgttgcccaggctggagtgcagtggcactatctcagctcactgcaagctccgcctcccgggttcacactgttctcctgcctcagctactccggaggctgaggcagaagaatggtgtgaacccgggagacagagcttgcagtgagctgagattgcaccactgcactcaagcctgggcagcagagcgagacttcatctcaaaaaaagga

SEQ ID NO: 400446 - DNA, 644 bp, Homo sapiens
taagggcctgattcttcactgtcttcttcatgtataccaactgtgctctgcaaaactgaagaaacaaaattaaaaggaattataacattactttacttgccattcagctctgataaggatgctctttgaaaccttccttggaacttgagagggagctgggggaaaaggagtgtgaaatggaaagcagaacccgggaacttggagaaaggctacagaacaactttgcaccaaacacctctaagctgccatccttctccccaggcccagtgttgccgacccctgtggatgtgggcctgttgggtggattcacggtcattgtaagggctgctaccgactcttaagatcagaggagacataccaaaagcccaccatactagatgtttgcaaaactaaggtgagagattgaggtgatacatagatgatgcacttaaactctcgtaccagtcttttgtgtgttccaactctatatcttatcagctctatcagagattatcatctcatcatttagagcaataatcaaacagaaagcactaagcttccatggaagccacctggcagaagagtgtgtatttagacataccctggaagggcttcgtttgtaagtaaataagtgatttctactcttaagagtggtctttgaacaa

SEQ ID NO: 400447 - DNA, 456 bp, Homo sapiens
ttttttcaatttaaaaatagtatagaaatatttcacatttactactgttggggaatgagttataatatttcatgaataaagttcaccttctgagtgttgaaactttattttttgtagtatgggatggaaatatctaaaatgtgcatcagtcctgacctcttgaaatgggctatagtaccgacatggactggtatagtttcttatttttaacccctcaagagtgtcaacttaaaataatcaaaaggatcagaatctagtttaaagagagtttattcaagtacagagtttaaggatggcctcttgggaagcacagattccaaagaatggaagtccgtgtttcaaagtgtagaagtttgggatttcttactgtattagtccattctcacgctgttataaagaactgcctgagtcccactggccctccagtgagctgagggtttttgcaggaaaaaaaaa

SEQ ID NO: 400448 - DNA, 400 bp, Homo sapiens
cagacaggtggcccaagcacaatggattcaatccataatggactcccaatccagtctaaccggtctgggcatctctgcccctaggggactgagcccttaataaacagatgtgtcttccagctcagaactgcagacatgtgcgtgctcatgtttatgtcagtagcctttgttctaaatccataccaatacccgtttagtatttctaacagattggttctttctgatgtgactgtctgaacaaatgaaaagcatttccctgtggcctacctgtcacacttttttccgtcctctaattgagaacactttcaaacctctccaactcctgtttgcctcgcagtaaggtgaagatttgatttcttccctattacaattttcttttgagtcaaaacgagtatcttgg

SEQ ID NO: 400449 - DNA, 427 bp, Homo sapiens
ggttggagatgcatatgtgcagtatgtaattacaaaacactgttatgttggccaatacaagtgtgtacaaagcatggaaaaaggatggattccttgaagacagaacctataatctgggtttttaaggatgagtacagaacaataactaaataactttgaggggatattttaatttttttgtctgttggtgtggttgtcttctactacaaatagaaatgacagctgagaagcaggtagaatgcagttacaaatacgttgtttttgcacctctgtttgtgatcatcaaaattgtgtgtcacatctgttatgtatgttaaaaatattctttcccaatgtttcacttgattttatcatgcaaaaatagttttatgtaattaagtatcttagatcttattaaaggttttgtatttttcccagaaagttttcc

SEQ ID NO: 400450 - DNA, 170 bp, Homo sapiens
tttctagagatagaaaattaaagtagtaatatgtactacttatctctgttttgaggcacctaatctataaaatggagttactaatactatctaacttaaagagttgtgagtttgaatgacataataaatgtgaatcctccagtattatatcatgcacaaggtaaaatttt

SEQ ID NO: 400451 - DNA, 945 bp, Homo sapiens
catctaatggtatctggctagggaaactaggaatcagcaaatgcaagatatactgtttcttcttccccaaagaagctttcagagaagatgacctgcccatgatcaagtatcagtgttcttgagaatgtatcatgaaatagcattatatagaatatgaaaagtattattcattcatcatccactaagagttgttgtgtatcccttaactatagggtcctaatgtcactttatctgtccttactgtcatttttcatcaactctaatcttccactaatagtagatacatactattttaatctgtcatctaacatacaattcgaatatttagttaaattttcatagtacctttactcctgataaaaagagttatagcacaaataattgaacattaactttgtttgccttttgttcatcaatcgtccctggagggcaagtggtgtggaatttttttttttcctccaggactaatgagaaggtatgtagtgggttatctgcagctcttgccagttccccattatagccagtggctcatatttttaaaagctctctgaggttgaaagtgccatcaggcagcttggatcagggtttatattttcaggcaaaagacaatcaaatttaaaaggcaaaccttaaaaaacatttgggtaaagaaatcaggttgaaaagaaggaggaagaagggataaaggtgataaggagcagatataaaagaaggacataaatacttaatagtaagaattgtaagagtctacagcttggtcaacatggtgaaaccccatctctactatattcaaaaattagccagcatggcagcgcgtgcctgtaatatcagctattgaggaggctgaggcaggagaatcacttgaacccgggaggcagaggttgcagtgagctgagatcgcaccactgcactccagcctgggtgacagagcgagaccccatctca

SEQ ID NO: 400452 - DNA, 276 bp, Homo sapiens
atttgtagtttattctattaaggatgagaataatattctttgttattctgcacatttttaaagtgagtccagaagtctagtcaattgattgttgataaagggtcaagattcttcaatgaaaaaggatattattttcaataagttgtgctggatcaactggatgttaatttttttaatgatcattaactcacacaatacataaaatatcaactcaaagtggattatagatctaaatgtattattaactcataaaattcttagaataaaatctttaaa

SEQ ID NO: 400453 - DNA, 707 bp, Homo sapiens
agatagtcactctgcaactacaagatggcactggattagtgattctcagacgtttttctgcaccaaaatcacctaaaaggctggtttaaccgactgctaggctccacctccaaggtgtctgagtcggtaggcctgaggaaggcctgagaatgtacatttttaacaagtcctcaggtaatgcaggtaggcagtatgactggattgtttttgtggttgcctgcctctttttggcattggaaaggggaaagccagagtattccttgaggaatgacatttggagagaaccaaattttagatgcttctgtgatatgtacaccagagctattctggactagattgtaaattctcacatttcacctatgcaaaaggaaatactttctggtctcctattagtaatcagttgtctcaaattttgcccgttacctctggaaattctggaccctcaagtgatcagtcttttaaggcagtgtggaagaacagcacctattatggcagttgatttttcatggtctctaccctgtccttcctaatataactgctattctttaccttcctgtttttcaaaactctcgtattgttcctgttgtgttttttctaaatattttcttggttacaataaagtgctaatatttaaagagcttttgggagcctgctggtgccagaaactattcaagttacttacagaatactctcattcagttctctca

SEQ ID NO: 400454 - DNA, 380 bp, Homo sapiens
gaaaagcattataattttggtcttaatactaacttcaacatgaatacttgcctatagcaccagggtaccaacaaattgaaattagataagaacttaaacatgaaaagcaggagaatcatcacaagttggtggattttgaaaaaagagaagattttttttcagagtcagttggattttaactcatctagtagttttaaagactgaatggatgaaagatgatagcttaaagaataaggtaacagtaatgactacctgaagagcacttgtgctcatcatcactaccttaaacttaagaagagatatttattgttaattgagaacctaactttacactaaggaagtttcattataataaagggtaataattgatttaagaagtt

SEQ ID NO: 400455 - DNA, 365 bp, Homo sapiens
tggatgtatacacgcaggtcacaggggatatgatggcttagcttgggctcagaggcctgacagacactaaatccaaggacaaatgtgctgacagatgtcaacctgaaatagtcaaaagggtcagaatctaatttaaagtgagtttactccagcataaattggtgtgaggctgccaccccaccaccccgagaaacaccagctccaaaggaatggagtcagcctgcccaagtagggaagtgaaggtttcacttacagcagcagagagggaggagtttttttagcaggatgaaaactcattcatacaagagtacagctgcccctccgtacccatgggggattggttccaggacccatatgcaaaccaa

SEQ ID NO: 400456 - DNA, 443 bp, Homo sapiens
gcttgtgcctgataattcatttctgaagtgcttcaagattgacgcatcagatttgcacaatgtgccactttaggagattatttcttccttccttcagccagacagaagactgcagtagggatatggttcctgtttgcctatttccatccacaactctgccagagacgaaagcagtgtttgaaacaattcaccaagatttccatctggaatcatcaagaatggaattgatcaaattccttaagaaatttacttaaagtcatgattttgacagcctagtgctacctggaaaagggacagcagcagcctggagcagttttctagctaacaagaattttgttagctatgtggccacctagtggctcttccatggatgtcgctgatgcattgtcaggtacacagacaattgcccactaataaagaagttattatctttcttggaaaaa

SEQ ID NO: 400457 - DNA, 564 bp, Homo sapiens
gcttgtgcctgataattcatttctgaaggtgcaatattaagtgtcacagtgtccagctggtgatattttcagcatagaaacctgttagacacggcagcattaaggagatggaatgaattgatttatttctcttctgaattgcttggcagtgcttcaagattgacgcatcagatttgcacaatgtgccactttaggagattatttcttccttccttcagccagacagaagactgcagtagggatatggttcctgtttgcctatttccatccacaactctgccagagacgaaagcagtgtttgaaacaattcaccaagatttccatctggaatcatcaagaatggaattgatcaaattccttaagaaatttacttaaagtcatgattttgacagcctagtgctacctggaaaagggacagcagcagcctggagcagttttctagctaacaagaattttgttagctatgtggccacctagtggctcttccatggatgtcgctgatgcattgtcaggtacacagacaattgcccactaataaagaagttattatctttcttggaaaaa

SEQ ID NO: 400458 - DNA, 731 bp, Homo sapiens
gcttgtgcctgataattcatttctgaaggtgcaatattaagtgtcacagtgtccagctggtgatattttcagcatagaaacctgttagacacggcagcattaaggagatggaatgaattgatttatttctcttctgaattgcttggcagtgcttcaagattgacgcatcagatttgcacaatgtgccactttaggagattatttcttccttccttcagccagacagaagactgcagtaggtaatgatagcttaaacttgggaaatgtccttcttcagagacagcgtcacggacattttggagaggatcagattactctacagctgctttccctggtggacctgaggaggcacacccctgagccaggactttaagggagagggtagaacaacctagaagctcagaagggatatggttcctgtttgcctatttccatccacaactctgccagagacgaaagcagtgtttgaaacaattcaccaagatttccatctggaatcatcaagaatggaattgatcaaattccttaagaaatttacttaaagtcatgattttgacagcctagtgctacctggaaaagggacagcagcagcctggagcagttttctagctaacaagaattttgttagctatgtggccacctagtggctcttccatggatgtcgctgatgcattgtcaggtacacagacaattgcccactaataaagaagttattatctttcttggaaaaa

SEQ ID NO: 400459 - DNA, 504 bp, Homo sapiens
cttttcttgaacattctggaatgctaccagccttgggtgagtacctctgatctagtctaaaccatgagtttagtttccttttcactatttcatgcatagtttgaactaggatcacttaccaagttaatataacttgcatagcaccctcctgcccatcagagaaggcagtctttatataaagataaacatcttgataggaatggtagttatggtcactttaacaaaaccttgaaatatatcatagaaacacatttatttagtagatacattatttgtgagtattaactgaaagaaagaggcttctaaactggcaagtaaagagttaggctaaaggatgaaaaagaatgccttggtatatatggcataatcagtagacagaaagcatctagatcactgaacctgggataatggtgggcatgaggtttgaaggagacattgttaaatcagtaaaagaaaaatatctgccaagtagcttggaataaacaaataggtttcatgaatcac

SEQ ID NO: 400460 - DNA, 1245 bp, Homo sapiens
attagtattagtaaatcattaaaattaatatagtattattttctgttactttattgtcctgcctcagtgcctcataagaactttgagcccagaattattatctcaggattctttggcaaactactgtaatcagcagattaatgtagtttctaatggtctccatctcctgggattccaacccttgtctaataccctccccatgggtgtcagctggatccataggcttgctgctgttgcacagaatacagcaaacatgatgagaggttgattctgtgattagttgacaaaagatgtgacttctgtcttggactcttttcaatggcttttttttttggcttcgcacattttgatgaagaaaccttcccatactgaagaggctcacattatatggaattctggacaacagctgtcaaagtactgaatataccatcaagcatgtgagtgagattgattataacttgtgagagtctctgaatagaagacccagttaagccatgcccagattcctgcaccacagaaacttcgagataataaaggttttttttttttttttgtggtgaagaatatgtttctcatctttttttataatataaatacttttgaaatgtaacttttttatcttaataaacatttaacaattcatttgaagatggataatcacagatacaatttttccaacataaccaggacttttctgtaactttgactaatagatgatcgtttgaacattaccactttgtaactgcatttcagactatgatttagttgaatcacccaaagtgtgtaatgtcttttaatgtgcactatcaattctgttctgccataatgacctcattttggcttcttaactatattcatctgagtcttgtggggtgactctctgaagaagaatgactgttaataccaagaacttctgttgtttcgataaataacagccagattacagccagaacctcaaggttgagcacagctgctgatgtttggaatcccagccctttgggattaataggcctagacaggaggatcacttgaggacaggagtttgagaccagattgggctttaatgcaagattttgtctctgaaaaaaataaaataaaataagctgggcatggtgtcacatgcctttaatcttagctactcagaggctgagcctggaggattgcttgagcccagtagttgaaggttacagtaagctacgataacaccaccacatcccagtctgggtgacagaatgagaccctgcc

SEQ ID NO: 400461 - DNA, 1301 bp, Homo sapiens
attagtattagtaaatcattaaaattaatatagtattattttctgttactttattgtcctgcctcagtgcctcataagaactttgagcccagaattattatctcaggattctttggcaaactactgtaatcagcagattaatgtagtttctaatggtctccatctcctgggattccaacccttgtctaataccctccccatgggtgtcagctggatccataggcttgctgctgttgcacagaatacagcaaacatgatgagaggttgattctgtgattagttgacaaaagatgtgacttctgtcttggactcttttcaatggcttttttttttggcttcgcacattttgatgaagaaaccttcccatactgaagaggctcacattatatggaattctggacaacagctgtcaaagtactgaatataccatcaagcatgtgagtgagattgattataacttgtgagagtctctgaatagaagacccagttaagccatgcccagattcctgcaccacagaaacttcgagataataaaggttttttttttttttttgtggtgaagaatatgtttctcatctttttttaaaatttcattattatactttattttgggataatttgttatggaggaatttgacaaataatataaatacttttgaaatgtaacttttttatcttaataaacatttaacaattcatttgaagatggataatcacagatacaatttttccaacataaccaggacttttctgtaactttgactaatagatgatcgtttgaacattaccactttgtaactgcatttcagactatgatttagttgaatcacccaaagtgtgtaatgtcttttaatgtgcactatcaattctgttctgccataatgacctcattttggcttcttaactatattcatctgagtcttgtggggtgactctctgaagaagaatgactgttaataccaagaacttctgttgtttcgataaataacagccagattacagccagaacctcaaggttgagcacagctgctgatgtttggaatcccagccctttgggattaataggcctagacaggaggatcacttgaggacaggagtttgagaccagattgggctttaatgcaagattttgtctctgaaaaaaataaaataaaataagctgggcatggtgtcacatgcctttaatcttagctactcagaggctgagcctggaggattgcttgagcccagtagttgaaggttacagtaagctacgataacaccaccacatcccagtctgggtgacagaatgagaccctgcc

SEQ ID NO: 400462 - DNA, 1247 bp, Homo sapiens
attagtattagtaaatcattaaaattaatatagtattattttctgttactttattgtcctgcctcagtgcctcataagaactttgagcccagaattattatctcaggattctttggcaaactactgtaatcagcagattaatgtagtttctaatggtctccatctcctgggattccaacccttgtctaataccctccccatgggtgtcagctggatccataggcttgctgctgttgcacagaatacagcaaacatgatgagaggttgattctgtgattagttgacgcacattttgatgaagaaaccttcccatactgaagaggctcacattatatggaattctggacaacagctgtcaaagtactgaatataccatcaagcatgtgagtgagattgattataacttgtgagagtctctgaatagaagacccagttaagccatgcccagattcctgcaccacagaaacttcgagataataaaggttttttttttttttttgtggtgaagaatatgtttctcatctttttttaaaatttcattattatactttattttgggataatttgttatggaggaatttgacaaataatataaatacttttgaaatgtaacttttttatcttaataaacatttaacaattcatttgaagatggataatcacagatacaatttttccaacataaccaggacttttctgtaactttgactaatagatgatcgtttgaacattaccactttgtaactgcatttcagactatgatttagttgaatcacccaaagtgtgtaatgtcttttaatgtgcactatcaattctgttctgccataatgacctcattttggcttcttaactatattcatctgagtcttgtggggtgactctctgaagaagaatgactgttaataccaagaacttctgttgtttcgataaataacagccagattacagccagaacctcaaggttgagcacagctgctgatgtttggaatcccagccctttgggattaataggcctagacaggaggatcacttgaggacaggagtttgagaccagattgggctttaatgcaagattttgtctctgaaaaaaataaaataaaataagctgggcatggtgtcacatgcctttaatcttagctactcagaggctgagcctggaggattgcttgagcccagtagttgaaggttacagtaagctacgataacaccaccacatcccagtctgggtgacagaatgagaccctgcc

SEQ ID NO: 400463 - DNA, 434 bp, Homo sapiens
acaggaggaagacagctgatgagaaccacatgtgtgccttggagctgcccgacacctgttagtcttgtatttgttgtgcttctgggaaatattttcatttgcaaaaacggctgcttctgcacgtggctatggttgcgtgcttctgcacatgtgaaaagttttacatcacacttggaggagaaaagaaacacgggcaaaacacttgtcatttactgctcccaacctcgcccctcccagaatgcggtgcattgtgtacatggtgtacatggtccaagttggaaactggcccattcggagataattctctcatttctgataagcaaaataagcaaagccttcctcaggcatattctggtcttgcctctctcttaatttctaactcggatgtacagtatctttttttttttttaataaagtattacataggaggcaat

SEQ ID NO: 400464 - DNA, 524 bp, Homo sapiens
agtagaactatgatttgaagtcagagagattggctctagagtccatgctcttaccttagaagcgatatctcaggagaagataccaaagagcaatatatgaaaagaggttcaggttgggggctatccagaaaaaaagcaaagcaggtgatatctaatttaggatttgaaggataaatttgacatttggggttaaagctgtaagaagagtgtcagaagagtatatctgaaagaataatgtgaaatggcttggaagcttaaagcatcatgtactttcaaggtaatataatcaatttcagatcgtaaaaggtctaaattggaattagagacgtgggaaaaaaaattagacgtataagacttttataccatttgaaggaatactttatagacaaaataataattgaattaaaagtatagtattgaacattataaattaactattttgtatttaaagagcttacgaggtcagtcaagggaaggcgaaataaaatagcttccaaactgtcttaatctggcattatgataaa

SEQ ID NO: 400465 - DNA, 266 bp, Homo sapiens
tcttttaaaaaaaacttccttgatgatgctcatactgtcaaagacatgaaagccaggagaaatccacaggaggtgttagggatgaagcatcatttcttagggttcaccactctgtgaagtaaatcacatctctctcacataatcataaacaatttcaattgtgcacatttgaattatgaaatggtatctatacgctgcttgttctttcataattcctaggccaacaggacctgataatgctacttattatccaagatatattctat

SEQ ID NO: 400466 - DNA, 495 bp, Homo sapiens
atgtgagaaagcccaggagaagcggatggcggatggcgtttctcaagctcgctgacgtcactcaagttcatgatccaaggcttcaccctactggggttggggggttgggttctactggaagagtgaagctggtggattaagaaaagtggtggtagggagagggagggaaaggagttctttctgctagtcaaaggagaaaccaaataaaatgaatgaagtccaagaaaaatacaactctattgtttgggggcataagaggctggctgggaggcttcattgagtaattcgagtcacaccctttctctgtgggcctgaaggaatgttggctgtttctctgcagcccaggtgggaggtgggtagacaggtctatggagatgagaatttcttggagctgttaactctctgaacatccccacggccttgcaagctgggaggctgggacacaaagaagcaggaatgcagtgctgaatcaaggccaaggagcagcggccatgg

SEQ ID NO: 400467 - DNA, 375 bp, Homo sapiens
cttgtggttggctagtgaccactggatgggacaatgcagatacggagttgaactttcagtgagttaaaaatttatttattttgttccttcaagttcaagtagcttttcagttctttcccttacgctttaaaataaatttgtttttaatatctatctacaatgtcgttatttccaccatttgttcacagactgggttttgtaggtgaatcttaacatggacttggcatgaacagttctgttctaaacagaagagggagcacagctcagggaaggccagtgcatgtctgtgggcaggttcctccctgtctctgattcctggggagtaagagcaggtttccagttaagacttgggggttttgtagtagcttgagctgt

SEQ ID NO: 400468 - DNA, 377 bp, Homo sapiens
caaatgccgagtgatccagggcaagcttgcagcccatgcttccattgtttctccacattcctgtgtaggtgttgtccagcctttatgaagtcccctagcaggagggttcacgccacctctcagctctgaagctcttcagctcctaagcaggaagaataggaaaggaatatcattatgttcattagcattttccttagagcttttcttaccttcttctccacgttttctcattggttgcactgaggtgcccacactgtggttcagtaaacacatgatgaacacaccgccttttcccactccgtggcgccttcctttctgcctgcgtgtctttcactctggcccctgttgtcccccatggctggcctgtgaggactgag

SEQ ID NO: 400469 - DNA, 456 bp, Homo sapiens
ataccagcaaaacagctaaaatcaaccatttcagaagtctagaagttaactagataaccagattgaactgaaacactcctatcgaagacacactgtcaaatctcaatgagatagcagggtctgtggcatttcaacttgtggctgttcccagtaccttctgtttacagctctttatcacagtagccatgaaaatcagcagttttgtggccaaatgacaggattaatctcttttggagctccattaaaagctccatccccagagcacagtaaatattttgtccaattagcaacaacctggaaaatttctgttcccaaggtgttgtggctatttgatttgacttagcaatcacctctgtgaaaaaggctttatttttaaggcattgccaaaagcaatagcaaactgctgacaagatcacagcatccacagtaactaaaatccacatgaggaaataaagg

SEQ ID NO: 400470 - DNA, 222 bp, Homo sapiens
tttttttattttctttattttctggcaactagcaaatgtcacatggaatatgattggcttacatttcattagagtacatagtaggttcttctaagtaatgctattcttgataagaaaaacactttgaatacttcaaactaaaaacttacaaaaatgtaattcttagttattgctttaatggaagaaagaaacatatttttaaataaaataaaatttaaatta

SEQ ID NO: 400471 - DNA, 199 bp, Homo sapiens
cttcatcaacttcattcctgagtcatacttacttaataaacaagacaagatcaacaacaagaaaggtggaagaacacagctggtttacctgcacaggagctaaatactttgcaattccattggctgagcgcaacaccaagaggctgactaagaggagcacacatgcacaactgctgcgtgggaaacaggatggcagcga

SEQ ID NO: 400472 - DNA, 646 bp, Homo sapiens
ggttgatccattttctaagaaagattggtatcacgtgaaagcacctgctatggtcagtataaggagtattggaaagacactaggattcaaggaacaagaattgcacctgatgaccttaagggtcatgtgtttgaagtgggtcttgctgatctgcagaataatgaagttgcatttagaataaactagctgattactgaagatgttcagggcaaaaactgcctgactaacttccatggcatggatcttacccatgacaaaatgtgttccatggtcaaaaaatggtagaccatgactgaagctcatgtcaatgtcaagactaccgatggttatttgcttggtcagttctgtattgattttatagaaaatgcaacaatcagatacagaagacctcttatgctcagcaccaacaggtctgtcaaattcagaaggagatgatggaaatcataaacacagaagtgcagacaaacgacttcaaaaaagtgttcaataaattgattccagacaacattggaaaagacatagaaaatgcttgccaatctatttatcctcttcatgatgtattcattagaaaagtaaaaatgctgaagaaacccaagtttgaattgggaaaactaatagagtttcatgatgaagttagttgttctgg

SEQ ID NO: 400473 - DNA, 423 bp, Homo sapiens
cccgggaggcgggaggcggaggttgcagtgagccaagatcgtgccactattccagcctgggcgacagagcaagactccatctcaaaaaaaaaagaacataaataacatcttactcaaagttcatctctaggctccgtctgcgcatatttccccactttcaagtgggaaccaaagcaaggccataaggctgcttgagacattgctgactagatccaatgttgcctaaaatgtctgtggtacatcagaaagctgtgtggagacactgggtagctagtagaagagccacggcacaggtccccagagttttggagcaaaagcaagccctcttccacatcctagcatctgacttaatcttgggtcctcagcatgcgagggttcatgaaacatgagctgccctttatgaactgggtgttgtctgcacca

SEQ ID NO: 400474 - DNA, 663 bp, Homo sapiens
aggtcccccgtgatgcagccgtgctggccttgcttactgcacaccagccagtctttcatattcatttctcaaatatgccacactttcctccggcctttgtgtgtgcccttccctatgcctgaaatgcttttcctgactgcttgtcttctagccttctcgttcttatccctcagatcttagcctaaatgtcaagtcctcaaagaggcccttctggactgtcctgaatgtaaactaggccgcttgttattcctgcttggcaaagcttcatagcagttatcataatatttaattacacgttatgtttgtctttacatgtttaatgcccgtcttcctcactgggctggctgtgagtcccaggaggtcaagcccagacctgttatttatttatttatttttgctttgcattgcatccccagtacatactaggtgtgcaaaacaaaacaaaaaacctttattaaatgaatgtggttgaaatagaattgttactcatttaaaattttggttagtttgtcattggactagagcagggaacaaagtctggccggaagtttttaaaaccctggcggtgaaatttcaaagtgaaaatgttactcgtaagttaaatgaattcatactgcagcctgggtgacagagttatactgtgtctaaaaaaaaaaataacac

SEQ ID NO: 400475 - DNA, 369 bp, Homo sapiens
ccaggggacaccagaacatctataaactgtcattcgccatagtaacaaaggataaagaaaatataagattcatcttggccaggcacagtggctcacgcctgtaatcccagcactttgggaggccaaggtgggcagatcacttgaggtcaggagcttgagaccagcctggccaatatagcgaaaccacatctctactaaaaacaaaacaaaacaaaaaattagctgggtgtggtggcaggcgcctgtagtcccagctacttgggaggctgaagcaaggaatcgcttgaacccaggggagcagaggttgcagtgagcagagacagtgccactgcactccaggctgggtgacagagcgagactgtctcacac

SEQ ID NO: 400476 - DNA, 675 bp, Homo sapiens
gtcatgtttgtatagcactcattataaagagggccttgctcccaaggtaatggtataatgagaaaaagtacaagtaaatgaggctgacagcaattggcacagattaatacctggcacagccaattccaccttgggaaaaattctgaagagaaatttcagagaaatttggtagtgataaagtataaattcatgatgggacgattttacattggaaataagagagattctgtcaagtttgcttgctggaacaatttccagtaatggaaaaagttatatcttctctttaactgtgtataaataccacaaaccaaagtttcatgtgatcaaattatttccgtttattatcagatggccagttctgcacaaagaatgtctcaggacagaaatgatagaattcattcttgtgagttggtgttggtgattagcaactctgacagtttactaccttcactgtttttttctaagccttacagttacaccccaaaaaaaagaaaaaaaagaaaaaacaacaaagaaacaacaacaaaaatcaagaagaaatacaaaggggttcagatacatagacagggatgtcaatactaaattttacaaaggacttgcacagtcaaaacctccttgatccttacaaatttctgagaaagaaatgttagtatgcatgtttgatacatgaggaaa

SEQ ID NO: 400477 - DNA, 264 bp, Homo sapiens
caaaacattcaaagggtgctcccagccttggcaatctgcacttctcttccatctggctgactccagctcctcccacatcagggctccttttgtttgagaaaagctggaatttggggaaattcaatgacaagctggctgttgaggaagattctgtaatatgatcatgcagctgttcggtgattctacatgagtgtaggatcgcttcagggtggaatgtcaaggcttaccagacattatcttggaccaattctcctttttccatga

SEQ ID NO: 400478 - DNA, 372 bp, Homo sapiens
ggctctatgagataatggaagttgggcaaggtgttattacactatctcttttgtttcttttgaacagaaccccattcacagacaggaggcttgtgggaggatgaaaatttaagaacctcaggcagagtatcccctttactcccatttggaggttctgggatgatgatggtgatgatggttattattaactgagcaattattctctggcaggctctaggttaaacacatttcctaccttaatgtacttaattctcctaacaacccatgagatgaaccctactgtaaagtagccacccctattgactctccattatcttactatgttaattttcttcatagcacttattactaactaaaaataactaatttacc

SEQ ID NO: 400479 - DNA, 2816 bp, Homo sapiens
  misc_feature (1961)..(1961): n is a, c, g, or t
tttaagtcaactgaattttattccattgacaggttagcatgactatctttgaagatgaaaaaaattgttgcttgttgggagaaaaattgggagtggataaggtattaagacttctaatctaatgaggaaggcatcaatccttactcatatgattcctggccacaattcctctttatatcaactaccttagaatgtgcatagcagcatctataaatataaatcagaatggagttgtttcaagaacagtgtacatatttttaaaagcatcacttaaagcattctttcatgacaaagcttaagtcacttttgttttatcataaataaagggaatgcaggacaaattcttggcacaaagttatctgtcgaaaagtaaatgctgtttgttatcatgagtgatttattgccaatattatgattttcagatgcactgagttagttggtctcatctttttatgggctacattgacttctattccttctcctcaacttgtgccatggaaactatgcagtgaaataaatctcaaggggataatagtgtgatgaattggttttgcaaaatgcgttttttttatttccacatatatatcactccttcctgataggaaagaaaataattggcaagattagtgttctaagtctgtaagcaattttttctttgaaagttcagtaactcatgaaatttattaaaagtattaatttagcacctatgatgtgccaggaactgagggtactaaggatctggcaacaacaacaacaaaaaaaacaggttaagcctctgtcttcactgcgttgactttcaagtggagagtctgacaggtcaacaaacaaatattataaatatatccataagaagccagcagcaagtactataaaaaatcaaggaatacaaaagcaaaaataataaatgaacgggttaaatgttattttctgtagtctggtcagagaggccagatttctgaaatagagctagtttaaggaaaaaaaagcactagtataagaaaaaaactaaagctattaatatcttgagaaattgaaattcacaaaacaataagggaaggaatgccatcagaatgctttctgaggtagtgcgctcttgttccaataggaattttaattttaatttttatggtaagaaaactgccattttgaaaaggcctttctgagcattcaatgccttcacactgacctgtctagtaaacaaaggttatgccttactatatgattttttaatgtaaggcgtgcatgatatttaaccctcagtttcttaaagtgagcatcagtttttaaaatgtgatggacagcctaatttgaggataattttagaaagactctcaaatgtaattcatacatttttctggaagtttcttctaatagttaacatttttcatgttgtaattatataatgtacaaataatgcatataatgtataatgtcatgttgtaattatataatatacaaatatttaaacaaatgtctaaaatgtaggttatgtggattatttacactatgcatgttttctcctctgattgagaaactaccatcaatgttaaatttagaatttatcctaacagacgaaatcaaatagaatttgtcataatttaaattgtaatttgttcatcatatatacatattagtctacacccatgaatatattgttataaattacatgcacatttgttttttgttttaatgaagaatcatcctggactggtactttgttttagctagagcttgttagcatagataccatcaacatctagtgaaatcatctttaagggatctggatttatgatatctgtggagtgagagtcatactggccaacatccagtcatgtcattaaaatttagaggcggatcttctgaaatgagagaataaaatcttctttgtgtataaattgttttattagataatgtgttgatactgtaatatttcaactcaggtagaaggcattttaattaanatgtggattaaaatacctataaatcttaatgaaggtgaaatctattccttatctagacacatctgagccaggcaacagatggagcaggtccttgaaccagaccttgaatcaggaccactgcttaacctgacacttgcttagaggcataggcttattaaactctctgcttcaggactccagtaatgcaatctcggtgaagaaaaataaaatttagtatacctgaaattaacactttataccagcaaatttgaaatagcaatatgttagagacatctagccctaagaaaaacttgatgatcttggcaccaaacaaatcctttgatgtctcattaatatgtcctgtaccataactctggatatggatttttctctgtcttctagtaactatgaagcatgagataatttatccaaattcctgggcttgggatgaagatgcttttgcattgttcacaggtagccaattttattagttcattctgtcacttgtatcaactggacctgttttctgaccaataggctaggacataaggggattagattaatcactaaagtcttttataactcaaaatatgaatcggactattttgactagtgaatattttatcaagtcaaaagattagattttattttttccaagtcctaccttaacgttcattgttctttaaagaagaattacattttaaaaatcattgtctataacaatataaatgagttactaaaatccgtcaaacacatgacggataatttttgatgctggtggaagggatatgataaaaagtcaaaggcttggagtcctcagcagagaaataactggtctcagaaatagctttaattaaatgaagattaataaaatgc

SEQ ID NO: 400480 - DNA, 377 bp, Homo sapiens
gagatagtatcttgctctgtcgcccaggttgaagtgcagtggcgtgatgtcggctcgctgcaacctccacctcccgggttccagcgattctcctacgtcagcctcccaagtagctgagactataggtgcccaccaccatgcccagctagtttttatatttttagtagaggtttcaccatgttggccaggctggtctagaactcctgacctcaaaagatccacccatcttggcctcccaaagtgccgggattacaggcatgagccaccgcacccagcctactgaactttttgactagggaatttgttctctgttattgttttatggaaataagaagaagctaattcttatctgacatcaaagactccaggcaagataa

SEQ ID NO: 400481 - DNA, 601 bp, Homo sapiens
atgtactgcatttccatggagtaacatccacggctggctatctatggatgtaactgcattggctaagaacggtgaacacaaagaaactttaatgaaggcagtaaacttgccagtaacaggcactgtgcttccccagtactcaacaggctgatgggtcactgacagacgaggaggaacaacctgtcctagatatcattaaaggagattcttggcttgatggagagacaggctcccacaaaaagaaaaatgagaggatgttatggtcatgtattactaatagtttagaggagaaaatttgaaaatgtaaatgaaatggataaattactataaaaatacaaaatattaaaactgactcaagagaaaaattgaatgattcaaaccaataaacatcaaagaatttaaatcagtagttaacctttctattaacaaaatgtgcagtactgatgactttacaggtaaattctaccaaaaaaaaagagaagacaatttcatataaactcttcaaataatcacacagaggaaacactctttactcattgtatgaggcaagcttacatttgataccaaaaccaaactagaatacactaagcaataaaaacta

SEQ ID NO: 400482 - DNA, 423 bp, Homo sapiens
aaaccctggaggagcctgggttctttgcccacaggtcctggggcccttggtcctcctgcatggattcgtgagggagattcctgctcatctgggccactcaacagtggtccctgttgggccagggagtcactttggtgtctgaaagtccctgtggggacagtttatgctgagcccagttgaagcttcaggtttattttctgcagagcaccccagtgggggctttcctgaagagctgtggtgctgacactcagataacaagccatcatttatggcacactcacctaaactgggcaccgtggaagtgggttccaggggtagcccctcactgtgacatgcccagccttaatcttcctctgcatttgcaatggtgtgtagatgccctgatgttgaagctaaaatgagcccctgttttcaccaggaaaa

SEQ ID NO: 400483 - DNA, 672 bp, Homo sapiens
aaaccctggaggagcctgggttctttgcccacaggtcctggggcccttggtcctcctgcatggattcgtgagggagattcctgctcatctgggccactcaacagtggtccctgttgggccagggagtcactttggtgtctgaaagtccctgtggggacagtttatgctgagcccagttgaagcttcaggtttattttctgcagagcaccccagtgggggctttcctgaagagctgtggtgctgacactcagataacaagccatcatttatggcacactcacctaaactgggcaccgtggaaggggcttcccatacttcctcccaacaatcccatgaacacaacaccaacccagacaggtgggctctctggagagtccagcttgcagaggggaagctgaggcccaagccggctcaggttctcccagtgcttcccagccagaagcagcattgccagggctcgaggttctgaaccgggcactccagctgccccttccccatgccggagggcagcagcctggctccaagcacccctgtgcactgttcctgggaagtgggttccaggggtagcccctcactgtgacatgcccagccttaatcttcctctgcatttgcaatggtgtgtagatgccctgatgttgaagctaaaatgagcccctgttttcaccaggaaaa

SEQ ID NO: 400484 - DNA, 1248 bp, Homo sapiens
tgcgcgccgcggggggcgtcttacctgttgatcttgagcgcgaacgcgcggcgctctgcgctcggcagagtggccatggcccgccggcggttcggtggcttctagggtcgcggggtgcggaaagcgggggcctggcgcgccgcagagtagccgcggaacatgcccagccaagcgcaaacctcgtctgtcggtcggcgctggaaacttccgcatttccaccttctaagccgaaatcaccccgggggagggtccgagggcggagcttgcagtgaaccgagatctgccactgcactccagcctggcgacagagcaagtctccgtctaaaagaaaaaaaaaaaacaaccaaagcgaagtatttttggttcaaacctgcactatttaatatgatagccactagccacatgtggctattgaccactcggcattatggttagtctgaattgcccactgctggatgtgtaaaatgtacactggaatttaaagacagcgcagaaaacatcgtgtaaaatgtcttgttaatgattttcatgttgattgcatgttaaatgatactttggatataaaaaatatattattaaagttaatttcacctgtttgttttccccttttaaaaatgtggtttgcatttttaaaaatgtaaaattacacatgtggctcacatttgtgagcctcattatattcctattggacagtgccagtccaatacaacctaatttgtcacctaatactaaaatccacctaaggactatattcagtctcttcctgatacagccttcctttctggtttcagctgtgtcaggtagtttagtaacttttcagtactggttaggtaactccccgccccccaatgcccaccaaatatcagtgcccttttaagcatataagacaaagttcactgcatagactacaatagactacatatgaaaacaaacccaaagaaaaataaagcttttttgaaatttagagtttctgactttcaaaactgtccttatttactacattggaatttatgagcaaacatttggatagcaaaatacaaagagaacaaatgtgtaagtacttcttcaaactgagactcaacgaatgatacatagaaaacattttgccccagaggcttcggtccacggtgtaccatgtcagcctttcggatgaactcctctgagtttctgaatgtttatgacatacattttcatatagaacaaaaatatactggtttcacacaaacataaataaaatgtaatgaaagc

SEQ ID NO: 400485 - DNA, 615 bp, Homo sapiens
gctaatagcatgcgtgaggtggcatcccccagtccttaacttgaagctggacgatctgtgtatctcaagatgtcctggcacaggacaattgtttgggttcatacaagtgtaaattgcccgaaggaatcacttttgtcatgtatcatggtctccgtattggagccacgtgatagtcaatatatagcggatcgtcactcacaggagagctacacactctgtagctggaataatgaagcaggcgaggacggagccttgctcaggacgacagaaggcttgcagcctgcctcaaacgcaactctaatttcagccacttcacttcttccccccgcgctcagacttgcctcaaaggaagctccatctgcccgaagctgcgaggctgccagggaatgtaggcaagtcgggggagccccacaaagctggcgaggtcgggaatcaccccagggattcgtaaggctaggtgttattaagggttgacaccattctcgaagaaggcagccaaaaaaaaagacaaaaaagttagtggaatctatcaggattcaaatcaacttttgcaagcaatatgcccatcatccttcctgagacactaaataaatataatggattcatccaaggaat

SEQ ID NO: 400486 - DNA, 709 bp, Homo sapiens
tgcgcgccgcggggggcgtcttacctgttgatcttgagcgcgaacgcgcggcgctctgcgctcggcagagtggccatggcccgccggcggttcggtggcttctagggtcgcggggtgcggaaagcgggggcctggcgcgccgcagagtagccgcggaacatgcccagccaagcgcaaacctcgtctgtcggtcggcgctggaaacttccgcatttccaccttctaagccgaaatcaccccgggggagggtccgagctcggagcagcgacggccggctccgccacccggcctggcgcgcaggcagcggcgggcgaggagggcgtgggcccagcgcggaactggcctccggatactggggcagacggcgcgctctgcccggggccgccgacctccggccgaagggagcgcgggcggacgacaggcgaccactgcgcgcaggccggaagctccatctgcccgaagctgcgaggctgccagggaatgtaggcaagtcgggggagccccacaaagctggcgaggtcgggaatcaccccagggattcgtaaggctaggtgttattaagggttgacaccattctcgaagaaggcagccaaaaaaaaagacaaaaaagttagtggaatctatcaggattcaaatcaacttttgcaagcaatatgcccatcatccttcctgagacactaaataaatataatggattcatccaaggaat

SEQ ID NO: 400487 - DNA, 745 bp, Homo sapiens
ttggaccagggtataaaaatagcgatgccaccaggagccaagctctttctagaataatgaagcaggcgaggacggagccttgctcaggacgacagaaggcttgcagcctgcctcaaacgcaactctaatttcagccacttcacttcttccccccgcgctcagacttgcctcaaaggaaggagccgtttatgagacactccgtggcgcgcccaacacggttacccaggcgcctatcacccttctgggacccggccacctgtaagaacctggagggcggagcgggcgaggttgttcggggaagggatccccggcggcggaggacatccaggagcaccgagattcttggggaggacctcgccgggcccagcgcaggagccgccgcgcgtccagcggctccaccgccgcagcctcgggaaccgggcgccccaggtctcaggcgcgccccgccgcggacgcgaatggactcgtccggcctcggcccctgcagcgaagctccgcttcacaccagcgctgggctgtccggccgcgacctgcgcgccgcggggggcgtcttacctgttgatcttgagcgcgaacgcgcggcgctctgcgctcggcagagtggccatggcccgccggcggttcggtggcttctagggtcgcggggtgcggaaagcgggggcctggcgcgccgcagagtagccgcggaacatgcccagccaagcgcaaacctcgtctgtcggtcggcgctggaaacttccgcatt

SEQ ID NO: 400488 - DNA, 608 bp, Homo sapiens
gtgatggcgcatgcctgtaatcccagctactcgggaggctgaggcaggagaatcgcttgaacccgggagccggagggtgccatgagccaagatcacaccattgcactccagcctgggcagcaagagcgaaaattcatctcaaaaaacaaaattagtaggacctggtgagatgcacctgtagtcccagctacttgggagaccgagccaggaggatctcttgagcccaggagtttgaggttacagtgaggaccactgcactccccctgggtggcagagggataccatgtctaaaaactacaatcaaaaaaagccttttttttaaaagttactttggttttaaggaataagaagccttgaaacactcagccctggactgaatcctccaggcaccagagctgtgctggtctggacccttccaccccacttgaaacctgttggccctgttgcaaccctctcttgctttccctgagaaccctaaggtgaccccaggggctgctgatggagacagtcacctccttgccctgctccctgcagcctctcactttggctgctttgctatcataaggaaggaaacataaaagctactttttagcattacaaagttaaaa

SEQ ID NO: 400489 - DNA, 266 bp, Homo sapiens
ttatatatttcaaaatagctagaagacttacaatgttcccaacacaaataaatgataaatgtttgaggtgatggatatcttaaatcctctgatgtgatcattacatattgtatgcaggtattaaaatatcacatgtactccataaatatgtacaattattatgtatcaataaaaatattttaacaccccaaaatatgaggaaagagatggtttcagaagcaagaggcttcaataacccatgaactaaagaagtcaaaatgagtaac

SEQ ID NO: 400490 - DNA, 341 bp, Homo sapiens
accctgtggccgtgggcctcgatgagggccacagagttaccaaaaatgggagcaagcctggcccagccaccgccaaagtgggcaactgaccaagcacaccaagttcatgtgggacattattccaaagatgtatggctttactccctacgagctggcgcgccatggagttgctcaaggtttccaaggacaaacggccctcaggttcatcaagaagagagtgggggacacgtccgcaccaagatgaagagagaagagctaagcaacgccctgcccgccatgaagaaagtggccacaaagaaggactgaggccccataccctatccataaaaccttcacagaaa

SEQ ID NO: 400491 - DNA, 262 bp, Homo sapiens
tgcagtcccagctacttgggagactgaggtaggaggatcgcttggggccctaaacattaaggcttcaatgagtcctgattatgccactgcactccagcctgggtggcagagtgatagggtctcaaaaaaaaaaaaagtccactgaaacaaataaatgaaaataaaaagcataatattatccaaaaatgaaaaataagttacagggtacccaaatgagaataaactcataataaaacttaattaaaaacattgaaaatggcgg

SEQ ID NO: 400492 - DNA, 362 bp, Homo sapiens
tgcaatgagcagcaggtaaatatctttttagtgtctttagccttagcttgtctgtgtgattttccctacatatgtatagccagatttcagcagtttttacacaaaacttggggctttccactctcagactcccttttctgggatttcatctttctatttctaactttcatggttgtcccaaactcttgtcttttggttttcccaaccagtgagaccttgggtttctatccagattttaaatgtcccatgttgcattgactagtgaaaaatcttttttaaaaaacccgttgcttgagcctgggaggtcaaggctgcagtgcgagctgtgatcgcgccaacttgcactccagcctgggtgacag

SEQ ID NO: 400493 - DNA, 240 bp, Homo sapiens
gtaaccatcaggaagtggaattgctgggccaattgtgaacattctaagtctcatactcgatatttttgagtaactaaagttgaaatggttttgtcccatgactgagatcatcaagcttgtgacttgtagagcctttacctattgtctaccctctttgtgttcctaactctaccatagtgggtccagcccattgtgggtgctcagtaaatatttgttgaataactttatgaagggaagaaa

SEQ ID NO: 400494 - DNA, 178 bp, Homo sapiens
cagttttacagaggtacagattagtgaaggaatttatccaaggtcacacagctattaagtggtaaagcaaggatttgaatttaggcaatctgagtccagagactccattcttaaccactaaactggatgtggtctctgcagagagtcctgtctcatagggagacagaatagatgaggg

SEQ ID NO: 400495 - DNA, 499 bp, Homo sapiens
agaggatgactcctctctcgcaggtccaccttctttggtgttgcttgagggatcagaagaaatgccttaacataggtgtgtgggaactatggctgctaagtatgaactcagttacctccagttataagctagtgtgaggttccatggtgagcactttggactctgaattcagtgatcagagttcaagtctcactggtacctttctgtataattccagtgaggttcctctctattgctccataagcagaatgggggaaattgcccaatcgtggtcacagaccctccatgccactggctgtatgcaattggagtcccggacccagcgaccagcaagacccctcccctctcagggtgaccctgggcctccaggtcacaggtctccactaaaaatgctgcctcccctcaatcctagaccccgagttttcttttgttcacgtcattgggccattgccctatgtctctttggaagaaatgacctatatgaaaaattttacttcca

SEQ ID NO: 400496 - DNA, 343 bp, Homo sapiens
gttgctactaaatggattcaggtttggtcaggtttgcgaataaattagttacaaaaatcagagtcttttggatcttggaactgtggaaactggattgtggacctgtacttgactatgataagcatttctttttttctttttttttttgagatggagtttcactcttgttgcccaggctggagtgcagtggtgtgatcttggctcactgcaacctccgcctgccgggttcaagggattctcctacctcagcctccctgataagcatttcatatacatctttgcttaccccaagatagccagctgcataaaaatcatgatttttaaaaaatgctgtagttaaaaa

SEQ ID NO: 400497 - DNA, 306 bp, Homo sapiens
tctccgtgtctctactcttttctctgggcttgcctccttcactatgggcaagcttccaccttccattcctttcttctcccttagcatgtattcttaagaacttaaaatctcttcaattctcacctgacctaaaatctaagcgtcttattttcttctgcaatgccacttgaccccaatacaaactcaacagtagttccaaatagccagaaaatggcactttcaatttttccaccctacaagatctaaataattcttggcgtaaaatgggcaaatggtgtgaggtgcctgacgtccaggcattctttt

SEQ ID NO: 400498 - DNA, 417 bp, Homo sapiens
ttattaccatcttgggaacatattcagaaatgtctttccttccctccctccctccttctttcccatcctttcttccttctatttattttccaggcaggcccatttgtctgcttagattcagtgacacagaatgggtccaggaccatgtcaagaccacctgctgatgctagtgttagatgactccaggaatgtgaggtgtgcatccatggtttcagaatgtaatccgtgttgacgtgtactgtttgcatactctcagactgttttttttttatgcaaaagaaatgttactttctgggggaaaaaattaaaagtctatctttcatcaacctaaaacttctatatcccccaaacatagaagtttacctttttaacatttttctctcaacctgtacaaaaataaaaaaattctacattatg

SEQ ID NO: 400499 - DNA, 551 bp, Homo sapiens
cagagtgtgactctgtctcaaaagaaaaaatgaaaagaaaaagttgttcgtagatagtggaaggttttgagtcttcctatggcagtatgacagcataatgcagtgtgtaggggtaaactttggagctacactccttgggtttaaatcctggccttcctatttatgagctatgtgacattaggcaagctatttaaccatttaatttccttatgcctcagtttccttctctgtaaaatgaggatgataataataagccctctcacaggtaattgtaaggtttaaatataaatactttagttgttattaacttgaacactttctactcactcaatacccttggccacacagaatgccttcagttcctcaatgtgccacattcttcttcccccagagctgccattcaaattgtcttgcaatctggaagattatccctcctgttcaccttactgactcctccaccctttgggactcagcttaaaaaccccctcctcagaaatgccttctcagaggtgtctctgaaataggcctcccacaattactctttcctctac

SEQ ID NO: 400500 - DNA, 675 bp, Homo sapiens
gcctaatgtaatgaaaaatattgctatctctccactgattattttggatgatgggagagctgtatagccatttaactaaagaggaatcctttcaggaactactctgaagtactttaagagatggagttgctgaagaaaaaagattgaaaacaattggcttagctgttcggagcgtggcaagaatgtaactgtaatctgtcattgtgtgggcagacaaattgcctgaaaattgaataaattggaaatcactggaaggcagctattttgtccttgagtgcattagatatcttggaaaaatgttattaaatggtgaacaattgctatcgaaaagtttctagttgtttggaatatagagttacataaagtcaagattctattattattctaataatagataaaatccgaatgtaaagaaaatgtttcctatgaaatatgtaatttaattcttctcagagcaatactttaaacaattatttgattagcctgtgtttgtgaatgtatataaagtaagcaataaccttattttctcctctttgtaatttaattcattagaaattgagaatctcagacttctctccagccctattaaatctgcatcttcatttccaggtcactcatatactgtttaactttgagaagcactgctgtatattgtcttgagagtccacactatga

SEQ ID NO: 400501 - DNA, 420 bp, Homo sapiens
caaagggagcctcccagccagggtccacggccgcccatggagtggcctgagtacatcttagtgtgaacactggagaagccccggtgagatgccgaggtaggtagttgtacgtgttggcttggctaggctgagtcaaacactaatctaggcgctgctgtgaatgcaggtgctttgtagatgtggttaatgccacaatcagttggctttgagtgaaggagattaccctgaaaatatgggtgggcctcctacatcagtggaaggccgtaagagcaaaaaccggtttcccagagaaggaattctgcctcaaggctgcagaattcactccccggagctgccagcaacagatttcaggcctgccagccccccgcagacacgggccaagtccttcaaataaatctattggttctgtgttcctggaga

SEQ ID NO: 400502 - DNA, 498 bp, Homo sapiens
ccttggtgctgtctacagagacaaaaataaatttctttggattttagttatctttctatgtcagagattcccaagaccatccccaggttgacgatttgctaggaagactcacaggactcagcatatatccatattcatggttatgattcattatagggaaataacataaagcaaaattaggcactctccgcctggcacatactaaagttacatactcccagaagaaaagtagatgtcagcataaaccgtattgtttgtacaaacaatctaggcatagtgagtcactcttatttagggaattgtggaatccctcctgaaatctaagttcacaggtgccaggcaaaaaggcccttttaatcatagaagcctcaggcctgctgtgataactcttttctctacatgtttttttttttaatttatacaatgatttgcaggtaaaatcaagagtccacatatcaagtaactgtcttttaaatgttattcatatatttacaggta

SEQ ID NO: 400503 - DNA, 625 bp, Homo sapiens
cacaaatttatttctcagaatgcaagtctgtctcttatatcctcgggaaacacacctttatatcccagttagtactggccaaaattaaactagggactggccaaaaacagtgcctttcctcactttaatctcactaaagtagataagactcaagttattttgttcttgcaatggcattgacaaatgtttgcaccaaaaaccatgttgaagttcattaaggaaactgtgatccaagatccaaggtcaaaaaaacaaattcatcaattcagcacaccaccaactcacaggctaagcatcttactgctaattcattgatgctgccatttgtcaagtgccaaattgaattattgatttgtcaataatttccttccgttggttacttatatagtatattgcaattcttgttgctgaagtcagctacactttttctatttgaaaaacaatttcttgcatttgggatttcaggtatagtgattgttacaaatatgaaggacttgaattaacagcaagttttcaagtaaaactttacttatgtataactgaatgagttcttaaagacatttactaacaattttccacaaactaaaaatttataaaacaataaataaaatagactttaaaaaaa

SEQ ID NO: 400504 - DNA, 159 bp, Homo sapiens
cattccagtgaaatgaatggaatggtaaaaatattcttcatatacttacagcagcaaaatagttgttttctttttggaattctttttagctgtcaagtgaatataacaaaattgttttctttttgttattcagggaatttctataaattacgttcaggg

SEQ ID NO: 400505 - DNA, 118 bp, Homo sapiens
gctgttggttggccatgtgacctacatctctcctttaggtctcaggtgaaacatcccctcctcccaggatccttccctgattcccaagcatgggaaggaggaggaacctcctttggtg

SEQ ID NO: 400506 - DNA, 474 bp, Homo sapiens
gtgacaccctggagctccagtttcttcgtttgcaaaatgggatcctcagagacacccacctggccctttcacaacagcagccagcacgttcctgatatggcagacaatgctgtgtgcaacacatcgtctcctcatctggacacgcgacaatggtgctcccagccgccctcacagtgagcctgggcacgtgacgttctcgccaacggacctcgcacagaagcgatgtgccacttctagtccaaggcagagagtgctccccgacccatctctcttctctggctgcagttattctgaggcctctgattccggcctcaggcagcctggattcctgcactggctgggaggaggcccatccagggggccttttatcagactgtgacatgtgagcaaaaaagagactttttttactaagccactgagacagtatcaatgactctgaataagacacctaataaaacaaaagtcaaatcaaat

SEQ ID NO: 400507 - DNA, 499 bp, Homo sapiens
gtgacaccctggagctccagtttcttcgtttgcaaaatgggatcctcagagacacccacctggccctttcacagtgggttgcggttggcgctgttgggacagcagccagcacgttcctgatatggcagacaatgctgtgtgcaacacatcgtctcctcatctggacacgcgacaatggtgctcccagccgccctcacagtgagcctgggcacgtgacgttctcgccaacggacctcgcacagaagcgatgtgccacttctagtccaaggcagagagtgctccccgacccatctctcttctctggctgcagttattctgaggcctctgattccggcctcaggcagcctggattcctgcactggctgggaggaggcccatccagggggccttttatcagactgtgacatgtgagcaaaaaagagactttttttactaagccactgagacagtatcaatgactctgaataagacacctaataaaacaaaagtcaaatcaaat

SEQ ID NO: 400508 - DNA, 359 bp, Homo sapiens
  misc_feature (168)..(168): n is a, c, g, or t
acattgtaatataaagtctttgaatcctcacaatgaccccaggaggtaggtgctgttattaacatcgtcctttcctccatgaggctaataagacacagagagattaagtgtcttgtccaaggtcatagagctagaaccttgactccagaaacagcatctgcaaccccncctaaccccccaccctcgcggccttttgcctattctgcaatctcatgaaatttcctttccttctttgaggccaggagctctccaaggtgctggagagaggcccagaagcagcgtagagaggcagccccgccagaccctgcaagaccatagtaaggaccaggattttattttgagaattaagggaaaccaca

SEQ ID NO: 400509 - DNA, 302 bp, Homo sapiens
ggccaggaggcgctgggagcgggagtgctcgccctggggaccgcccccttttcccttttagggtggctcctgtcctccctccccatccctgacctggcgaaaggcctagtcctggggaccctcccacctcaggggctgcaggcggactgccccagctcccccagccccacgaaactgggcctttcctgctgagaggaagtgactttttacagaagccactgaacctggttattttggcaaatcgtccgtctcgagggccttggggggaactgaaatatacagcctgaacgttaaaagtgctc

SEQ ID NO: 400510 - DNA, 484 bp, Homo sapiens
gtcatccagccctacctcccctccaagcagggtcacccgtttctacattccattgcagcagctggagtcctggatttgccactaacacaccccacgtgcccaagcacagtttcatcttctgcaaaatggtgacactccttaaagtttcttcccatccgaaagttctgttatcaatacccactcatccaacaaatggcaagaaaatttagcttctccttaaatccatgctaatgtttatgagcataagaacccaaggagatcctccttacatagaaggcaagcatctaaatcaattcaactctacttttatcttgcattaaaagatgaagccaatacaaaaattagctgggtgtggtggtgcacgcctgtaatcccggctactcagggggctgaggcaggagaatcacttgaacccaggaggcagaggttggagtgagctgagattgtgccactgcactccagcctgggcgatagagcgagactc

SEQ ID NO: 400511 - DNA, 434 bp, Homo sapiens
gaaatatgtccatgactaatcattgaaacctgggaatattgcctttatatggcaaaagggactttgcagatgtgattatgttatggatttttagatgagattatcctgggctgttcccctgggcctgatgtaatcatactggttcttaccagagagatgaaagagtcagtcagagaaaaaaggcgatatgattgtagaaacagactggagtgatggactttgaaaatggaggagggggcactagtcaaagaagacagatggcccctagaaaagcaaggaaatgggtgctcctgagagcctccataaggagccagccctgccaacatctttgctttagcctgctgaaactgatttcagttttctgaattctagaatataagagaatagataaaccacaaatttgtggtaatttttacagcagcaataagaaacta

SEQ ID NO: 400512 - DNA, 412 bp, Homo sapiens
aggaagtctgtgtacataaaatgctggtcataccctggatttatttcaaatgcgttgtaggattgtcagatcaacataggaatttttgtttcaggaaaatgggatcttacagggtaatgtggtgagatgatggattctgaatatttcatttcaaatgaaatcaagtgatacaagatatgatcctcccttcacaacaagggaacttggagggaggagaggaaagaattttcttaaaactcgtagttgcatgtttattctccccttgggtgccctaccctatcttctaacaaatcagaactactccttgtgccccgcctatcctcagttttcctgccttccgctaatttgttcaaactactccctctgcctatgtgaaaagactgcccgtggaaggcagcgagactccgtctca

SEQ ID NO: 400513 - DNA, 308 bp, Homo sapiens
aaccaaactgtcatttcaggcttgatctcaggaaatttacctcccacacacaagttctcaggaagctaattaaaaaggtaacctacgaaaataagaaggaggggtccagaaaactagaaacccaatacctgttagaagtaaaaaattctaaggatgacgggaaaaggaattttaggagaacagctatgcaggagaccaaagagcaatcagctcagattggagcaagaggacacacatctccaaagaggtgactctgccaagacgaatttaacgtttgaatggactgaaaggagatttatccttccatg

SEQ ID NO: 400514 - DNA, 238 bp, Homo sapiens
  misc_feature (1)..(1): n is a, c, g, or t
ntctagaggatccctggcaaggtggaaatcaggatttatttcatgggctctgtcacagtctcggatggcagcattgggcttctcgtatttggggaaggggatgttctgcacagtgcagtactcacaggtttgtttcaggggctggaacagcacagagggcgtgtttgagcattaggaggagtgggagtggaggagaagcacagagttcttagccccagcttcctgatttccccagcta

SEQ ID NO: 400515 - DNA, 482 bp, Homo sapiens
tgtgtcactgggaacttgagaattcttttcttaactagtcggggaataaaaatctcttctaaagcccgtgtttttggttacccgggggtgtgcctctttgaacacaggctcaactgctaccagggaaggctggggggcagctgcactgctgtgtgaatcgctgactcactgggttcaaaggaaaccagccgctcttctatatgtgttgacagcaccctgtgagcaaggtgggcatccttaagacctgctggactttctgctgggggcctggctggcttcagccttgcacagggacactgggcatgaaggcagggagctctgcagttcaggactcggggcaggagtcagggctggttttctcgaaggtggacacaccacccaccccaggactcaagcgatggtggcctggacctccagttctaagcctcatctgtttttgttttattatctatgatttgttataaaatcttgaaggcatgtta

SEQ ID NO: 400516 - DNA, 619 bp, Homo sapiens
gggagatagtaaataataataataaaaccaatagctttcattatttgtttttttttaaattattttattaataattaaggtataattatcacatgacaaaatgcactcattttaaatgaccaatacaataaattttgacaaatggatatactcattaacacactaactacaatcataatcaatatatggaacatttccatctctcctaaatgtctccttgtgatacttcccagggactccctccctattccccacccctatctcccaccactggacccaggcaaccactgatttttcttctattactttagattaaacttagtctttctagaacttataaataaaatcatatagatttattcttttgtattctggctcattttgctcagtaaggtgtttttcagatttatacttgtgatggcatgtatcagtacagtattttgcttctttttattgctgagtatgatgctattaatatggatgatacaaaaacttgtgtgtctgttcaccagttgatgggaatttgtgtggtttccacagggtttgggcacctattcacttttttaatggcctaacaaggctccaagtagacattactatggcttcttagtctttcccg

SEQ ID NO: 400517 - DNA, 320 bp, Homo sapiens
ctaccagtgtccgtggttcttccagagtgccttttgtaagctttcccctgggatctagtacatccatcacctctgagctccattcgggctgctgataaaagagcaccagcattgaaactggccagagtgaaggactgatctccagtcctttcctgttcctgccattttctccctaaactatgctacttcctgcatgctggcttgagaagcacaagattctaaattaagcaatcagataaaaaggaaaaatacagaaaatgtcaaatcctgcttggactagttttataagtaagcaggtaaccaccaatatttgatgttaa

SEQ ID NO: 400518 - DNA, 520 bp, Homo sapiens
tgaatatggctttcttttaatgcatctccaggatcacttttctctgatctagagtctggaccacctcaggggacaaagcagagctgtcagggaggtgtggacaggagcaggaatgatgtcagattaccagctgcttgcaggacggttgctgggtggctgtggactgacgcggctcttctgccattctcacttgtagttgtcaagaataactttagactttgctgggaatgcaatatcttctgacaaggaggagttggctggaacagcctgggctctgtacctgtccctcagatgtcctttggtgctttagcccagtgactcatcgatctcccaggtataaaacccagggtgggcttctttctggggtccttcggctgcagtacaagtggggcatgcacagatgagactccatctaccctgggaagctctcctgagccttgggggactggcttgtcatgaatccttggctttagttgtcccttgttgtgtatttctaatgaataaacctgttgcatataaa

SEQ ID NO: 400519 - DNA, 567 bp, Homo sapiens
gtatgggtattctacctacaggttttccttcactgttgcccttttcaggaacaagacttatctctcacctagcctaaggtaagggaagaaagtcggaggctggctttggctgcgaaaagagaaaaaagaaaagagaagagaaggaagaaaaaggaagaccaaagaaggaaactagaagaaattgaagccaaaaataaagagaactttgaactccaagctgctcaagaaaaagaaaagcttaaagttgaaggggatggtttccaggaccctcacggataccaaaattcagatactcaagtctttatataacatggtgtaatatttgcataaaaattatgcacattctcccatatactttaaatcatctctacattacctctaatacctaacgcaaatgctatgtaaatagttgttatactgtattttttaaattcgtatttgttttttgttttgttttttgaatactttcaatctagtgttggttaaatctatggataaagaggactgactgtattgtgggaaggaacccctgccatgaaaccaccaaaaataagtgcatgcaaaaaa

SEQ ID NO: 400520 - DNA, 618 bp, Homo sapiens
ggaggattctcccctaagcccccctcccttgtttggccgcggaaaagggctttcaaggggtactacgagcaattatattggggaccgacgagacccccgcgggtacgtgactgggaagccatttgacagctgtagcctaatttcagccagctcaacaggcaccatcgctagacctacggcgacaagagcgaagactccgtttccggaatataaccagaagaaagtaaggtacatcttaaacttgctcctcttatgatgaaccacatagacataactagtgttaatgggggtcagtggaagtcatcatgttctgaaaatccattaaatgtacatcattctagtgtttaggttaatgctgttaaattcctgttactttaagaaagggttggccgggtatggtggctcacgcctgtaaccctaaccttggggagacagagatgggtggctcacctgtcaagagttcaagaccagcctgggcagcatggtaaaaccccatctctgctaaaaataaaaaaattagctgggcatggtggcgcatgcctgtaatcccagctactctggaggctgaggcatgagaattgcttgaacccaggaggcagaggctgcagtgaaccgaga

SEQ ID NO: 400521 - DNA, 339 bp, Homo sapiens
caaactgagaagaggctatgggaagaaatggactttcctatttgctattaggatctcatgtccatccttctctacctgcctttgcatcctgggaggagacatgtctgtgcctcgtcaatgggctgtctttcactcaggctccaaagggtacacattgacaggagattggagggtgactttttttttcagccaaagggacacattgacagtagattgggggatgattttttaaaaatttcctggctctctccctgcgccctgaagggctgtgagttggcagtggcagtgtttttctacctaaggacatagccctgcctggtggccctttcctgtagccac

SEQ ID NO: 400522 - DNA, 518 bp, Homo sapiens
tgcctgattgttcatttcatcgatggccatctgtagctacatcttcttaaacctgggtgaccccacatttcctggaaccttgccatagcaccagcccctccacaatgggattggagggaaggctactcccagcgtatgctggtagctggtagcagggcttcatttcagagttatttccttatctcgcagccccactgcacagacccctgcaacagcctcctgattagcactaccttcctgttcataaatgcaccacaccaggatttctctgtcagcctgcgaggcattcacttcctcagcccctagggaggggtggtggaaatacacacggccccccatcctctttagtaatccaacttcaagtgaagatgtgaagtccactaatttttttcctccacatcttatttgtctctttgcttggcaaatgtttcaatgacttaacagatgggattaatttttatcagatgtgcaagggagccatttttagtttttgctaaataaaaaaacagtggagtaca

SEQ ID NO: 400523 - DNA, 380 bp, Homo sapiens
ataatatccggtgagcctctttgaattttgaaagcaacatattcttcatttgggtatgctacaaaaacctatttactgagtgaccccaaagctgctaattttgactggagccagaaaaaaagaaggttctgcagcaggtccaggctgccgtgcaagctgctctgcgacttgggccatatgatccggcagatccaatggtacttgaagtaacagtggcagacatggatgctgtttaaagcctttgctgggccttagagctgactcacagtgcaggcctctagggtttttgtgaaagaccctgacagcaccttaatcttggacttatagcctccagaactgtaaagaataaatttctattgttttagacacctagtttgtgg

SEQ ID NO: 400524 - DNA, 192 bp, Homo sapiens
gttcaccagtgttgtagatccttgggcatttttagaagtgaaggtctgcctgtgaagatttcctagaagcttctgccctctagcgcccagcctgagaggtagtgtggcaccatccctacttatccgtgcttccttcctcaatttacaaatcgtgattcagcgtgagaaaatgataaagtcagcaggatggag

SEQ ID NO: 400525 - DNA, 407 bp, Homo sapiens
catcagtgatccccattggcaccatggaggacacggctggtggccccaaacagaagcccaccacaccatgattcaagcagacaagggaactttttgactccataatggaaaaattaggggttgaggcctggcgcggtggtgcatgcctgtaatcccagcactttgggaggccaagttgggcggatcacttgaagtcaggagtttgagaccagcctggccaacatggtgaaaccccatctctactaaaaataacaaaaattagccaggcgtgttggtggatgcctgtaatcccagctactcaggaggctgaggcaggagaatcgctttaacctgggaggcggaggttgcagtgagccgagatggtgccattacactccagcctggtgacacagcaagactctatctca

SEQ ID NO: 400526 - DNA, 405 bp, Homo sapiens
gcttcttatggtaccacaggaggaaccttgcatccaccttcctggaagcacatactgaccacatggagtgggcttactggtgtggtgaagctctccagagccctacaagtgtgaccctgggctagttacttcaacctctctgagagtttaatttctccatttgttaaatagatagaggtttgttaagtgcttagcacccagtgaatgaccctgcttctggcttgtattaggacttttgcttaaagtcactttacctctgtgtctcacttgcctcatctgtaaaatcgggctatttgaagcaatgagatgaaagatgggatagtatttttgttattcctgtttatcttgagaactcattgtttgatatatatatatatatatatatatatagtcctcaggtgacct

SEQ ID NO: 400527 - DNA, 664 bp, Homo sapiens
gaggttttattatctgcctgcaatctgcaatagatcctcaatttttctagtttactacaatatttagctacaacactccaaattaatatttcatttttttcctgctattctggcttggaatcactaaaattataaacttttcatttcttgaagtccttcaaactgaaactggatgacttgacataagcttcagaaaaattaccacaacagcttgtgtgtggcccatctttatggcattcaaactgcaaactaatccaatgcctcttctcacaccagctgaagatactacaagcccagcatctagaaatcttattgatcagctgccctctgggctcagaaactgtctttatagttcgttccaactattaatcttttttaattttatttttatagaaactaaacttcccacattaaaggcctgatagctcacactatccaggaaatatcctctgctaccaagtcccaacagatgattcaactggtccttaatgaataaaaggtgatcaaacaagaaaagagacttatattgtttgaaggaaagatgaatgtctcttctttccttaaacaagaagtagtactaacaaagattccttgcttggccaaactttagtcagatgtctatcttccttgcaaaatccaacttttttttttttatgtggtacaa

SEQ ID NO: 400528 - DNA, 436 bp, Homo sapiens
cctctagcctgggtgacagagtgagaccctatttcttaaaaaaacaaaccaaacaaacaaaaaaagactcttcatgttagagaataaatatcctgaaaatgttttaaatatctcttcatattagagaataaatattttgaaaatgttttaaaggaaagagaggacttctagtttcagactaagatggagtagacacactcctctctattcctcctgttaattgtagcttaaaactttgcacattatatgtaatatacatgttaggaaatatctgaaaagtggagcgaaggcagcagactgcctagggactttgggacacaaagagggacacagcagttttctttttgccttatacgtaccagactggatgctagagaagatcataaccttgaaaacaccaatggaagataaaagtttcccaaaactttgctctatc

SEQ ID NO: 400529 - DNA, 494 bp, Homo sapiens
cgttctttcctagccccggactttcagaactagttgtggggagaactgctgggccaagagacaggtccgagttctgtgtaggtggcatgaaggctcctgcctccaggacatgaggcggggctccagtgaggtgttggccctaggggcaaccttatcctgcaggggttcttaacccgaggagaggtaattaattcaagagtactgtgaacttggatgagaaaaaatttacgtcttaattttcaccaacctctgacatttagcacgttttgccattatgaacgtagacaacaaactacagtagcagtaggataagtatttatgacttagtaatcactagaaaccataggtttttacatcacatcacagttgttgcaagtatctcaaataacagtagttattagacaatcagccagatattatatgtcaataatgaagcatatatattgctctagcacaaatttttaaaaacattttgttagctacaaaaaaaaaaa

SEQ ID NO: 400530 - DNA, 460 bp, Homo sapiens
tccggtctctatgtcggactacgatcagtctgagaccttcgcccagatagaactgaccccaaactgacaaagggaaggtcagtgccagcctttgtgaaggcttcctggttggcctgaatttcctgctcccttcaggaagggtggggacaaaggagaggcccccctgggggcaaagagggaaatatcagaggttgcctaagaaaatgccctgctggaaaacacaaacccgaagggaagtttgggctgtaactctggtggcagggtgaccaagcgcagctgcttgaggaagccctgctgtgcctcaacaggatgtaaactcattgtgagcaacactttcctgctctctgtgaacttaaagggcagaaccagcaggtcctgccccaaacagtccctgccttagagcagggtggtcgggatggcctggacagccacagcaattaaaaaattgcaacattttaaa

SEQ ID NO: 400531 - DNA, 644 bp, Homo sapiens
atccagcccagggcaaaggttacattttagtcatctttctcctctgctagcttattagcctcattcacccagggtaatggactcttctgttttcttttctgctgtacccctcgttcctataaaaaatacccggtgcataggagacatatagtgactatgttaattaatttgagttgaagaatagacaagtaattcagagtctacagtattagcatggtttttgtctctgaacacactggagttttgttctcatcttggtcttgcaagtcactttagcttttttctgtcttacgacttttcagttagctcctctactgaaacacattattagactcttatatccatttttctatttttcattaatgaattaacacctgggatctaaatttttctgtttcctcatatacaaatggtaagctaatgtcagttgcagcaaagggtatatttactaggatttggggacccaaatcctcttcatgctattgggaatgatatttattcagactgggatttgacctgttttttgtctctcttctcagtttctttgtgagttggttaactttttcatacagtataggtcttctcagttacatgattctacttacatctgattttaataattgtgctggtctgttatttttaag

SEQ ID NO: 400532 - DNA, 397 bp, Homo sapiens
ggtgaaaccccatctctactaaaaatgacaaaaataagccaggcgtggtggcgggcacctgtaatcccagctactagggaggctcagggaggtgaatcacttgaacccaggaggcaggggttgcagtgagccgagatttcaccactgcactccagcctgggtgacagagtaagacaacatctcaaaaaaaaaagatccaagggaaacagatcaaagtaacacttcacttttatgaaggaaataagtgatggtcaggcagtcttctgggcataacagaaacccagaatccttcagccagatagtcaatgtcaaggccaggtgccacggttcatgcccggaatcctagtactttgggaggctgaggtaagagaactgcttgagactagcttgggcaaca

SEQ ID NO: 400533 - DNA, 488 bp, Homo sapiens
ataataataataataataattattattattattattattattattatttaaaaataattaattgccagatgatttgtattgattcctagaagggagatagcattttatgctggaatgcttaggggaggtatcatgagaagatttctctggttggacaggatttagatggagaacggagaagagggtatttcagcatgttattgggggttagcagacaaactagtttgactggagtaaaaatttatggactatagaaagctaatagaagggaaaatacgtatttaggagtagaatgcagagaatcttggatatcagggagtttagacatcaacttgcaaagcaccatagaagatttttgagcagaagattaaaagtagtcctttaatgaaggagaatcgcctgaacctgagaggcggaggttgcagtgagccgagattgcgccactgcactccagcctgggtgacaagagcaagattccgtctcaaaaa

SEQ ID NO: 400534 - DNA, 712 bp, Homo sapiens
ataataataataataataattattattattattattattattattatttaaaaataattaattgccagatgatttgtattgattcctagaagggagatagcattttatgctggaatgcttaggggaggtatcatgagaagatttctctggttggacaggatttagatggagaacggagaagagggtatttcagcatgttattgggggttagcagacaaactagtttgactggagtaaaaatttatggactatagaaagctaatagaagggaaaatacgtatttaggagtagaatgcagagaatcttggatatcagggagtttagacatcaacttgcaaagcaccatagaagatttttgagcagaagattaaaagtagtcctttaatgaaggagataaacttagtggtggagtacatagttgagtaaagcaggagagaattagaaagaccagataagtgggggcaaaaaattttttttggtgtgtgtagactttagcccatttgtccttcttctttctattctatctggtctaatatatacaggtcccaaacaacacataatgcttcccacccaaaatccacctctgtgatgggactagcatagtctgccttgactgaatgtataagtgacttaaatggttggtttaggcaaacaactggcgtgagacattttcttttctgaaccaacatgttgtatggctgaattgggttgg

SEQ ID NO: 400535 - DNA, 439 bp, Homo sapiens
tgagactcaaagagtcactcaaactcataattgcgtgtgtgtgtctactcattctccctctatctctccaataaccctttgagactcagaaactttttatccacatacaccctttatcacattttcttccccccactacatgtgtctcactttctctctgtatctgtctcgcttcttccgtctctgtcctacagcttggcggtaactgacgacctgtgagcttttagctgcaaactgcaactacgcggcaaacaatttatttagcccgacatctagccggtctccggcaggaccctgcaccgcgtcgggatcggacccttccgctggggcggcctcctgcgtcaaggccagcaggaaccttcctgtcgccctccccggccgccgcttcgcctccttcccgcccccggaggttgtgcaggcgctatggtccgcctggagg

SEQ ID NO: 400536 - DNA, 506 bp, Homo sapiens
acaataaacaaaagtttaagcaaactataattatatccaaaaaaaattattatgcatctcttaaaagggttacatagtatgacaaacatgcgaaaataattttgttaagccaaagaagaatgtaaaattgtacataatatataattacaactatatctgattttttttaaaaacttaggcatgggaggaaaaaaggagcaagaaccagtacaatctttctattctttggcagtatataccaaaagcttttaaaatggtgagattcttaaggccaggcggagtggctcacaacactttgggagccagattgcttgagtccaggagttcaaaaccagcctgggcaatatggcaaaacccattctccactaaaaatacaaaaattagctgggcaaagtggcgtgtgcctgtagtccctgcccagctacttgggaggctgaggctacagtgaaccataattggtgctacgtgcacttcagactggcaacagagtgagaccctgtctcaaa

SEQ ID NO: 400537 - DNA, 418 bp, Homo sapiens
aagctctatttcttgttcaagtcgcagtccattgtgggttcataagggatgagaggcttctgctccaggctgtcattcagggaccaaaactgcttttatctctttgccttggaatctgctgtgggaacttatacaacctgctggaagaaaagacagtgaagacacacccatcctcagctctggagtggcgctccccttccagtggtgagggctaatcatgtggcctgggctcagtgcttgaggtctgggaagtatcgtctgaacccaggaagaaatggccctcgcctcagctgctgataacaggccgtagttaatgacagatcatgatcatcaagtatcgccaattctcggtggaagttgggtttgtatttactttgtacagtttttactgattaataaagccagtggttgcaaatta

SEQ ID NO: 400538 - DNA, 1504 bp, Homo sapiens
atttgagtgggaatctcaaagcagttgagtaggcagaaaaaagaacctcttcattaaggattaaaatgtataggccagcacgtgtaacttcgacttcaagatttctgaatccatatgtagtatgtttcattgtcgtcgcaggggtagtgatcctggcagtcaccatagctctacttgtttactttttagcttttgatcaaaaatcttacttttataggagcagttttcaactcctaaatgttgaatataatagtcagttaaattcaccagctacacaggaatacaggactttgagtggaagaattgaatctctgattactaaaacattcaaagaatcaaatttaagaaatcagttcatcagagctcatgttgccaaactgaggcaagatggtagtggtgtgagagcggatgttgtcatgaaatttcaattcactagaaataacaatggagcatcaatgaaaagcagaattgagtctgttttacgacaaatgctgaataactctggaaacctggaaataaacccttcaactgagataacatcacttactgaccaggctgcagcaaattggcttattaatgaatgtggggccggtccagacctaataacattgtctgagcagagaatccttggaggcactgaggctgaggagggaagctggccgtggcaagtcagtctgcggctcaataatgcccaccactgtggaggcagcctgatcaataacatgtggatcctgacagcagctcactgcttcagaagcaactctaatcctcgtgactggattgccacgtctggtatttccacaacatttcctaaactaagaatgagagtaagaaatattttaattcataacaattataaatctgcaactcatgaaaatgacattgcacttgtgagacttgagaacagtgtcacctttaccaaagatatccatagtgtgtgtctcccagctgctacccagaatattccacctggctctactgcttatgtaacaggatggggcgctcaagaatatgctggccacacagttccagagctaaggcaaggacaggtcagaataataagtaatgatgtatgtaatgcaccacatagttataatggagccatcttgtctggaatgctgtgtgctggagtacctcaaggtggagtggacgcatgtcagggtgactctggtggcccactagtacaagaagactcacggcggctttggtttattgtggggatagtaagctggggagatcagtgtggcctgccggataagccaggagtgtatactcgagtgacagcctaccttgactggattaggcaacaaactgggatctagtgcaacaagtgcatccctgttgcaaagtctgtatgcaggtgtgcctgtcttaaattccaaagctttacatttcaactgaaaaagaaactagaaatgtcctaatttaacatcttgttacataaatatggtttaacaaacactgtttaacctttctttattattaaaggttttctattttctcc

SEQ ID NO: 400539 - DNA, 1066 bp, Homo sapiens
atttgagtgggaatctcaaagcagttgagtaggcagaaaaaagaacctcttcattaaggattaaaatgtataggccagcacgtgtaacttcgacttcaagatttctgaatccatatgtagtatgtttcattgtcgtcgcaggggtagtgatcctggcagtcaccatagctctacttgtttactttttagcttttgatcaaaaatcttacttttataggagcagttttcaactcctaaatgttgaatataatagtcagttaaattcaccagctacacaggaatacaggactttgagtggaagaattgaatctctgattactaaaacattcaaagaatcaaatttaagaaatcagttcatcagagctcatgttgccaaactgaggcaagatggtagtggtgtgagagcggatgttgtcatgaaatttcaattcactagaaataacaatggagcatcaatgaaaagcagaattgagtctgttttacgacaaatgctgaataactctggaaacctggaaataaacccttcaactgagataacatcacttactgaccaggctgcagcaaattggcttattaatggccacacagttccagagctaaggcaaggacaggtcagaataataagtaatgatgtatgtaatgcaccacatagttataatggagccatcttgtctggaatgctgtgtgctggagtacctcaaggtggagtggacgcatgtcagggtgactctggtggcccactagtacaagaagactcacggcggctttggtttattgtggggatagtaagctggggagatcagtgtggcctgccggataagccaggagtgtatactcgagtgacagcctaccttgactggattaggcaacaaactgggatctagtgcaacaagtgcatccctgttgcaaagtctgtatgcaggtgtgcctgtcttaaattccaaagctttacatttcaactgaaaaagaaactagaaatgtcctaatttaacatcttgttacataaatatggtttaacaaacactgtttaacctttctttattattaaaggttttctattttctcc

SEQ ID NO: 400540 - DNA, 678 bp, Homo sapiens
atttgagtgggaatctcaaagcagttgagtaggcagaaaaaagaacctcttcattaaggattaaaatgtataggccagcacgtgtaacttcgacttcaagatttctgaatccatatgtagtatgtttcattgtcgtcgcaggggtagtgatcctggcagtcaccatagctctacttgtttactttttagcttttgatcaaaaatcttacttttataggagcagttttcaactcctaaatgttgaatataatagtcagttaaattcaccagctacacaggaatacaggactttgagtggaagaattgaatctctgattactaaaacattcaaagaatcaaatttaagaaatcagttcatcagagctcatgttgccaaactgaggcaagatggtagtggtgtgagagcggatgttgtcatgaaatttcaattcactagaaataacaatggagcatcaatgaaaagcagaattgagtctgttttacgacaaatgctgaataactctggaaacctggaaataaacccttcaactgagataacatgtaagtataatttttcataaacaattttatttcaatatatccctcaagtttaccaattcaaattcatattttaattgagaggctgacttttctttctttgaaactaaactgtgaaaacaatccattaaaaagctaaat

SEQ ID NO: 400541 - DNA, 487 bp, Homo sapiens
ccctgtgaatagcttccttgacacccaataaggtcaattagactgcggttgcatggatgccatctggattttccagaaggatccagagaaaacgtagctggataccagacatcctgctaagaagaaatgccttaggggctgggcccagcaaagtgtctaccgggagtagttgacaagcccagttggagagagattctaaatcattaattttaagccactggaaattaaaaggtcaaaactgggcaagtggcaacaaagagactttcaacctgaaaactggtcatcatttcaaaagccccatttggaagcaaaccctgggattatcaaggagagagccaagcaggatgagctgcaatggtggtggagacagagggtggatgtcttgacttaaaaacatagagctacataaacaccccttggtcttctgcttaccaataaagaaatagagaactggcctcgttggcctcagcggtggagctctcggcag

SEQ ID NO: 400542 - DNA, 339 bp, Homo sapiens
gctggagacggcggcagtggcatgctgaacccagaccagggctggccccaaggctggagtgcgcagagtgtggcctggaagaatgaaaaagagtttcgcaggctggagggaaacactgtggaggaggggcttccctcactggggtagcagtttccggcttgccccacatggcaggatttccatagtatatgtagtatgagttctacatcttggcctgttacccggctttggcagtctcatctccaccacctggagaataaatgggatctgcacgaactccactctaaactgaaatacatggccgggcagtgactcacacctgtaatcccagcactttgg

SEQ ID NO: 400543 - DNA, 425 bp, Homo sapiens
aaaatatgtagccccagccctgaagcatgccccaccccactgaccccttcatttccctccgtaccacttatcaccatgtcacaaatatctgcttgcttgttgtctttatcctcccacagaatataataatgacagggccgggcacggtggctcatgcctgtaatcccagcactttgggaggctgaggtgggcagatcacctgaggttgggggtttgagaccagcctgaccaacacggagaaaccccatctctactaaaaatacaaaattagctgggtgtggcggcccatgcctgtaatcccagctactcaggaggctgaggcagaagaatcactggaacccaggaggcggaggttgtgatgagtcgagatcgcatcatagcactttccagcctgggtaacaagagcaaaacttcatctcaaaaaa

SEQ ID NO: 400544 - DNA, 413 bp, Homo sapiens
ctcctaaactctgtgcagacaaatttatttggctttggaatttataattctagcttcagttttgcctgctttgtgaaaatgccataatcccattagtttttctttaattgctcttattctttatagtagagaagtatgcaaaacaactctacacatttaagtgcacacaagaattatgtggattatcagaatgcaattacatttcaagattgtagtgagctaattttcaatttggaccttattcttttttctcctcttcctttttatttttgcctaaacaccactacttgaaatgataactcattgaaacttttataaatgaagtagctctcaatttgttctttagcactgccactttccgccaaggctttttcacttgttaaatcatgacttattaaactgatgtaatgtta

SEQ ID NO: 400545 - DNA, 480 bp, Homo sapiens
tttttgtaattttttaaatcttagcagctatcattagtgtttgtgtattttatgtgtactccaaggcaactccttctttcaacgtggcccagggaggccaaaagattggacacccctgcaaactaatcacatcaatctctcttgattacactgtgtgatggtcatattagtctctctacatgggaagatgttgtgcttactatggccagtcactttgacaaagaaaagccaaattcttttctaaagaattgttccttattaccaaactcccagtaaccccctcaaagaataattgccccttgcttaatcatgcaattgcatattatgtttatactcacttcagcacttatcagagataattgcagtttcacaaggtttactttttaaagtataaacaaattatgtatttacttactaatagaaaatataggtaatttgggaaaatttatgtacattgttaaataaaattatatctatcta

SEQ ID NO: 400546 - DNA, 386 bp, Homo sapiens
agaggttcttacacttcctttcaacacccccaaaggactgtccttcgcttcctgctttggataccaatataatctcaacctcgttttctgtcctacacaattggtctcagccttattttctgttccacacaactgacaaatgcagtaaactccaggcagcaggggctggagctcaacacagaagagtggctttaactggactcagggccactcaacaggcaagtagctctcaatctggtttgtacactgcaaccaccagggagctttcaaaaaggaccaataacgagtccccctaccagagatttgatggaattgatatagagtttgacctgggtgtcaggtttttttaaaagttccacaggtgttcctaatgtatagccaacacc

SEQ ID NO: 400547 - DNA, 289 bp, Homo sapiens
gtagatgggctcatgctacattgccccagctggtctcaaactcctggcattaagcaatcatcctgcctcagcttcccacagtgctgggattactttacccttagtaatttaatttccagtgaaaactataaagcaaacaattgtgaactgtcacaccagcattctgtacattgacatatctatgaactgtaattactagaagcatgtgccttctcatggtataatttttcaatgtgacagaaaacacatttggtaatggacctaactatctttagtctctctgtaataa

SEQ ID NO: 400548 - DNA, 307 bp, Homo sapiens
cagtcccaccaacagtgtaaaagtgttcctatttctccacatcctctccagcacctgttgtttcctgactttttaatgatcgccattctaactggtgtgagatggtatctcattgtggttttgatttgcatttctctgatggccagtgatgatgagcattataaatgaagattgcttggtagtggactaatggataattgtttctgcttctttaggattttctaaatttttcccaagttttgtatattaagcacaaaattataacaggaaaataaagaaaagaatttaaaataaacatgcaaccaaa

SEQ ID NO: 400549 - DNA, 416 bp, Homo sapiens
aaaattcaagaggtatttcccaaaagaaatgttagaagatgccttaagaacagaaacagaatctggaaaagttaagactgtaagctcaatgaggacaggtacttctgtgtgttttgttcactggcatattccatgcaccttgaagaatacctaacacatggtatgcactcaacaaatactcgtcaaatggtaagggaaaaggaagggccattattttaaaagtagataaatcctgaaatgtggaggaatagaattgagacacatcaaagatgattgtatcatatctgtcagtaaagtaagaagctagtgggtgtggaggaggatggccctccacatgcatgaccacctctggggaaatcattaggaatcaataagaaagtaacaaaaataagtactgtttttctgccgagatttcc

SEQ ID NO: 400550 - DNA, 416 bp, Homo sapiens
tatgtgtgagatggagcctgcttgcttgattgattgggagacagcatacttagggtttggcatgcaggctctgcagccagattatctgtccctggacaggttctgactgcaacatttactcactttgtgactttggggaatctagttggtttttctatgcatctttttcctcatttataaaatgtagatgatactaataatacctaccatcaatggttgttatgacggcttaaaatagctaaaccttacctgtaaggcacataaaactgtgtctagcatataataaatattctattttgtggaataattaaccaattgaaacctttaaaagtggtccaaattctctaaataatgtaatttacatttgactttgtatgatggaagtttcatactctgtagcaatctaaaagcaaaaa

SEQ ID NO: 400551 - DNA, 283 bp, Homo sapiens
aatggccacattgtatttgtttttttaaatgacatctggtcatcatcgaaatcaagcaaaacaaaattaagagaacctacccaagatgtcagtgaaattggaacattcctgacaataccagggcataaatgcaggaatcaggaataggcagcagtgatagaacaattctgtttgtgcccttgttaacgtgaagttcaaagtcatctttgcaattagccaaaagaatctgaagtgaagctgaggaaattgctgatgttgaaataaacatttccttccatgagga

SEQ ID NO: 400552 - DNA, 420 bp, Homo sapiens
ctcaaaagcattatgctaagtgaaagaagtcagacacaaagtattacatactgtgtgacttcatgtatgtaaaattctagaaaaagcaagagtagaggaacagaatacagatcagtggtttccagaggctaggatgggagagagattgactacaaagagcccaaaaggaatttttttcaggggataggataatagtctatatctttatggtagtagttataggactatatacatgtacgtgtttcaaattttatttaactgtgcactgaaaaagagtagactttactgtatgtagttgtactcaataaacctctcttaaaatatacttggggcagcgggaggagggaattattctccctgcttcagtttcctcatctgtaatgtagacccgataataaaacactgcaagctccgcctccc

SEQ ID NO: 400553 - DNA, 984 bp, Homo sapiens
tctgagcatacttaattttcctctcctgctttatgttatttttgtcataagctctctctctcttttaacctgagacatgagttttcttgttcggtggaatcaatgtctattagatttactcacatttttaccactgacatctcagatttcccgtctggggccattttccttcctcatgcaaggcatcctttagaatttcctttaacgaagacgttctagtggcacactttttgtctggcttttcttttgcctctcgtcttgaatgtaactttcatttggttcacatgggagtctagactggcggttaggtctctcccgacacacggagatgccatctcaccttctgccgctcccactgggaaatctgcaggtcccagggtttgccatcgtctgtcctcgttcctggccacttccaagatgactccgtgctttgtgttctgcaggctcactagacacttaaaacaaaatcatattgggcttccttgggcttcttaaatctgtggcttgtatcttcttcagatctggaaaattcttagcctttgttgcttcaagctgttgcctctgtcccacgtgttctcttttctcttcaaattctgacagtgacatcctgcgccacatcctctcttaggcaagtcacttccctggacccgctttccaggggatgcaaaacgcagggccccccttgcagacctgactcctcagtgagctgaaggcagggcctgactagaatgtgtgtgtatcaagagccaaagtcaaaacagtagagccagccgtgcttagcatccagctcctctgcaaagaaggaaatgtgtgtgccctagtgggtgggaaatacgaattgtgtgcttttggtgattccacgtatgacttaaatgctctaatatttgcacttaaaactgacattctggtgtaaagatgcactgtgaaagtcataaaatttataatttaattttttcttagaataacattaaataaacagcaaat

SEQ ID NO: 400554 - DNA, 343 bp, Homo sapiens
  misc_feature (228)..(228): n is a, c, g, or t
tgagaacaagcagctgtgtgcgtgagcccaggctgagggagctggacttcaccttccactctagacagattcctggaatgtgagcagacggaccgtttacaaatggccctacttctctcattcaactaacgttactgatcattttcaatggattccattcagtggaatctgaatctactctgcatctactctgtgtttggaggctggatgggatatgatcactggccntttctttctgctgagtggttcactgtgtaaacaaatggcttgcagtctccagggcaccacagaccccagtgatgcacctgttttaagtcaaacactctttttggtatattaacaa

SEQ ID NO: 400555 - DNA, 147 bp, Homo sapiens
atggagttgtcctgggtaaaacatcccccttccctggaagaggacaggcaaagcttggcttgatcctggaccagtgtcttcttgctaacacgtatgcaacattaaaaccatcagggtttgccatatcgactttgggagctttatctg

SEQ ID NO: 400556 - DNA, 336 bp, Homo sapiens
aaagggagccaccgaggcaggaagaagtgaaagtccctttctcagcgatctaccttccaggaagcaacaacccagcaggtctcaacaaagccccgaggctgtgatacagctacccctggggcaggtccaacgcgctgttatcatactctccgagcttcatccaaatgctcacacacccaacctagtgcttcctcgcgataacaccagtagcaggagcagcccagtgtcatcctgcacaaacaggtggtgtttacgcacggcatgtcaccgagagccatctgaccagccgtgccaaccgggagcaaagggggctgataaaggcagcttatcacaaac

SEQ ID NO: 400557 - DNA, 150 bp, Homo sapiens
agatgattataggtgtaattggcacatggaattagattggaaagtggcttacaaagtaggtactgaagtggaaaacctgagagaattttaaaaatacatgttgtgtatgcggtatgtacatgtgtggatatttacgtccgtacatcctgt

SEQ ID NO: 400558 - DNA, 405 bp, Homo sapiens
ggaatattggctggttagttgtattattgtctgtatagcaatttctctttctcaaacaagtataagtactaccaattttgaaacacattttgatggaaagcttaatgtagacatagtgcatggccacttactgctaaagatggaattttaattagggcctctctaatgttctttttactgctaacattttatcacatgtgacacactcaaatttaagccaaagtcatgctaggctagcattttaatgtgtataaaacgtcacatcctgtctccaactcactaaatataataatcaaggctagtttcctggtgatattttaaaggacaagaaaaggatacaagaattaaaaattgccttttaagacaattttgtccttatttctacacagtatgtttattatagaa

SEQ ID NO: 400559 - DNA, 952 bp, Homo sapiens
taaaaagataaggttttccaaagacttccaactgttccagtcctctttttgatttttttctataatgtaaacaactaattcagagtctgtgaaaatttgccttgaaacccattaaaatgaatttattgtttccaaaaatattaattagacaagctctgaatatgaacaataccattgaatagcttctaaaagaatgagtatttccagatgttttaaattaccttttgtctttgaagctttccttattttccttgcgatatcctattttctcttttgtgacaaaaaaattagacaaacatgttgaaaattggttataattcctaccatcacatgctatttcagatagtgactaataaacacattacatcactgtaatgtctttcccatgtagtcctgactgttcttgatagaacagattcaccatccagatcttatctatgcattgatccctcaataaaggaataacccaagatgaagttggcagtgggtatacacacagctatgtcacaccaaacttgaaatactttttagaagttttaaatgctgataaacaaactcttaggacaaatcactaatgagcatggaattcccatcttcttcagatttattcatcataaatggttttcacagattttatcataaaaacataatcttctctttcattcatagtttataattcacatgatttattcacattaaccagctgtgattggagaatcaggaggagctttgagtcccatattttataaatgcttctgagaagtaccatagttaatgcccctttcaaataaataattttggatggttgtggtggctcatacttgtaatcccagcactttgagaggccaaggcaggaggatcccatgagcccaggagggcaaggctgcagtgagccatgatcagagcactgcattccagcctgggcgacagagcaagagcctgtctcaaaaaa

SEQ ID NO: 400560 - DNA, 472 bp, Homo sapiens
ctgtgtggtggaattgtgattttcattttttaacttacatttttataagtattttcaaggataattaaaatgaacatgcatttccttataattagaaaagttagaaatagttataaaactattttcataaagctgttgtacttaggtctgaggacgtttgaggatactaacattgatgaaaaaagaacccttctctccctccttgcactctctccccactctttttatcttctaggattgaacagttgcatttgaatgtagggtaagtttattagaggagaatatagaaattatggtatattagtatattgcattaagtgtatatcttactttttagttaatttttaaagtttattcataggatttgcctagggtataatttatggagcttataaataaatatccatttaggagacagtgttaatagatccattacagtgagcatttattaatcatcttttgtataaaaggt

SEQ ID NO: 400561 - DNA, 563 bp, Homo sapiens
aaaccctgaaagttttggaatatgagaaacgggaccgagaaatgtgtgagtcccatttttcagccttttcctccttttgctcagcagacactgaatataatccacaggcagtacagacttattcttccaaaggatttattatgtaatcttgtacaagcctcaacttttctcatttataaaatgggaaaaatatcttccttacccaattgttgagtgaactgtgaaacatccatatgtattattgtgtatcagtacatatatgctatttttgtagtaggcctccagaaaatggaggctatatactgtttcatttcttaaaaggatactttcacttggttcaaagttcaaaagatagttatatattgtatttcttgaaatcttttcacttctgttcccagccacacaatttccctccatgatccatgtttcttttgcatcttgccagatattttatgtacgtctaaaagtaaaaacgtattttccccactttaacaattttacataaaatcacactattgcttgttttgccttttaaaataaaaatacatttttgaaattgttca

SEQ ID NO: 400562 - DNA, 498 bp, Homo sapiens
ctaaggctggacttcaggagactgtggccttaccgggaaagtaaagacgggttgacagtggcagagtgtggtgagaaggggctaaaggacaggtgcccaggagtggagaagccctggagactctggagaggatggggctccagttcaaaaaggagggaggttgaagcaaggtagacctgaataaaactcattcctgtttaaaataattttgtatacattccaagatgattttatatatatatatttattatactttaagttctagggtacatgtgcacgttctgtacatgtatcccggaactcaaagtataataataataagtagacagaatattggaatgctcctatattactgataggaatgtaaaatggtacagccattttggaaaacagtttgacagtttctcaaaatgctaaatacagagttaccatgtgacccaggaatttcactcctaagtatatgcccaagagaactaaggacgtattcatgcaaaaaaa

SEQ ID NO: 400563 - DNA, 355 bp, Homo sapiens
atatttaaaaatggtcttggacagtttgtattaattactcagaatttgaatatgctcattgtttatcatcattataataacagtcctacctcaggtttatatgtttattcccatatatttgggttcctttaattatcttatgtatttttatgatgtctgcaaaataaaaggggaatgagtgttattataccaatttttatggatgcgggaacctgagcatagcctctctaaataagttgctaaagtcatttttctgatacaatccacaaccagattgactgcttacctagactcttagctttgtctggagctgtatcaagctagttagaagtgcaaagtctaaatttattgactg

SEQ ID NO: 400564 - DNA, 108 bp, Homo sapiens
ctcttacataaaggtgagctggatgtctactatattccaggcacttggctagtcactctatagtttttaatgacattctgtttaatcttgagagcattatttttctat

SEQ ID NO: 400565 - DNA, 293 bp, Homo sapiens
tattggggtacagcagtatttggttacatgagtaagttctttagtggtgtgtatgtcttcttttgagaaatgtctgtccagatcatctgcccattttttaataggaatgtttttttcctgttgagatgtttgagttccttgtatgttctgggtatcaatcccttgtcaggtgaacagtttgcaaatgtttcccccaattctgtgtgttgtcttttcactctgttgattgtttcttttgctgcacaaaagttacagtgttgtccttccactcaccgccatgtcctatcaggtgc

SEQ ID NO: 400566 - DNA, 457 bp, Homo sapiens
cagcaaggtcataaatctcttcatcaccctccatggaccatgagaccagccaactaggagtcacctgaaatcaccagccaaatgtcagctgaaattctgaaacagaataatcctaagctcaatgctatttacccaggaaaaatgatttcttttgttctaaattttcaatccaagacgtttaggggatcagaaaaatcacaattctatttatttatatacttatttatttatttatttagagacagagtcttgctctgtcacccaggccggagtgcagtggcgccatctcggctcactgcaagctccgcctcccgggttcacgccattctcctgtaatcccagctactccagaggctgaggcagaagaatcgcttgaacctgggaggcagaggttgcattgagctgagattgccactgcatttcatcctgggtgacagcaagactccgtctcaaaaaa

SEQ ID NO: 400567 - DNA, 514 bp, Homo sapiens
tttttttttccaggagctctagcagggcctcgcagtgagtatcagagaaaaattcccttatgcttccagtggaaaaaggaggaaaaggaccattttgaaaaaacaccagagatcagcaccataggaaaaggaaaaaagaaaaagaaaaaaacaccagagaattatgttcttaacaaggttttgccctccagagaaactaaccagaccctaacttgctggggctttggcagagcctaacctacctggggaaggaaaatacccaactccagtccactctagtcatcctgtcccacaagaaaacaaacaaacaaactgagaagcactgagtgaagctcacagtccagggtcatgggctcactagaagactgagacccactcacaggactacaggagaacaattccattctgagttagtccactttgcatttgctataaagacgtaaccaatgctggctaattttcaaagaaaagagatttatttggctcacggctctgcaggccatacatgaagcag

SEQ ID NO: 400568 - DNA, 429 bp, Homo sapiens
cactcaaatgattacactttggaggcattttcttatattaaaaaatattttaatgcataacttccatgaaaagttgcatattttccaatacggggttccctgactgctcacccaccatcttgcctttcagcaggtttcgtacttttaggtttcattgttctattcagggcttccagagttctccattgatttcagatccccaaggccaggccaagccatgcctctcactgcattcccatgacctaaagcacagggacctgcactctttctaccgatctctgaaatgtttcatatttacaagatatggcccagagactgattctaattcattctctccccaccaaagaaagaggtaaaattatattgattgtttatatctttttcactctacaaataatctgtttactataaaaaatacagaccagcaaa

SEQ ID NO: 400569 - DNA, 523 bp, Homo sapiens
tctcctagatacagaccaaggttgaacaagcactcccaggggaataaagccactagttgagccatgccaatcaaatcctctcttttggaaacttgaacaaagacatagagattacaatgagaatttgaaggaggctgtataagatactagactgacagccgtgcatggtcatgagcagcccagggatgaccactgggagaagagaaagcggagagcagcagagatcacagaaatcatgaggccctgaaaagtgaagatcccgccctcactttctcactttcctgatgcagtcatgtgaaatttgtctttacttccatttacttcctttccaactctcagtgttctgaaatgtaccattacgtaaaagtgacagaaaatgaagaaaaaccattaattcctagtgggatttcccatttttactctcactccccattaccaccaaataaaactgtttttgttgagcaaacttttctataagcctctttgcattcttactttgcatcccaggaggtacaagtaagaa

SEQ ID NO: 400570 - DNA, 356 bp, Homo sapiens
cccaccttggcctcccaaagtgctgggattacaggcgtgagacaccaggcccagcctcaactgtagacttttaactcaaaggtacaaaaattggattatgtctgggccagttttttcccttgtcgatagtatagcccattggttagagttcagactgaggctacaagtagaactggattctttcttttttttttttttaagctgtataagtgaaaactacttgggcaagttacttaacctcttggtatattagtttcctcatctgtaaaattctggttatgcttgccttttagtgtttgttaaacattcttatgatcaaaaaacaagcaaataaaaactccttatcttcatccaca

SEQ ID NO: 400571 - DNA, 351 bp, Homo sapiens
gtaaaaagggagaaagaaaaagaagggaaagcagtgggactgaagaagctcacgccctgcttcatgcaggtaaatctggatttctgggggtaggacccaacctgcagcccagtttaagagccaatgccctgaccactttttgtaaatatgtataaggaagtgtcatggtggtgtcacaaacactttatttttcatttgaagaaaatgccattgatttctaaacaaggtcttccaaagaaaatgtttgcttatttgagttgataccaacttgaggttggtgtttttctattatctactccaatatcaaccactctgtaaatggaaataaatacataatgcatgtcacatagt

SEQ ID NO: 400572 - DNA, 861 bp, Homo sapiens
cagggacagtgagttctggaacgggtcaccagggctgcccatgttcagctctaaattctatagatctagaaagtgcttttcatttctgtgaggtgcccctctcagacactgggacgttactcagtgctaaaaagaaatgagccttcaagccatgaaaagacaaggaggaaatttaaacgcatgttactaagtgaaagaagccaatctgaaaaggctgcatattccaacttatgacattctagaaaaggcagagctatggagacaggaaaaagagcagtggctgccaggggttcgggatgagggagggtgaatagttggagcacagaggattcttaggacagtgaaagtcccctgtctggcaatgtagccagggatggatggcatggtacatgtgtcagacccatagaacgtgcaaccccagagtgagctgtaatggaaacgatagactccgggtgatggtgatgggtctgtgcaggttcacggactgtaacaaatgcaccactctgggccgggcccggtggctcacgcctgtaatcccaacactttgggaggccgagttgggcagatcacctgaggacaggagtccgagaccagcttggctaacgtggcaaaaccccgtcgctactaaaaataaaaaattaaaaattaaaaaattaaaaaaaattagccggtcgtgatagcaggcgcctgtaatcccagctactccggagactgaggcaggagaatcgcttgaacccgagaggtggaggttgcagtgagctgagatcacccactgcactccagcctgggcctcagagcaagagtccatctcaaaaaaacaacaaaacacaaaagacaaatgcaccactctggcgataacag

SEQ ID NO: 400573 - DNA, 470 bp, Homo sapiens
ccctttcctgattgattctttctgaataatgccttttaaccaatcaaatgttgcctttccattactacctatggcctgcccctcccctattctaagcccataaaagcccaagactcagccacattgggggtactttcctgccttttagagggaccacccccatgttccctctccctggaaagctgttttgtcactgaataaaactctccactttgcccactctttgactgtcagtgtatcttcattcttcttggacactggacaagaactcaggaactagtgcacaaaccggagtcagcccgggtaggatgatttgacagagcacctcctacagcaggtagcatgcctctagcattgctgactggaggtccctgactggcaaagggacaaagaaatatcctgtatcactgtcaattaacaagaaagattttgttacaatagtatgataaaaataaagtctcaatggctta

SEQ ID NO: 400574 - DNA, 685 bp, Homo sapiens
taaagcattaataatgatctggtcttaacatatcacagtgactacatgtcttactcttgatactgatggagagacctatcgtcatcaccttatccatgcaagtgttccctaggcctgtaatctttgaggggtggctgtgttgcccagatgtgttattcaagtgcaaaccagaactgattgtgacattcaagtgcaaaccagaactgcagagggtaatgcaggagagtccactcctttttgcttacatttgaatttcagtccacactgactctacttgaggtgtaaattggagaattccttctccacagcctttgttttcttctctttcccccgcaaactacttctcgtttctcctccctttttcttgtttgaaaacctctgccttcttcacactcacttccccaggatctgctttttccttctttcagcctcttgttctcccagtcaagcaaacaggaagtgggaggtgagggagcctcagatcctgtgcaggatatggggtgggagaggtattacagaaagggcttctttcagagtagacttctgatgaagcggcaccttacagacaagcctttctatggtaaacatgtggtgtgttattgtgaacaaggaatatctgtctcatttctcggccttacaaaaatcttgttcaactatcttagtctggtaagagttgaggtactag

SEQ ID NO: 400575 - DNA, 613 bp, Homo sapiens
aatccaaagtattttattctaatgtgatagggaaatgagacctaatgtctcctgattcagtttaaggagagatagatcaacattatgtttcatatgatggctttaatgtatattctgattaggcattttaaagtaacctgttaactcctttttaaagttaataatatcttattgtataatatacatatgtcagacagtatttacaaaacttcttagttgctcagatactataaggaaacaagataagtagagggttgctcagccttagattgataaaaatctacttttagagatgatgtgacattaatccaaccagtctgtgatcagtacatggctgcattcttttgacttcacccccaagctgttatgtctcttcatatataatcttgccctgtgatttgagaaagggtaggttagttatgtgttctgagatcatgtaatgtatattaataaaaatacaaaaattagccgagtgtggtggtgcatgcctgtaatcccagctactcgggaggctgaggcgggagattggcttgaatccgggaggtggaggttgctgtgagctgagattgtgccactgcactccagcctggtgacaaagcgagactctgtctca

SEQ ID NO: 400576 - DNA, 911 bp, Homo sapiens
cttcgtggtggtttgacttattattatgtaatctccctggcaatattctttgctctgaagttgattttatcttatattaatacagccactcctgctttcttcagcctccgcctgatctgtctgcttccattactgatcctgctttgtacccctttgctggaataaactgcagctgtaagactctgagttatgtgagtccttctagtgaattatcagatgtgtagagggtcatgagaccccccaaaacaaagagccaaaactgattacagtgacgagattagacaacactgaaggacagaaaccccacccagtgtctgtcccaggcccaagccctgcggcccgctgcaaccttgaagaaaccatctacacatcttcgcccacaccccctcctcccagcctctcctcagagcagcaccctgggctttatgtgctgggattctgtgtaatatttttggttgataacaggttcaatgtttgaaaagaagaacacgaaagtcatcagtgaaatctaatgacctcatgttacaagtgagagaattcattctcagacccgccctgactggctcaggatgacagctgtcagaggaggcatcactcaatgaacacatggtcccaggcctctggccccctgcccagtgtccggtttcccagtagactaagctcaccccaaagatgacacatccgagagacaacacagctagggtaacaaacagcagatgtgacttaactactcaggggagtgggaggaggcactacttctggggaagggcaccgtcacaaacactgtgctgtaaaagacttaagctcagaagaggaagcactctggatgtccagtcacacagctcagttcaagacagactctgctgcccgtgcctgatacagtctccagccttgttcgacaagcagagaag

SEQ ID NO: 400577 - DNA, 443 bp, Homo sapiens
caggtactcaacagctccccagaccagaaacaaacatgctacaatcagggagtttggcaaatccagccagagcctctgagcccaggtgccaggcccgcctgggaccccagccttctggggaaggggtagtttcaggctgaagcaccccctctctgctctcctgctcagcgtctgggttagaggcactgcctgaccctaacaggccccgcccctagttgggggagtcagctgctgcctttaggggttgggggacagaagacagggaccaattaacaaagggagcgatttggggggctattacccccattctaggttgccagataaaatacagaataatatgccagttaaattggaattacaaataaacaaatactttttgggtataagtatgttccaacttctgcttgagacattattttaaaattgtttatctgaaattcaaa

SEQ ID NO: 400578 - DNA, 177 bp, Homo sapiens
ctcctccctgcaaagccgcagaccaaaaggaaaatgactaccaaaaaaatactgtttttcgtggtttctgttcccttccctttcacccacctcccttccctctctctactttgccttctctttgttggctacagggataaacccagaaagctgacaggtagctacctaaacttgaga

SEQ ID NO: 400579 - DNA, 526 bp, Homo sapiens
tgtgtgtcaactaggtgtgttctaaacatcatttttccagttggaggaatgctgagtttggagatggctgataaatgtgtcatctggataacattctgagattgatataggaatgccttcttttgcttctttagctgccttgaccaatgtagtgatgctgacagaggctataaaaaatgtggctctccaatcttgggcactttatgtaaccttgctcctgggaggccgagcacatattcagcaggaaggaacttgctggctcagttaccatgattcatgccaacaaatcaaagaatgctgctaatgaatcacaaaaggtggagaatgctaaacagcaatgcttctgtcactctgttgtggctattaatcaagatgatgcattgctaagacagctgcctgggtatgacaggaagcaaattgctgtgtctgcctgtcagaagtttatttgctactttgagtatatggaacatgaatgtcaactgaatgtatttaaagaaagtgcaaattaaacatgaagatcttcaaa

SEQ ID NO: 400580 - DNA, 1279 bp, Homo sapiens
tcttattttaccaaaagatggtgcaaatctatgaccttcacattttttccaccacacccaccagtagctgttggtgattgcatggtgtctcggtgcatggggaaaggcaaggtcttctgagctcatcttaactggtgaggcatctggatgtgtctgatcttactgtgatgttttactgtaccgagcccaatgtgggtccatctcatcagccctttgctgatttcatgatttctcaccctccctcccatatgtagggtgtgattctgttttattatagccacatgttttattaacagaatgagtgatatgaagcttgtacttatgcatttctcgggcctcttccctcattttcatcagtctgtctaagaacttgactcggcactgtttctcgtgtaatatccttctaatgcttagcaacaacaacaaaaaattgctctctcagatccataatccatactcagtgaaagcagggaaaaaatattttcacttattttatttgcttctaaaatgcaaagatgaatactaaagtcagaagcagtgtttcattttgaacacattttggattattaagctgactaagcaatgatctaatacacatttcatattttctttataataatttcttatggagaagaggctatatttcaaaggaattgagacatactcccatctataaacatgtttggttttcttacgatacagggccatttttttaaaactctcaggactgaacagaagagaaaaattattaattagctgctactgtatgttgattcttttcggagaaattgaaataagctctttgcaggcgtccaatcctagaaaccaatggtctccagaactctcacacaagtgtttttctgattctatgataactaattaaccatcatctggtgattaaaagaacataaagtaagattatgattaagtgtccatcacctgcctgtcagccgtggtcagaataagttttacacgaagcaggtgaaagatttagttcttttcaaagtaacttattttcttgtgacccgtttatgatgttgtttgaagtccctgtttcccattgtgtacgcactttctggatgtctggaaggatcgggacttttgtgtgagaggcttgagcgcctcctctatgtgggctggtgtccttcttgaagttgtcaattcctcttattcttaaatatctaaagggaaaggaaaccaactttaatttcagaacttctctttacgtcttgtatgtatttcttttctgttctcaaggaggaaaattggtctaggaagc

SEQ ID NO: 400581 - DNA, 441 bp, Homo sapiens
gagagctccctagtgtctgctggaatgtgatggctgtaagacgcagggaggagaaatggaaaaggagcgtctttattgacccaacagagccttgtaaaaaagcaccaactacatatatgcagtctgtgcatttcaaaagtaacaaacaaacaaaatcagtttaccaactcttgggagagaaaatggattatcattcactgcaaattctcctaggtaaacagaagagtgctacacctgtgcagagagaaaagttttatatatgctcaactatgggtcctcagtataatacagtcccatcatgtatttcctgagacatctactaaggagacttcctagaattgaatctttctcatctttttttctcttttcttcctcaagtcttctgtgacatgtgataatacaaaacaaaatacaggtcttagaataaatgtacctggaatc

SEQ ID NO: 400582 - DNA, 836 bp, Homo sapiens
gagagctccctagtgtctgctggaatgtgatggctgtaagacgcagggaggagaaatggaaaaggagcgtctttattgacccaacagagccttgtaaaaaagcaccaactacatatatgcagtctgtgcatttcaaaagtaacaaacaaacaaaatcagtttaccaactcttgggagagaaaatggattatcattcactgcaaattctcctaggtaaacagaagagtgctacacctgtgcagagagaaaagttttatatatgctcaactatgggtcctcagtataatacagtcccatcatgtatttcctgagacatctactaaggagacttcctagaattgaatctttctcatctttttttctcttttcttcctcaagtcttctgtgacatgtgataatacaaaacaaaatacaggtcttagaataaatgtacctggaatcaagtcattgtgaaatgttgggcttctttgaccctcagtattcccatcgcaaaccaggaataataagacctgcatttctccattgaccattagtaaattgagcttcaattacctagttagagaaaaagttaaatattgcctccaaagcttaacatgcattttaatatttttgctttctgcttttaaaaatatgcttctcattttcttcccctgactagctctttgactgccagagagatgtataagcatcttgagctccactggtagagttatgagttcttgaatttagaggttattagaagaattttttcctactgttttcatgtaaattaccactcaggaaaaaatggtggaatagaatcttttttcccttttatagtgtctttttcattgctt

SEQ ID NO: 400583 - DNA, 448 bp, Homo sapiens
attctgtgcgtcgactgagatcaggttagatgagtccttagggtgtttctttcccaactatgcaatatacaattggatagggatttttcatataaatataccccatcttttgttttccaagccagagtaactgctctaaccatggacatcatgcccagtcagaacgaagtctgggcttggcactgtggctcacgtctataatcccagcactttgggaggccaaggtcggaagatcacttgagcccaggagttcaagactagactgggcaacatagtgagactccatcactacaaaaatttaaaaatcagctgagtgtcgtggcatatacctgtagttccatctactcaggaggctaaagtgggaggatcccttgagcccaggaggtcgaggctgcagagagctgtaattgcaccactgcactctagcctttgagaccctgtcttgaag

SEQ ID NO: 400584 - DNA, 447 bp, Homo sapiens
tgagagaggagagcgaggtggggaccatttgtgaaggttactgtatgtcatgtggagagctttggaatttatcccatcatcggcatggttctgcaccccgtcgtgtgaagaaatcatccggagaacttgttctgagtccagaagttacctacaggctgccttgaggcagtggtcctcacacggcatcctcctggctcccttccaactgcagctgccgtgaacatgggacagtccccgcatgtggacagtgccctgcctcaggtgctcgtggggtgctctgccgtgggagcacactcagctcgtgcatgtgttggggcatcagtgccctgagggcagccttcaacaagcagtggataaatgtcccagtcttggagagacatttgcgacatgcatttaagcagaagactcccatgatctgatttcagttaaaaaaaaaaaaactcactg

SEQ ID NO: 400585 - DNA, 508 bp, Homo sapiens
acagagtagacactcctatcactgttgttagacagtggtcatgggagagggtcttgtgtgcctcggataccagggccctctttttattgggaggtgcttgttatttctgtgtgtggctgcatttgtttcccaagactgccacaacaaattcatcaccaacttggtagctcaacatagcacagctttattcccttcctgggattgggctatcattgatagcccaatcccaggaccccagcactctcctggttcgtggtctttcccactctctcctaggatagatattttaaaagattctgctcttattcctcagctctttcacccttctgttctctctagctcagcaaaagcagtcatacctggggcttcgtgctatctcccccaactcagaaaagaattcccagcactctctcttctgccctgactctgtctctccaactcaatttacatttttcaattgccttctggccattctctctctcttctttttgagatggggtctcactct

SEQ ID NO: 400586 - DNA, 333 bp, Homo sapiens
aatggtgctacagcaatttatcagtgttcttgaaattccattctgtggatcccaggaccccagcactctcctggttcgtggtctttcccactctctcctaggatagatattttaaaagattctgctcttattcctcagctctttcacccttctgttctctctagctcagcaaaagcagtcatacctggggcttcgtgctatctcccccaactcagaaaagaattcccagcactctctcttctgccctgactctgtctctccaactcaatttacatttttcaattgccttctggccattctctctctcttctttttgagatggggtctcactct

SEQ ID NO: 400587 - DNA, 639 bp, Homo sapiens
aaaagacacaagatcctgatccatagctgttataaatataggaagcagggggttcagacagatgtaaggaagggattatggaccaggtggaaagtatctttgccttggatttcctcaaatgaatgtatctatagggaaccttgtacttgtactgctgtccagaaacccaacggaatggcaggttgtctcctgttacagacacagggaataatgggttttctcctcttgcagatgtaaggatgacttatcaagaaactttcacacagcacaggtatgcacaacagagttgaagagcttgaaatgcagagagtacatcttggatctgagagtacccttgagctccgtgttcagcaagaaagcagtgagcgccatgggctctgtggtactggcatcaggttactcacctgtcttggagcttatcaacgatctactttacatctcatatttgataccagaaactgctaaaaataaaatcagatcaagtaaaacaggaataaaggggtttattgtgcctacggcatcaggttactcacctgccttggagcttatcaaggatctagtttacatctcatatttgacaccagaaactgttaaaaataaaataaataaataaataaataaataaaaataaaaaatgag

SEQ ID NO: 400588 - DNA, 560 bp, Homo sapiens
gtcaagctcgctgacttcaagaatgaagctgcgggcctcacagtgagtgttacagctcttttcaggaatgaagccgcagacactcgcagtttgaggatacatgtgaaattcctgtcatgggattttgttgtacagattatttcatcactcagatgtaaggatgacttatcaagaaactttcacacagcacaggtatgcacaacagagttgaagagcttgaaatgcagagagtacatcttggatctgagagtacccttgagctccgtgttcagcaagaaagcagtgagcgccatgggctctgtggtactggcatcaggttactcacctgtcttggagcttatcaacgatctactttacatctcatatttgataccagaaactgctaaaaataaaatcagatcaagtaaaacaggaataaaggggtttattgtgcctacggcatcaggttactcacctgccttggagcttatcaaggatctagtttacatctcatatttgacaccagaaactgttaaaaataaaataaataaataaataaataaataaaaataaaaaatgag

SEQ ID NO: 400589 - DNA, 427 bp, Homo sapiens
gagttctgagcttatgaaactcaagactgcctggagtagaatccctccatgagtgtcagaggtgcagtgccaatgtgcttgttcccgagcttagctctggtggtatgggcctgtccgccttccctctctccctgaccttccctccctcgcccacacacccacttccttccactgtgaaagcggagtaaggctttaattgcacaggttcatcatttcttgtttggaagtcttcagatttttagttttataccttagctttctgcagaattctccgttgaatcaatgccctgggaaccccatggacagaagcaccttttaatgaagtccttccaaaactcgttcctcagtgcattgctctgttggaaacagtgctgtggggtgttggggtgtatagtatattttaacatattttaacttaaaaaaaaaa

SEQ ID NO: 400590 - DNA, 343 bp, Homo sapiens
cccattgtatagcgacttcgaaaatatgggaacacagttagttattttgagacttccctccctcgcccacacacccacttccttccactgtgaaagcggagtaaggctttaattgcacaggttcatcatttcttgtttggaagtcttcagatttttagttttataccttagctttctgcagaattctccgttgaatcaatgccctgggaaccccatggacagaagcaccttttaatgaagtccttccaaaactcgttcctcagtgcattgctctgttggaaacagtgctgtggggtgttggggtgtatagtatattttaacatattttaacttaaaaaaaaaa

SEQ ID NO: 400591 - DNA, 599 bp, Homo sapiens
tggcttagaggctgcatctgtccatatccttctcactgcaagtgtcagaaatcctggctcaatctaacttagatgaggaggacatttattatctcacttaaagggaagactagaggtgatgcaggccccaaggtggttaatacagtggcttaactctgccaccaacagtaccatgccttcatggtgggttttatcctcaaactggtagtaagatggttacagaagctccatgtcatatccagagaacactcagcgggaggagagacagagactagatcttcttgtgtctctgaggagtgaagaaatttttcttggaagccctctggctgaattcactatgttgtagagaattggtcacaactgtattcctaaatccatcactggcaagggggtataggagtctcatgagtagatgagactgagcaggagatccccctggagctgaaggtgggagagaaaggtggatacaaaagtgatcaaaaagtaggaccaaatgacagaatgggaaaagatgcttgcagtgtctaaaactgactaatatctagaatacacaaggaattcctacaaatcaggaaaaagacagcaaccccatagaaaaa

SEQ ID NO: 400592 - DNA, 592 bp, Homo sapiens
cctgcacctaatctgtgagaagagttaatggcctacatcataaggggaaaagatataaatgaaatttctaactctcacctctggtgttctggactacatacgctcaggaaactgcttagaaaatgagctaagaatagtcatgcagcaaatagaagagctcagaataagctcataataaaatttgtgtttgctttgttttatagattgagaaagaagaccgtaagctcttttagaagcactagttcagcagaaggattttactgtcctacatttgtggttttcaggcctctccccttttcctgagtgatgaaagcctcttcataggaagttgtgtgatacagagtcagaacagaaaacagataaagagtggtgtggactttcgtaggggtggcaaagcctgtttgtggaacttgatgtttgtgatgttcacgcttagatttatgattgccccaaaagctttgccccaaaaggtagttttcccatggaagcacttcaggcagtcctgccgaaggtgctcctcccaggcacgtggcacaaaagctgttcagacaccccactagcagatgtacttgtcaccaattccagcaaggtt

SEQ ID NO: 400593 - DNA, 170 bp, Homo sapiens
caaagtcagttacattttatatgccaatagttacgtatcagtcaaaaagtgaaataaggtcaggttcattacaggctcatgcctgtaatcccaggtactcaggaggctgaggtggaaggattgcttcagcccaagagttcaagattacagtgagctatgatcaccctggg

SEQ ID NO: 400594 - DNA, 325 bp, Homo sapiens
gtttctagggctgagactctggaaatatattaattttaggttgtttctgatggcaaaaaaaaagatccgtctattacaatctcttgcctgtggagatgagaaaaaattcttcctgctacctttgactgaaataatgcagttagcaaagatttaaatgacaagagtagaagtgtcatctttttgtccctttgcctctaggcaggactacagttaagccatctcaggaaagagaagagtgctattgctcccaaaactctccaggtgagaatgataaaaattaaaaacagcaagtgagaaaactcaggggccctgaaattaataaagg

SEQ ID NO: 400595 - DNA, 417 bp, Homo sapiens
tgatagagatggggtcttggggggctgcctccaccactgcctgccctgctcagcgctgacccacttcccttgaccagagttttggcctctctgaatgggacggtcgttttagtcctgagggcccataagaagcccagtggcggctgggtgcggtggcgcacacctgtaatcccagcactttgggaggccgaggtgggtggatcgtgaagttaagagatcgagaccatcctggccaacatggtgaaaccccgtctctactaaaaatacaaaaattagctgggcatggtggtagtcccagctactcgggaggctgaggcaagagaatcgcttgaacctggtaggcagaggttgcagtgacctgagattgcgccactgcaccccagcctggcaacagcaagactccgtctcaaaaaaaaa

SEQ ID NO: 400596 - DNA, 174 bp, Homo sapiens
gactgtagacagctgaacttgatcctataatcaacagtttacttccaaaggcttttgtataaggttataacatcatggaagtcttaagacgaatttggctattgaatataagatgaatttggctggacacggtggctcactcctgtaatcccagcacttttggaggccgaggcg

SEQ ID NO: 400597 - DNA, 302 bp, Homo sapiens
tcagatgtacacttattgataatcttgctcagttttatcctgcttgttctcccagaattttttgtaaactcaactcctctgtttacagagttttagtcacttttaacaattttttaaaattcagtttgtagactccatttgttaagggaatcaatatcagaagtaatactaaaatgttataataggaaaagggatccactaatatagcttatggttattagagctgggctacctttaatcatggaataatcttatgtataggtgtaagaatgactcactatatgaatacatactaatcatat

SEQ ID NO: 400598 - DNA, 340 bp, Homo sapiens
tacgatctcagctcactgcaacctctgcttcccaggttgaagtgattctcatgcctcagccaccctagtagctgggattacatgctcatgccaccacacctggctaacttttgtattttcagtagagatggggtttcaccatgttggccaggctggtcttgaactcctggcctcaagtgatctgcctgcctcagcctcctaaagcgctgaggttacagacatgagccaccacacccagctgaatattaacattttttattgttattctgataatgaaatttttctgattgttttcaattaacatattttagtttactagtaagcatgaactttaaaaaaa

SEQ ID NO: 400599 - DNA, 361 bp, Homo sapiens
gccacagggtcctcttccaaagtggctctctctcgtggctggcacattggtgctggcagttagctgggggcctcagttcctctccctgtgggtctctccatagagctgcttgagtgtccacaggcgtggcggccggcttcctcaggagcctgcaatccaggagaccagggtgaaagctgcaagatcttttaggatctggccttggaagcacacaccattactcctgccatatggggccagccctgatgcagcatgggaggtgatcaccaaggatgtgaataccaggaggaaacgaagatcattggggccatccaggaggctggctaccacagttgtggttgtgaatattagaagtacaggg

SEQ ID NO: 400600 - DNA, 380 bp, Homo sapiens
ggtctctttttctccagctctaaaatgggggaaaaaaacacctcccccacgtctaaaaaataactcttttacccttgtatcccacagcacaacattcatatccccaccatttcaacttacattttcctttctacctcgttaccctacattatacggagaactctctgctgtcagagatgttgtcttatgcacctttttatctccagcacacgatacagaacaggtgcttaggatgtacttgggaaggaaggaagagaggtgaaggaggcagagaaaggaaacagtgccaagaatgtgctttgcgtaaatgtgaaccttgtgttctgcttctgctctgtccatgagcacactgggtacattaaaattgttttctccttctg

SEQ ID NO: 400601 - DNA, 2696 bp, Homo sapiens
agcggagactgagccctgggaggctacgggctcccccggaaaccctgccaggggagccgggttttgagctcaggcgcctctagcggcggcccccagaaatctgactcgcgaggccagagttgcagggactgaatagcaaactgaggctgagtagggaacagaccatgaggtcagtgcagatcttcctctcccaatgccgtttgctccttctactagttccgacaatgctccttaagtctcttggcgaagatgtaatttttcaccctgaaggggagtttgactcgtatgaagtcaccattcctgagaagctgagcttccggggagaggtgcagggtgtggtcagtcccgtgtcctacctactgcagttaaaaggcaagaagcacgtcctccatttgtggcccaagagacttctgttgccccgacatctgcgcgttttctccttcacagaacatggggaactgctggaggatcatccttacataccaaaggactgcaactacatgggctccgtgaaagagtctctggactctaaagctactataagcacatgcatggggggtctccgaggtgtatttaacattgatgccaaacattaccaaattgagcccctcaaggcctctcccagttttgaacatgtcgtctatctcctgaagaaagagcagtttgggaatcaggtttgtggcttaagtgatgatgaaatagaatggcagatggccccttatgagaataaggcgaggctaagggactttcctggatcctataaacacccaaagtacttggaattgatcctactctttgatcaaagtaggtataggtttgtgaacaacaatctttctcaagtcatacatgatgccattcttttgactgggattatggacacctactttcaagatgttcgtatgaggatacacttaaaggctcttgaagtatggacagattttaacaaaatacgcgttggatatccagagttagctgaagttttaggcagatttgtaatatataaaaaaagtgtattaaatgctcgcctgtcatcagattgggcacatttatatcttcaaagaaaatataatgatgctcttgcatggtcgtttggaaaagtgtgttctctagaatatgctggatcagtgagtactttactagatacaaatatccttgcccctgctacctggtctgctcatgagctgggtcatgctgtaggaatgtcacatgatgaacaatactgccaatgtaggggtaggcttaattgcatcatgggctcaggacgcactgggtttagcaattgcagttatatctctttttttaaacatatctcttcgggagcaacatgtctaaataatatcccaggactaggttatgtgcttaagagatgtggaaacaaaattgtggaggacaatgaggaatgtgactgtggttccacagaggagtgtcagaaagatcggtgttgccaatcaaattgtaagttgcaaccaggtgccaactgtagcattggactttgctgtcatgattgtcggtttcgtccatctggatacgtgtgtaggcaggaaggaaatgaatgtgaccttgcagagtactgcgacgggaattcaagttcctgcccaaatgacgtttataagcaggatggaaccccttgcaagtatgaaggccgttgtttcaggaaggggtgcagatccagatatatgcagtgccaaagcatttttggacctgatgccatggaggctcctagtgagtgctatgatgcagttaacttaataggtgatcaatttggtaactgtgagattacaggaattcgaaattttaaaaagtgtgaaagtgcaaattcaatatgtggcaggctacagtgtataaatgttgaaaccatccctgatttgccagagcatacgactataatttctactcatttacaggcagaaaatctcatgtgctggggcacaggctatcatctatccatgaaacccatgggaatacctgacctaggtatgataaatgatggcacctcctgtggagaaggccgggtatgttttaaaaaaaattgcgtcaatagctcagtcctgcagtttgactgtttgcctgagaaatgcaatacccggggtgtttgcaacaacagaaaaaactgccactgcatgtatgggtgggcacctccattctgtgaggaagtggggtatggaggaagcattgacagtgggcctccaggactgctcagaggggcgattccctcgtcaatttgggttgtgtccatcataatgtttcgccttattttattaatcctttcagtggtttttgtgtttttccggcaagtgataggaaaccacttaaaacccaaacaggaaaaaatgccactatccaaagcaaaaactgaacaggaagaatctaaaacaaaaactgtacaggaagaatctaaaacaaaaactggacaggaagaatctgaagcaaaaactggacaggaagaatctaaagcaaaaactggacaggaagaatctaaagcaaacattgaaagtaaacgacccaaagcaaagagtgtcaagaaacaaaaaaagtaaccgggcaatccatactcattcagtaacacaggctcatttatttaaccagctaatcatttatccaaaggctttccattcttctcccaatatttttttactttaatttttcccacaagttttgatcagcaaataaacagcattcttgttttggaaacaaac

SEQ ID NO: 400602 - DNA, 2669 bp, Homo sapiens
agcggagactgagccctgggaggctacgggctcccccggaaaccctgccaggggagccgggttttgagctcaggcgcctctagcggcggcccccagaaatctgactcgcgaggccagagttgcagggactgaatagcaaactgaggctgagtagggaacagaccatgaggtcagtgcagatcttcctctcccaatgccgtttgctccttctactagttccgacaatgctccttaagtctcttggcgaagatgtaatttttcaccctgaaggggagtttgactcgtatgaagtcaccattcctgagaagctgagcttccggggagaggtgcagggtgtggtcagtcccgtgtcctacctactgcagttaaaaggcaagaagcacgtcctccatttgtggcccaagagacttctgttgccccgacatctgcgcgttttctccttcacagaacatggggaactgctggaggatcatccttacataccaaaggactgcaactacatgggctccgtgaaagagtctctggactctaaagctactataagcacatgcatggggggtctccgaggtgtatttaacattgatgccaaacattaccaaattgagcccctcaaggcctctcccagttttgaacatgtcgtctatctcctgaagaaagagcagtttgggaatcaggtttgtggcttaagtgatgatgaaatagaatggcagatggccccttatgagaataaggcgaggctaagggactttcctggatcctataaacacccaaagtacttggaattgatcctactctttgatcaaagtaggtataggtttgtgaacaacaatctttctcaagtcatacatgatgccattcttttgactgggattatggacacctactttcaagatgttcgtatgaggatacacttaaaggctcttgaagtatggacagattttaacaaaatacgcgttggatatccagagttagctgaagttttaggcagatttgtaatatataaaaaaagtgtattaaatgctcgcctgtcatcagattgggcacatttatatcttcaaagaaaatataatgatgctcttgcatggtcgtttggaaaagtgtgttctctagaatatgctggatcagtgagtactttactagatacaaatatccttgcccctgctacctggtctgctcatgagctgggtcatgctgtaggaatgtcacatgatgaacaatactgccaatgtaggggtaggcttaattgcatcatgggctcaggacgcactgggtttagcaattgcagttatatctctttttttaaacatatctcttcgggagcaacatgtctaaataatatcccaggactaggttatgtgcttaagagatgtggaaacaaaattgtggaggacaatgaggaatgtgactgtggttccacagaggagtgtcagaaagatcggtgttgccaatcaaattgtaagttgcaaccaggtgccaactgtagcattggactttgctgtcatgattgtcggtttcgtccatctggatacgtgtgtaggcaggaaggaaatgaatgtgaccttgcagagtactgcgacgggaattcaagttcctgcccaaatgacgtttataagcaggatggaaccccttgcaagtatgaaggccgttgtttcaggaaggggtgcagatccagatatatgcagtgccaaagcatttttggacctgatgccatggaggctcctagtgagtgctatgatgcagttaacttaataggtgatcaatttggtaactgtgagattacaggaattcgaaattttaaaaagtgtgaaagtgcaaattcaatatgtggcaggctacagtgtataaatgttgaaaccatccctgatttgccagagcatacgactataatttctactcatttacaggcagaaaatctcatgtgctggggcacaggctatcatctatccatgaaacccatgggaatacctgacctaggtatgataaatgatggcacctcctgtggagaaggccgggtatgttttaaaaaaaattgcgtcaatagctcagtcctgcagtttgactgtttgcctgagaaatgcaatacccggggtgtttgcaacaacagaaaaaactgccactgcatgtatgggtgggcacctccattctgtgaggaagtggggtatggaggaagcattgacagtgggcctccaggactgctcagaggggcgattccctcgtcaatttgggttgtgtccatcataatgtttcgccttattttattaatcctttcagtggtttttgtgtttttccggcaagtgataggaaaccacttaaaacccaaacaggaaaaaatgccactatccaaagcaaaaactgaacaggaagaatctaaaacaaaaactgtacaggaagaatctaaaacaaaaactggacaggaagaatctgaagcaaaaactggacaggaagaatctaaagcaaacattgaaagtaaacgacccaaagcaaagagtgtcaagaaacaaaaaaagtaaccgggcaatccatactcattcagtaacacaggctcatttatttaaccagctaatcatttatccaaaggctttccattcttctcccaatatttttttactttaatttttcccacaagttttgatcagcaaataaacagcattcttgttttggaaacaaac

SEQ ID NO: 400603 - DNA, 338 bp, Homo sapiens
ctcttctcaagatccacagcaaataacacattggtctcatttaactttgaccgtcagtgattttcccagcatttgaccactcttccttctgaaacactgttcactgtgtttccattgcaaagtactcttgatttttctctttcttcattcactactctatcaccgtccactttgcaaactcttcctcctctatcttaactcctaatgttggaagtcatttacttatttatccattcatctactgaagaatgtcttggttaatttcatgttttggcaattatgaattaggctgccatgagcattggtgtgcaattttatggacataaattttcaaccgc

SEQ ID NO: 400604 - DNA, 867 bp, Homo sapiens
tggagccaagaataccccttagggtggtagaaaccgcccccggggcactgtgcagtgtggctggctctccagcatcaggagtactggggattgcctgggggacgactcctagggctgggcgcccgtgggccctcccctgctgccactgcggcccacgcaagccgggcctgaagggcgcgagcggcatgggtggggagcttgagggggcgttgggctcccaccaagcgccagatccttgcgcgcctccagcgctcgcccgcgcggctggttcctttgggatgcggaggtgcgacggctcctccgcgcgcgcccgctgcaccccagcccgcccgccgcccctcccggccctccgcagcctcggcccgccctcgccgcagatataaggcggcccaggcggtggctgctccgagcccggacgccgccgcccaccagtcagccggcgtccccatggcccggtccgcgacactggcggccgcgccctggcgctgtgcctgctgctggcgccgcctggcctcgcgtggtacaagccagcggcggggcacagctcctactcggtgggccgcgccgcggggctgctgtccggcctccgcaggtccccgtacgcgcggcgctcccagccctacagaggggcggaacccccgggcggggccggcgcctccccggagctgcaactgcaccccaggctgcggagcctcgtgagtccggcgtgccggggactgatggggggcggcggcaggacgtgggtggggtgcggcggccctcagcctttgcttgcctgccccccaggctgtgtgcgtccaggacgtcgccccaaacctgcagaggtgcgagcggctccccgacggccgcgggacctaccagtgcaag

SEQ ID NO: 400605 - DNA, 429 bp, Homo sapiens
tcaaagaccaggatccctagtaagatgttcagaggtcctgggggtgaggacattgacccatcttttttgggggggccaccattcaaccccctgtaggttttattgcattgagttgcataagttcccagtggggctctgaggggaaagagctggccgtggagaaataggatgccttgaaaactgcaggtggatccctgcagtctcacagcccctggaattacacgtacgcttctgtgtggggatattgttcccaagagagggcttctgccagactctcaaggagtctgagacagcagaagggtcagagccctcatatggataggatgtgcgtgtctatcccacacgcgaagcttttcactttaaagtcctgttttctggtgttttttttgttttgttttgtttttgagacagggtttcactcttgtcgcc

SEQ ID NO: 400606 - DNA, 436 bp, Homo sapiens
caccagcccggtgtagggggccgagcctgcgccaacaaaagcgcgacaggggtgacggccgggctcaaggttggcctgtcctttggttttaaaacaaagacggagaattttgtcagtcgggaggcgtccagggagcggaggccggagccagcggcctaggaacacagggaaggcctcggctccggtggcccaggctggccgcggagaagcacgctgggccgggcctcggctagccagggcagcttctcccgcagctgcggcttagggctacaaggaagacccccccagcccccagccgattttctacccagtcaaacacacacacacacagacacgcgcgcgcgcgcgcgcacacacacacacacacacacacacacgcactttcactcaattgcgtccacagtttttggccacctatcccgctgggtaaacaaaa

SEQ ID NO: 400607 - DNA, 458 bp, Homo sapiens
ggtgtgagccaccacgcctggcctacacaggtttctaagcttttacttatatatttgagggactaaaaaaacacctcatgagaaggaaaatataatcacagattttgttactagaattttcaaaagagctttcgtggtataagacatgttgactgaggaagcataaagaactgaattgtggtgttagtttttctatttaatgagtgttttcgtttctctgcttcttaaaggccagtcttgctggggttacaggcatgagccactgtgccaggcctacacatcttatttctatattccaccaacttttttttattactgcatagtattccaaaggatgagttctgccataatttatactgttttcctaagtgtttaggatgttataacagatagatacatatttctttttttgtttgtttgtttgagacagggtgacagtgtgagactgtctcaaaaat

SEQ ID NO: 400608 - DNA, 420 bp, Homo sapiens
cctgcggtctgctcttgggaagggtcctctagtcccggtgtccagggacccacaggctacgtcacatagtctccatgtcttcttgtgggaaggtaccgtgtgagtctttttaaaaagtaatcttaaaagagaacatctttgactgggcgcagtggctcacgcctgtaataccagcactttgggaggccgaagcaggcagatcacacggtcaagagatcgagaccatcctggccaacacagtgaaaccccgtctatgctaaaaatacaaaaattagccgggcgtgggtggtgtgcacctgtagtcccagccacttgggaggctgaggcaggagaattgcttgaacccaggaggcggacttgcagtgagccgagatcatgcccttgcactccagtctgggtgacagagcgagactccatctc

SEQ ID NO: 400609 - DNA, 526 bp, Homo sapiens
cccaagctccttaccatctggtctctgcacaccttccttaccccacccagccctctgctcactatgcagtggccacatgggcatttttctattccttggtgatacccaggtaattccacttcaggctctttacactgccatccctttgccaggcccggctgtccctccaggtcactcaagtcctggctaagggtccttcacttactatgtattctgaagtcacctcccatcaactcacctattttattttcctcttaactttttatcatataaaattatttattgatttgctttttataccatttgtcttcctcacctttccccactggaatggcagatccatgaggacagcagcttcgcctctcttattccctattgtaaactggaatagtgcctgaatttgatacgcatgcaatgagtacttttacaagaaaatgttataaatgtgtaacagcattgaagggtataaacttccttcagataaatttggcaatacatattaaaaattaatactgacgtctgaacc

SEQ ID NO: 400610 - DNA, 572 bp, Homo sapiens
aaaaaaaaaaaaaaagttgacgataacagcactacatcatggagtacatgtcaccgatgagccccaaatccaactgaggcaaccttttggaaggcagtgagtgggaacttgtgttctcgtaggttttctatgccacacttgcccccaggttactagaactctctgtgctgacacgctttcccagaaactgtgttatgcctggtaatggaccctctcaaatgcttgaggctttgtattattttcctttcttttcctgctgccctctatgtttacggcaagtcccataaccatcactggtgagaatctagctgatctcctcaggtccgtatctctgcctagcaattctgggagggatgttttaaagcaccctctttttcaaagtccaaaataatgacctggtgatgtatggctgtgcatggaattgtaaagtaatctgaaaaatgtcagcaaagtgtcaagtagagacctgtcttcctggtgacctttgtttggtcaaatacctaattgtttggcttttagctttgtgtaatctgtgaagtaggataggagatactaggaaattctttcaatat

SEQ ID NO: 400611 - DNA, 123 bp, Homo sapiens
tgaagatgaagaagatgatgatgctgaataagtttgttttagtgcagttttttttcttatctataaagcatttaagccccttgtacacaactcattcctttcaaagaaaaacaattgaaatgt

SEQ ID NO: 400612 - DNA, 854 bp, Homo sapiens
attcttagaaacatagatagaaagaaaactggggatagctactatctgcattgttcttggcattaaattaagtgatacttagaggtaggtaattatgtgaagtcatcatcacggggtttatgtgcctgacaatttgtggttttaatcatctcccatttgttaccaaaaagagatggagtcaactttgggggagttggaaacaaagattctgctgaattaaaaatgtggtagaaagaggaacaccttattaagagaattaactgacttttagctttatttccttaagaaaggaaatgctctatttccactagaaaaaaaaaaggaatataaataggaaacacttattttgtaaacatgtcatttaaatcaacaaggagccacactacaaataaaactacaaaagcaggtgcattttggtaacattttctgggaaatcatttttagactcagagtccttttgtttcttcactttcaagaaaactccttaagattctaaaaaaggaagaaaagatatttagggagggaggaaaacaaatgactttttctttgattttaattagcaccttttaaaaaaaaattaatccttcccctgataggagggttcttcaaaggcaatatctgtttggggagggggtgattcacaagtttgcatttgaggatatgagactgcggtgaatgaggaagggagtaggtggcataaaattgaaacttcatgtgaaaaattccagcgtctattggctgcagcgatttcacttgtataatgagtagccctattccagctcaccctgaccacacccacttggaaagtccagggtgcacttcgcagtttaaatgtctacacaccagaacaaaaa

SEQ ID NO: 400613 - DNA, 472 bp, Homo sapiens
caggtcacttgcctggccccacagtgataatggtttcttccacttaccttagattgcataatccatctttctggataatggaagctgcctgcctatctgggctcttaatatgccttttcttggttttgaggcccagtgccaacattgccttggccctcaagtaagaccctgctttgtgtctgactttgatcctcctcagcctttattcactgtatcatagtgtacaggtcatgcatttgagcagtgaagttttctgaacacagtattcagagctgtgtacataaacctaaataagcacaaatgacatgtataggattgagctgattgtcttaatgaatgcattttataattcaaatgatgtagatgtacagtctctcctatttattttgtaccaatttatttgtaaattttgtgattgttttacaaggtttttgtttatttctattctatttagataaatgatgttctgttc

SEQ ID NO: 400614 - DNA, 508 bp, Homo sapiens
tgacgcgtgggtatcaatatcaaaagctctatcagttgtcaataaatataactgggaatgtcctagaagtaaatggttaccctttttccttcattgctgcaacaagaaacattgttctggtggaacatttcacaaaattatgaatgttttgaaagaaagaaatatgaaatcccttggattttactaatatacacagttctcataatatacaacttatttaccatgctggagaaatagcaaccataaaaacagctgcaattaaaatgttactaaagcttttgtacaaatggtagattattaaaaacaaaatgttataccgataatttaagggacaatattgagtttctgtatttttccctttaaaggctgtaggtttatgcttgactaatccttttgacagtatccctggcaataatattttttgaagtagttggtgttcaatatttgtaatttcatgtttcccaacagtctgtttttccttgtttatttaaataaaaaactgtaaaac

SEQ ID NO: 400615 - DNA, 328 bp, Homo sapiens
gagacacactgtgccaggaagggctcgaataggggaaaccatcagcccagctgagcacggccgaccctccacttgcaacctgcacaagtcagaattgagttcctgcccagaggagcctcacacaccagtgaaggcccactagacagggggtattcttctttgtaaccccactctctggaggtactaagcatagagtaagttattcaatgtggctgaacaaatatagcctatgcagaatgccgctaatgcctcaatattttctccagtttttccagggcattcttaatttgagactcatggccaatcaataaaccctgatttttggttc

SEQ ID NO: 400616 - DNA, 760 bp, Homo sapiens
tatatgttatatataaatatataataacgtatagtatattagaacttggtatgagaaagatgttattccttattgaaaagttaaagtagatgcatacttccaaaataaataccaggttgatcaaatactcaaatgtggaaagaagaggttaaaattatcagtaaagatgaggagcaatgacgcatgcctgtaaccccagcattttgggaggccaaggcaggagtatcacttgatactcatggctggccatgagttcaagaccagcctgggaaacatagcaagactctgtctctacaaaaaacaaacaaacaaaattaactgggtgtggtgctgcatgcctatagacccaagttactcaggaggctgaggagggaggatcccttgatcctaggagttcaaggttgcagtggactatgatcacaccactgccctccagtctgggcaatagagaaagaccctgtcttaaaaataaaaaataaacatgttcgtgactaatccttttccccaggccaatgcagagtgaatgtttaggggaaaaaatctaagttggcaagtttctcacttttctgcagtttttgttctctctttagttttcctttgggactttcaggattagttgatccagaaggcaaacaaaaggatttcgatagaagataatataactgattcccaggaaataggacagagacatgcatcagagtttcagctggccttgactttcagctgagagcctcttgagcaccggcaggtcacaaaagca

SEQ ID NO: 400617 - DNA, 1031 bp, Homo sapiens
cccagcactttgggacgccgaggcaggtggatcatttgaggtcaggagttcgagaccagcctggccagcatgatgaaacctcatctctactacaaatacaaaaattagctgggcatggtggcatgcgcctgtaatcctagctacttgggaggctgagacaggagaatcgcatgaacctgggaggcagagattgcagtgagccgagatcatgccattgcactccagcctgggcaatagagcgagaaccagtctcaaaagaaagagttaatttttgatgtttataccaaaatatttagcaatctctaatgtattttgagaaggaattatatttgtgaaagaatatagtttttcaaaatgacatagatattgtaggaaatcggaatttttaaaacatgattgaaaacaagatgagtttcactcattagggtaaatggaaaatttctgagtatgatatcagcaaactctaagattcttttaaaataattgtgcaatagtcatttttctggcagagtcaattcattcttctggttcaatatattctagacaaatgaaagaaaaggaatgttgatctgtgtttatccttgtaatttttctaagctttatatacagttttataaatgggatgaattatgtgcacgataccatcaattctaaaaactacctttttaaaaaccttttggaaatcaggattgcagttgataactacctaaactcacttccagccctataaaaattacttttccaaactaaggagcatcacgcattatgcattgtcagccaaagttctgtagtgtcagcgtgatcattcgttgtgtctgtagtgtcagcgtgatcattcgttgtgtctgtagtgtcagcgtgaacattgtgtctgtagtgtcagcgtgatcatttgttgtgtctttagtgtcagcgtgatcattcgttgtgtctgtagtgtcagcgtgaacattgtgtctgtagtgtcagcgtgatcattcattgtgtctgtagtgtcagcgtcatcattgtgtctgtagtgtcagcgtgat

SEQ ID NO: 400618 - DNA, 477 bp, Homo sapiens
tctttgtgaaatcaagcttattaaatgtcataagtcatagataagtatatgaaatgtctaacgttcaaaccttgttttcttaaaaccttacacatcatataggtccttgtaagaggataaacaaaccggctagcctttcctggggcttttttagtgatgtgtgcagtcagttatttggtgccttgtgggtcatgatttccatttcttctgtgtacaggcataaaagatcttctgttcttatacaagcatgtaaatccaacattctcattgtctcattttattcttgcaatgaccctgtgaaatgtgtagaagcagcacatcctcattttacaattgagaaacatggagactccaaatggattatttacaggttcacaaaacagctttgtggcactgaaagggcgagagccaagatctcctgatttctgttcctgtgttcatagattctttttccttaataaaagtaaacatatatca

SEQ ID NO: 400619 - DNA, 517 bp, Homo sapiens
tacaattggaaaattaatgtgaagttcagaaagcattgaagagaagggaaagaataatcaataaagaagttttggccagagttgagataaagctatacagatccagacctcaggggctgcagtgagaatggaaaagaagagtgaaaataaaataaattgttgcaggagttggcagaaattgtttactgacaatttaggaagatgccaaaggagagaaaggagataaggtttagcacctggtttctgattaaaagaataatttcgtgactgagagaaataagagataccagaaagagaaaggtggcaaatttgacttcagatatgggaattttattttcatgattcagggaacttatttctcttggtctactatgtattcccaatgcttgatccatggtaagtttgtaattaatgtgattgaataactgaaaaatactccaatcagaaactttagcaaaatatgtaagtgcagataaaccaaaatcaagtcatctttgttttgtacatcatctcttcc

SEQ ID NO: 400620 - DNA, 397 bp, Homo sapiens
gctgcttctcccccgggtctctgagcgtgcgttccgtcacctgcacgcgcactggggcgttccttcattcatcctgggcttgctggcccaactgccttggggccacaggtggtggaagcttttaccggccgctgtccgagcactccctgggcagcctccgtcctaagacagaggagaaaatactggcttcagaaaacccctgggccaagggaccctcgggggtcatgcgtggggctggatcccgcagccaggccctaaccaccaggttctcctgtcgctcggcggggaagccctgcgcttggtccccacccaggaggacgatagacatgaagaccaaggtccggggctcggggcggatggtgtgggtctccgggtcgcccaggccctgtcccctccc

SEQ ID NO: 400621 - DNA, 641 bp, Homo sapiens
caactatggacttatttaagaaaaaaattattaatacaacagaattgcacatatccacaattattttgttcaggtttttcccatcaaaaccttttcaaatatgaaaaaatcagaattggctaagtaaatttagtttcctcttctaccaggcttgcaaagggagggcttccacccaagccacacctacatctctgctccaagaatttgctactgtatacacaagctacatggaatattgagaaaactgatttaaaatgtattcttggaaagtggcctctgagaggacttaaatagcagttaattcttcagaaaaatgccaaaccctgagtgccaccatgggcaagtcagctatctcagtctttcctcctaaagtgagcgttgaattttatactctgtacccaactgacttcaatccatctttattctctctaccattttcatatttaaataaaaccttttgctcttatcaaaaatcactttttaggacaagctatggtaaaagaggaaaccacgaaaatctcatttaatcaactgaaagaaaatatacaattaatttgcctgttgccttaagttgaagtgttttaatacattctcctgtatttaacgtttgcttatatatttttttcccttttggtttattc

SEQ ID NO: 400622 - DNA, 694 bp, Homo sapiens
gtatctcttttttgctgtttggttaatgattgagtgtagtgtgtgttcttatcagtttaatatctggtatgttctcctgtttgatgaacgctatattaaacgcagttttggaactgggagttggagtaagagtttactctatctagtctacgcatcgccattagtgacaaaaacaggtttgtaattttggaaacatcagaaggttgtttccaatttcacagcaatatggctaaaaaagaaaaaacaggtatgctagcagtttaagaaacaggggtctacaactttgattaaattttccaaaacgaggtggctgacacacgcaatcccagctctttttgaaagaaaatggcttgagcccacgagttcaagatcagcctgagcaaatatggcgagactcagtcttttgagatagtgcgatcctggcttactcactgcatctttggactcctgggttcgaacatccacatcagcctctcagcagacacgtgccataacaacgggctagtgtgtattttttttgttttcatatgtatatatggtttttgtttttgtttggtagagaggggtgtttcccccgcgttacccagactagtctcagactcctgggatttgggctttgggatcaagcgatcctcacccccaaccccaaagtgctgggattacaggtatgagccactgcacctggcactctacc

SEQ ID NO: 400623 - DNA, 340 bp, Homo sapiens
ccaccgcgcccagcctagaaaacatttttcaaagaaactaaagaagacctaaataaaaagaaagacattttgcatgcatggattgaaagacttaacgttaatatgtcagtgtttcccaaattaatctgtagattccacacaatccctgtcaaaagacttttttgtagacaagtggacccagtagaaatacaacgaacccaatataggcaaaataatcttgaaaaaaagaaagaatatagttggaaaaaatatttgttttttttttgttgttgttgttgtttttgagacagagtcttgctctgtcgcccaggctggagtgcagtggcgcagtctcggctca

SEQ ID NO: 400624 - DNA, 446 bp, Homo sapiens
attaacattaatgttaacatcttttttttttttgaaacggaatctcacactgttgcccaggctggagtacagtggtgtgatctcggctcactgcagcctttgcctcccaggttcaagcaattctcctgcctcagcctcctgaatagctgggattacaggcacatgccaccacgcctggctaatttttgtatttttagtagagacagggttttgtcatgttggccaggctggtctcaagctcctgatgtcaggtgatccgcccacctcagcctcccaaagtgctgggattacaggcatgagccactgtgcctggccattaacatctaattatgcattgagtttgtgccagaaccgggactttaatttgtgcctactgatttctcccagtccagtgctctttgcattgtgttatgtgactttttaggacaatgttgtcatgtaaacta

SEQ ID NO: 400625 - DNA, 249 bp, Homo sapiens
cggcacgaggtttatgtccacaattccttgcctcctcattcacacagagcattcacaataccctgtgaacacagaattccagtgggctcacaaggtgcagaagtttagtgggaatcaaagtgagtacaaagtattaagaaaagtatgtctgtggctgagcaagccggggcactgacagcctgaagagaccacattctccattggaacaggaacttgttttgagtgcagaaagatggtgaaggcatgcta

SEQ ID NO: 400626 - DNA, 429 bp, Homo sapiens
aaaatgaatatctaagatgaatgtaatatgctctgtgacagaattgtaactagctcaatgggagcacagactggtgagctgctaatggaacttggagagtaggcctcactgaacttcccatttcacctgcacattaaaataccagtgctggaaaaaagaaaagagaaagggccttatacttcccgatttctagtgtctatcctatttggtcatatattacaaattcatagttaccttttagtttttccagcacaaagtgaaaattggatttgtccccttaaggaggagaaaagacaccaacaaggaaataagtaaaattgactacaaggtagacaataatacacgataaagagagaaactagcaaagagctcaaaggcagaaggcaagacttttgaatggaggcaagatgtggtatttgaaccaaggat

SEQ ID NO: 400627 - DNA, 237 bp, Homo sapiens
caggggtaagttgtatgcccatcagcttaggtttgggtgactggcagatggcagaaaataagaaactagagcctaggcagcatagtgagaccctgtctctacaaaaaattaaaaaattagccagtcgtggtgatgcacacctgtggtcccagctacttgtgaggttgaggctgcagtgagccatcattgcaccactgcactcagcctgagtgatcgagtgattctcagtcttggtga

SEQ ID NO: 400628 - DNA, 415 bp, Homo sapiens
ctttatttgaaactagcctgttcacaggaagagtgacccgcagcagcttagtgctctgcctccttcaagctttgctgtctccagtttttccttagtttctccttctcctcaaccaggctgtgcccgctgtactgtaagtctcagttttcctcctctcagtagagtttactccaaggagaggctaaactcctcatggaggctatctgtaccggtccagaatgaagaaatggatgcagaaattaaaaacaaaaaagtatatttcctaatgccctgttgctttatccaggtaatcacttacatatactgcatgtgttttagttcccaaaactaattgtcttgaacaggaaagaataacttctgtagtgtgttgatgatagcaatcaaagactaaaataaatgacagactttcatagga

SEQ ID NO: 400629 - DNA, 323 bp, Homo sapiens
tctccctatcccctcttctttctttcctttcctccctctcttcctctctcactcctatccatcaaacctatatgttttgcatatccattatgttctaggtactgttttatttttggggatcgagcagtgatgaagacagaccaggtctctgctctttcagggttttctcttgcttctttacattaattctatattcaactataaaacaaaatttcccactgaactgcttgtcccttgccaactgcattcaaaaatatccatttgttttccagagggccttggaaagctatctgggaagtttgggctttattctgcccgccatg

SEQ ID NO: 400630 - DNA, 553 bp, Homo sapiens
agttctgtgggatgagtgaagtgggagttgggggttgagtgatgggggaccgagaggtcagtggacgaggttctaggggctcactggtgaacaaagttatgggggctaagcaggattaaatggggcttattaaactttgacttttacacgttttccagcacagtgacctgcccctaaaggttcatgcgcatccctcagacccctctttagacgcgccccgcttctccctctgccctctccccttgcccaagccccgaggtgggggcctggtgtgaatgctccggccgaagtgaacctgcacccccgcacccgaaggcctctttccggcttctgggcaaggcggccccggtgaggtgagcagaaggaaggagaggcacctgcgaggtctcacctgaccccgggcctcgcccaagttgggggcgtgggaggaggggtaggtgcggggtctgagggagatgggggtaaaatgtaattgggataatagttttagagtgtagttttttttggcatttaataaataacatttgaatatatagattaattctgaaataga

SEQ ID NO: 400631 - DNA, 397 bp, Homo sapiens
ggaagtgcttgttggggccaggctttgtaacggtctcctgagcagcgagcagaaaatctgttatcgagagagatgacctgcccctaaaggttcatgcgcatccctcagacccctctttagacgcgccccgcttctccctctgccctctccccttgcccaagccccgaggtgggggcctggtgtgaatgctccggccgaagtgaacctgcacccccgcacccgaaggcctctttccggcttctgggcaaggcggccccggtgagctcggccgtcacacatctctgctttttcccaagaagagcaggaaatggccaaaccccaggggctagtgacatttgaagatgtagctgtggatttcacccaggaggagtggcagtacctgaacccaccacagagg

SEQ ID NO: 400632 - DNA, 407 bp, Homo sapiens
agctggctgctagccctggatcccttgtttcctgagatactcaacttcccagcctcccttgcagctagtggtaatcatgtgacccacttctggccagtaagatgaaaaaaggaagttcactggactggcagagggagcttgggagggcttttgctgatgccacttgttcttcttgccataaagggccccactcaaggcaccatcctctcctgggtggaggctacagcctctgatcatctgctgtatgatgattcactgtgatggcaaagtgggaggagatgctgatcctgaaaacagtatttatggtgcaaatctcatccatgcaacaggacaattccagggcttacgtcttctcctcctggagcctccattgctctcaactcaataaacactaaataagacttgcc

SEQ ID NO: 400633 - DNA, 2188 bp, Homo sapiens
agctggctgctagccctggatcccttgtttcctgagatactcaacttcccagcctcccttgcagctagtggtaatcatgtgacccacttctggccagtaagatgaaaaaaggaagttcactggactggcagagggagcttgggagggcttttgctgatgccacttgttcttcttgccataaagacggtgtctgacttccaggcaacaatgcacacagaagttacaagtgtggatactagagtcagagcctggattccaatgctgcttcttaacagctgtgtgactttccacaagtaatgcaacatctctgggtctctgtttcctgttctgcaaaatgggggtactgtctacttgccccagggacctgctgtgctgaggatcattcccaggaagcacctagcaccatgctgggtcctggcaagccactgacaaatgttcactgtcacaatggccctgcttcctctggtgctcggcaccaggctgacatcgagtacacagtcaatgaagaaacaaggagactctgcaaggagatacattaggatgatgtactgacaaagccttgggaaaactgctggtgcctttgctggggggaagatttccagatggagctcctcaggatggcctgccaatccaataaactcaggttcctagaaagggcctcccccaacccaaccccacccccactctgtaagccccacccaaaccaggacagcagcaattctccccttcccctggtgtgccttccccggtggtctgtttctttaggacaggaacgcagctgtctggaaggcacccagggaagccattccttgggacatgtcccctgacccacccccggcaaggctgggatgacagaaggacaaacccagccaaacatatggacccgtggcccaggataggcaacagctgggccactgcctgacttttcttctgctccttggaatattctggcaatgagaagacatagtctcagcaacttatagacattttcccaggaaatcctaaccgctaagggaacaatttgctccattctcacacatttcaatctacttatttggaagaccaatccttgcgtgggcatgcacgcacatgcgcgcgcgcgcgcacacacacacacacacacacacacacacacacacccttcatgtggtcttgtgtagaagtacacaaacctgataatagcaaccactaatatttagtatatgctaagtaataaaagtagctactatagtcatcatctcatatagtcctcacaacaagcattgagacaggggctctatccacatttcacagatgaggacacagaggtgggctgcctttcacagaacaagctgctagccatgctggggctggcgtcggagcccaggtctaagaactctggtacaaggaatccactccctttcccggatttgcctcctccacctgtgcttaaggagttaaccttgtcggagaggttttctttccttggttatgttttctattctttgggtaagtttgacaaagtggggttctttttcatcgccagagtctgtgtccctggaggctgaggaaggaaccagaagttgcactttccaacatggatcgcctgctaattttccaaggcagctcagcccctgccagcgtcccctccctcctttgggctgagggcccaggaacccagcctcaaagttcagcttgcttcctccagcacgcacatttggaaattgaaatttcccacattttcaccacacaaaagccaggttgtatttttgttctcttcaaaatatgccaaaggaatttttcctaccccttgaactttctccaaaaataagtagaaaaagtcaagaccattttgccctgtaagctgagaatagaaaaatcaacatgcagggtgccatttccaggatgttacgaaacagcgaacatgtgaatccgtctcaacaccatttggcaactttggggatacagtagatgatatttctcacccacaaactcctcactgagtttatattaacattttgctttttttttttaaaaaaaaagaaaaaagattctgaaaaaggtaagaagccttgataaattaccaccacctggattaaaattcagagtcagcacactgaccaccagcaaataaaacatgaaactatacagataacttagtaaaacaaaaaacgatagtggcccaagataaattaaacttgcagcataa

SEQ ID NO: 400634 - DNA, 846 bp, Homo sapiens
agctggctgctagccctggatcccttgtttcctgagatactcaacttcccagcctcccttgcagctagtggtaatcatgtgacccacttctggccagtaagatgaaaaaaggaagttcactggactggcagagggagcttgggagggcttttgctgatgccacttgttcttcttgccataaagagtctgtgtccctggaggctgaggaaggaaccagaagttgcactttccaacatggatcgcctgctaattttccaaggcagctcagcccctgccagcgtcccctccctcctttgggctgagggcccaggaacccagcctcaaagttcagcttgcttcctccagcacgcacatttggaaattgaaatttcccacattttcaccacacaaaagccaggttgtatttttgttctcttcaaaatatgccaaaggaatttttcctaccccttgaactttctccaaaaataagtagaaaaagtcaagaccattttgccctgtaagctgagaatagaaaaatcaacatgcagggtgccatttccaggatgttacgaaacagcgaacatgtgaatccgtctcaacaccatttggcaactttggggatacagtagatgatatttctcacccacaaactcctcactgagtttatattaacattttgctttttttttttaaaaaaaaagaaaaaagattctgaaaaaggtaagaagccttgataaattaccaccacctggattaaaattcagagtcagcacactgaccaccagcaaataaaacatgaaactatacagataacttagtaaaacaaaaaacgatagtggcccaagataaattaaacttgcagcataa

SEQ ID NO: 400635 - DNA, 410 bp, Homo sapiens
catatgtattatatatattgcatataatatgtgtaattataatgtgatatggattatagaatgcaaatatatttattaatattatataacacatagaatatatatatatatatatatacatgtgttctcagtaacagtttgttacctatttattgtttctaatgtatgttttattctcccttaaatagatgctaaggtctttgagggtagaaaaaaaatcttctatttcttaacacttataattagtataatgaaatgaaagtgataaaaattataaatttgtgttcaatctcatacttttacaataggccagatattgtcattagtttcccaattaacccagatatttacaatatgagcttgaaaaagttatctaagaaggcataaaaaatgaacattagatattcatc

SEQ ID NO: 400636 - DNA, 306 bp, Homo sapiens
gtgtctcagggaatagggaggccagaggagaggagagagttagaacagctggctggtgaagcggtcagaacacacacaacattaaatttgccatcttaacatgggcatggtttgtggctgcccaaaacaattacaacagtaacaccaaagatcactgatcaccacaacacataataataatgaaaagtttgaaatattgccaagaattaccaaaatgtgacacagagacacaaagtgagcacatactgttggaaatatggtgccgatgacttgctcaatgtagggttaccacaaaatcagtttgtt

SEQ ID NO: 400637 - DNA, 509 bp, Homo sapiens
gacggggcagcattcagggcatgtgaccagtgcgtgatcctggaagccattcacaaggtctttgctctgtggtgctttggcctttgcttcccttcctcctaacccatgacctttaccaaatggatcctctccccattatctgaccactcagtgtgactctttggaaaacatgaggaaaaagtgactgtagcatggattttttctttgtgagtgttgtagagattcacagttgtctttcattgtggttgtttttcagtcattcaacaagcctttactgcagtcagctatgtgcctagcactatttgggtatgttggtgcaaagtcacctcagtgggttattaaagaagagtgagagcgagacctacacatgtctttgctgtgtggttttataggcctctttacagaccagccagatgcctagtctttaaggtctgttctaagagaccctgagttgagatgccttttcagcctcctagagagggcacccagaccaccatgctgccttctgg

SEQ ID NO: 400638 - DNA, 422 bp, Homo sapiens
ccaaaaaacaaagagagttagacatagattaccaaaatcagaaatgaaaatgagagcatcactgctgaccataaagaagaaaattaaaggaaatatgaagagcaacttcatgcaaaggaattaaacaattaaggtgaagtgagtaaattcctagaaaggcacaaattactgaaactaacttaacaagaaataggaaatctgaatagacctataccaagtaaatagattgaatttataatttaaactcttctgacaaaagccaaagcccacatgaccttaccgatgaattgtattcaatatttaaacaagaaataatgtcagttcttcacaaactcttttagaaagtactggaggagagaatacttccaaactcattctgtaaagccaatgttacccttacacaaaagccagatcaagataac

SEQ ID NO: 400639 - DNA, 336 bp, Homo sapiens
ccagaaaagacatactgttctttccaatatgatgtggaagtctgaaagattaggaattgtttggtaagaaaaaaatatacatagctatttgtggatgacaatgccctgacactgttcctcctttctgtccttggttgggggcctgcctcatttctcattgaggggaattccttcatcaggacctgctacgctaatggtcacggaccaatgttctttttgctgtttgaacagaatgcttgccttgtgtatgtccagtcacaaagttcccttgataaaaaccatatgaaaataccacaaagccaaagggcaataaatattgttacatagagcacgttt

SEQ ID NO: 400640 - DNA, 430 bp, Homo sapiens
ttctaaaagagcatacaacccttccgctgtctgcacagcagcctggagcttggcttcttttgttccttaaatcaaggccaggaagcagagccaagagcccctttcctccctgcttccccttgcggaatcatttccaattcagtggcagtgagaaaatggtcattcattgggctgtgaggtcagaagtctccaaggccccagcaaggacagaaaacactggaagggcaaaatgagagcccttggcaggtgctaaaggaggggccacagggtaacacctcccatctgggggagcttaagaaagaagctgggcacatgtagtcttagctactcgggactccaaggagggaggatcacttgagctcaggagttcgagactagcctcagcaacacagtgagattccatctctaaaacaacaacaacaaaccaaaa

SEQ ID NO: 400641 - DNA, 410 bp, Homo sapiens
tacaatcaggcctgaggctatacttgaccctcgacaagtgaaaatgtcagtatttatggtaatggcttctgagcatctctcatctttgccagcaagtctacagcttttctaccagtggattatggattcaaatttgagaacaagccattaaaagcaaagcagcttcacagtgacagcctgacacctgtcatatctccaaggccacgtcgctttttgtattcctgaaaactcttgggctaaagagcctataaaatcaaatccccttaaagtgcggcatcagtggatttcccaagcccaaaaggtttaaatgccaagcaagtcaaaggtggttacttctgccacttcagatttattcctcctattgatttatcctaacatatgacattaaagttacagtattttatgtatga

SEQ ID NO: 400642 - DNA, 407 bp, Homo sapiens
ccacgccacctcttggctttctgcccactaataagattgttgatgttgatgactgggcacaggctgcggcccctcctgagcccctcagaagcaaaactggaatgagagtggggagctgcccgtcttccagcaggaggcgggccccgactcccgccgagcgactccgggccccgcgcggtccctgtcaccttgtattctcattgcccgttccgcggccgtcagctcccaggattgccccatttagcaaatagctttcgacaacccctcttcgtcagacgttgtaggtgcagaggtgctggagtggacagaggcaaggcgcccgctcttggggagctcacgttctggtgggaagagacagaaacacattaagaacctatctgtaaaataaagataatttcaggtgcaaa

SEQ ID NO: 400643 - DNA, 441 bp, Homo sapiens
tcaaggtatggtccaaggaatcctggaggtcccctagacatttttggcgagtctacaagtgcaaaactatttttataatactgagacattctttgccgttttctttgtagtgacatttgtacctgtagtataaaaacagtggtggataaaacttctggcgctttagaataaaccaggttagagtacttcactgtcctagtaatcattgtattattcactgccatgcactcagatttttttttaagtttcacctaaatgctcttgatgaagaagtaaaaaaattttaaactaaatctctacctttgtacacatctttaatatactgtaacaaaatgggaagtatgcttaaaacactggcgaggccatggacagcaagcctcccagcactttgggaggctaagtccagcttgggcaatgtagtgagagcctgtctctcctatt

SEQ ID NO: 400644 - DNA, 425 bp, Homo sapiens
ttccaaatgattcgaaatctgattatgtctgcaacaaatcctggtgggatataaattatcacaagttttaatgtactaggagagagagggtacctggacttttcctcatcttttctgttgtgagttactgactgaacatgtgtcaatcaacttcccaccacagcagaggtaacattttaaaggcccagctaaggagcaagcatgacttgttcctgtggaggcaccagatgggtaactgggcccatggcaaatgaagaggaagggactgtgatgtcctggagcagagccacgctgggctgaaccagtggtggatgggtgtgactgaaaaagcaagtccagcctttaggtgcctggactttgaagtcaaggctggctggtggagaacaactgtttcaaaaccaggcatcagaattagattgaagtta

SEQ ID NO: 400645 - DNA, 431 bp, Homo sapiens
atccttcctgtccttatcctgtccttttgcacaaatgagcagatacatgtatacattttcaaaatacccttcttacctatatgtagggtagcatactgtagatagtctttggcactttactgtatttcacttaacaaaatgtcttgggaaaatctctcctggacattggtctaggcaaagaattcgtgactaagacctcaaaagcacaagcaagaaaaacaaaaatattctgaatcaaggaccagagaaaaagacaaacaaaacaaaacaaaagtagacaaatgggacttaattaaattaaaaaacttctacacagcaaaagaaataatcaacaaagtaaacagacaccctgcagaatgggagaaaatatttgcaaactatgcatcccacaggggactgatatccaaatttacaaggactcaaacaactca

SEQ ID NO: 400646 - DNA, 482 bp, Homo sapiens
aataacccatgcaaaaagacattgaaaaatatgccgaactgagtgacaatggaaacacacttatcagattctgtgagctgcaacaaaagcagtatttagaggaaaattaatagtgttaaatgcttatgttttaatacacaagttaataataatagtttaaaagaaaaacacagaataagctttgaaagatgctgaaaaataataagagaaaaaccaatctttcattccagtttttctttttgcataaactattcttcaggtaaccaagacattgagaaaggatggctccctttatagatatagtccagctaataaatgcagaagaattagaatataattctgtaaccactgataaaataacatattcacataaagatgtcagtagctggctgttaacatcacataaaggaaaacaaccagatactatgccctacttcagagaagtgcacatcactatgtatgatggattactaaaataaaaa

SEQ ID NO: 400647 - DNA, 416 bp, Homo sapiens
aatatttcaacatactatcaataactaatagaataagtagataaaatacctttgatttaaaagatttaaacaatataatcagcaaatttgaataggcattatatggaactctatactcccaaacaagaaagaatacttattctttttaaatacaaaagtgaattatttataagtgaataatagtgaaaatacagttattaacacttgaaggaataaagtgagttgcttagagagaaatttatatcccatagagatatagtctctaaaaaaaaaaaactgccagaatggtagcacacacctgtaattccagctactcaggaagctgaagcgggaagattgcctgaacccaggagttccaggttacagtgacctatgatcatgccactgtcctccggcgacagagtgaccttgtctca

SEQ ID NO: 400648 - DNA, 179 bp, Homo sapiens
gaccctgtctctaccaaaaaatattatttcaattcatttctggcttatccttccagcatttcctttttacaaaggatagtttccctatccttctgccctaagtatgaatagacaaccaagaatcttccagcatgtgggaaaaaccagcaccatgaattaaaatgaccaaaactaaacta

SEQ ID NO: 400649 - DNA, 289 bp, Homo sapiens
atgcattctggctctttggaagcccttcaggtcttacactgcacccaaaatccaaccccaagtgaccacagcagtgggctacaaacagggtcccagtgccccagggctgtagcctgcagcttagaagtgcactgctggtggctatgctcgtcacttgaacaaggaaggagactacactctctgcagtcttggagagctggggcacacaaatgcacgggcttgtgtaggttcctccacagggttgtttcagtgaaggagtggcctgttgtcctgctttaagtcgacatat

SEQ ID NO: 400650 - DNA, 3013 bp, Homo sapiens
  misc_feature (43)..(43): n is a, c, g, or t
  misc_feature (1557)..(1557): n is a, c, g, or t
tcaaatatccagttttaccttctgtggtctgtgaacatggcgnctataattttcttttaatatttgtttacatttccttgtgttttaatatttgatcaatttttgtgactgtttcttgtatactgaatgtttatctctacatatcaattacattaagctcattaactgctcatgttacataaatatatgtatttatttttttctactttgttctgtcaacttctgaaagatgtgtgctaaaatctcccactatgatcttggtttttatcacattaaaaaaattattagatttcttctctttatgtcaaagctatattgctaagtgaattcatatctataaaacaatttaccaagatgataatgaaatatctcttcgtttcttttaattgaatgagtttttgctttgaattctcttgctatgcctactactttttatttgcctgattaatctttttctcaaccttctagtctatgttttatgtgctccttgtaaacagcaaacatttttcaaactgatttgagaggctaccctttaataagtgaatgcaaccattctacattgtatttctatttctcatgttttcttatagcttctgtattttcttttccagctatatgctgcctttactgaattttctatgttccatttttctttctccctaatggttttgaacgaaaatattgtttcttttcgtctagtaattatgcttatcatgagtactgcatgtctaaaaaatgtcagttttataatttgggcaggtattgaactcttaagtacaaaattattttcccaaagaattttaaaatatactatcccactatctttttgcatccagcattagtaattataggattattgctggttgctactctttctgtctatcctcagtgtctctcaactcgccttttttttcttcctgtttgtcctttcttttgaattgctaacttcaaaaagctctaaagttttcttttttgatgaatgcagtgtcatcctgcatgtctctgaggacagtaattatatttattctaaaactcttgttttgctttctttattaactcttatcccttgggcattagttcttccatttatatagtttggtactctccttcatgatattagttttcttcaaatattttgtgattctgggttgtgaccctatcttttttggactttagagatatcctattagtctgtgatggctgtatgtgattacagtagcatgagtcgggggagaaagatgtgccaccgggtagttaaaatggatagttagtgttctaggggtttcctatctgttctggatattgacagcattgggagtactcccttggcttttaaatcacccaaatttcttgtttttgcatgtcaaacaccaagaaaaaactgtgaaggtagggagaggtagttctacatgtctccttgtccaggaggctagacataaagaatccccaaatagccattcataccttttgcagtattccagtcctacacatattttagattatagttcttatctgcattctaatgccatttatcaagggctctccatggtttttggnagttttgctgtttcctatcacagttgtatttaattggtactatatattctatagagagggagaggaggattatttttaggaatgtgtagtagcaaggagaggttgcagcatgttctcaatgtaccatcttgtactgaagtttcaaatagatatgttttggcagagataaatggacaatattgtacatacttttaagggaaaatgtgcttttttactatacattcccttctactaaaatatgatctcataatagtaagaagggggtgtttatccagtagtttctaactctagatgcacattactcaaatatcaaagtgtaaccccagaaattctattttaattgaacaagggtaagaaacactggtacagtagcagaaaaactgcaggttagggatcagactaatttgagttcaatcaccacttactaaattatatgactttaggcaaaaacaacattttgagccttagtttcttcagctgtaaattgggtttacaaaattgtggtgaggactagagataatataagaagagagactagtatcatgcatggcaaacagcatatgcttattaaatgttagctcttctaatgctatgtataagtaagtagatgaaaaacatggcataaaggaagatcaagtgaaataggatgtcccttcatacgtcaaaatcttacaatgactaaaatttaattccagatgtcacaggagctgacaatcattaccagatttacaaactgagcaagattatgggatttacagagtattcctgtcacatattacatacctcctgggctcttttaacattcttctttcaatgcatctttcaaagaccactctctaggaaatcacacaactgctcaattccacatttccaaatttgagagagtaaaatctgtcaataataatggcaacctaattatatgtttctgtttgtattttttaaaatactatgacaaatagatgagcacttttaagttgcaggaaataagaataactagaaagctgtggatcccagaaattaaagaaactttagtgtcttccaggcaggaaattatccaaacctaattacaaccagctggagacagctccattttcaggaatgcttagatactagcaaaacacagtgatgcccatttgctgacaagtaaatgctcatatctttatcatctgtgtcattcagaaacattcatatgccacttggcaaaacaacttcttaataggtaatattcattgaattcttataaaagttttaattcatttccaaatacaactataatacttcactatttcaacattagagaaaaattattttctcttgtttctttacaaatgttttgtttggctgggtgtagtggctcacacctgtaatccaagccctgtgggaggccaaggtgggaggatcatttgagcccaggagttcaagacaagcctgggcaacacaggaagtccgtctctac

SEQ ID NO: 400651 - DNA, 469 bp, Homo sapiens
ctcctaaaactctgagaattccttgagtgttgagtgtctttggtatgctaatgagatgactctcaacagaggggctcctggatagcttcaatatgagagctggttttcagaaacaccaaccttgtgattagagggttggaactttaagcctcacccctggacctctgaggacaggagagggactgaagattcatctaaccaccaattgccaatgatttaatcaatcatacctatgtaatgggaccgctataaatatcctaaacaatgggatttggcgagcttgccagttggtgaatacatcaatgtactgggagggtagagcaccccattcccttgggaacagaaactccagtgttcagtacacttccagacattgtcttacctaaactttttcatttggttgtatatttgtatcttttataacatcctttgtaataaaccagtaaaagtaactgaagtgtttcttcga

SEQ ID NO: 400652 - DNA, 522 bp, Homo sapiens
cacatatattttccattccaaaagaatattctttccactccatcctgaagggtcttgctctgtcattccagctggagtgcagaggtgtgtgatcgcaactctctacagccttgacctctgagcctcaagcaatccttctacctcagcctcctgagtagctgggaccacaggataatgctggtctcacaaaatggattgggaaatgccacacctctactttctgaaagagtttacataagagcctcactctgtcgcccatgctagagtacaatcatgcaatcttggctcactgcaacctctgcctcctgggttgaagcgattctcctgcctcagcctcttgagtagctgggattacagcctctgttactgggcatggagtcatctgtcttctatggagcacctctgtcttttggtcaaagagggaaaatgaaatcctggccctatggatactgggaagcatactcaagtatctctgagtttgagaccagcttgggcaacagagcaagacgccgtgtctacaaa

SEQ ID NO: 400653 - DNA, 190 bp, Homo sapiens
tcgcattcacagcacaacgtttctctttcccaaataggcatgttgttgtttcaaattaacatctgtgcttactgcagaatagtgaatgccatcttcttttgccccgctgaccctgatggtgtcactgaggctttcaaagcagagtgaccaggcacagctatagttttctgcagtatcaggaaaggggtgg

SEQ ID NO: 400654 - DNA, 267 bp, Homo sapiens
tcacacctataatcccagaagtttgggaggtgggtggtttgcttgagcccaggagtttgcgaccagcctgggcaacatggtgaaaccccatctctacaaaaaattatttaaaaattaactgaatatggtggtgggcatgtgtgtagtgccaacttgggaggctgaggtgggaggatcacttgagtctaggaagtcagtgctgccatgagtcctgatcacttcattgcattctccagcgtgggtgacagactaagaccctgtctcaaa

SEQ ID NO: 400655 - DNA, 451 bp, Homo sapiens
tctttagatattaaatcatatttatcagtggcacaatatacccactacattccttcctgtcctactgttcttttatctccccaaccatgttaaagaatttagatctgtgtttagagctccgtcctcactgtaactacctcaaggcctgacataggctgagtgaggcccttactgttgttgattcaagttcaggatactgatgatgagaccactggctcatctgataagaccactgataagaccatgagctgttcagcaggcacagagcttcaggtttacttggttgctcaattgggtcgttcacacagtgagggagatttctagtttgattgcataaccaaaacgcttttatatgcccagaaagaagaatggataatcgttacacagataatggtgtgtgactattgtaattccatgatgcctctgagaaaaactggtttttataatgtat

SEQ ID NO: 400656 - DNA, 431 bp, Homo sapiens
gcaatggttctgaggtccaccaggcagccgtaggagccagttgtgagaagggcaagttccacaggcttgggctcttagctgaaagagctcctttcagaattttctttttcttctttttcttttattgccttcccatagaagattatagatagctgaagtttgtgagttggattacttccatccataaaataaagactaaaatctttccaccctaatcagaaaaaagcatccttttgtcccactatattcatcaatatgtcatatttaacagttacaattattgacaggcatataaaacattttgtgacagagaaaatagcttcctataaagtgtttattcttttttattgataataagttgacttctctagccctaccaagagaatacggaccactaacaagagatcaaatccatttatatgacttcttac

SEQ ID NO: 400657 - DNA, 426 bp, Homo sapiens
gaagctgagaacaatcatttcttgttccgtaaacacatggcttgtgtgttttatctgtaagtcaattccaaaagttgaaaattagtaacagctttatattatcatgatcatataaatattagtcacagcagaaccaagtagtgtgctgggtttatacttccttttctataatattcctagcatatacatcaaaaccatatgaatgcttattaagttaaaccacatgaacttgactttttttgtaggttgaaacagtcaaatatgggcaacttcatatggtccaacctaatcagagagtgtcagttgctctccaaattggatgtatctgtctacattcccacctactgctttccatctccaacatctggtgtcccaagaccttcatctgtctaccaatctgatgagtataaaatggtgtggcgtccg

SEQ ID NO: 400658 - DNA, 285 bp, Homo sapiens
caggggccggcacagtggctcacacctgtaattccagcactttgggaggccaaggctgaggatcccttgaagccaggaaatcaagaccagtctgcatggcatactgaaactcccatctctacaaaaattttaaaaaccagctggacgtggtggcgtgcaccagtggtcccaactgcttgggaggctgaagcaggaggattgcttgagcccaggagtttgaggctgcagtgagctacgatcgtgccactgcactctagcctgggtgacacagcaagaccctgtgtc

SEQ ID NO: 400659 - DNA, 512 bp, Homo sapiens
tgagccacagcccctgaccagaactatttttcttcccaagctagcatcttagccaaaattaactagaatgtttctcgtccagttagaaaaaggtattacactttcaaaatattttacttgtttatatcaaaaaaggtgcagcaatatgctgattttgttggaaaaagttacactgcctagaattaaatgtctgatatccagcacagaaatgatgcttcctggctgggcctagtggctcacgcctataatcccagcactctgggaggctgaggtgggaggctcacctgaggttgggaatctgagaccagcctgaccaacacggtgaaaccccgtctctactaaaaatacaaaaattagctggatgtggtggtgcatgcctccagtctcagctactcaggaggctgaggcaagagaatcactttaacctgggaggtagaggttgcagtgagctgagatcgagccactgctctccagcctgggagacagagcgagatccatctcaaaaaataaaa

SEQ ID NO: 400660 - DNA, 739 bp, Homo sapiens
  misc_feature (49)..(49): n is a, c, g, or t
agaattgcttgaacctgggaggtggaggttgcagtgagctgagatcgtnctgctgcactccagcctgggtgacagagcaagactcagtagagacggggtttcaccatgttggccaggatggtctcgatctcttgaccttgtgacccacccacctcggcctcccaaagtgcagggattacaggcgtgagccacagtgtccagccaattcatactttttaaggttactttgtttatattgtggagaatagactgaagagctagagtgaaaatactggttaaaaaacaaacaaacacgtaataaatgaggtgaaagatagtaacttcatctagagtgatgaagaaaagtgcatggatttaagatatgttttggaaattggcatgaaaggatttgctgatggttttacatgaggagtaaagaattaggaatgagtcccaggtgtctgatatgaaaactaggggatggatataatgtcatttactgtgatggggaagtggggtgtggagataagatgtgagagaaattcagaggttaagtttaagacatgttaagtttgaggtgcctgtcagataatttctctcctgggcctggttcttcctttgtatggaagtgatccttgtatttcctcattggtattatcacacttttaaataatgatgattttattttaaaggacttgcaggtaccaagcataacaggaatgaagaaaattctagggcttttccagcctcattgacaagg

SEQ ID NO: 400661 - DNA, 480 bp, Homo sapiens
ggtacccacataattgttcgtggacactaagcaggtattttgcaagagaaatctggtttctttcgtgtttggtgaaataactgaattttcccatgctttaactatgtgtgaggaaataatttctggttcttctgtttattttctctttctatggtcatacatacactcaccgtcttcctctgacagtattgattaccaagcacaattaagcactgagacagaaagttaacagctgaagtggggtcacctataggcagaaaatagattcgtgtctgtttaacagtaacccaaataagaagccatgttaaatagagacaacttttattacaatccttatagcataccttccttttaacattatttttatgatttagctccctccaataggaaatgtttggccacccactggttttgtgctttatatacttattgctttaaatgtgttattaaaatcttaccaccaaattaggaaaaaaaaac

SEQ ID NO: 400662 - DNA, 576 bp, Homo sapiens
  misc_feature (49)..(49): n is a, c, g, or t
agaattgcttgaacctgggaggtggaggttgcagtgagctgagatcgtnctgctgcactccagcctgggtgacagagcaagactcagtagagacggggtttcaccatgttggccaggatggtctcgatctcttgaccttgtgacccacccacctcggcctcccaaagtgcagggattacaggcgtgagccacagtgtccagccaattcatactttttaaggttacttttgtttattttctctttctatggtcatacatacactcaccgtcttcctctgacagtattgattaccaagcacaattaagcactgagacagaaagttaacagctgaagtggggtcacctataggcagaaaatagattcgtgtctgtttaacagtaacccaaataagaagccatgttaaatagagacaacttttattacaatccttatagcataccttccttttaacattatttttatgatttagctccctccaataggaaatgtttggccacccactggttttgtgctttatatacttattgctttaaatgtgttattaaaatcttaccaccaaattaggaaaaaaaaac

SEQ ID NO: 400663 - DNA, 356 bp, Homo sapiens
aagggaccatctcccttttcaagatgcagcctcctgaacaatctgggttccacatggctgccctgatccccagctgcaggtggaaggtcagcagtgctatcctcagggtgacaccctccatagggtcctgggacaactttacccaaaaaggaataatcacaccaaatgcatatatgtgtctctttgtgaagcaagaacttttgaagaattcagatggttttaacacaatatggcatgcagctagaagaggaaatctgggttctcatcaagtatgatattcatcccagtgagccatttgaaatgaaggaggcaaagtctttgtcgacgcggccgcgaatttagtagtagtagtaggc

SEQ ID NO: 400664 - DNA, 383 bp, Homo sapiens
caccagcacgcagcctgggcaccaagagtgaagctctacaattcacaaagagtttcagaatagctgggagataatgggcaaggctgcaatctgatagctcagaggacatgggataggcagtgcattaccacgtttgagacaagtcattgtgttcccaagttgtgtgtctgtccaggccgctccggcagagacgtggagccatggctgtggctcacggctgtgatccgcatccttgtggctgcagggagagttgcagggcaaactctgccctgattcttttgagcccatggtgtgagcatttctactcaaagcaggcttaactgtagcaacatgttactccagaattgtaccttgtatctgttagatttcataggcagtagtgg

SEQ ID NO: 400665 - DNA, 404 bp, Homo sapiens
aattattctgtgtttgtgatagggaggagataatctgttcttttgattttacctaatgccattaaatattcagagctactgaagtctggttttcctgatatgtgagctgggcaggagtgtcaggtaccctggcagacacaattggtgctgttgttatgcttttcccccgctgcccactctcttccccaccccactcccaatttgagagggaaggcccctgacacagaggaatttctgcccaaggcagggagtatccccgtgtggttcctcaaatgtttgcagaaagaatgaaaacaactacacttcttgggacccaggccaacgtcataaggccgacgtcataagaaggttctttcctcttgttatttacaaaataaattgatcccttgtcctaactagaaaga

SEQ ID NO: 400666 - DNA, 2245 bp, Homo sapiens
ccgtgctaccccctccccccgggtgctggctccatgtctgtgtgaccggcctcaggggtagagtccaggcccgacgcggggcgggccagcggcggcggcagctgaggtgagagacggcggcggcggcgcgggcacccggccccccagcgggaggatgaagcggcggaacgccgactgcagtaagctccgccgccccctaaagcggaaccggatcaccgagggcatttacggcagtacatttttatacctgaaattcctggtggtgtgggcacttgtcctcctagcagattttgtcctggagttcagatttgaatacctgtggccattctggcttttcatcagaagcgtctatgattccttcagataccagggactggccttctcagtattttttgtttgtgtagcattcacgtcaaatataatatgcctgctgttcatccccatacagtggcttttttttgctgctagcacatatgtatgggttcagtacgtatggcacacagaaaggggagtgtgtttgcctacagtgtctctctggatcctctttgtttatattgaagcagccattagatttaaagatctcaaaaactttcatgtagacctttgtcgtccatttgctgctcactgtattgggtaccctgtggtaactttggggtttgggcttcaaaagttacgtaagctacaaaatgcggttaaggaagcaaaaagaagtacaaaaagagaacgagttttacatgcaacttcttcaacaagctctccctccagagcaacagatgctacagaagcaagaaaaagaggccgaggaagcagccaaaggattacctgatatggattcttcgatccttatacaccacaatggaggtatcccagccaacaaaaaactctccacaactttgccagagatagaataccgagaaaaagggaaagaaaaggacaaggatgccaaaaaacacaaccttggaataaataacaacaatattctacaacctgtagactctaaaatacaagagattgagtatatggaaaaccatatcaatagtaaaagattaaataatgatcttgtgggaagtacagaaaatctcttgaaagaggactcatgcactgcttcctcaaaaaattacaaaaatgccagtggagttgtgaactcttcacctcgaagtcatagcgccacaaatgggagcattccttcctcatctagtaaaaatgagaagaagcagaaatgcactagcaagagcccaagtacacacaaggacttaatggaaaactgtattcctaataaccagctaagcaaaccagacgcactggtcaggctggaacaagacattaaaaagttaaaggctgacctgcaagccagcagacaagtggaacaagagctccgcagtcagatcagctccctttcgagcaccgagcgagggatccgctcagaaatgggccagcttcggcaggagaacgagctgctgcagaacaagttacataatgctgtgcaaatgaagcaaaaagacaagcagaatatcagccagttggagaaaaagctaaaagctgagcaggaagcccgaagttttgtagagaaacagttaatggaagagaaaaagaggaagaagttagaagaagccactgctgcccgggctgttgcgtttgctgctgcatctaggggagaatgcaccgaaaccttacggaatcggatcagagaactagaagcagagggcaagaagctcacgatggacatgaaggtgaaagaagaccaaatcagagaactagaactaaaagtccaggagcttcggaaatataaggaaaatgagaaggacactgaggtgttaatgtcagccctctcagccatgcaagacaaaacacagcacctggagaacagcttaagtgcagagacgataatcaagctggacctgttctccgcactgggcgatgcaaagcggcagctcgagattgcccaaggacaaatccttcagaaagatcaggaaatcaaggacctaaaacagaagatagccgaagtcatggccgtcatgcccagcataacatacagtgccgccaccagccccctgagccctgtttccccccactactcttccaaatttgtggagaccagcccctctggacttgaccccaatgcctctgtttaccagcccctgaagaaatgaaggccagctgtgtgttgtgcccaaaaatttggttaccggaaggcattgcaaaggagcgtctctggcagtcaagataaaaaaacagtttctattgt

SEQ ID NO: 400667 - DNA, 2353 bp, Homo sapiens
actggtaattctgcctactagttgcagctactcaagaggccggggcagaagaatcgcttgaggccgggaggtggaggttgcagtgggccgagatcgcaccactgcactccagcctgggtgacagagcgagactccatctcaaaaaagaaaaaagaaaaaaaaaattctagttctttcaggtaacccacatttatttggaatccaaatgaattcactgtgttcccacctcagctcattctgatccagttctttttcatgatttgaggaccataaagtactagtattctttaatgttaaagtaaccgctactttttatatggttgattttaaatgtttaaaatttccttttgtgaatttgctttacagttaccaagttatctcttagcagtttcaataattttgtccaacatgtgtttaacaatgtgtggttgaaaataacaggttctaagatgtatcttttattttgttttatttttccctttaggccttctcagtattttttgtttgtgtagcattcacgtcaaatataatatgcctgctgttcatccccatacagtggcttttttttgctgctagcacatatgtatgggttcagtacgtatggcacacagaaaggggagtgtgtttgcctacagtgtctctctggatcctctttgtttatattgaagcagccattagatttaaagatctcaaaaactttcatgtagacctttgtcgtccatttgctgctcactgtattgggtaccctgtggtaactttggggtttgggcttcaaaagttacgtaagctacaaaatgcggttaaggaagcaaaaagaagtacaaaaagagaacgagttttacatgcaacttcttcaacaagctctccctccagagcaacagatgctacagaagcaagaaaaagaggccgaggaagcagccaaaggattacctgatatggattcttcgatccttatacaccacaatggaggtatcccagccaacaaaaaactctccacaactttgccagagatagaataccgagaaaaagggaaagaaaaggacaaggatgccaaaaaacacaaccttggaataaataacaacaatattctacaacctgtagactctaaaatacaagagattgagtatatggaaaaccatatcaatagtaaaagattaaataatgatcttgtgggaagtacagaaaatctcttgaaagaggactcatgcactgcttcctcaaaaaattacaaaaatgccagtggagttgtgaactcttcacctcgaagtcatagcgccacaaatgggagcattccttcctcatctagtaaaaatgagaagaagcagaaatgcactagcaagagcccaagtacacacaaggacttaatggaaaactgtattcctaataaccagctaagcaaaccagacgcactggtcaggctggaacaagacattaaaaagttaaaggctgacctgcaagccagcagacaagtggaacaagagctccgcagtcagatcagctccctttcgagcaccgagcgagggatccgctcagaaatgggccagcttcggcaggagaacgagctgctgcagaacaagttacataatgctgtgcaaatgaagcaaaaagacaagcagaatatcagccagttggagaaaaagctaaaagctgagcaggaagcccgaagttttgtagagaaacagttaatggaagagaaaaagaggaagaagttagaagaagccactgctgcccgggctgttgcgtttgctgctgcatctaggggagaatgcaccgaaaccttacggaatcggatcagagaactagaagcagagggcaagaagctcacgatggacatgaaggtgaaagaagaccaaatcagagaactagaactaaaagtccaggagcttcggaaatataaggaaaatgagaaggacactgaggtgttaatgtcagccctctcagccatgcaagacaaaacacagcacctggagaacagcttaagtgcagagacgataatcaagctggacctgttctccgcactgggcgatgcaaagcggcagctcgagattgcccaaggacaaatccttcagaaagatcaggaaatcaaggacctaaaacagaagatagccgaagtcatggccgtcatgcccagcataacatacagtgccgccaccagccccctgagccctgtttccccccactactcttccaaatttgtggagaccagcccctctggacttgaccccaatgcctctgtttaccagcccctgaagaaatgaaggccagctgtgtgttgtgcccaaaaatttggttaccggaaggcattgcaaaggagcgtctctggcagtcaagataaaaaaacagtttctattgt

SEQ ID NO: 400668 - DNA, 1563 bp, Homo sapiens
ccgtgctaccccctccccccgggtgctggctccatgtctgtgtgaccggcctcaggggtagagtccaggcccgacgcggggcgggccagcggcggcggcagctgaggtgagagacggcggcggcggcgcgggcacccggccccccagcgggaggatgaagcggcggaacgccgactgcagtaagctccgccgccccctaaagcggaaccggatcaccgagggcatttacggcagtacatttttatacctgaaattcctggtggtgtgggcacttgtcctcctagcagattttgtcctggagttcagatttgaatacctgtggccattctggcttttcatcagaagcgtctatgattccttcagataccagggactggccttctcagtattttttgtttgtgtagcattcacgtcaaatataatatgcctgctgttcatccccatacagtggcttttttttgctgctagcacatatgtatgggttcagtacgtatggcacacagaaaggggagtgtgtttgcctacagtgtctctctggatcctctttgtttatattgaagcagccattagatttaaagatctcaaaaactttcatgtagacctttgtcgtccatttgctgctcactggctggaacaagacattaaaaagttaaaggctgacctgcaagccagcagacaagtggaacaagagctccgcagtcagatcagctccctttcgagcaccgagcgagggatccgctcagaaatgggccagcttcggcaggagaacgagctgctgcagaacaagttacataatgctgtgcaaatgaagcaaaaagacaagcagaatatcagccagttggagaaaaagctaaaagctgagcaggaagcccgaagttttgtagagaaacagttaatggaagagaaaaagaggaagaagttagaagaagccactgctgcccgggctgttgcgtttgctgctgcatctaggggagaatgcaccgaaaccttacggaatcggatcagagaactagaagcagagggcaagaagctcacgatggacatgaaggtgaaagaagaccaaatcagagaactagaactaaaagtccaggagcttcggaaatataaggaaaatgagaaggacactgaggtgttaatgtcagccctctcagccatgcaagacaaaacacagcacctggagaacagcttaagtgcagagacgataatcaagctggacctgttctccgcactgggcgatgcaaagcggcagctcgagattgcccaaggacaaatccttcagaaagatcaggaaatcaaggacctaaaacagaagatagccgaagtcatggccgtcatgcccagcataacatacagtgccgccaccagccccctgagccctgtttccccccactactcttccaaatttgtggagaccagcccctctggacttgaccccaatgcctctgtttaccagcccctgaagaaatgaaggccagctgtgtgttgtgcccaaaaatttggttaccggaaggcattgcaaaggagcgtctctggcagtcaagataaaaaaacagtttctattgt

SEQ ID NO: 400669 - DNA, 424 bp, Homo sapiens
aacttaaatggattgcgctgttctttgcacaagagcaaaaacatctgcctggagtgcagcttgtcctagtggctgggacttccctgatacacagctctcccccatctgctgtggagtggtctcactgacatctggggaagcaactggaagaagcttcatccctatttccaaaggttcacagtgactggcagctggtgttgagacagacccgccgccttctgtaggtggactttggtgctggccttggttgtctttttatggacatattgtgaggagtgtgattttcgtcctcctgccccagcagtgtggcagtgcattttttattctttcaagcaggttgtttcatggtgtttcttggcatacgatgggaacagaattaaagatatgcctcttttggggcgtggctttggcaccaaaggctttc

SEQ ID NO: 400670 - DNA, 436 bp, Homo sapiens
atctcttgaaactgttcactattggcacaagtacctataagttaaactaataatgccacattggacagtatatcccataccctaaaccataacgatatatatctaatcaataatcaatgccatatctgtatataaataaaaatttccaacaaacaactttgtatcagcccactctctgtccttctcttgttgtctttacaaatcctcttgtaactgctgtgaatcaaagtgtagattccaggcaaattgaacctttgctcccaggttataatccttaaacttgacccaaataaactgtctacttatattcatgttgtgtcagcttttttttttttatgtagacttatcatttagaatgtgctagagcagcctctatgaggggatccctcctttgtactccatttgctgtaacaccaaacgatgcagaaccaggtgg

SEQ ID NO: 400671 - DNA, 507 bp, Homo sapiens
gggtgggaggcccctgtccccagcagtccgcatcccagccatgagggcaagcaggcaccaaatcacccctaaagggggcagagctcctggcaggattccagttgagcttgggtgtgggcacgtgccctggaatgggttgtgtcctggtgctgccccctagaggccagatggccaggggcaggtcactgagaaacagagcagccatactgaatgggtgcgtctgggctgcaacggctgcggaacatggtggatttgattccagccttcttggatgactttctttacaaggcaaaaatagtatttacagactgggcattgtggctcacgcctgtaatcccagcacttggggaggctgaggcgggcagatcacctgaggtcaggagtttgagacaagcctggccaaaatggtgaaaccccgtctctactgaaaaaaaagaaaaattagccgggtgtggtggcacgtgcctgtaatcccaactactcgggaggctgaggcaggagaatcac

SEQ ID NO: 400672 - DNA, 381 bp, Homo sapiens
tctgagttctagccctgtgccaataactaaatgaccgggtgttcatccgatcatctgagaaacgtttattgagcacctattacgtgcccaatactgtgctagttactctagcggacaatgagatgaactactcaagatgtggcgttgctcttgagtagttccttgtctagttgggactggggcaaggagatgtgatgccagctgggtagggtaaaggctttaagggaacccatggtgggctgggccaagaaaggcttcctggaggaggtgccgcctgagactcaaaacaagtggtgttagcctggagtgtaggggagcgagccttgacgacagagacacgagcaggtacaaagggcagtgaaaaggtacatggccacgtgg

SEQ ID NO: 400673 - DNA, 388 bp, Homo sapiens
caggagccgaacaccacggtggatgtggccatagacacaggccgtgagagctagaagggccttggagccttgggcagccagaccagtaccccacgcctcctcgggaacccccgtccttttcctgcatgcagcagagagccagccccgcagggactcactaagaaatgattgctttccagccacctgtcctcctgcagtccctgccctgcctccgcagtgacccactaccaggctgggcatctgtggcatggaggatgggcagatcccagccctgccacttctgagccacctgtgtgaccttgggcaagtcacttgatcaccctatgcctcaattcccatctgtaaatggagatagtcaagggaaagaaagaaatgtgaaaatgctaag

SEQ ID NO: 400674 - DNA, 815 bp, Homo sapiens
gtgatcctctattccagtgcttagaaatacaggttcattattaactgttggatcatcactaaaacaccctactgtgctctacctaaacttcaaagtgcttaatggcaccaaataattatttcctaattccaatcaaatttattattctatcactatcagttaatatttaacagatagatttttattaagttaatttataccaatatataaatgattaatatccctttaatgttcctgtgatagtttctgttttgaagatgaatgcctgttatcacagagggtatcctagagatatgcaattaatgaagtctgagacaaaactgcagaaagtattatataaagggaattttatcaaaacattttttagtaactcatttatttatttaactgcaactttctatgtatgagactgtgttggaaacaatatacaagacaaatttcgcctatttgtaacttcaatttaaagaatttctccttccaatagaggaaatagatcattaaaatagtttttccttccagataatcttttctggattttcaggttcaggtgagtctcaaaggatgaatatgagccagccatagaaagaaaaatgggaataaggaagtgggaaacatgttttggtcaaaggcattgtacaggtcagagtctcagcaggtagcacacaccatagggatgatcaaggagactttaacagagagaccacttatgaacctacatgcagggtcaagagaaatcagcaagggaaaagctaggagctgtaaccacccttaggcttgaaggggcaagaggacggaacaattacctacactgagca

SEQ ID NO: 400675 - DNA, 225 bp, Homo sapiens
gatgtggcttgattcttccctcccctcttcttcctgtcctgatcatgacatgaaggctggagctgtagtggccatttggtctccatgaggaagaggtcaagacaatcatgaaggctcatgcctgtaatcccaacactttgggaggccgaggtgggatgatcacttgaggccaggtgttggagaccagcctgggcaacatagtgagacctcataactacaaaaaaa

SEQ ID NO: 400676 - DNA, 2794 bp, Homo sapiens
cttcaagattatcaataatcggagatacgtatattttatttgtaaagaaaacatggctgccctattcctacgtggttttgtccaaatagggaactgcaagactgggatatctaagtcaaaagaagcattcattgaagcagtggaaagaaagaagaaagatagactggtgctgtatttcaaaagtggaaaatatagcacttttcggctaagtgataatattcaaaatgtagtccttaaatcctatagaggaaaccaaaatcacctgcatttaactttacaaaataataatggcttgtttattgaaggattatcctccacagatgctgaacaattgaagatattcttggacagagttcatcaaaacgaggttcagccacctgtgagacctggtaagggtgggagtgtcttttctagcacaacacagaaggaaatcaacaaaacttcattccacaaagttgatgagaaatcaagtagcaaatcttttgagatagcaaaaggaagtgggacaggtgtccttcagaggatgcctttgcttacatcaaaattgacacttacttgcggagagttatcagaaaatcagcacaagaagaggaaaagaatgctctcatctagctcagagatgaatgaggaattcttgaaagaaaataattctgtagaatacaagaaatccaaggcagattgttcgaggtgtgtaagctataatcgagagaaacaattgaagttaaaagagttagaagagaataagaaattggaatgtgaatcttcatgcatcatgaacgccactggaaatccttacctagatgacattggtcttctccaagctctcactgagaaaatggttttggtatttctgttacaacaagggtatagtgacggttacacaaagtgggataaattaaaactattttttgaattatttccagagaaaatatgccacggcctccccaatttgggaaacacctgttatatgaatgcagtgttacagtctctactttcaatcccatcgtttgctgatgatttacttaatcagagtttcccatggggtaaaattccccttaatgctcttaccatgtgcttggcacggctacttttttttaaagatacctataatatagaaatcaaggagatgttactcttgaatcttaaaaaggccatttcagcagctgcagagatattccatggcaatgcacagaacgatgctcatgagtttttagctcactgtttagatcaactgaaagataacatggaaaaactcaacacaatttggaagcctaaaagtgaatttggggaagataattttcctaaacaggtttttgctgatgatcctgacaccagtgggttttcttgccctgtcattactaattttgagttagagttgttgcactccattgcttgtaaagcttgtggtcaggttattctcaagacagaactgaataattacctctccatcaaccttccccaaagaataaaagcacatccttcatctattcagtctacttttgatcttttttttggagcagaagagcttgagtataaatgtgcaaaatgtgagcacaagacttccgttggagtgcactcattcagtaggctacctagaatccttattgttcacctcaaacgctatagcttgaatgagttttgtgcattaaagaagaatgaccaggaagtcatcatttccaaatatttaaaggtgtcttctcattgcaatgaaggcaccagaccacctcttcccttgagtgaggatggagaaattacagatttccaattattaaaagttattcgaaagatgacttctggaaacatcagtgtatcatggcctgcaacaaaggaatccaaagatatcctggctccacacattggatcagataaggagtctgaacaaaaaaaaggccagacagtctttaaaggggcaagcagaagacagcagcaaaagtaccttggaaaaaattctaaaccaaatgagctagaatctgtatactcaggagatcgagcattcattgaaaaagaaccgttagctcacttaatgacgtatctggaagatacctcactttgtcagttccacaaagctggaggtaaacctgccagcagcccaggcacacctctctcaaaagttgactttcaaacagtgcccgaaaatccaaaacgaaagaaatatgtgaaaaccagtaagtttgtagcttttgataggattatcaatcctactaaagatttgtatgaagataaaaatatcagaattccagaaagattccaaaaagtgtctgaacagactcagcagtgtgacggtatgagaatctgtgaacaagcccctcagcaggcactgcctcaaagctttccaaagccaggcacccaggggcacacaaagaacctcctaagacctacaaaattaaatctacagaagtctaacaggaattccctacttgcactgggttccaataagaatccaagaaacaaagacattttagataagataaaatctaaagccaaggaaacaaaaagaaatgatgataagggagatcatacctaccggctcattagtgttgtcagccatcttgggaagactctaaagtcaggccattatatctgtgatgcctatgactttgagaaacagatctggttcacttacgatgatatgcgggtgttaggtatccaggaggcccagatgcaggaggataggcgttgcactgggtacatcttcttttacatgcataatgagatctttgaagagatgttgaaaagagaagagaatgcccagcttaatagcaaggaggtagaggagacccttcagaaggaataa

SEQ ID NO: 400677 - DNA, 381 bp, Homo sapiens
gcaatttacttcacttcttttgccttaatttccacatctgtaaactggtacctttctcagaattacagggaggattaattaggttagtattggtaaaagactttaaaaagtgcttggcccataggtttgttactattattatattttgtggcatatattttattttacttttcactatattgtctacattcagtttctattgttttgttatgtatttcttctgataccatggaagatatagtagattgtattttccaaagatggccacgacagtatctctcatttcatttgttcttactatttgacttcaacaatccccttttggaaaggtggagcctgtgtcctctccctttgaaactggactggcatttgtgactgcct

SEQ ID NO: 400678 - DNA, 466 bp, Homo sapiens
aattgaatctgtaaggtctctgtttagaagatctctttttctgaaagcctctttgcctttcattataaaagagcctggtactgctctctgttttaaaaatccagctggaaaattacagagcacaaacatttgcccatcggttcttcatttggagaaaacagaaatatgtcttcaaaatggaggctgacatttaagtatttattcctatcagcgggagctgtagtttgtattttttgcattttacttctgtaaccacatataatatatcttggcttctgcgtggtgtaactgtaaaacaccatctttattttatgtcattttgtgattgttgttcaaatcctccaatgatctgtttctgagcccctcagaatctctaaaaaaatcaaggtatccttccttttctttttggctctattaaattgaaacataaatggttgattctaataataaaaattggctcataaat

SEQ ID NO: 400679 - DNA, 729 bp, Homo sapiens
acgcaatttagctaagtataaaatattaatgcacaaacatggctttaaatatagccagagaatctggcaggaggaagccacccaacagccccctctacacatcactctctcaaatcaaaggctgggtgaataatgaacatacccatttccaggtcgaaagtacaggtggatcgtgacaggccatctcaaatcctgggaagggagggctgctaagaatgacagccatttcagaaaacaggcctgggttagcagttttattcagacagggtttggcctcctaacctctcctgctttccctggactctctttgaaaaagggtgactatattctttttttttttttttttttgaaacagagtctcactctgtcccccaggctggagtgcagtggcgcaatattggcccactgcaacctccacctcccagattcaagcgattcccctgcctcagcctcccgagtagctgcgattacaggcacgtgccaccacaaccagctatttttttgtatttttagtagagacggcgttttgccatgttggccaggctggtctcaaactcctggcctcaagtgatctgcccacctgggcctcccaaagttctgggattacaggcgtgagccatggtgcctggccaggaccagtatattcttgatgctcagggatgtggtttgtacccagggcaacatagaacagggttacaagcatgggctcaggtgtcagattacctaggt

SEQ ID NO: 400680 - DNA, 479 bp, Homo sapiens
tctcatccagactagagtatcaataattagcaccatttgaatgtttatgtcaaataatttgtggcccttaagacagagttggtggatgtttccttgtgttcaatacatgaaaaggctttcaaatctttaattagtgtgtcttttatttccattatttgaagatgaaaatgattcagtcaaaaaaatttcagctccaatattaagattatcttttgaggaagcatataaaaataaaaacaatgacaatatccaaccccatccaccccttccccagtagaagttgatatctggctagaatgagcattaataaataacctagagaaatacagtattgtacagttttatattttcaactttttattaaaatttttaccacaagtgaataatttttgttaaaatctaactttttgtactctgtattggatatgatttgcttgcctaattaaagtctacctgctgattatactagaaaaaaaaaa

SEQ ID NO: 400681 - DNA, 372 bp, Homo sapiens
cctcccacccttaatgaaattctgtttatgtgcacaagaaacttcaaaataccaccatttgatctccctgaaaggtgaagaaaagggtaaccacaaagaaccaaccagaataaaccacaggggacttaagtagtaacaaagaatgcaaggaagacccaaatctagcccaggatgatttctgacacaaatgaaagccgttatgtcttcaatcactgccagtaggagaatgttagacttggctgaagactttccataacaaagtcttgtgcgtgggcctcttgagagtgtttcctatatgtcctggggcactataaatacaggctgtggtaggccagacccaagcaaagggggctttctcttgtcaccctacct

SEQ ID NO: 400682 - DNA, 591 bp, Homo sapiens
gccgtgtctccgggctggggtgctgctggtgcagcagatgaggcacctgaaagcactccgaggaatggccaagccctcatcgcacagccagagctggtcacagtgctgctctgcacaccagcctctagtcataaaaataaggaacacactaagaatcacacccctgtgatcccacatcagatgtctcctcccatcctgagttattaataattttattaagaatatgctttcaacacgcttgtatttatatatgtacttaacaagaaatcaccaagactgcagcgggcagttcctcttccctttccttttcattgcccagagaaagggagacagcagtggggtctccttccgccctcaggcacagcttgctttgagacttgcagtatcacaattagtgttctcttgcagcttggacttaaccagcttaaattaccatctgactgaagggtgcgagtgctgggtctgcatgtgtttctttccatcaggggaaagatttgccagtgcatgtttgaacatctgcaagtttgggtttattttggctccaaatctgtatgcaaactgttggtcataaagagttagaagttcacagcg

SEQ ID NO: 400683 - DNA, 376 bp, Homo sapiens
ttgaaccaaaagtttaccggggagtgtctccctgcagtctacattttaaaccgatctctcgggtgattcttacccacctacaaatttgagaatctctgcgtttatcagttttgcacaggctggtttcctccggaatttctgctctagtgtctctgaacatttaagacccatctcataggtcatctgtgatgctttcaaagttgactagctcctccctatgcctgtgttcccacagtaagtttgcatcttactctgtaagtatcggggccttccccgacaagactgtgagctctttgagagccgagatcagttttgatggatttctgcacctccagagaaaagtagacacagtacacatcaattaataaagaaatct

SEQ ID NO: 400684 - DNA, 235 bp, Homo sapiens
ctttctggacaacccaagataacctccccatctcacaatccttacatcatagattccaggatcaggaagggggcacttcggagagtgccaaccttagccaaccatagccactgaggactggggggataagactggcaagatccaatccatatgttggcaaatggatttctggtgctcagaaatgaccaatctttaggaagcaacgagtttctgaaaacaaaacaacaacaacaaa

SEQ ID NO: 400685 - DNA, 428 bp, Homo sapiens
caagattgacaaaagactggccctaatggagtttacagttctcagggagatacagtcaacaccatcataactggtttgggggaacaggggagatgaactggaccattctaaaaggaggcaagaggtgcatctgaaattggaaactggagaaaccaggggagacagacctgttgatctggaaggcatagaacagaaagaaccagagaatagtcagggactgacaatgaggttgtgattgttgacagccggaccaggccaggaaatgaagaaggtaaggagagaagcgtactgtctaacacccctcgaatgcacagttgctagggccagtaaagatcatcgggctactcatctctcaatttaggtaatgtaaatgatgcatcttattgacaatccatatccttaagaaattgtgaaatgagtcttttact

SEQ ID NO: 400686 - DNA, 528 bp, Homo sapiens
tgctagctgggagtcctgagagcatatccattagtggagcagaagttcaaaactctgcctattttcaatacccctttcttacactaaacaaaagccttaagccattgtggaagaggcagagtaccccctcctccaacctcaaagcctagtccatgatggactgcttctggtgatgggatagggacaaatgctgcctacccctggggagtgggcaggaaaccctgttggactcaggaccctgcactgatataagacagagatctgttactgccagggtagaggcagagacccctttagcaccacctgcagttacaagacatagttttgttagtggtgggggacaggaacaccaagaaagtcccacccccaaggctcagctgcagcaaaaaatttgtcttatgctgagttggtaccaggagactcaaaaggtcccccaacccccactatgaacttaacactgagaaaccttcaagatcaatctaccactgggaaagagagacaacctactatcctacaggcgtgcaggac

SEQ ID NO: 400687 - DNA, 678 bp, Homo sapiens
  misc_feature (171)..(171): n is a, c, g, or t
gattacggtataagatcactgtcttcaagcagtgcgaggcaacgccacctccccggctaaaatcgacatcacctttgcgtctagtaccgcgacggtacccccggactcaggcttccagcaccaaacggacacaacaacgccatttttgcaagaactacgcatgcatttccncagtaagcgcaagtgagcaactttcgcgtttgatccttaagcccacacattctacactggaaggctttgacttgggacatcgaccaggcaagagtagggcacacatgcggtgggacaccgctattacagcatgattgaatgctacacaaacaaaagatgctcttgtggcgatgtatggcctgtccctgttgtccagctaacaaaattaagggggcagatgaacacaacacaaattcaaacacaacagccgatccagcagttggcatttccactcagacttaccttaagaacaagtaatcatattacacataaaccttaaaaatggatatgtaccagcttcatttctcactgtttcgttagatgaaagtttcagatgctgggccaagcgcagtggctcacgcctgtaatcccagcacttttggaggccaaggcgggcagatcacaaggtcaggagttcaagaccagcctggccaacatggtgaaaccccgtctccactaaaaatacaa

SEQ ID NO: 400688 - DNA, 834 bp, Homo sapiens
gaggactgtcgaggaggagtgatgagaagagggggtgccctgcaccccccgagaccacgggccacgctgccacttgccaggcgccccccttcctcccaggcgaggggcaggtgttccacactgattctcgtgactttaaggaccagggatttgaagaggtattagctcttcccaggaagggaggaagtttctggaagagaagggaaagacggcagacgctgcgctgggaccagcagagcctgaggagctgtgggaagctgacagagcccagccaaaggagcgggaaggagccgcagccccaggctggcactgtgttctgaaagatttgaactcaagctgctttttacggaagaggggccacttcagagggcaccccagaatttggttgagctcttctactctggatgccccctgctctgaggagcctgccactgagaaccaaagaagataagaggacagatactttttcttcaagcacagagctggtgggttggagtcaggcatctgcacccctagtggctgtctggtgaggaatttcttgtttcttcccagcttgcggcttcagtgcttgatggggctgcctgttggtggatcagtttttgcagtgcctggtaggagtggagagccgtgggaagaggtcctgcggcgcccaagcctgggttcacccagatagtcttccagtggagagagagagaagcaaaaaaaaaaaaaaaaaaattgggggccgcgcgaaagtttaaacactggggcgggccaggagaaggaagtccgggacggccgagggtgtcccaaacgggccgggggaccgtggcttctaggccccccccgcggggt

SEQ ID NO: 400689 - DNA, 544 bp, Homo sapiens
cctggcttgaacttaggcatcctagtgcctgcgctgctggggctcaaagggaacctggaaatgaccctggcatcaaggctttccactgcagccaacattggacacatggacacacccaaggagctctggcggatgatcactgagaaccaaagaagataagaggacagatactttttcttcaagcacagagctggtgggttggagtcaggcatctgcacccctagtggctgtctggtgaggaatttcttgtttcttcccagcttgcggcttcagtgcttgatggggctgcctgttggtggatcagtttttgcagtgcctggtaggagtggagagccgtgggaagaggtcctgcggcgcccaagcctgggttcaccccaagactaagttctttcccaagttagagaagaagagagaaagcaaaaagaagagaggaaagttctcccttcccctcctccgtgcctgtcatgtcctctaagccagagccgaaggacgtccaccaactgaacgggactggcccttctgcctctccctgctcttcagatgg

SEQ ID NO: 400690 - DNA, 836 bp, Homo sapiens
gaggactgtcgaggaggagtgatgagaagagggggtgccctgcaccccccgagaccacgggccacgctgccacttgccaggcgccccccttcctcccaggcgaggggcaggtgttccacactgattctcgtgactttaaggaccagggatttgaagaggtattagctcttcccaggaagggaggaagtttctggaagagaagggaaagacggcagacgctgcgctgggaccagcagagcctgaggagctgtgggaagctgacagagcccagccaaaggagcgggaaggagccgcagccccaggctggcactgtgttctgaaagatttgaactcaagctgctttttacggaagaggggccacttcagagggcaccccagaatttggttgagctcttctactctggatgccccctgctctgaggagcctgccactgagaaccaaagaagataagaggacagatactttttcttcaagcacagagctggtgggttggagtcaggcatctgcacccctagtggctgtctggtgaggaatttcttgtttcttcccagcttgcggcttcagtgcttgatggggctgcctgttggtggatcagtttttgcagtgcctggtaggagtggagagccgtgggaagaggtcctgcggcgcccaagcctgggttcaccccaagactaagttctttcccaagttagagaagaagagagaaagcaaaaagaagagaggaaagttctcccttcccctcctccgtgcctgtcatgtcctctaagccagagccgaaggacgtccaccaactgaacgggactggcccttctgcctctccctgctcttcagatgg

SEQ ID NO: 400691 - DNA, 945 bp, Homo sapiens
ccgtggccctgcgccaccttccccgctcaaggagacctccttttccatcgggctgcaagtactgtttccattcctcctggcaggctttgggaccgtggctgctggcatggtgttggacatcgtgcagcactgggaagtcttccagaaggtgacagaggtcttcatcctagtgcctgcgctgctggggctcaaagggaacctggaaatgaccctggcatcaaggctttccactgcagccaacattggacacatggacacacccaaggagctctggcggatgatcactgggaacatggccctcatccaggtgcaggccacggtggtgggcttcctggcgtccatcgcagccgtcgtctttggctggatccctgatggccacttcagtattccgcacgccttcctgctctgtgctagcagcgtggccacagccttcattgcctccctggtactgggtaagaaagggagggcatagaggagtaaggagtgccgccccagagaacactgcacctggcacttccactctctctttttgtttgttgagactcctttatctcttctcaccctgcctgcccctcctcccacttgctcaccaggtatgatcatgattggagtcatcattggctctcgcaagattgggatcaacccagacaatgtggccacacccattgctgccagcctgggcgacctcatcaccttggcgctgctctcaggcatcagctggggactctacctggaactgagtgagccaccaagagtgtggcttcttggagtcctgggtggggttgggagagatggtagtagtttgcaaatgtgcaagagtttcttctgtgttcttaaactatttggtttgaacacaggttgtaataattcctgatcttagagatttgaagctaagtactgatctcaaattcaagcaggcatcaggggcaggggaaaagtatcaga

SEQ ID NO: 400692 - DNA, 1753 bp, Homo sapiens
  misc_feature (989)..(989): n is a, c, g, or t
  misc_feature (1335)..(1335): n is a, c, g, or t
  misc_feature (1632)..(1632): n is a, c, g, or t
gtttatgcttcctgtattttgaggcactgttattagatgcagaaacatttacagttttgtcctcttgattatttgacccctttatcattctgaaataacctttatttctggtaataatcattatattaaaaaccattatttggccagacatggtggctcatgcctgtggtcccagcactttgggaggccgaggcgggtggatcgcctgaggtcaggagttcgagtccagactggacaacgtggcgaaaccccatctctactaaaaagagaaaaatagcctagtgtggtggcacacgtctgtagtcccagctactcagaaggttaagtcaagataatcacttgaatccgggagttggatattgcagtgagccgagatcacgccactgcaccccagcctgggaagcagagcaagactccatctcaaaagaaaaaaaaaaaaaaaaaaacaaaacaggcctggtgcagtggctcatgcctgtaaacccagcactttggaaggccgaggcaggtgaatcacctgaggtcgggagttcgagaccagcctggctaagatggtgaaaccccgtctctactaaaaatacaaaaattagccaggcacggtggcagctgcctgtaatcccaagtacttgggaggctgaggccagagaattgcttgaagctgggaggcagaggctgcagtaagccaagatcatgccattgcactctagcctgggtaacagagcaagactccatctcgggaaaaaaaaaaaaaattacttaatattaatataaaattagtgttttatattagtagtataatactgtttttgactagtgttaaaatgacatatctttctctacccttttgcttttaatctagatatcatgatattcatttattttttaatttgtaaaaatagagatggggttttgccatgttgcccaggctggtcttgaattcctgggctcaagccacctgcccacctcaacctcccaaaacgctgggattntaggcgtgagccaccatacttggccatatcattatattttcaaatggtttcttgttttttcgtttttcttttaaatgtaatctgacagcgtcttttaattaatgtgttttggaccattcatctaatgtgtattaatttttactcatctggatcttaggggaaataacctatcagattatagggaagtgtttctcaaagtatggttccccaaacagcacaacctgggaattgttagaaatgcaagttctgggccgggcactgtggctcatgcctgtaatcccagcactttgggaggctgaagcgggtggatcacctgaggtgaggagtttgagaccagcctggctancatggtgagaccccgtctctactaaaaatacaaaaaaaattagctgggcatggtggtggtactttttaaaatttttttagagacagaatatccctgtgttgcccaggctggtctgtaaatcctgacctcaagcaatcctcctgcctcagcctcttaagtagctaggtacaagccaccatgcccagctatattgacttgtttttgagacggagtctctgttgcctaggctggagggcagtggtgcgatcttggctcactgcgacctccgcctcccgggttcacgcgattctcctgccncagctactcagaaggttaagtcaagataatcacttgaatccgggagttggatattgcagtgagccgagatcacgccactgcaccccagcctgggaagcagagcaagactccatctcaaaag

SEQ ID NO: 400693 - DNA, 709 bp, Homo sapiens
  misc_feature (291)..(291): n is a, c, g, or t
  misc_feature (588)..(588): n is a, c, g, or t
ttttttccaatatcttcatgacattcaatgagtagcaaagtttgaagataacttctggaatttcatctaatgtgtattaatttttactcatctggatcttaggggaaataacctatcagattatagggaagtgtttctcaaagtatggttccccaaacagcacaacctgggaattgttagaaatgcaagttctgggccgggcactgtggctcatgcctgtaatcccagcactttgggaggctgaagcgggtggatcacctgaggtgaggagtttgagaccagcctggctancatggtgagaccccgtctctactaaaaatacaaaaaaaattagctgggcatggtggtggtactttttaaaatttttttagagacagaatatccctgtgttgcccaggctggtctgtaaatcctgacctcaagcaatcctcctgcctcagcctcttaagtagctaggtacaagccaccatgcccagctatattgacttgtttttgagacggagtctctgttgcctaggctggagggcagtggtgcgatcttggctcactgcgacctccgcctcccgggttcacgcgattctcctgccncagctactcagaaggttaagtcaagataatcacttgaatccgggagttggatattgcagtgagccgagatcacgccactgcaccccagcctgggaagcagagcaagactccatctcaaaag

SEQ ID NO: 400694 - DNA, 101 bp, Homo sapiens
tgttgggattactggcgtgaggcatcgtgcccagcaagctactgtcttttctttgaccctttccagtttttgaagataaagcaggaaataatcttctctga

SEQ ID NO: 400695 - DNA, 379 bp, Homo sapiens
agccctggcattgcttgttccccgactgtggtgctgtgtcctgggcactctgaggattcccttcttcttgaagggtatcagagcccggtggggtcagccacctgtgcggaatcctctccagacaagtcagctctggtgcagaggcggctcgtggcttgtggaacatcagaagacagaggagcctcctggggactgagctccagcaccaacaaggccgggcccctcccagcaggttcccacatggccttctcatcaagggctccttggaggaaacccagctgtgtgccgaccacagagaacctcgctcaagctaggaaagttcttggactgcttaataaaatcgcaatgtttgttaataaaatcatactttagttgcccc

SEQ ID NO: 400696 - DNA, 343 bp, Homo sapiens
tcatcccaaggggccacattttattgggagaacctcagaagcccaaggtactgctcagttctgaggcctgagacccaagctgggtgcacctgggctggaacagtcacatccccagcccatgactagggttacgtattttaaaggacaccccaatttctcagaagcagcacctgacaagaccatgggtgtaaagacaggaaggatgttccaggcagctcccggggagggtctgactacctgggtcaaccacaagctagctccatgggaaccaatggcagtgaccagcgggcaccagctcctgacacagaaatgctcttcttccccctcagtaccccggaggcca

SEQ ID NO: 400697 - DNA, 256 bp, Homo sapiens
gaactcctccaaacactttctgaactccctacccctcagagcccctttacaagccacacgggatgtagatctcagccccaaagcattgcctgttttcatcatcgacttcattcacagacatagttctaaatgactttcagctatttctagaaattagacacatcttcctaagcgaaggtttaccatgtttaaggttccatgaaagaatgtgccctaagttgttgcccagcccctggctgagaagaaacgggcgtgt

SEQ ID NO: 400698 - DNA, 474 bp, Homo sapiens
caaaccaacaacaaaacacaagaacttcccctgtcatatctagagaaaatgactttggggcacagtttaaaatgaatcacccacatacataagtggcgtggtaacaacacagaagatgaactgaaaaattaaaagtcatcagaatatacagattcttgcccccgatatggtgtagtgagtagaaaaatccatataagaaatgaaaacgaacctggcaaataccctgtttctaaatgcatgccacatcacacaaaggaaattcacacaaaggaaattcaaggaatcatgaaacattagaacaaggaagccccagtgaggtttacagtgtgcgtttttccctgccacctacacattccacagccaagtatcacagcattgtctcaatgactaggcaacacgggctatagatgacacataaatgtataaagtaccaccagaatacctggtggaaagtattcttttatgatgatcagt

SEQ ID NO: 400699 - DNA, 171 bp, Homo sapiens
cacagatccaatagaggaaaaatactgtcttcaggcagataggggatgtgccactggggccgagatgacgagtttcgtgaaaaacagagttcaaaagaggaggctcttgagtgtaaagataatttgaggggaaaagaaaaagatagaatgtgactggaaggaacggaatag

SEQ ID NO: 400700 - DNA, 222 bp, Homo sapiens
accactggtctgtttggccctccgggtcccctctctagctggcctcccatcttcccctgctgagccaggttggtttcggaaatgcccttacagcagcaggcaaagtgaagcctagagctaggaaaggcgctcacagtacctctcagatggtttcaaaacccctgagggcaaaagaagagctgctctatgaagtccagatagtcctaaaactccaaaaatctc

SEQ ID NO: 400701 - DNA, 646 bp, Homo sapiens
acccatgtttaaaactttaacataagtagcataatgacaccattaaaaaaggaaagagaagcttgagggaaagaacatcctcagatgacgcggcttcagaatgcacgcagcacacacggaaagcaagagatgttcaactgtgtattaaacacaacaagccagcctgcaacgtcagcctgcactgtggcttccaaaagattatcttcatctcactgccatattccacgtgccttacagcccaggagtatatcgaggaagaccctgctttctgatcacacatctttttcattagacttggcttggtggactcttgagttttccatgaaccaagctctccctgaccgataagagcattcaagagattatagcacaggcctgggaggcactagaagtgaccagggctgaggtattccaagctgtgctggggagtcagcccctggcacccaccttgactcttgaccccggcacggactaagtgtgatcttggctttccccagtgttcttgcttgtacagtgcttggaactgtgcccggcctacagcgagccccatgcaaatgtttctacatgccccatggaggactctatgcatctggggttagatccacatgggccactttatccactgactgtgacgcctgggtgggca

SEQ ID NO: 400702 - DNA, 414 bp, Homo sapiens
ttaataaaaaggaagttttttcgttttagcaaaaacaaaaaacaacaaaacccattttagcaaaaacgaacaacaacaaaacccatttacctaatacgacagtgagaaccaactcattgtgtaagattatttattaaaaggaactaaaacatttaaggcatcttaaaaatgaaaattatggccgaaagtattctactcctttcgaaaatattccaagtttttgtcatttcaaaacacaaaacttcctgatcaaatgtgtaagtcattaaaaggtctggcttttaccttatatatacaaggactaaaacatctgatttactctcttacccagatttttacatgtaggtatgcatgtatatgaataatgctcgtgcatataaatgtactgtatgcatacttacatcatgcatacat

SEQ ID NO: 400703 - DNA, 678 bp, Homo sapiens
gttttgccaaacccaatcagaaggactgcctggactctgtacatgagcctgttgtgacctgattctcatgtattctcgacacaatgctgaaggtccaaagccctggcacttctagggagcaaatacctccagagttgagtaaacctgaatcaggaacactttctctgactgaattctacctcaacaatatgcatattcaaaaaagaaaaggtaacatccttggaaaatatgtgctgggaactgccatattcaaaatacttctaaaataaatggagagtttttttttttttttaaaccaggaaaaaaactcttgtgaagaattagtttctaagtttttggtttctaagtagtttctaagttttctttgtattttattgatctcaaatgttgttgggttttatacatcacgtaacttttgatgttacttacagaatactctaattctatcattagatgtgtttatttctgaaaagtgagtgattgttgaatagaatcccattagcaacattaatgttacaatttaaagacaataatttcttgtagaactatgacgaggatacaagttttgcaatgttaaacatttttggaggtgtacttcccttgagtgggcacagttttagtcattttgatctatttttaagcttcagtttgaaaaagtcatacctcatttgtccttat

SEQ ID NO: 400704 - DNA, 410 bp, Homo sapiens
agagatcctaccgtctcagtctcccgagtagctgggcctacaggcatgtaccaccatgcctggctaattttataatttttttggtagagatgagttcttgctatgttgcccagaatggtcttcaactcctggcctcaagcgatcttcctacctcagcctcctgaagtgctgggattataggcatgagctaccaagcctagcctatatggtgtatttcatcaaacctaagacactgttgatcctaagatgcacccaggttttagagatgttaaaatgcacctccacctccacaaaaaagtatgctttttagaaatgaaaataaccactacctactcagaatctttagataaaaaatgttgtcaggccacaagcagaggggcttccccgcctctgaccttcttcacacgggg

SEQ ID NO: 400705 - DNA, 392 bp, Homo sapiens
gatagggtttctccatgttggtcaggctggtcttgaactcccaatctcaggtgatccgcctgcctcggcctcccaaggtgctgggattacaggtgtgagccaccacgcctggctgacctcccactttctataggaaggattcacttcacttccctgagctttaagttccttgtcagtatatgtgaggccatgccagagcgcactgtagtgctatgcacacctaagggactggttagtagataccatttcgtggcagcaaacagaagccgaggataagggggctctcttacaagtgaattcaaaatttgggttaatagtaaatgtcagttttttgtttttttgttttgaggcaaagtcttcgtcacccaggctggagtgcagtggcaccatct

SEQ ID NO: 400706 - DNA, 219 bp, Homo sapiens
agtgacaactactttaaaaatggcacagaatggaaaagataggttaacaaagtagcattttagaaaattgaacacttccccacttatgagtaaattttgttgtaaatactttataaaatgtgtattgaaatgttgctttaacctaacttgaaaaacattgatgaaaaatgtaacgacaaaggtcaacagtttcataaagcctttagccaagttttcata

SEQ ID NO: 400707 - DNA, 497 bp, Homo sapiens
gcacatgcctataatcccagctactcaggaggctgaggtaggagaattgcttgaacccgggaggcagaggtttcagtgagccaagatcgtgccattacactctagcctgggcaacaagagtgaaactctgtctcaaaaaaaaagaaagaaagtcactgaacttcagaggaagaggccagaattcgagctttgccactaactggtagatggccatggacaagctgaataacctctctgggcctcagtttccatatctgcaaaaatcagccagcggtaccggatgctcattaggtccctttccagttccacattcttgtactaatgtaatttcctgctcatgaaaaacatctactactagaaaagaacttccatgtttggtgttcaatataatgggatgttgcccttatttcaaaagtggagtagctggaaagatcaagaaaaaatataaaattaggaaacacatctaataaatccccaaagacttgttaaatgaccac

SEQ ID NO: 400708 - DNA, 379 bp, Homo sapiens
ggctctctaaggagattcttctggcaaaagaccttggctcagactttcaggtaaggtgcctcatgcacagatcctattatttatttttttcctttgttttgttttgtttttcttgagatagggtctctccccgctggccaggctgaagtgcagtggtgcaatctcagttcactgcagcctcgatatcctgggctctagccattctccccccctcactctcctgagtacctgggactacaagtgagcaccaccacacccagctaatttttatttattttttattttttttgagacggagtctcgctctgtcacccaggctggaatgcagtggcgcaatctcggctcactgtaacctccaactcccaggttcaagcgattc

SEQ ID NO: 400709 - DNA, 1622 bp, Homo sapiens
cggccgccaagctgcagatcggcgagctcagcggcaaggtcaagaagctgcagtacgagaaccgcgtgctcctctccaacctccagcgctgtgacctcgcctcctgccagagtacgcggcccatgctggagacggacgccgaggccggggactctgcccagtgtgtgcctgctcccctgggcgagacacacgagtcccatgcggtccgactctgcagagccagggaggccgaggtgctgcctgggctgagagagcaggccgccctggtcagtaaggccatcgatgtcctggtggctgatgccaatggcttcacggctggcctccggctgtgtctggacaacgagtgtgctgacttccggctgcatgaggcccccgacaacagcgagggccccagggacaccaagctcatccatgccatcctggtgcgcctgagcgtgctgcagcaggagctgaatgccttcacgcggaaggcagatgcagtcctcgggtgctctgtcaaggaacagcaggagtccttctcatcactgccccccttgggctcccaggggctctctaaggagattcttctggcaaaagaccttggctcagactttcagccacctgacttcagggacctgccggaatgggagcccaggatccgagaggctttccgcactggtgacttggactctaagcccgaccccagccggagcttcaggccttaccgagctgaagacaatgattcctatgcctctgagatcaaggagctgcagctggtgctggctgaggcccacgacagcctccggggcttgcaagagcagctctcccaggagcggcagctacgaaaggaggaggccgacaatttcaaccagaaaatggtccagctgaaggaggaccagcagagggcgctcctgaggcgggagtttgagctgcagagtctgagcctccagcggaggctggagcagaaattctggagccaggagaagaacatgctggtgcaggagtcccagcaattcaagcacaacttcctgctgctcttcatgaagctcaggtggttcctcaagcgctggcggcagggcaaggttttgcccagcgaaggggatgacttcctcgaggtgaacagcatgaaggagctgtacttgctgatggaggaagaggagataaacgctcagcattctgataacaaggcctgcacgggggacagctggacccagaacacgcccaatgagtacatcaagacactggccgacatgaaggtgacgctgaaggagctgtgctggctgctccgggatgaacgccgtggtctgacggagcttcagcaacagtttgccaaggccaaggctacctgggagacagagcgggcagagctcaagggccatacctcccagatggagctgaagacagggaagggggccggggagcgggcagggcccgactggaaggcagccctacagcgggagcgtgaggagcagcagcacctcctagctgagtcctacagcgctgtcatggagctgactcggcagctgcagatcagtgagcgcaactggagccaggaaaagctgcagctggtggagcggctgcagggtgagaagcagcaggtggagcagcaggtgaaggagctgcagaaccgcctaagccaggtg

SEQ ID NO: 400710 - DNA, 351 bp, Homo sapiens
ctcatcataattaattactcgttcctctctgttctcctagcgtttcttcacacatctgcttacccatttttgtaagtcctcctaacacaatattataaggcactagatgctcaatcaatatttattagtttaaagctaccagctttagggggactcggttttaaatagatgagaagtgataaaacacctggagatagtactgtcagctgagataacatgtcatagaaccagctgctcagcataattgaaatttcattcggattatatgggcctactttacacccatcttactatggtaaatgagatcatgctcattaagcattaggacactacttggttagcgcatctagg

SEQ ID NO: 400711 - DNA, 282 bp, Homo sapiens
tgtgtgagaagctcgggcagggctctccgggccattttctcactggtcctgaggcctgctggctgtggcccgagggcagggacggcatggtggcctgggggaaccgtctctgcaggcacttctcacctcccggctccagtgaattacaggccctgtggggcttgatgccgtggatggaagttttgtagaaggccatgtttgtgtcttctgtgaagtatgaaaggtgccagtttgaaaaccagagaaaaagaaagcgtggattaaaatgcagtccccgtttta

SEQ ID NO: 400712 - DNA, 289 bp, Homo sapiens
tgggaattgattatatcagtatttactcacacttttatagatagatagatagatagatagatagatacagaaagaaatataaatataactgtgttacatatatatgtctatacagattccctcagctgtgttcactcatagagcctgagaatagagcctggagcagcatcttgttattctggaaaggaaggatgtgccaaaagccaggctaaaggggctcccactggccaaatctgtacattttgaacaacaaaataaatagtgatagtaatagatttataattctttg

SEQ ID NO: 400713 - DNA, 398 bp, Homo sapiens
ctaaggtggtttcataggcacagctgggttgggagcagggatggatgaagtggtgaggaaggaccacagaaaggccctggtcctgctccaaggccatgatcccggagccctatggaaaccatggccctgcacctttcatgcctggcattttactgtaagggaagtttggggtcaccactatttgtgagtcatctaggccacaatgtacctacaccttaatccctatcaaagatggtggaggcccttgggcagggccagagctctgccctggtgctcaggacgaccaggtgcctaaccttggtatgggccttcctgccactttcatccaagttttgaactgcgtcccaggagggtgactgtcaggatgcccagtgattagtcgtgggagcagagggggc

SEQ ID NO: 400714 - DNA, 547 bp, Homo sapiens
tgagatggaatctggctctgtcacccaggctggagtgcagtggcatgatctcagttcactgcaacctctgtctcctggattcaagtgattcttctacctcagcctcccaagtagctgtgactacaggcgcgcaccaccatgcccggctaatttttgtatttttatttttattttatttatttattttgagatggagtctcactctgtcgcccaggctggagtgcagtggcacgatctcggctcaccacaacctccgcctcccaggttcaagtgattctcccgcctcagcctcctgagtagctgggactacaggcgcttgccaccatgcccagctaattttttgtatttttagtagagacacttcaccacatttcactatgttggccaggctcgtctcaaactcctgaccttgttatgtgcccagcccaggatgagtttcttatagtcagttaggagccaagacttccagatgctggctgaatggcttctggaaacacttcttttttgactagggcttaaccacccattattcaggtacaaactctta

SEQ ID NO: 400715 - DNA, 548 bp, Homo sapiens
tgcactaatactgtaaaaaatatgaccctggacagcacagatctgatgttcatgaaccactacactatggtgggggaccgtggctcatgcctgtaggctgaggcaggccaatcacttgcgttcaggagtttcatggcgaaactcttgtctttacaaaaaaaatacaaaaaaagttagccagggatagtggcatgcacctgtggtcccagctactcaggaggctgagatgggaggatctcttaagcctggaagttcaaggctttagcttctacaaaaaaacaaaagcaggctggacgcagtggctcacacctgtaatcccaacgctttgggaggctgaaggggggggatcacgtaaggtcaggagttcaagaccagcctgaccaacatggagaaaccccatctctaattaaaaaaaatacaaaaatcagccggacatggtggcacatgcctgtagtcccatctactcgggaggctggggcaggaaaattgcttgaacccaggagacggaggtcacagtgagccaagcctgggaaacagagcaagatgcc

SEQ ID NO: 400716 - DNA, 592 bp, Homo sapiens
gagacggagtcttggtctgttgcccaggctggagtgcagtggcacgatcttggctcactgcaacctccgcctcccaggttcaggggattctcctgcctcagccttctgagtaatgggattacaggtgcgggccagcacacctggctaatttttgtatttttagtagagacagggtttcaccactatggtcaggctggtctcctgacctcgtgacccacttgcctcagcctcccacaagtgctgggattatatgcatgagccactgcacctggctgaaaaccacaacatcttctaaagataaggctttagcttctacaaaaaaacaaaagcaggctggacgcagtggctcacacctgtaatcccaacgctttgggaggctgaaggggggggatcacgtaaggtcaggagttcaagaccagcctgaccaacatggagaaaccccatctctaattaaaaaaaatacaaaaatcagccggacatggtggcacatgcctgtagtcccatctactcgggaggctggggcaggaaaattgcttgaacccaggagacggaggtcacagtgagccaagcctgggaaacagagcaagatgcc

SEQ ID NO: 400717 - DNA, 521 bp, Homo sapiens
agcaggaggatggaaataataaagatttcagcagagataaatgaaatagagaaaaataatcatcatagaaatcaaaagttggttctttgaaaagatcaacaaaattgacaatctattagctagactgagtgtttaaaaaaaaagggaaaaggcaaataactaaaatcagaaatgaacaatgggactttgctgctgaccttatagaagttaaaaggattgataatactataaacaactgcatatcaacaaattagacaatctaggccaggcacagtggctcacacctgtaatcccaacactttgagaggccaaagcgtgaagaatgcttgaggccaggagtttgagatcagcctaggcaacacagtgagtccttgtctctacaaaaaaattagccatgtgtggtggcatgcacccgtagtcctagctactcaggaggcttaagcccaggagttcaaggctgcagtgagccatgattgtgccactgcactccagcctgtgtggtagagcaagaccctgtctca

SEQ ID NO: 400718 - DNA, 217 bp, Homo sapiens
ctgtaaccatctccacaattaggattccagcagtaacatcaccctaaaaaattctgttatccctttgtagtaacccccttcccccatataacatctggcaaccactcttctccatgactacacttttgtctttttgaaaatgtcacacagatggaatcatatagcatgtaagctttcgatacgggcttctttcactcataaatgtctttgagactta

SEQ ID NO: 400719 - DNA, 233 bp, Homo sapiens
  misc_feature (180)..(180): n is a, c, g, or t
cccaaagcaaataaatttttattaagtccagtaccttgctttttaaaacaacacgatagcttacaaaagaaatgaagctttagtacacactcttggaaataccttttcagatgatggtgaaaataataaaactgcaatgaaaataatgacacccataataggacacactgggtgcatacnatattctcggcactaggctgagcaacacagtgggtattttacatacacattcc

SEQ ID NO: 400720 - DNA, 423 bp, Homo sapiens
cataagaagttataaaagtattaattttgggaactgataaatgtccatgaaatcttcacaatttatgttcagagattgcagtaaagacaggtgtaagaaattataaaactattaattttgggaactgatatgtgtccatattaaagtgaaatcttcacaatttatgttcctctgctgtgactccagccagtccctctgtttggggtccctgacttcctgcaacacattgtgtgacttcttttactctctactgtctctttgaatgcaacactacaacctcctgtacccttagaacccctaacaaagtgtggcctcttatcaattttatgtcactcttttatatttactaatattatatacattgtattttctcaggacttattttcctggcaagggtataataaacaggcatttttaacaact

SEQ ID NO: 400721 - DNA, 401 bp, Homo sapiens
cattaagttacatcagaagttattattagagtgatgtttaatctcaccctaatgtaacttctgattagcaagcttccattctctctgccaaatataactcatgttaacgtagaaaagtgttatcattagttaccagagcaaatccagtgtactggattgtgaatgcatagtctttctaattaggaaaatgagagtgtgtattgtcttcttaatttacatttataaaatcctcataaaatacagttaagtcagggtcttttaaaagagaagaattcaactgaaacctgtcattctctagccgggcatggtggctcatgcctgtaattccagcacttggggaggctgaggcaggtggatcacttaaggccagtctggccaacatggtgaaactccatctctac

SEQ ID NO: 400722 - DNA, 384 bp, Homo sapiens
ctgagctcagttgtccagttgggaaagagatcaaattaaaagctacctgtgctaccttagcatcattctttatcttcctctaactaacacaaaatcatctttaagcttaaactttccatcactctctgtgctttgagatgtaaatttgccactgttttctctaaaattccataagggcttcaatcatgtgaaacagataaactttactttttccagttacacaaaagcacagtttgaatcccgtgttgtttgttttgttttgagatggagtttcgctcttgttgcccaggctggagtgcaatggcttgatcttggctcactcaacctctgcctcccgggttcaggcaattctcctgtctcagcctcctgagtagctggaattac

SEQ ID NO: 400723 - DNA, 395 bp, Homo sapiens
cacatctgccactcatcaacatatatcagttctggatgcttggataattcctctcattccaacaagttagcaaagcaaaggagatgccaccagaatccagaattgtttaccaaactctaattaaatgcacagctctacagagtattgccaaacagactggacacataatattaatgcagaaacaagagttacattttgaaaatgccatcaggcagaacagaaaaaaagaaagctgcatattggtgacatctgtgcgcatgtgaggaaatccacacaagaaggtaaagatatacaggctctactcaatagttgtctaaactaggaaaggtaccctggactgccattctacgcagttgagagaacactggatgtgttgttgactgctgtagctcaat

SEQ ID NO: 400724 - DNA, 921 bp, Homo sapiens
aattgaggaaggaaacaaagcttaaggcagtgattgataggttatttcttggacacagctgaacgtatactgtgcgcctgcaactttccggtggtttcggaccggacttcagtgaagccagtgaagtcggtcgacttgcagaacttcctttcagaggggcgtacacagcaccgcggccgtgtgcctgtgatctccttctgagtttgaaaaagaagatcctagacaccgagccaaatatgtttgcataaaccgggagacttgtggctctattttgtaacagcttggcgcagggcagctggtttggagatgtctctgttcttcccttggtgggggtgccggaaaaaatgtgctgcctgggcgatcgaggttggggcaaaagcgttgcaaaggaaaaggtgggaggactctactttcacatttcccaaaagagttttaccataagactatttctggattgttctaacgtgaggatattgggagcattttgaaaatactggaggaaaagctgtcactgggcgatttaaatccgggacagattcactctgtcatccaagctggagtgcagtgagccgagatcacgctagtgcactctagcctgggtgacagagcgaaactctgtctaaaaaaaagaagttatttttatcaatatatattaacatgcaatggatttattattattattattttatttatttattttttacttgagacagagtcttggctctgccacccaggcctggagtgcaatggtacaatcatggctccactgcaactccggctcccgggtccggtgattctcctgccttagtctccgaagtactgggatttgcgggccgttcaccatgcccgtaattttgtattttggaccgatggggttcacctgttggccggtggtccgaacccggacctcaggtgttcccc

SEQ ID NO: 400725 - DNA, 1212 bp, Homo sapiens
aattgaggaaggaaacaaagcttaaggcagtgattgataggttatttcttggacacagctgaacgtatactgtgcgcctgcaactttccggtggtttcggaccggacttcagtgaagccagtgaagtcggtcgacttgcagaacttcctttcagaggggcgtacacagcaccgcggccgtgtgcctgtgatctccttctgagtttgaaaaagaagatcctagacaccgagccaaatatgtttgcataaaccgggagacttgtggctctattttgtaacagcttggcgcagggcagctggtttggagatgtctctgttcttcccttggtgggggtgccggaaaaaatgtgctgcctgggcgatcgaggttggggcaaaagcgttgcaaaggaaaaggtgggaggactctactttcacatttcccaaaagagttttaccataagactatttctggattgttctaacgtgaggatattgggagcattttgaaaatactggaggaaaagctgtcactgggcgatttaaatccgattccccttgtcggcaaagccaggcgctgatagcgttatggctgccatgagagtcagcagtatcccagcttccaaggatgggtgtaaggtgggggtgaggaagaaaaggaacttgaagctgcctcctgtcccagaatcacaagacatctgttaagcccttactacctcattcactccactcacattaggttgacccacttgggcagcaagacaagcaggcctgcaaacttccttttcttcatcagccacagagacatcctcagctattattctggattaaggcagagatctccaaacagcagactaagatcagcctctagatctcaaagccttactgttatctctccaagtcagtggctgatctcagagaagcttctgaatagtgactagcaaagagtcactcaggctacttacaaatccaggacagcagcgtttttttttttttcttttttagagacagattcactctgtcatccaagctggagtgcagtgagccgagatcacgctagtgcactctagcctgggtgacagagcgaaactctgtctaaaaaaaagaagttatttttatcaatatatattaacatgcaatggatttattattattattattttatttatttattttttacttgagacagagccattgcattccagcctgggcaacagagtgagatcccatttca

SEQ ID NO: 400726 - DNA, 526 bp, Homo sapiens
tgggaggctgaggtgagagaattgcttgagccctggaggttaaggctgcagtgagctgtgatcatgcttctgcactccagcctgggtcacagagcaagacctgtctcaaaaaaaaaatagtattgtggtaatgtttatttcctgattttgataatatcactgtagttataaaaaagaatgttcttatgtgtttatatatatataaaagagagagtgatggtcgggcacagtggctcacgcctgtaatcacagcatgttggaggccaaggtgggaggattgctcaaggccaggaattggagaccagtctgggcaacatagcgagatctcatctctactaaaaattaaaaaattaactgagcatggtggtgcacagctgtggtcctagttgcttgggaggcagaggtggggaagatcacttgagcccaggagatcgaggctgcagtgagccataattgcaccactgcattccagcctgggtgacagagggagaccctgtctcaaaaaaagaaaaaaaaaaaaagcaga

SEQ ID NO: 400727 - DNA, 417 bp, Homo sapiens
gtgatctgcccgcctcagcctcccaaactcctgggattacaggtgtgagccaccacgcctggccttaaacaaggttttcttgagctgccatcttgacagatgccatctaacatacctgtttttaaaatgtgttaacaacacttgtttttataaattttctattgtgtcttttttttccaaattgttgcttcacagtgtaaaaatgctactgtaatgattagcttgaatgatgtccatacttaaggcatacagtgctgaattttacattagatttacaaaatcgaatattagattttctaaaatctttccctctcagccataaagtgtacttggtcttatagcagtgaacaaaaaccatcactaagaaaaaatgtttgtttatgtaaagcaaataaataattatctttaacatgcacc

SEQ ID NO: 400728 - DNA, 505 bp, Homo sapiens
aattgaatctaacagtttataaaaagaataatacaagatgaccaagggggatttatcctaattacgcaaggttggaaaagtctattaaattacaaaaaaaaaaattaacgtcccacctctttttcttcctaccatcccattttctgatactatctgccgttaacaaaacaaaccatcattcaaaatacgaggagtctgatgatgcagcttttagagatcaccatcccagggcccagggcagggtggagaagggtgggtaatagataggcagcagcaaacacaggatgacagtacttgcagcataggggtgattaggaattggaattttgagagggacttaggtcatccagaagtcaatgtaaacagacaaaaagaaggcgtaagagcacagtttgctaaacatcgaaacttgaaagtctaggaaagtaaaggaatcacaaaaaaagatttagagggtagttagaaaagcagagaagtgtaacatctaactcagttaaaaaaaaaa

SEQ ID NO: 400729 - DNA, 231 bp, Homo sapiens
gacctgacccgccctctagccttacactatcccgggacaatacgttgttcaggtcagcatgtcagccgcctcccacaccctgcgtgaggcagcagagaaaggagggagcggaaggtttgaacgtcagctggagtctcacctgcacctggacatcctgcacatctctaggaggatggtctcatttccccactgagacctactggcagagtgagaatataggcccctaaatgc

SEQ ID NO: 400730 - DNA, 745 bp, Homo sapiens
tatacatccacttttaagttaacacttttcacatttctcaaagaccgtatctttaaaataaaagattaagagctaccttagctggtaataaaactggtatacttaaaaaaaaatcagagattgttactttatcattgtacttgtttggcatggctaagatgtgttactggtcactaagggtgagatttcacttccctaacctgttcttgaaggccttcaacagatcccacttcttgttccactctagtagccacacttctaaaaatgatctgtgcaacatatataatatgcaagctgtagaatgctggctgttaaaaacggggtccattttcaaatacaacatttttctaaaccatgcacaaaagaacagccctacagggacactcttccatactgtatacatgccgttgccactacatgtgaatactggcagacgttagtggctaaagataaacattagataaaacataggtcttcattgagcagacctgaaatagcagagcaatgaagtacattacaaatcagcatcccactacattttaaaaaacaaaccaacaagggtgtcatgccaccagtcaaaaggtactttgcttaaactggcattctttaacatgcatgttgtagtggtaagtacttcatttcatacagccacagtaattaatactttgctaagggctacccagctgctaaaaactgctgttatctcatactgagaatgctagttctatacctttgctctcaggct

SEQ ID NO: 400731 - DNA, 502 bp, Homo sapiens
gtggtggcgtgtgcctgtagtcccagctcctcgggagtctgaggcaggagaatcgcttgaacccgggaggtggaagttgcagtgagccaagatcttgccactgcactccaccctgggtgacagagtgagactccgtctcaaaaataaaataataaaaaaaaagggaagaaaactagatgctatctctgggccaatctaccaagccatcatcagccattagtagcccccactggctaacatcaatttaggtgtagtcagtcatccgagagacctgagggactgggacacagtggggatgagttttgatgggcagggagatgagcactttctccagcaaggaactgaggagccacatccactccctgagccctggcatatctagattaggtcctgagtgaggactggagtcgcttcgccctgtttctaaatttttcttaatacttagctcaacaggaatcagcacgctctgtctgcagagggccagatagtcagtatattagtg

SEQ ID NO: 400732 - DNA, 427 bp, Homo sapiens
ttgcagcccctgcctttggtcctgttcccttactctcagagcagttcttgtaccacctcctccaggaggctcgctgtgatgtacccaggcccactgagtgtcggtactcttcctcctacaacagctctcaaattcagctagaattcaagttcagccagcaccccaggcagagcctccagcccacttaactgaggccagttcgcaagccactgcccacgaaacaccagaagctgaggcggggaaagcaggctccttgatgagccacaagggctgaggaggtggctgcctggcataagccgaccgctgtggacggctgtgccacagcacaggcccggagccaggagcccgctctggctctgcagcccggccacgctggggctcccatggggttgctggggccaggctgactgcgagagggcagcggccg

SEQ ID NO: 400733 - DNA, 515 bp, Homo sapiens
gcaagagaaaatctgcagagacgaccttctattcatttctgtaatagttttcttgccacaggagacttaagaagatttgtacagcctgctctcttttcattagcagaaagtgcaatgctgctgggtaagttaatgtgtaagactgtagaaaagaagagtgctgtatatatgaatttttattccatttaaaaaactatccttttacttaagtacaatacagctgaaaatataaataaatggtaaatatatttaatattttcttaatcatagacttagcatctggcttcattctgtttgttgaatgcaattccatggttcactaggttttggtatgaacatgttaaaattatcgttactgaactgacaaggaaacttgattgaatttttaacacagtcataattcttgtcgtcaaatgtaacagtatttaatgatttctttgtatttccatatgcaacaaaatgcatcagtgttttcaggcttagtttggccattccattaaactgccaggactaaa

SEQ ID NO: 400734 - DNA, 670 bp, Homo sapiens
ccagatggactttcctgagaaagcaatagttttcctgagatctgtagggtaagtaggagttcatcaggcaagagtaagacgaagtgtggagagccttatagtcaatgagagaatgtaaaagagacaggagaagattgaggaaaagagatggtggatgctagcatgtttaaaggtctagaatgaggagaataagaaagagtttgattatcaaagagattgagaggtagtgaaaggccagatcatccagatcatgtagaatgtgttaggagaaagttaggaggctgggcatggtggctcatgcctataatctcaacacttcggaaggctgaggcaacaggatagcttgagcccaggagtttgaaaccagcctgagaaatataatgagatctcatctctacaaaaatttttttaaaataaaaaatcatccaaatgtggtggtgcacacctgcaatcccagctacttgggaggctgagttgcaaggcttgcttgagcctgggatgtggaggttgctgcagttagccaagatcgtgccactgcactcaagtctgcgtgacagagtgagaccctgtctcgaaaaaaaaaaaaggatttcatcctaagagcaatgaaaaaaactactgatagattttaattcatgatttgacatgatcaaatatgcacttcaaaaag

SEQ ID NO: 400735 - DNA, 494 bp, Homo sapiens
tagagaaagggtctggctctgtcccctgagcttgagtatagtggcataatcatagctcactgtagcctagaattcctgagctcaggtcatcttcccacctaagcctgcttagtagctgagactacagccatgagctatgagctaccatgcctaacactatcctcattcttaatcagattaccaaagtcacaaaacacttgagaaaaatggaatttttaaaatgaaaatttatgaaaaggctgggcatgttgtctggaatgacaaatgggtagtacgggacaaaaaggaagttgcagaggtagaaacccacaaaaagtatggttctgggagcttttatcaattggcagaggttggggatggctctcgactcctccagatcattacatggtttaggtcaagcttaaccagatgcccaaggcaactaacacctgcacttagtaactttacaattctgtgctattgctgtttctcagttcatttgcttctcttgggac

SEQ ID NO: 400736 - DNA, 190 bp, Homo sapiens
tctttccacctacaggttcccgacttcctatttatgtctcatgacacttcttagcattaagatagtaaggaatcatatttattgtgcatgttatatattgtctgactccctcactagaatgtaaggtcacagggaagtgatctctgttttgtttgctgatgcattccaagtgactggtaaggtcgtctca

SEQ ID NO: 400737 - DNA, 310 bp, Homo sapiens
gggaggggaaggagggggaggagagggaggagggggaggagagggaggaggaggaggaggtgaaagagggggaggaggggggaaggagcacagctttcgacccaggctcttcaggtgaaggaaggaaagaaagactggttcccagcgcgccctaggagagaggccaggaatacaaggccacgaaagcccatctgtttccaggcttctgtgatttgttttcccttttctttgaataccccttgatttatgagactaggggtgaagatctcttctcatttaacttactttgaagctgattcaagttgttcca

SEQ ID NO: 400738 - DNA, 366 bp, Homo sapiens
agacagaagaggcgacgttgctttcttaaccactggatttgcagtgctgtggttctcagaagaggccaggacaggttaatccactcgcttgggaggttgaatgtacagctggtataaaaatggtgctttgtcgtcatgaagaaggtgtattctgggatcaaaccacctggctggagatgcttactaacctcagtttcttcatctgaccttacctttctaaaagaataagaagaagatgatacatattcctctaaagtcccaacaggaaccttttcccctcactccctccccagagatgtgtatcatttccatgagtgtctgtacttttacaacatgtgcatattaataaacaaaatatgacaaatt

SEQ ID NO: 400739 - DNA, 743 bp, Homo sapiens
cgggggtaccggtccgtgtttctagaaaaaataaaaattcggttgaatgtacagctggtataaaaatggtgctttgtcgtcatgaagaaggtgtattctgggatcaaaccacctggctggagatgcttactaacctcagtttcttcatctgaccttacctttctaaaagaataagaagaagatgatacatattcctctaaagtcccaacaggaaccttttcccctcactccctccccagagatgtgtatcatttccatgagtgtctgtacttttacaacatgtgcatattaataaacaaaatatgacaaattattttgtcttaatatttgcataaatctagccatactctacaccacttttgcaactttcactattatatattttgaagattatccgtgtttatgcacataagtttatcattttaactgttgaatagtggttcattatatgaattaaccataattcatctatttccctgagtgacaattaggtttctttttgtttttatgctctgatgaacaatcttgcaattattatctttgtatatgtcttcatgtataagaaattctccagggtagacacttagaagtaaagggtctgactcagagagtctgtggtattttaaaatgtattggttattgtcaaattgttcctcaaagtagatgtaccaatttacattcctacagtggtatataacagtttttttttctccacatcctcttcaacactcgtcattaccagc

SEQ ID NO: 400740 - DNA, 745 bp, Homo sapiens
gagcggtggaggagttcgatcgtggtgggaggcggactcgtcggttgaatgtacagctggtataaaaatggtgctttgtcgtcatgaagaaggtgtattctgggatcaaaccacctggctggagatgcttactaacctcagtttcttcatctgaccttacctttctaaaagaataagaagaagatgatacatattcctctaaagtcccaacaggaaccttttcccctcactccctccccagagatgtgtatcatttccatgagtgtctgtacttttacaacatgtgcatattaataaacaaaatatgacaaattattttgtcttaatatttgcataaatctagccatactctacaccacttttgcaactttcactattatatattttgaagattatccgtgtttatgcacataagtttatcattttaactgttgaatagtggttcattatatgaattaaccataattcatctatttccctgagtgacaattaggtttctttttgtttttatgctctgatgaacaatcttgcaattattatctttgtatatgtcttcatgtataagaaattctccagggtagacacttagaagtaaagggtctgactcagagagtctgtggtattttaaaatgtattggttattgtcaaattgttcctcaaagtagatgtaccaatttacattcctacagtggtatataacagtttttttttctccacatcctcttcaacactcgtcattaccagc

SEQ ID NO: 400741 - DNA, 797 bp, Homo sapiens
agacagaagaggcgacgttgctttcttaaccactggatttgcagtgctgtggttctcagaagaggccaggacaggttaatccactcgcttgggaggttgaatgtacagctggtataaaaatggtgctttgtcgtcatgaagaaggtgtattctgggatcaaaccacctggctggagatgcttactaacctcagtttcttcatctgaccttacctttctaaaagaataagaagaagatgatacatattcctctaaagtcccaacaggaaccttttcccctcactccctccccagagatgtgtatcatttccatgagtgtctgtacttttacaacatgtgcatattaataaacaaaatatgacaaattattttgtcttaatatttgcataaatctagccatactctacaccacttttgcaactttcactattatatattttgaagattatccgtgtttatgcacataagtttatcattttaactgttgaatagtggttcattatatgaattaaccataattcatctatttccctgagtgacaattaggtttctttttgtttttatgctctgatgaacaatcttgcaattattatctttgtatatgtcttcatgtataagaaattctccagggtagacacttagaagtaaagggtctgactcagagagtctgtggtattttaaaatgtattggttattgtcaaattgttcctcaaagtagatgtaccaatttacattcctacagtggtatataacagtttttttttctccacatcctcttcaacactcgtcattaccagc

SEQ ID NO: 400742 - DNA, 870 bp, Homo sapiens
taatcttttgcccttacatgtaaaaggcctaaatgctgttccttttctaaggcagcccctgaaaaatgactaattacgagtaaattttctgcatcctgggatgcagccagcccttcagaagagatttgattctgtagctcaactagaggagttactccttcttcacataaacactccttttcaagttcaagaaacatctgcactgagtctgtgtcagagagctgttctgcatcaatagtacccacagtacatgctgaatctgaaacaagtccctctaacccctgagcagttctgtttgccacctcaccgagaatatcctcacctgtaagaacacaatcgcaatccaggggtatatccttgggaacagtagccaactggtccttggctggctgtgggtcatcagggcaacaaatctgaccaagagataggtggccaaaagtcctcaagacagcagctaagcaatcggatccatcctccaccactgctgtgtttgcttgttctctttcttcaaaaatatctgccaggctgttcttctcatctgccatcagaaaagtcttttccctgtctgacagtttctcttcctcccactctccctcagcctccatcataatccatcgctcatcctcctcaaactttagctcagactctgttttctctctcaggctgggggttatgagaacatgcaattctggatctaacagctcttcactcaggcaaggggagagaggtggcatttccacagtgcaggctgtgtccccaagggggtgctgcttctcactgaagcctcccttagctaaactttttgtggccctcggccaggttgcacttgagaatctggattcctgcattacatctgtgttaccacttgtt

SEQ ID NO: 400743 - DNA, 720 bp, Homo sapiens
ggaactaagtgatcaacaactctggcagcagtttatgtaataaaagtcacatatataccttttgtagaagaaaagttatcagtcatacagatcacatccattacaagggataccagcaccttgttatctttacgtaggcaacattaccagtcttcaaaggactgattataatactatttggggccatactcatttttgttttttttgagatggtcttgttcagtcacctagactggagtgcaatggccatctcgactcactgctccctccgttccatgggctgaagcgatccagtaataagcatcatcttttattatgaagacaataaaatcttgaggttgtgttcacttaatctggttgcagttggtcttttgggagggaataaactagggccatcaataaaattccctttgtagaaaaaattttcttaaattaaataaaattctggctaggtgtggtggctcatgcttgtaatgccagcactttcggaggccaaggcgggtggatcacttcaggtcaagagttcaagaccagtctggccagcatggtgaaaccccatatctactaaaaatacaaaaattagccaggcgtgacggcacacgcctgtagtcccagctacttgagaggctgagacaggagaatcgcttgaacccaggagacggaggttacagtgagctgagatcacaccactgcactccagcctaggcaacagagtgagac

SEQ ID NO: 400744 - DNA, 612 bp, Homo sapiens
cagaggatccccccaacactctctatcctgtggctgggtgcagtggctcaccatggcaaaatcctgtctctactaaaatacaaaaaatggccgggagtggtggcaagcacctgtagtcccagctactcgggaggctgaggcatgtgaattgcttgaacccgggaggcggaggttgaagcgatccagtaataagcatcatcttttattatgaagacaataaaatcttgaggttgtgttcacttaatctggttgcagttggtcttttgggagggaataaactagggccatcaataaaattccctttgtagaaaaaattttcttaaattaaataaaattctggctaggtgtggtggctcatgcttgtaatgccagcactttcggaggccaaggcgggtggatcacttcaggtcaagagttcaagaccagtctggccagcatggtgaaaccccatatctactaaaaatacaaaaattagccaggcgtgacggcacacgcctgtagtcccagctacttgagaggctgagacaggagaatcgcttgaacccaggagacggaggttacagtgagctgagatcacaccactgcactccagcctaggcaacagagtgagac

SEQ ID NO: 400745 - DNA, 754 bp, Homo sapiens
tagaacaactttattgagatataattcacatatcacacaattcatacatttaaagtgtacaattcaagtatacaattcaaagtgcacaattcatgcaataacttttggtatattacattattaatttttttaaattatggcaaaacatacataacataaaatattcacattgttgtgcatcatttcttatgcacaatatctggaacatttttgttctggaacatttttgttattcgaaacagaaattctgtaaacattatacgataattccccattcttcctccctccagcacctggtaatctctctctctctctttcttttttttaaagacaaggtcttgcactatcactcaggctgaagtgcagagggccaatcaaatctcactgtagcctccacctcctgggctcaggcaatcctctgcctcagcctcctgaatagctgggactacagtgtgagccaccacacctgggtgccctctggtaatctctgatttgcttcctgtctgtatgaatttgcctattctagatatttcatataagtggagtcatacaatatttgtccttttgtgtctggcttatttcacttcacataatatttccaagattcatccatatcagcatgtttcagatcctgattcctttcctatggccaaataatatcccgttgtttgtatataccacattttgtttactcattcatctgctgataggcccttgggttgtttcccatttctggctactgtgaataatgctg

SEQ ID NO: 400746 - DNA, 405 bp, Homo sapiens
tctcatgctgcagggtggctgcgtgtgctccgtacatcacacccatatttcaggtagggacggttcccggagggtgctcagcaccatgccgactactgctggctggcacgttcgcacgtggccatgtcagctccaaggaggatgctgacatcctgctggctggcacgttcgcacgtgtccatgttagctgcgagggccatgccgacatcctgctggctggcacttccacaggtagccatgttagctgagagggcgatgccaacatcttgctggctggcacgtttgcacgcggccatgttagctgcgaggacaatgcttctgcaacttttggtttcttccctttcatcctcccacccctgaccgtttttgcctgggagcaagtgcctaataaattacctgcactca

SEQ ID NO: 400747 - DNA, 604 bp, Homo sapiens
tataagtaggattaatgcccttataaaagaggcccaagacagattgtaaacattcagagaatagtacccagtttccttattttacagataaagcttttatgaatagaagataagtgacttgttcaagattattttgttattgacaacctaggtcatctgagtctgaatgtaaatctggcttagttttacctgtactatcctctgaaagttcccaggccactcaccaggttacaacaacacatcaaattcagaaacagttactatattcacattatttccctctacccataaaatagttaatcaaaagagtacatgcaagcaaaagggcaggaagccacctagagaagctgatcacagccatctgtggtatgaggtatatggtaaatattcaaccatttatttaatggaatgagtgaatgttgaatctgtgatcatgcaaatgataatatcaatgtacaaaatgaaaatgtgatttttaaaatttctgtatttatttgaaccagattgtattataacaggatagttagattgctaatgtcatttcttataaaatgatttttcatgatttgaattttctaaaaacaagcctaacttctacctttta

SEQ ID NO: 400748 - DNA, 860 bp, Homo sapiens
gaccgcgtgctctttgattcgcatcagcagcggctgatggcccctcaagtggttcctgtttgctgtctcccagcattgcggcaggtaggcggggtgcagcacagggcacaggcccctgggcctcagtgcctccgacgtgccagttccggctgtggcggcgggggggttgcggtgtgcctgggcctttggctttgccccgaccaccctctaacagggctctgcccgctcttggaggtgaagggtacacttgtgcctggaagctgatggaaagggcttctgaatggactgcaagcaactggctcagtggtcacctctgaagtcaaataaagggaaaagtttggagcacaagaaaatgagtacatagatcaaagtgtccatgtcccatgtccatgtctggcattttctctgccttatgtccctgatggtgggggaagagaagggaacagatttacagagacccggacagctcacctccaataggagccatatatcccagtggactggacgcacccaacacggaggcagcagccgagacttacaccgcaaggccttggctggctctattgggccaggaccccatactgggagtgcggggtaggggcaggttgaattcagtttccagagtcaggcccctgtcagaggggggaagtgattgtgaaatattttaaatgcacagagatgagctgatggacaggtcttaatgaaggattaaatggacacgtttaagagcctggaaagcaccaggcagagttccatgggcccagaataactgcttgtctctgaccttttctgtcttgggaacatgcacagctttagctgaaagaactgagctcatggcaccagtttcaacccctcgcttc

SEQ ID NO: 400749 - DNA, 297 bp, Homo sapiens
aggcttgatctctgagaccaaaagtgaaaggacaaaggatgaaccaaattaggatgaaaagaatgatttttttccaacctctttttgctttgtgttgtggtaggatcatttgaggtcgggaaagtttctgaagctgtcgtgcgacaggtggttacccagtgtacagaaagcataggggctgacctgtaactggtcaaataacatcactggcattattaatccagggttagggaggcaatgaaaggacctgaataggagaggttacaggaccaaacagaatgttcatagattaaaaaa

SEQ ID NO: 400750 - DNA, 275 bp, Homo sapiens
aggtcaaatcccagcttggccactgcgaggctatgactgagcaatcattgagtctcgctatgtcccgattttcttgcctgtataatggggatgatagcgttgtgaggatttagtgagttagcacgtcagaagcccctagggtggtgctcagctcatagccagtgctcagcagaaattagctgctgctgctgctgctgttccagggtgaaggggtagaagcttatgccacactcagtggagttttttaaacagtgctatagaccaaggctgtgttt

SEQ ID NO: 400751 - DNA, 726 bp, Homo sapiens
ctacacaacggatgtgtagctctagcacctgacaggtagaagataccctcaaggcgcctcctgtagacacacgggtaaactcacacactatgtcctatccccacgcagcagtcggaggaaccaggctctgggccaggacagtttccagtgctgtgaagaaacgaggtgagcagtatccaaggggctcaaggataatctgctgatttctttcttgtctttcacacagagaggccaccagcaggaaagcagtgggagttgggtagctgctggggccagcatgtcctcttccacactacctgcctttcagaactctgctcttccgcttgtcccgaagtcagggctggcaatcttcataatcaaaggggagttggaaaagaacacccactaagaggcctccatggcagatgtcaattaaattgccccccccccccaaatctcatgacagtttattcacatcagtagtgtgggaagttacaatgttttttttaaaaaaagcttctttccttggctttccatttctttgaaaaaagggtttcttttgaatttttaaagctctgccatactgaacattcctgtggaaaggtttaaaatgcagagcctgaggtttttgcttttcagaaaaataaaaatcatagagattagctagtgtaaatgttaagctataaattatgtttcaaactgtgaaaaaaaaaagttttaaagaatgaatgaaataaaacctgaaaa

SEQ ID NO: 400752 - DNA, 473 bp, Homo sapiens
ccacttccctcccaccccgtcccgtccgaggcctccgccccctgcccctccgcaccccccgacccaggcacgcgcagcggggagcagcccagcctagcccgtctcactgctttggttttgaaaggtcacgtatttaccttagaatttcagcaccttccaacttactgttttaagtacctttaaccagcctattggctaaaaaccgaaacggtcctacccgcgactaccactgctccagtgacaatgctctgctgctacttatttaacggagctcaaggtttataattctcgaaagaatgttgttccccttccctttcccctcccgcctctgtacttgactctcgtaagaatgaaatcagaaaagtgcagaaaacacaggctcctagcaatggttcggggcaaacgggaggggcgaagaagggctggagccgccccggggccctcgctccggcctcgggagggcgtcgcggccg

SEQ ID NO: 400753 - DNA, 369 bp, Homo sapiens
gaattacattaactataaataaatttcagcgtgaatatagatattgccagcattaaaggaagatggcatgacaactactagcaaagttttcatttaatttctgaaagtgccaaagtggttcacaggaacagagatacaattataactggtcacctacctcatggtcacctcaggagagcaggcaaaaactacctgctacgtagtgggcaaacccatttaacaccaaactcagagttccttccactgtgctgtaaagcctctctagcatatgcttgtgaagaaaatggctactttaaataagaagcactactgagaaatgttctttactctgcatgcatcttcaaaaatatttgaaattacccacaatga

SEQ ID NO: 400754 - DNA, 505 bp, Homo sapiens
acttcttgtaaagaatagttcttttcacatatacagtcagagatattaaaatgcatgtttattagcaatgtgtagaattttattgtttggtgctcacagaagcaatgtaaatttccacatctgttaggtcactctgagagtgtatgtgttgtgtggggagagagggcatgcccatctgtttgagctatgtcaccaaaatctatatcaagatttttaattaggctgagagtggtggttcacgcctgtaatcgcagcactttggaggccaaggtgggcagatcacttcaggtcaggagttcgagaccagcctggccaacatggtgaaaccctgtctctactaaaaatacaaaaaattagctgggtgtggtggcacatacctgtaatcccagctactcggaaggctgaggcacaagaatcatttgaacctggggggcggaggttgcagtgagtgagatcacaccactgcactccagcctgggtttcagagtgagattctgtttcagga

SEQ ID NO: 400755 - DNA, 214 bp, Homo sapiens
atttctcaatcggttgcatattctaattattgtattactagttaataatcagttttgtccaggtcactataacatattattaaaaagtttatttgccttttctaatttatctttgcagtaaattatgctttggctttaaaacttcctattaaaagatcataatgagacatacaaattattaaactgtcacaaatgcattcaaatttgtttgttc

SEQ ID NO: 400756 - DNA, 369 bp, Homo sapiens
aggtgtcctggagtgggatctgggaggtggctctcttagggtttggcacagggtggggtgagagtgctgggaacctagcaggaccagattttctgctaatttgagggctacgcagaaaactttgtttagaaaagcaggaatctttctagaacatcccagtcttccttctttctggctttaacaaatatgtcccaggtgcctgtttgcatgagcaccaggagtgccagtgtcagtcctgcttgacttcctgactccatcatcagcatcaccattcagatttgtataaaaccatttgtaaactagttttgtgagggagacactcagctaagccctcagtatgtggattatattaaatccagacacaaacct

SEQ ID NO: 400757 - DNA, 579 bp, Homo sapiens
atttatgaacactgaacccaaaagagctgaggtttccccaattttggagctcgtgtagaaagctttcctcaatctccttggatggaaaacttaaactgctcccactgtttagcacttcctgcagtttatgactctcagttcaggctctaactcaccagtaggggaatagggatattctggtgtatatgggtctttctgggcaaaccagtgaagcaagtctcacagctgttctgtcaagaacccaaattcccctaacctgggttctaagactgggccagccaaatggcacttttatagaacctcttcccaaaccagcgctcttgggcgatctttcttctgaaacgttatgtgtttccaatagggaggaaaagaagaaatgaagtaactttttgtccaggaatactcctttgtaaaggttgatttcagggctagcaaagatgccttcatagaaggcagttatttgtgaaagccaaggtgatggggtttgaaattgacaaagggatgaggacttagcttttcttctgaaggtgactttctgcccatggatcttccatttccattaatcagaagtattcgtta

SEQ ID NO: 400758 - DNA, 564 bp, Homo sapiens
aaaggctgtggaaaatgttcctgattgacagagatgacagacacacaacaagcagatgcaacacctgatcccagaccacatcctgtgctggagggaaaataatataaaagacattactggggggactggaaatactggggtgcagcatctagacgggttttgtaagctgacaatggtgctgtggtgatgagaggacacccccattcccaggaaacagcacctctccatcctctgaatcaccctcttgactcctcagggaccaatgtctagcagcatccacgtgctctctgtctcttaattttcaaagtttctctactaactcattttcaggctttaaatataaccaagtagctcatactaaagatgcaacccaaacacctcccttctagaccccaagttttcagagtcaaacattttccacagccatctccacccctccctctccctgactcttcaagctggctcaatctggcttcctttgtaccttctcaaagtgactcaggacctcctgaccatccctgtgccaagtccaatgccatctttcagccctcgtcttctgtgttt

SEQ ID NO: 400759 - DNA, 325 bp, Homo sapiens
ttttttttaaacaaagactcacattaagaaatatcattataaaatttcagaacaccaggaataagagaagatcctaaaggtttccagaaagaaaaaaacagctttcttataagggtcttggaggccaggcaccgtggctcacgcctgtaatctgagcactttggaaggcagaggcgggcagattacctgaggtcaggagctcgagaccagcctcatcaacatggcgaaaccccgtctctactaacaatacaaaaattggccaggtgtgatggcaggcacctgtaatcccaaccactcaggaggctgaggcaggaaaatcgcttga

SEQ ID NO: 400760 - DNA, 531 bp, Homo sapiens
atagaagtttattgactttgtgataaaattgtcttaaaagatcttaactgaatgtctaaagctttttaagaacttgtttttatctaaaaattttaatcaattggatagtagagatcatacgtattctcatgtcactgtttactattctagctaagcagtggcatccatcttgctgaaattcattttctggaattaaagtttagtttttgttctgtttgtataatatagacttactaagcaatgtagactttagtgtagacatactgaacaaaaaagtttttgcaaaagcaaccatggctcatgcctgtaatcccagcactttgggaagccgaggcaggcagatcacaggaggtcaggagttcgagaccagcctggccaacatggtgaaaccctgtctgtactaaaaatacaaaaattagccaggagtggtgctgtgtgcctgtagtcccagctactcgggaggctgaggcaggagagttgcatgaacctaggagccggaggttgtagtgagtcaagatcgcaccactgcac

SEQ ID NO: 400761 - DNA, 316 bp, Homo sapiens
cccttccatgccaccttccagttctggctagagtaactgccacaactgaaaatctgatcctatcactcttctgccagagctgccccacatctaaccttaggaaggaagcccaagccctggacagggctcttgggccctcactggcaggaggcttctgcctcatcccccttgtggcccctcctctcagtgtctcagtgtctgatggcgccaccaacagaaatgtgcatttatttaccggatacatattcttatttacaagttatatatgtgctctactgaactcattgtatgtttataataaaaaattcaaaacaaa

SEQ ID NO: 400762 - DNA, 367 bp, Homo sapiens
gattacaggtgtgagccactgcgcccggcccagttatctttatattttaagaaacatagttcaacttctactttttccatcaacatatttaacatatttctatacacatcagtatctacagccttttcttcctgaatgtcctgtaacgtacaagttccttgcctctcttccaatttctaactgaaatcctgtggaattttagtgcaagattatatttttatttcattctatctcaggaataatttattaacaattaccttagggttttcagccacattagcagcagttattttctactgtgatgggagggcattgcggggtggatgacacatgcaaagaggggcgcttctcccttctggaagctttc

SEQ ID NO: 400763 - DNA, 345 bp, Homo sapiens
tatacatcttgggattgattgcaaagaggcttaggatgatagtgtctgcatcaaagatgcagtgatgcctttgatagaatgaatcactgctactaaaccatcttaaatgagaaccagcttttccctccaaaccaatcggattgatctgtgcattgaaatatgttcctgtcacgatccttttactgcattggagacaagaatgctgcaaaaagaagtgccagaagccatgcttgctgggattgagaatatcttatttacggtctgagcgcattatggtttgaccactcctctatcgtacatgctaattccttgaacattactaaaggatcctctgaacttctcagt

SEQ ID NO: 400764 - DNA, 414 bp, Homo sapiens
ggcttgaattctcttctgtcagtagctacagaaaatcaaagaaggaaatatcaaactgtgttttcagggccactgactctgtgacttccgctgtctggccttcatgaagccaggcggtcaaatgggacacacagaaactcgaatcagtgagtccttcctcctggcctgaggccccagcttgatcccacaacagggaaaattctggaggtttctgtgttgacctgggtggtagttatgcagcggtgttccctttgtgacaattcatcaaaccattcacataatgtgttgccttttctgtaggtatttttttcttcaatgaatagtttaataaacacaaaaaagaaaatatggtcatcttatctttggacagtctctcaaatgttttataattaattaaattctttaacttatgta

SEQ ID NO: 400765 - DNA, 416 bp, Homo sapiens
gtgctgggattacaggcatgagccaccatgcccagcctggaggtggtgtttctattgataacaagtaggtgactggcctagagatggaggtcatgatgactgcaaggaagagactggacccatacaatgtactacccccaaagacagctttaggcaccaaggaagaccctaatttagtcccctccatcaccaacaagagaatagtgggtgcatctgtgaagaggaaaacagtgctgtcatctggttttggccgcacaaaggcaagacccagcaatgccccagctatggagcccattacaagctggtacccatcagctggtgcattgagcgcctgcaccaagttactcaaaatgtgctataaagtttcatctttccaataaagaccagccattgcattggctccttctccttctgca

SEQ ID NO: 400766 - DNA, 578 bp, Homo sapiens
ttcagtaaataaaggtcagagtcatattacttgagaccttggatcaaattaatacttctaccaaaatattcttacaacccatttttaagtaactatttcaaaagctgtattagcataaaccgtttctgccagctacttgggaaactaagggaaaaggtacctattgagtatgtttgtcttcacagcatttatgagaaagacattaagttacgtggttttctctcactaatagtggcaatgtgggaaaattccagaaaaaaaatgcaaaaagccaggctttccaaatcatgcaagatattttttctagagcaggaattggcctagatcacatgtggtttgctgaatcccagtcctggcatcataaagctgagaaaatacagtgtaggtttgaagccgacacaacagcagagtaccaaaaaacacatggtaggagtgggatccacatgggaaaagcaacactgagatggaagttaataaagtgtatatatttatttatatatttattatatttatacatacggtgtctatatatacacactattatctggtctttattaagatttgctttattatagaag

SEQ ID NO: 400767 - DNA, 485 bp, Homo sapiens
taagtttatgtattcagtttttattaaatatttctgtaaaattggtattccataattgtttaaaaatgttttttgacagcagtatgactcgatgctatttgaagaatcacattttaagcacttgagaggaaaaagtatatattctactagcagtgaaattctttatagacaaactttatgagacaacatctggtattgctcttcacttaactgtctataagaccaaaaataatagctaaaataagtaaagctactaatactgttaactgagaaaaccatgctgatctctgtcttctttttttcctggtggaatttgtatcttctttgtctactagaaataaatactcaaattatgaagcataagttgatagtcttattttattactctcaccattagatgacagcattctgaaatcagagcttggaaaccagtcaccatcaacctccagcctgggcgacagagcgagactccatatgagtaaaag

SEQ ID NO: 400768 - DNA, 438 bp, Homo sapiens
attttcacctctctactatgtacgcatttcctattgttgcatttactacaatagactaagatgtagctataccagtggttttcaaattttaatggtgtatcagcatcacctagagggcttgttaaaatacagattgctgggttttacctctgtttctgattcagtacgtctgtggtaagaaccaagaatttgcatttctaacaagtttcaggtgatgctgatgctattggtctagggactgccttctaagaactctaatctagacattagctgctttacatgtttgtgaaatccataagagctgaagttgatgcatcttttttctccaaatccctggacaatggcatagaaggctcccccaaaataatgagtgaattattattttaatctattttttcagttatttagaaacactgtgtgtaccacattttttcccta

SEQ ID NO: 400769 - DNA, 258 bp, Homo sapiens
ggactgtgggacacacaaccaaaattaggaaggcaagaatcctcagtaattcataaaatctcgagtggggcaggaattcaggttgccatgggaaacccatctcaggctcctcaggcggtgggtggcagtcagggagcctgccctgccactgagtaaagaccaagtggcagccctggcccggccacctgccctgatctcccgctgttctgcccccatgggctttccgaccggctgacactctggctcactgtatccacg

SEQ ID NO: 400770 - DNA, 347 bp, Homo sapiens
aaatctcctatcaaccaaaaataatactaataataatcatgggaaattaaaagcaaaaacttgattgatgatctctgtgtgacattataaaaactaccccgagttggggactagaggtaagcaagtaggttgacgatcacttatcacaaacccaaggtgtaatgttattattttaaaggaaatttgatttgtatttaagcaataatacataccagataatttctagataattatttatgtctgaatttaaatgtatctattgagcaaatcagatacatatatatttatgtgtatgtgtctatatgtaattctattctttctttttataaagactcaaatatttctga

SEQ ID NO: 400771 - DNA, 639 bp, Homo sapiens
cggtggctcacgcctgtaatcccagcagtttgggaggtcaaggcgggtggatcacttgaggtcaggattttgagaccagcctggccaacatggtgaaaccccatctctactaaaaatacacacatacacaaaattagctaggtgtggtggcaggcacctgtaatcccagctactggggaggctgaggcaggtgaattgcttgagcccgggaggtagaggttgcagtgagctgagattgcaccactacattccagcctgagtgacagagcaagactctgtctcaaaaaaaaaaagctgtggttctatatctcaaaataataaaagccatatatgacaaacccacagctaacatcatattgaatggggaaaagttgaaagcctttcctctaagatctggaacaagacaaggatgctcactttcactatttttattcaaggtaatactggaagtcctggccagagcaattaggcaggagaaagaaataaagggcatccaaattgcaaaagaagaactcaaattatccatgttcacagatgacataatcctatatttagaaaaacctaaagaaaacactggttataaacaaattcagtaaagctgtaggatacaaaatcaatgtagaaaaagtagtagcattt

SEQ ID NO: 400772 - DNA, 426 bp, Homo sapiens
catatttgtgctgggctccttttcactgaggctgaatgccaaataaatattttacatcttccttctagtttgtggaaaataaatagggtatgtaatggaatgccctagtgaacacaagccaagccaaagattaaattcctggggttttgttgtttccttttctcttattttgcaagggacataccagttacaactatatatatatatgtatatatacattgatactctgtgtgtgtgtgtgtgtgtgtgggtgggtgggtgggtgggtgtgtgtgtgaagtaaattacatataggtcaaaaagtcaccttgaaatcactgaaggtagcttcctttgacaggcagccatagatgaaataaaatagcccagtaatatggtggaaggagtattagtttccaaggactactataacaacttaccacaaac

SEQ ID NO: 400773 - DNA, 158 bp, Homo sapiens
ctgcatcaccagggcaccagaaagccattgagactgagtgagcaggggctgggcatggggagacccaccagaggagcagctatgtagggctcatatgcaggtaggcacgattaggatttcctaatatacctaatacatttccccatataccccaaatg

SEQ ID NO: 400774 - DNA, 282 bp, Homo sapiens
ccaatggctttcccaagtcatttaccagggtagcacaagatgccttacaaattaccagagtaaagtaatggccccaacaggtatgcttttgaggccacatgaggagatacacagctgcaggattccctatcagcaaagactgaatgatgtcaaacgttcagaaaaggagaaactaagtgggtgtagcacaatcaatcactttgcatttcaaggtgaacttgcagctcttatggggagggaattctctatgtcattttccacgtaaataaagtaatgagacca

SEQ ID NO: 400775 - DNA, 629 bp, Homo sapiens
aagatatttatttttccagtggacccatgtagattgcctcaaattttcatgaatttttggatacccatttttctttaaatagttacttggtttttacttttgtctttgtattggtgggagagtaactcaagtggacgacaagcagtgggccaaagtgttcagcctgggcaatgttcaaggatggaacagtgggtaggaaaagatataacacagacatagagggccttggagatgaatggaaacagagagatcatctaatccaaggttttcatttaccacaattttgtgtgtgtgtgtttgtgtgtgtgtattgaagcatccattacattgtatcccataaatatatacaattattatttgtcaataaaaaatttgaataaaaagatgaaacggctcatggaattaaaatgatttgctcaagagcacctctagtaaaatgacaggaccgggattaggtgtctttccagtaatcaactttgtcaaactttgttgacgtccttcacaggtataataagagtttttgaccaggaaagcattttgtccccaaaatgctgaattaggaactgagattaatagctataacaatctatagcattcatatgaggtgatttcatctgtatttgattgcc

SEQ ID NO: 400776 - DNA, 388 bp, Homo sapiens
ttttggagaaagggtctcactgtgccacccaggtgggagtgcaatgggtgacagagcaagactccatctaaaaaaaaaaaacaaaaaccatccaccaaaatgggaagaagtgatgaaaaattacagtccaagaagaagggccatagctgtttaaatcaattggtatatttgttatctaatataaccccacgtaacgacaggtatttaacaaatgtttctgctgaatttgacgattccatttcccttacatcccatatgcaatccatcagcaccccacatccaacccatcagtacatcctgtcagcattggctcccaaatataacctaaatctaacacatatcctactatctctgctgctacaactttagtctgaaatctcataatctc

SEQ ID NO: 400777 - DNA, 3035 bp, Homo sapiens
  misc_feature (67)..(67): n is a, c, g, or t
aagggctactccgggatctacggacccgggttcccctggcgtaggtcggccctcggccgcagggtgnggctgggcatgcagccgggaccccgggcgtcctgtcccgttcctgcgcggcgactgcggccccggcgccctctctgggcagctccgcgcccgcagcctcgcgtctcccgagattgtgcggctgtaagcaacacaggttcgcggcccgactcactgcaccgagacgctgagggctgcagcagaaacagtttaatagccagagaggggaggacaccccagatccgcctccctgagggatttggggtctggacgggggcggctgggtgtagggtcgttggttggtggggaagtgaggggtgaatcctgggacaggaggtgaagaaaccgcattctgctgaatgggctccctcgttgggacttcaacctgattggcgccagcctttgctgggattcaggatctgagaactccggcgactcttgagcagttctcagagatcttatccccaggcacaatggggaagccggcggtcagcgtctgctgtgacctgactctcagggaggcggccccttgaggcagcggggctgagggcacctggttaatatctaactgcaatctcgcctccagcctggctcgcagttcctgtgaacccggcctcagtggctttagaggatgtggctgtgaacttcacccgagaagagtgggctttgctgggtccttgtcagaagaatctctacaaagatgtgatgcaggaaaccatcaggaacctggattgtgtaggaatgaaatggaaagaccagaacattgaagatcaatatagatatcccaggaaaaatctaagatgtcgtatgttagagagatttgttgaaagtaaagatggaactcaatgtggagaaacatctagccagattcaagatagtattgtgaccaagaacactcttcctggagtaggtccatatgaaagccgtatgagtggagaagtcatcatgggtcattcatcccttaattgttacatcagagttggtgctgggcacaaaccatatgagtatcatgaatgtggagagaagccagatacgcataaacaacgtgggaaagccttcagttaccacaactcacttcaaacacatgagaggcttcacactggaaagaaaccatataattgtaaagaatgtgggaagtccttcagttctttgggaaaccttcaaagacacatggcagtgcagcgtggagatggaccttataaatgtaagttgtgtgggaaagcgtttttttggcccagtttattacatatgcatgagagaacgcacactggagagaaaccatatgaatgtaagcagtgttctaaagccttttctttttacagttcctatctaagacatgaaagaacacatactggggagaaactgtatgaatgtaaacagtgttctaaagccttccctgattacagttcttgtctaagacatgaaagaactcacactggaaagaaaccctatacatgtaaacaatgtgggaaagccttcagtgcttccacttcccttcgaagacacgaaacaactcacactgatgagaaaccctatgcatgtcagcaatgtgggaaagcgtttcatcatctgggaagctttcaaagacacatggtaatgcacacgagagatggacctcataagtgtaagatatgtggaaaaggctttgattgtcctagttcactgaaaagtcatgaaagaactcacactggagagaaactctatgaatgcaagcagtgtgggaaagcgttatctcatagctcaagctttcgaagacacatgacaatgcacactggagatggacctcacaaatgcaagatatgtgggaaagcctttgtttatcccagtgtatttcaaaggcatgaaaagactcacactgcagagaaaccctataaatgtaaacaatgtggcaaagcctaccgtatttccagttctcttcgaaggcatgaaacaactcatactggagagaaaccctataaatgcaaatgtgggaaagcctttattgatttctattcctttcaaaatcacaaaacaactcatgctggagagaagccatatgagtgtaaggaatgtgggaaagcattcagttgtttccaatacctttctcaacatagaaggactcacacaggagagaaaccttatgagtgtaacacatgtaagaaagccttcagtcattttggtaacttaaaagtacatgaaagaattcactctggagagaagccgtatgaatgtaaggaatgtgggaaagcattctcttggctcacttgctttctacgacatgaaagaattcacatgagagagaaaccctatgagtgtcaacaatgtggtaaagccttcactcattcccgttttcttcaaggacatgaaaaaactcatactggagagaacccgtatgaatgtaaggaatgtgggaaagcatttgcttctctcagttccttgcatagacataaaaagactcactggaaaaaaactcacactggagagaacccgtatggatgtaaggaatgtgggaaagcatttgcttctctcagttccttgcatagacataaaaagactcactagcattctctctaaatgtatggaatgtgggaaagcatttattaattttatttcatttcagatacttgtacgaaacacattggagatagaccctgtgaatgtaagcacttggtaaaaccttaagtaatttcagtttctttccagtacagtcatcccttgatacctgctgggtattggttccagcactccgtgagccatgtccagtcccttttataaaatgacatatttgtatgtaacttacccacatcctcttgtatactctcaattatgtctagattacttaaaatacctcatgcattgtaaaagctatgcaaatagttgttctattgtattgtttagggactcatgataaggaaaagagtctatgtattttcagtatagatgcagtaattgtcagcctatcaacatagtatagtcagccagaacattaaagtttctttgtttcaactctc

SEQ ID NO: 400778 - DNA, 2399 bp, Homo sapiens
gccagcttccaaatattctctgcctcagtggctttagaggatgtggctgtgaacttcacccgagaagagtgggctttgctgggtccttgtcagaagaatctctacaaagatgtgatgcaggaaaccatcaggaacctggattgtgtaggaatgaaatggaaagaccagaacattgaagatcaatatagatatcccaggaaaaatctaagatgtcgtatgttagagagatttgttgaaagtaaagatggaactcaatgtggagaaacatctagccagattcaagatagtattgtgaccaagaacactcttcctggagtaggtccatatgaaagccgtatgagtggagaagtcatcatgggtcattcatcccttaattgttacatcagagttggtgctgggcacaaaccatatgagtatcatgaatgtggagagaagccagatacgcataaacaacgtgggaaagccttcagttaccacaactcacttcaaacacatgagaggcttcacactggaaagaaaccatataattgtaaagaatgtgggaagtccttcagttctttgggaaaccttcaaagacacatggcagtgcagcgtggagatggaccttataaatgtaagttgtgtgggaaagcgtttttttggcccagtttattacatatgcatgagagaacgcacactggagagaaaccatatgaatgtaagcagtgttctaaagccttttctttttacagttcctatctaagacatgaaagaacacatactggggagaaactgtatgaatgtaaacagtgttctaaagccttccctgattacagttcttgtctaagacatgaaagaactcacactggaaagaaaccctatacatgtaaacaatgtgggaaagccttcagtgcttccacttcccttcgaagacacgaaacaactcacactgatgagaaaccctatgcatgtcagcaatgtgggaaagcgtttcatcatctgggaagctttcaaagacacatggtaatgcacacgagagatggacctcataagtgtaagatatgtggaaaaggctttgattgtcctagttcactgaaaagtcatgaaagaactcacactggagagaaactctatgaatgcaagcagtgtgggaaagcgttatctcatagctcaagctttcgaagacacatgacaatgcacactggagatggacctcacaaatgcaagatatgtgggaaagcctttgtttatcccagtgtatttcaaaggcatgaaaagactcacactgcagagaaaccctataaatgtaaacaatgtggcaaagcctaccgtatttccagttctcttcgaaggcatgaaacaactcatactggagagaaaccctataaatgcaaatgtgggaaagcctttattgatttctattcctttcaaaatcacaaaacaactcatgctggagagaagccatatgagtgtaaggaatgtgggaaagcattcagttgtttccaatacctttctcaacatagaaggactcacacaggagagaaaccttatgagtgtaacacatgtaagaaagccttcagtcattttggtaacttaaaagtacatgaaagaattcactctggagagaagccgtatgaatgtaaggaatgtgggaaagcattctcttggctcacttgctttctacgacatgaaagaattcacatgagagagaaaccctatgagtgtcaacaatgtggtaaagccttcactcattcccgttttcttcaaggacatgaaaaaactcatactggagagaacccgtatgaatgtaaggaatgtgggaaagcatttgcttctctcagttccttgcatagacataaaaagactcactggaaaaaaactcacactggagagaacccgtatggatgtaaggaatgtgggaaagcatttgcttctctcagttccttgcatagacataaaaagactcactagcattctctctaaatgtatggaatgtgggaaagcatttattaattttatttcatttcagatacttgtacgaaacacattggagatagaccctgtgaatgtaagcacttggtaaaaccttaagtaatttcagtttctttccagtacagtcatcccttgatacctgctgggtattggttccagcactccgtgagccatgtccagtcccttttataaaatgacatatttgtatgtaacttacccacatcctcttgtatactctcaattatgtctagattacttaaaatacctcatgcattgtaaaagctatgcaaatagttgttctattgtattgtttagggactcatgataaggaaaagagtctatgtattttcagtatagatgcagtaattgtcagcctatcaacatagtatagtcagccagaacattaaagtttctttgtttcaactctc

SEQ ID NO: 400779 - DNA, 2954 bp, Homo sapiens
cacctgcgctgggcgctcggtgctcggctctgtagctaagagacgacctggaagttccgtggcagcctgtgtcccgcgggaacccgcattggcagcgggagccgtccggaggcctgggacaccgcggaagtcgggaaatggcctcagtggctttagaggatgtggctgtgaacttcacccgagaagagtgggctttgctgggtccttgtcagaagaatctctacaaagatgtgatgcaggaaaccatcaggaacctggattgtgtaggaatgaaatggaaagaccagaacattgaagatcaatatagatatcccaggaaaaatctaagatgtcgtatgttagagagatttgttgaaagtaaagatggaactcaatgtggagaaacatctagccagattcaagatagtattgtgaccaagaacactcttcctggagtaggtccatatgaaagccgtatgagtggagaagtcatcatgggtcattcatcccttaattgttacatcagagttggtgctgggcacaaaccatatgagtatcatgaatgtggagagaagccagatacgcataaacaacgtgggaaagccttcagttaccacaactcacttcaaacacatgagaggcttcacactggaaagaaaccatataattgtaaagaatgtgggaagtccttcagttctttgggaaaccttcaaagacacatggcagtgcagcgtggagatggaccttataaatgtaagttgtgtgggaaagcgtttttttggcccagtttattacatatgcatgagagaacgcacactggagagaaaccatatgaatgtaagcagtgttctaaagccttttctttttacagttcctatctaagacatgaaagaacacatactggggagaaactgtatgaatgtaaacagtgttctaaagccttccctgattacagttcttgtctaagacatgaaagaactcacactggaaagaaaccctatacatgtaaacaatgtgggaaagccttcagtgcttccacttcccttcgaagacacgaaacaactcacactgatgagaaaccctatgcatgtcagcaatgtgggaaagcgtttcatcatctgggaagctttcaaagacacatggtaatgcacacgagagatggacctcataagtgtaagatatgtggaaaaggctttgattgtcctagttcactgaaaagtcatgaaagaactcacactggagagaaactctatgaatgcaagcagtgtgggaaagcgttatctcatagctcaagctttcgaagacacatgacaatgcacactggagatggacctcacaaatgcaagatatgtgggaaagcctttgtttatcccagtgtatttcaaaggcatgaaaagactcacactgcagagaaaccctataaatgtaaacaatgtggcaaagcctaccgtatttccagttctcttcgaaggcatgaaacaactcatactggagagaaaccctataaatgcaaatgtgggaaagcctttattgatttctattcctttcaaaatcacaaaacaactcatgctggagagaagccatatgagtgtaaggaatgtgggaaagcattcagttgtttccaatacctttctcaacatagaaggactcacacaggagagaaaccttatgagtgtaacacatgtaagaaagccttcagtcattttggtaacttaaaagtacatgaaagaattcactctggagagaagccgtatgaatgtaaggaatgtgggaaagcattctcttggctcacttgctttctacgacatgaaagaattcacatgagagagaaaccctatgagtgtcaacaatgtggtaaagccttcactcattcccgttttcttcaaggacatgaaaaaactcatactggagagaacccgtatgaatgtaaggaatgtgggaaagcatttgcttctctcagttccttgcatagacataaaaagactcactggaaaaaaactcacactggagagaacccgtatggatgtaaggaatgtgggaaagcatttgcttctctcagttccttgcatagacataaaaagactcactagcattctctctaaatgtatggaatgtgggaaagcatttattaattttatttcatttcagatacttgtacgaaacacattggagatagaccctgtgaatgtaagcacttggtaaaaccttaagtaatttcagtttctttccagtacagtcatcccttgatacctgctgggtattggttccagcactccgtgagccatgtccagtcccttttataaaatgacatatttgtatgtaacttacccacatcctcttgtatactctcaattatgtctagattacttaaaatacctcatgcattgtaaaagctatgcaaatagttgttctattgtattgtttagggactcatgataaggaaaagagtctatgtattttcagtatagatgcagtaattgtcagcctatcaacatagtatagtcagccagaacattaaagtttctttgtttcaactctcacatattgcttttgtttaatgtgttaacacttaccaaaaccctgggtcttctctcttgataacccaagtatagtgattataacgatgatgattctgtggtgcccagtgttttgatgtgttgagatgactagatgtatggcattgtgggtaagtagtgagacatcaggttaacttgaatcttgacaggccatcaggactatcatctatgttggaagaaccaacttgtgattatagatgtggactcatttgaggaggctatgtaatactaatgttaggatctgtttggcttgagggctgaagatctgtaaccattgaatgttccatcttctttgcagatgcttagttataggaagctagttcttcttttcctttgcttcattaaaaaaaaaatcttgcagtgtttataggcatgttgttatttctcgggtggagtgaa

SEQ ID NO: 400780 - DNA, 2518 bp, Homo sapiens
cacctgcgctgggcgctcggtgctcggctctgtagctaagagacgacctggaagttccgtggcagcctgtgtcccgcgggaacccgcattggcagcgggagccgtccggaggcctgggacaccgcggaagtcgggaaatggcctcagtggctttagaggatgtggctgtgaacttcacccgagaagagtgggctttgctgggtccttgtcagaagaatctctacaaagatgtgatgcaggaaaccatcaggaacctggattgtgtaggaatgaaatggaaagaccagaacattgaagatcaatatagatatcccaggaaaaatctaagatgtcgtatgttagagagatttgttgaaagtaaagatggaactcaatgtggagaaacatctagccagattcaagatagtattgtgaccaagaacactcttcctggagtaggtccatatgaaagccgtatgagtggagaagtcatcatgggtcattcatcccttaattgttacatcagagttggtgctgggcacaaaccatatgagtatcatgaatgtggagagaagccagatacgcataaacaacgtgggaaagccttcagttaccacaactcacttcaaacacatgagaggcttcacactggaaagaaaccatataattgtaaagaatgtgggaagtccttcagttctttgggaaaccttcaaagacacatggcagtgcagcgtggagatggaccttataaatgtaagttgtgtgggaaagcgtttttttggcccagtttattacatatgcatgagagaacgcacactggagagaaaccatatgaatgtaagcagtgttctaaagccttttctttttacagttcctatctaagacatgaaagaacacatactggggagaaactgtatgaatgtaaacagtgttctaaagccttccctgattacagttcttgtctaagacatgaaagaactcacactggaaagaaaccctatacatgtaaacaatgtgggaaagccttcagtgcttccacttcccttcgaagacacgaaacaactcacactgatgagaaaccctatgcatgtcagcaatgtgggaaagcgtttcatcatctgggaagctttcaaagacacatggtaatgcacacgagagatggacctcataagtgtaagatatgtggaaaaggctttgattgtcctagttcactgaaaagtcatgaaagaactcacactggagagaaactctatgaatgcaagcagtgtgggaaagcgttatctcatagctcaagctttcgaagacacatgacaatgcacactggagatggacctcacaaatgcaagatatgtgggaaagcctttgtttatcccagtgtatttcaaaggcatgaaaagactcacactgcagagaaaccctataaatgtaaacaatgtggcaaagcctaccgtatttccagttctcttcgaaggcatgaaacaactcatactggagagaaaccctataaatgcaaatgtgggaaagcctttattgatttctattcctttcaaaatcacaaaacaactcatgctggagagaagccatatgagtgtaaggaatgtgggaaagcattcagttgtttccaatacctttctcaacatagaaggactcacacaggagagaaaccttatgagtgtaacacatgtaagaaagccttcagtcattttggtaacttaaaagtacatgaaagaattcactctggagagaagccgtatgaatgtaaggaatgtgggaaagcattctcttggctcacttgctttctacgacatgaaagaattcacatgagagagaaaccctatgagtgtcaacaatgtggtaaagccttcactcattcccgttttcttcaaggacatgaaaaaactcatactggagagaacccgtatgaatgtaaggaatgtgggaaagcatttgcttctctcagttccttgcatagacataaaaagactcactggaaaaaaactcacactggagagaacccgtatggatgtaaggaatgtgggaaagcatttgcttctctcagttccttgcatagacataaaaagactcactagcattctctctaaatgtatggaatgtgggaaagcatttattaattttatttcatttcagatacttgtacgaaacacattggagatagaccctgtgaatgtaagcacttggtaaaaccttaagtaatttcagtttctttccagtacagtcatcccttgatacctgctgggtattggttccagcactccgtgagccatgtccagtcccttttataaaatgacatatttgtatgtaacttacccacatcctcttgtatactctcaattatgtctagattacttaaaatacctcatgcattgtaaaagctatgcaaatagttgttctattgtattgtttagggactcatgataaggaaaagagtctatgtattttcagtatagatgcagtaattgtcagcctatcaacatagtatagtcagccagaacattaaagtttctttgtttcaactctc

SEQ ID NO: 400781 - DNA, 274 bp, Homo sapiens
gcttggagggaaagtcattgtttctttttgggatataattgatttgcatgtctatgaacaattatttgcattactatcaattttccacatgttagccaaaatatctacagtagtgttaaacagctcggagaaaagtctctgatccctaaggtccagatcatccgagggacaccctcatccattgagaggatgcccagtaatatttttgcttattccaaagtcttgtatttttccttacattgataattaatgctggattctggaacacttcaaa

SEQ ID NO: 400782 - DNA, 543 bp, Homo sapiens
ccacacacccatcccctagctactgagaataggggctgctaatggctcagaggttcatccctcattgggaaatgcatgacccaaggcacatcccctcctgggggagagccttagtcaatgactggctgatgggggatgcaaaggcccagctctctcacagtaggacagctctggagggccatcccagctccagagttccctgtagaattaactgaggtctccatggccagcacattgtggggcagctactccctctgccccgtcctgcctcccttgcccccttacaagtacatctcccaagaacactcctaattaatgttctgcgtgcagctctctatctcagagtctgtttccagggagcccaacctcagacatctcccaatctcaggctgagatactgggaaacacaaatgatactgactcagtcccctgactcgagggacccaaacagttacacagtgatctgccaatcaacagttgagcctttgactggtcttcaggttggttgtttccaacctgttccctctcactgggattaaagga

SEQ ID NO: 400783 - DNA, 1947 bp, Homo sapiens
taattttgccctaggtctggccaggaggcctcacatccagagacctgcccccgctcttgcagtgccagggccatggggctccggagccaccacctcagcctgggccttctgcttctgtttctactccctgcagagtgcctgggagctgagggccggctggctctcaagctgttccgtgacctctttgccaactacacaagtgccctgagacctgtggcagacacagaccagactctgaatgtgaccctggaggtgacactgtcccagatcatcgacatggatgaacggaaccaggtgctgaccctgtatctgtggatacggcaggagtggacagatgcctacctacgatgggaccccaatgcctatggtggcctggatgccatccgcatccccagcagtcttgtgtggcggccagacatcgtactctataacaaagccgacgcgcagcctccaggttccgccagcaccaacgtggtcctgcgccacgatggcgccgtgcgctgggacgcgccggccatcacgcgcagctcgtgccgcgtggatgtagcagccttcccgttcgacgcccagcactgcggcctgacgttcggctcctggactcacggcgggcaccaactggatgtgcggccgcgcggcgctgcagccagcctggcggacttcgtggagaacgtggagtggcgcgtgctgggcatgccggcgcggcggcgcgtgctcacctacggctgctgctccgagccctaccccgacgtcaccttcacgctgctgctgcgccgccgcgccgccgcctacgtgtgcaacctgctgctgccctgcgtgctcatctcgctgcttgcgccgctcgccttccacctgcctgccgactcaggcgagaaggtgtcgctgggcgtcaccgtgctgctggcgctcaccgtcttccagttgctgctggccgagagcatgccaccggccgagagcgtgccgctcatcgggaagtactacatggccactatgaccatggtcacattctcaacagcactcaccatccttatcatgaacctgcattactgtggtcccagtgtccgcccagtgccagcctgggctagggccctcctgctgggacacctggcacggggcctgtgcgtgcgggaaagaggggagccctgtgggcagtccaggccacctgagttatctcctagcccccagtcgcctgaaggaggggctggccccccagcgggcccttgccacgagccacgatgtctgtgccgccaggaagccctactgcaccacgtagccaccattgccaataccttccgcagccaccgagctgcccagcgctgccatgaggactggaagcgcctggcccgtgtgatggaccgcttcttcctggccatcttcttctccatggccctggtcatgagcctcctggtgctggtgcaggccctgtgagggctgggactaagtcacagggatctgctgcagccacagctcctccagaaagggacagccacggccaagtggttgctggtctttgggccagccagtctctccccactgctcctaagatcctgagacacttgacttcacaatccacaagggagcactcattgtctacacaccctaactaaaggaagtccagagcctgccactcccctaattccaaaaaaaagaggaactctacaaaggccaagatcacagagtacagtcttggagggacagaattgtttgtgctgggtattggagctctcagtggggagcacatgggttataatgagaaactgaactgtactgctgcatttcctgtcttccttcctaggtggctgctttgcagggctttggctgttacctttccctgctgaggggctcagggaaaagggtcggggattctcagtcgagtttccagagcaggaggccctacagacatttcgccccaaatccctgactcaataaagtaagcgtgtacctagcacc

SEQ ID NO: 400784 - DNA, 1012 bp, Homo sapiens
aaaaggcgggaaaacgtggaaagagggtaaaatctgtttccagattcctctggcacctactggtgccctttggataagcaagtgctgactccagcaaggaagggctgatgtcctgccatcaggccagcagacgctggggccaggtgctcccctgcgtcgtgagtgtctcgaacttaacgagcctcaatattctggggagaagttttggtttctttcagcccctgggggtctgccctgggctcccggcctccggggctgctcctcaggctggacagcctaggtgagccctgccccgcctgcccccagagccgacgcgcagcctccaggttccgccagcaccaacgtggtcctgcgccacgatggcgccgtgcgctgggacgcgccggccatcacgcgcagctcgtgccgcgtggatgtagcagccttcccgttcgacgcccagcactgcggcctgacgttcggctcctggactcacggcgggcaccaactggatgtgcggccgcgcggcgctgcagccagcctggcggacttcgtggagaacgtggagtggcgcgtgctgggcatgccggcgcggcggcgcgtgctcacctacggctgctgctccgagccctaccccgacgtcaccttcacgctgctgctgcgccgccgcgccgccgcctacgtgtgcaacctgctgctgccctgcgtgctcatctcgctgcttgcgccgctcgccttccacctgcctgccgactcaggcgagaaggtgtcgctgggcgtcaccgtgctgctggcgctcaccgtcttccagttgctgctggccgagagcatgccaccggccgagagcgtgccgctcatcggtgagcagcgggggcgcggggggacctgacgatgcgctggggtccccccagggcggggccgcgacagggcctgggtctgcggaacggccccactgcagaaagtgagaggggggcgtcctgggaacgtgccctcattttaagactgaggggaaaggattagctccttccaggga

SEQ ID NO: 400785 - DNA, 1285 bp, Homo sapiens
gattcgtatcttgccccagctcatgcccgtcgttatttgagagcgggactgtcctggattgtgtatgagtgcagcctccagcagtgacgggagcaattagagagcagtagcttccgatgacccacgtgtaggaatgaaggatggggagaactcggcccttacctccttcctgcttccatccatggggcttggagggtctggagagcttcatggtgggcttatttccatttgtgcagaggtggctgggaagctcaggaaccacaggcttttgttttgagtcaattggctttctctctctcttgcagggaagtactacatggccactatgaccatggtcacattctcaacagcactcaccatccttatcatgaacctgcattactgtggtcccagtgtccgcccagtgccagcctgggctagggccctcctgctgggacacctggcacggggcctgtgcgtgcgggaaagaggggagccctgtgggcagtccaggccacctgagttatctcctagcccccagtcgcctgaaggaggggctggccccccagcgggcccttgccacgagccacgatgtctgtgccgccaggaagccctactgcaccacgtagccaccattgccaataccttccgcagccaccgagctgcccagcgctgccatgaggactggaagcgcctggcccgtgtgatggaccgcttcttcctggccatcttcttctccatggccctggtcatgagcctcctggtgctggtgcaggccctgtgagggctgggactaagtcacagggatctgctgcagccacagctcctccagaaagggacagccacggccaagtggttgctggtctttgggccagccagtctctccccactgctcctaagatcctgagacacttgacttcacaatccacaagggagcactcattgtctacacaccctaactaaaggaagtccagagcctgccactcccctaattccaaaaaaaagaggaactctacaaaggccaagatcacagagtacagtcttggagggacagaattgtttgtgctgggtattggagctctcagtggggagcacatgggttataatgagaaactgaactgtactgctgcatttcctgtcttccttcctaggtggctgctttgcagggctttggctgttacctttccctgctgaggggctcagggaaaagggtcggggattctcagtcgagtttccagagcaggaggccctacagacatttcgccccaaatccctgactcaataaagtaagcgtgtacctagcacc

SEQ ID NO: 400786 - DNA, 1206 bp, Homo sapiens
taattttgccctaggtctggccaggaggcctcacatccagagacctgcccccgctcttgcagtgccagggccatggggctccggagccaccacctcagcctgggccttctgcttctgtttctactccctgcagagtgcctgggagctgagggccggctggctctcaagctgttccgtgacctctttgccaactacacaagtgccctgagacctgtggcagacacagaccagactctgaatgtgaccctggaggtgacactgtcccagatcatcgacatggtgcgttgtggtggtggtacagctgtggagtcttacctgtcacagtgtcaagaaatgaaggggatgaacggaaccaggtgctgaccctgtatctgtggatacggcaggagtggacagatgcctacctacgatgggaccccaatgcctatggtggcctggatgccatccgcatccccagcagtcttgtgtggcggccagacatcgtactctataacaagtactgcctatctgggcccctcctctctcttacccctctctagacttgcccttagctgtgggggtgtagtgatcccctctccctaccacataacctggttgccacgctgccctggaagcttttccccaggacccttctaagctgccaggcactcagcccctccatggcacccccactttaggctatcccaggccagcccaggctgaacgtctcctcggaacctactgtgtggtccagggcagttgtctgaatcacaagggcctctctagggcacacttttagctctaagtctctcagggctcccccaagagcctgtgtaagggtctctttcctccaggacatagccctctggaacactgctttatgtctccttgaccagttccgtgtctcccagccagcacatagctctgcatattttctctggggcccttctacaagttttgcagatgtcccccaagggaagtcactgtgtgtcccggagctacctctgggttctgcagaggcctttttatacatcctctggctacgtctgtgtcccttctggcccttcaggcaccaccccttccaggcctcgaaaggcagcgggtctctctaggtgcactccaccctctgtgttgctttgttctgaaaacaagaatcaaattaacgaaaaaaaaacaagcacatgggttataatgagaaaccgtcgattcgagggaatcctctgggta

SEQ ID NO: 400787 - DNA, 1819 bp, Homo sapiens
aaaaggcgggaaaacgtggaaagagggtaaaatctgtttccagattcctctggcacctactggtgccctttggataagcaagtgctgactccagcaaggaagggctgatgtcctgccatcaggccagcagacgctggggccaggtgctcccctgcgtcgtgagtgtctcgaacttaacgagcctcaatattctggggagaagttttggtttctttcagcccctgggggtctgccctgggctcccggcctccggggctgctcctcaggctggacagcctaggtgagccctgccccgcctgcccccagagccgacgcgcagcctccaggttccgccagcaccaacgtggtcctgcgccacgatggcgccgtgcgctgggacgcgccggccatcacgcgcagctcgtgccgcgtggatgtagcagccttcccgttcgacgcccagcactgcggcctgacgttcggctcctggactcacggcgggcaccaactggatgtgcggccgcgcggcgctgcagccagcctggcggacttcgtggagaacgtggagtggcgcgtgctgggcatgccggcgcggcggcgcgtgctcacctacggctgctgctccgagccctaccccgacgtcaccttcacgctgctgctgcgccgccgcgccgccgcctacgtgtgcaacctgctgctgccctgcgtgctcatctcgctgcttgcgccgctcgccttccacctgcctgccgactcaggcgagaaggtgtcgctgggcgtcaccgtgctgctggcgctcaccgtcttccagttgctgctggccgagagcatgccaccggccgagagcgtgccgctcatcgggaagtactacatggccactatgaccatggtcacattctcaacagcactcaccatccttatcatgaacctgcattactgtggtcccagtgtccgcccagtgccagcctgggctagggccctcctgctgggacacctggcacggggcctgtgcgtgcgggaaagaggggagccctgtgggcagtccaggccacctgagttatctcctagcccccagtcgcctgaaggaggggctggccccccagcgggcccttgccacgagccacgatgtctgtgccgccaggaagccctactgcaccacgtagccaccattgccaataccttccgcagccaccgagctgcccagcgctgccatgaggactggaagcgcctggcccgtgtgatggaccgcttcttcctggccatcttcttctccatggccctggtcatgagcctcctggtgctggtgcaggccctgtgagggctgggactaagtcacagggatctgctgcagccacagctcctccagaaagggacagccacggccaagtggttgctggtctttgggccagccagtctctccccactgctcctaagatcctgagacacttgacttcacaatccacaagggagcactcattgtctacacaccctaactaaaggaagtccagagcctgccactcccctaattccaaaaaaaagaggaactctacaaaggccaagatcacagagtacagtcttggagggacagaattgtttgtgctgggtattggagctctcagtggggagcacatgggttataatgagaaactgaactgtactgctgcatttcctgtcttccttcctaggtggctgctttgcagggctttggctgttacctttccctgctgaggggctcagggaaaagggtcggggattctcagtcgagtttccagagcaggaggccctacagacatttcgccccaaatccctgactcaataaagtaagcgtgtacctagcacc

SEQ ID NO: 400788 - DNA, 1215 bp, Homo sapiens
taattttgccctaggtctggccaggaggcctcacatccagagacctgcccccgctcttgcagtgccagggccatggggctccggagccaccacctcagcctgggccttctgcttctgtttctactccctgcagagtgcctgggagctgagggccggctggctctcaagctgttccgtgacctctttgccaactacacaagtgccctgagacctgtggcagacacagaccagactctgaatgtgaccctggaggtgacactgtcccagatcatcgacatggtgcgttgtggtggtggtacagctgtggagtcttacctgtcacagtgtcaagaaatgaaggggatgaacggaaccaggtgctgaccctgtatctgtggatacggcaggagtggacagatgcctacctacgatgggaccccaatgcctatggtggcctggatgccatccgcatccccagcagtcttgtgtggcggccagacatcgtactctataacaagtactgcctatctgggcccctcctctctcttacccctctctagacttgcccttagctgtgggggtgtagtgatcccctctccctaccacataacctggttgccacgctgccctggaagcttttccccaggacccttctaagctgccaggcactcagcccctccatggcacccccactttaggctatcccaggccagcccaggctgaacgtctcctcggaacctactgtgtggtccagggcagttgtctgaatcacaagggcctctctagggcacacttttagctctaagtctctcagggctcccccaagagcctgtgtaagggtctctttcctccaggacatagccctctggaacactgctttatgtctccttgaccagttccgtgtctcccagccagcacatagctctgcatattttctctggggcccttctacaagttttgcagatgtcccccaagggaagtcactgtgtgtcccggagctacctctgggttctgcagaggcctttttatacatcctctggctacgtctgtgtcccttctggcccttcaggcaccaccccttccaggcctcgaaaggcagcgggtctctctaggtgcactccaccctctgtgttgctttgttctgaaaacaagaatcaaattaacgaaaaaaaaacaagcacaagtttatttatttatttgagacacagcctgggcaagagagtgagacttcatctc

SEQ ID NO: 400789 - DNA, 519 bp, Homo sapiens
acagctttatgagacgagtctgttatctccatccccatttgatagatggggcatccctgtgggagctctgcccattccagaggtgccaggccattcactaatgggggcaggagccggtgagtaaatgccagtcttgtgctgtcacaggtggacgattcagagaggtgttctagaccattcagatctttctggaaccttctcagagaccagaagtatctcagacttgctatcagggaaccaaaactaaaacaaaagggaaacttgatactgggtcatcccctatagttctgtaccttgcctgggttaaaattgcactattttattagatgtgtgaccttgggccagtcacctgtctgtgcctgtttcctaatctgtaaaacggacataatgtcacctaattcacaggggtgttggaagagtgaagagagatggtgttaggtgaggtccttaaaacagtgcacaacgcattataagtgctcaataaatgtttgctgtttgattgcattttaaattgtaaca

SEQ ID NO: 400790 - DNA, 336 bp, Homo sapiens
atcacctcccacataaacgacttacactcaagtctcagacttgctatcagggaaccaaaactaaaacaaaagggaaacttgatactgggtcatcccctatagttctgtaccttgcctgggttaaaattgcactattttattagatgtgtgaccttgggccagtcacctgtctgtgcctgtttcctaatctgtaaaacggacataatgtcacctaattcacaggggtgttggaagagtgaagagagatggtgttaggtgaggtccttaaaacagtgcacaacgcattataagtgctcaataaatgtttgctgtttgattgcattttaaattgtaaca

SEQ ID NO: 400791 - DNA, 954 bp, Homo sapiens
ataactaataacaaaatagaagaattataacaatattctagcatcactactttgatgctttggggctattactaagtaaaataagggttacttgaagagaagcactgagataccatgacagttgacctgatcactgagatagctaagtgactactgtgtagatagagcatgcagtgtggatacactggaaaaagagcagattcacatcccaggtgagaaggagcaggacagtgcaagatttcaccacactgcgcagaatgaaattgacaagatgatcctaaaatttatctagaaacacacgggacacagaacagccaagataattttgaaaaataagaacgaaggactcatacttcttgatttcaaaactgactacaaagctacagtaattaacactgtgtgagactggcataaggatatgcatatagattgataaaataaaactgagaagcccttgagaaataaaccttatatatatggtcaactgatttttgacaataatgacaagaaaattcaataggaaaagaagttatttcaacaaatggtactgggacaactggatacacacatgcaaaaggatgaagttggaaccttacctcataccatatgcaaaaattaatgctaaatgagtcatagacctatatataagaattagaactataaaacttatggaagaaaatataggtgtaagtctttgtgattttggattacacaatggtttcctagaatgactcttaagcacaagcaaccaaatcaataagttggatttcatcaaaattgaaaacttttgtgcctcaaaggacattatcaagacaatgagaagagaacacatagaagaacacacttacaaatcatatatctgatacatatctgctttccaaaataagtaaaaacttttataactcaataataaaaacacaagtaacccagtttaaaaatgggcaaaaacaaagt

SEQ ID NO: 400792 - DNA, 856 bp, Homo sapiens
tagccatttaaagagaacacatggaagtaaaccaagaacccagccaatatccccaggtaagagatagagcatgcagtgtggatacactggaaaaagagcagattcacatcccaggtgagaaggagcaggacagtgcaagatttcaccacactgcgcagaatgaaattgacaagatgatcctaaaatttatctagaaacacacgggacacagaacagccaagataattttgaaaaataagaacgaaggactcatacttcttgatttcaaaactgactacaaagctacagtaattaacactgtgtgagactggcataaggatatgcatatagattgataaaataaaactgagaagcccttgagaaataaaccttatatatatggtcaactgatttttgacaataatgacaagaaaattcaataggaaaagaagttatttcaacaaatggtactgggacaactggatacacacatgcaaaaggatgaagttggaaccttacctcataccatatgcaaaaattaatgctaaatgagtcatagacctatatataagaattagaactataaaacttatggaagaaaatataggtgtaagtctttgtgattttggattacacaatggtttcctagaatgactcttaagcacaagcaaccaaatcaataagttggatttcatcaaaattgaaaacttttgtgcctcaaaggacattatcaagacaatgagaagagaacacatagaagaacacacttacaaatcatatatctgatacatatctgctttccaaaataagtaaaaacttttataactcaataataaaaacacaagtaacccagtttaaaaatgggcaaaaacaaagt

SEQ ID NO: 400793 - DNA, 714 bp, Homo sapiens
  misc_feature (14)..(14): n is a, c, g, or t
  misc_feature (38)..(38): n is a, c, g, or t
ggggtttgttggtngcaaagaaacacccagttgcttgnagaaattatatagcacccacacgggacacagaacagccaagataattttgaaaaataagaacgaaggactcatacttcttgatttcaaaactgactacaaagctacagtaattaacactgtgtgagactggcataaggatatgcatatagattgataaaataaaactgagaagcccttgagaaataaaccttatatatatggtcaactgatttttgacaataatgacaagaaaattcaataggaaaagaagttatttcaacaaatggtactgggacaactggatacacacatgcaaaaggatgaagttggaaccttacctcataccatatgcaaaaattaatgctaaatgagtcatagacctatatataagaattagaactataaaacttatggaagaaaatataggtgtaagtctttgtgattttggattacacaatggtttcctagaatgactcttaagcacaagcaaccaaatcaataagttggatttcatcaaaattgaaaacttttgtgcctcaaaggacattatcaagacaatgagaagagaacacatagaagaacacacttacaaatcatatatctgatacatatctgctttccaaaataagtaaaaacttttataactcaataataaaaacacaagtaacccagtttaaaaatgggcaaaaacaaagt

SEQ ID NO: 400794 - DNA, 455 bp, Homo sapiens
ttctatacctaatttggtaagagtttgtaataatgaaaagatgctgaattttgtgaaatactttttctgcagctattgagatgatcatatgattcctgtccttcattctgttaacgtgatatagcacctttattgatttggctatgttaaaacactcttgcatcccaggaataaatcccacttgatcatgctgtatggtccttttaatgtgctgttgaatttggtttgctagcattttgttgaagattttctgcatctattttcaggagggttattggcttatagttttcttttttcatatatctttgtctggcattaatgttagcataatgctggctttgtaaaaataagtacagaagtgttctttcccattccatttttgggaaaggtttgagaaacagtattattaattcttctttagctgttgataaaattaaacagcaaagccatcaaat

SEQ ID NO: 400795 - DNA, 930 bp, Homo sapiens
tgcgcatcatgcatatgggggccagttgggagacagcctgtgctagcgtcattctgtgagtggcgagaataaaatgaattcagtaggttgtggtcagataataaaaacagtgacagccaaacagctaattttacatttggtgttttggctataggaatctctgttaggtacctgagccaggaagtactgttatgaaagcactgttttcatgggttggaggaggggagcagggagacttctagaaggcggttagaacagtccaggcaccctgtgatgaggacaaagacttctaacagctggaaaggcaagaaagtgactctgcaaatgactgtccaaaaatattggtcatcaagtttttatgatcatcttaatataaataactggcaaagatttcatttcaagccaattttcctgtaaatttagattttggataacagtcttaagtagctagttgtgtgcagtgggaaaaacaagatcaaagtagaagcaagaaactgaagtttaaaaatatttgtgatccagagtgattcagggatcagtacgatttaaactacacaaatgcaaagtaggaacgaaagattcttaaatgtggatagagtctccagtacaaggaatgcaacaaccccttccccctgaaaatagcatagagaccatctagtgtgtataccctggaaacacttcctggctatgtgggttaccggctttgtggtcttgagatggtcagtttctgcatctgtaaaacagaaagaataactgtgtgtgccatttagggttgctgtaaaagctaaatgaggtaatatatatagtgtgcttgtcatttagcaagtgctcaataaagtgtaactaataaagataaatccttttggactcaacttttttaagagaaagaaggaaatactaacaaataaaactcatatgagtagtccgaat

SEQ ID NO: 400796 - DNA, 547 bp, Homo sapiens
ccagatatcaaaggtgggttctctttaaactgacttaacaggattcttgctacaagccccagattgaggcctggtagagaggagggctcaaggccctagcaaaagtgtggtcaagatgagagtctttatcggtgattgggaattcttgcaaagctcagcagtttaatgacccctgtatggagatcatctgaagcatcaagaccaacttaactggcacccacccttatttattcacctggttgtttgtgcattcataaataataaaccttcagcagatactatcctgtgtgctggcaagggataaatattaatctcttgggattttcggtccctgttctcacccaactggtgtttaagaggtccctatgagtttcactttttaggcgggggaggagaggagagaagaaaaaatagacctcagatactccacaacaagccatgggggaacatcactgggagagcctgggcccaggcccagccagaagttaccattgaaagaaaaattactttgtacttggaaataaaacaagaaaaaggaaaactttgt

SEQ ID NO: 400797 - DNA, 373 bp, Homo sapiens
cttcttacaaagttacctacttttttccaaaaatctgaaaagatttagggaggagatcaatggaacatgtaatgtgttttctccagtctaaaacttaacagctgcataactaattttaagtacaaatcatgctcttgggttactgagagttactggtatatggttgtgattaaagttaaaactttatttatacctgtatctctaattttctttactgattttcagctttagtctactgaaaataccattacattttaagagaaaaaaaggtgaccaatatattattaagatataagaaaaagcctttttaaattttactgattatgaaatcaatagatgtttcattgtttaaaaataatctagaaaataccaa

SEQ ID NO: 400798 - DNA, 484 bp, Homo sapiens
cttctccctgctctgtttctgatacgtcttttaaaaatatttatacatgtcaggccgggtgcaatggctcacacctgtaatctcagctcttaaggaggcagaggcgggaggatagcttaaacccaggagttcgagacctgcctgggcaatatagcaagaccccgttctccacacaaaggaaaaaaaaagtattgttgggccaggcacggtggctcacgcctgtaatcccagcactttgggaggccgaggtgggcggataacctgaggtcaggagttcgagaccagtctgaccaacatggtgaaacctggtctgtacaaaaaaaaaaaaaatacaaaaattagctgggcatgatagcgggcgcccgtaatcccagctactgaggaggctgaggcaggagaattgcttgaacccaggaggcggaggttgcagtgagccgagatcacaccactgtactccagcctgggcaacagagtgggactccat

SEQ ID NO: 400799 - DNA, 402 bp, Homo sapiens
gctcagaaaaaccataaatgcctaaatcatatctctacgccaatttctctccacatctattatcatttagaggcagagaaaacaacattaactaatgtttctggccctctgatcctcatgacttgaggctcttaatagaaatgtaacgcaaagagggaaatagggaaaactagagataaaatatttccctaactaaatggctagcagacaatgtttcaactggaaaatctaagtaacacatcctccttaaaaaaaattaggatctcagatataggtcagctctgtactcttgatttgtttttcttgagaaggagtgtggctctctctctctctctctctctctctctctctctctctctctctctctctctctctctctctctctctctctctctctctctc

SEQ ID NO: 400800 - DNA, 444 bp, Homo sapiens
tgttgttgcttgatgagtattgtctctgctgtcttgatattctgaaggcatttttagtaatggtcttgaggaccattactaatatcataccaaatcagaccaaaataatgttcctgaaagctcgtgatgaaaaggatttgctaatccaaatagagacactagagggagctctcttccaggagactggctgcatctggaaatggccctagagggacaagaaagctttaaatgactggactcatagagtatttaatggaacatcatattggtcaacagtgcaagaagagggcttatactcttatgtaggaaagacttttaaatattccaattgctatggaagttgttgtttttaaagattcattgccagcagttctagtagccaagctaatattgaagaaagactcttgaatattccaattgctatggaagttgttgtttttaaag

SEQ ID NO: 400801 - DNA, 599 bp, Homo sapiens
aatgttcacaatccgtggctgtggacgtaagggctatcaagataagacgaggaagaggaagatggcattgataataaaggtagtgatacacgaaccataggattaactgcctcctcaagtccatcatgtaaataaggtgctatgtataccaacttctcaccacctttgtttttctgttaggtctacctggccatggtagacttaaccatgaccatataaatgtaaatgaaggaaacactccaattaaaggcagcaattatcagactggattttaaaaaagcaagatctgtattgtctgcattttaaatatattttataaatcttggtaagaagttactaactcatttgcactctgtagccatctacagccatatacatacactttaatttaaaagacataattttatctcaacaagaaaaaatgttatagaagggtactttttcttccatgggcagtggcttgatacattaggtaagtttactttgtggtctgtgggctagtgtctctatatatgcacaagaaggtgcagtgggagagggggcattttcctgtgttcacccagtacacagtatgctaccatattgtgatatgaggatga

SEQ ID NO: 400802 - DNA, 489 bp, Homo sapiens
ctctgcatttactaaactcttcattgcaataacactgtctcagtaaatcagcttttctgggcaggggcaagatgaacccattaggcaattatgctggtgctgggagcagcatctctgtcccatcttttctataagctctgtcacaaagaagctaatacttttagaatatgtacctcaagttagcctctgagggttgaaaatgaatgatttttaagccaaactaattttaagcacccacaaccgactgaatggactcctgggattaaaggtgtgagccaccacgcccagcctcacctggataatttttttaaaaacattttttgtagaaatggagctttgctatgttggccaggcttggcataattattttataaattgtatatacatatgtataattgtgtgtactagtaatagtgaaaattgacattttaaaaagcagtacaatttacaacagagtaattaaatataaaatacttaggaataaaatat

SEQ ID NO: 400803 - DNA, 635 bp, Homo sapiens
agtctgagtatcagccatgagaacatcccaagcctattaaatggcaagtaaatctgtaaatggccaaatgtaatatattgcctgttagttaatgctgggaagaaaatggcttttgtttataaagtaattttagtttgtattactttaccatcgtttttcatgggttggttattatctttattttacaaatatgaaaatagtctgagataaatcagacagcttatccaatatcatgcatcctaattcagttataatctgcattttcatcagcatcctcagctttatacaataatttagcttcacattattgaccctgactcatcaatgaaaggttacattatgttgcagatgttctactttttcaaaaggcatggaggttgatagtacaaaggcctacatctgtgggaacatttctagccactattctttttcacgttctctatgaagtagagatgccggtgaggctgcagataaaagggaacacttatacactgttagtgggaatctagattagtcgagccactgtggaaagcagtttggagatttttccaagaacttagaactgccattcgacccagcaatcccattactgggtatatacccaaaggaaaataaactgttttaccgaaaagaca

SEQ ID NO: 400804 - DNA, 347 bp, Homo sapiens
tggattctcaaagaattcatgaaaatgttcacaatagagtcttcttatgcatctgttttccctacagcattcaattcaagcacatgaaatatcaggttgtacaagaagcatggcaccagcatctgcatctgatgaggacctcagggtgcttccacttgtggcagaagaaggggagctagcatgtgcagatgccacatggcgagagataaaggaaaggaaagaggaggaaggttccaggctctttttaacaatcggacctcacaggaactaatagtgtgagaagatgtttaacatattctaataagaaagatattcctaataaactgccgtgagataactgctatatt

SEQ ID NO: 400805 - DNA, 357 bp, Homo sapiens
tttatgtatgggatgcagcagggagcctagatgctagtgagaagtgacagacaggaaacatctactcaaataaataataccaaaggacagattaaattcccaacaatcacaacttttaagaaaatatgattgatctaatatgaaaatttgcagcaaatttttgaaaaatggaacatcttatttgtattataaaatatttttaaaacttataagggatatgttatagggtttctttaaagattggtctttcccactgagttttaaaaacatgatttaattgggaaaaacatagcttttcagaaatattgctgtttcccctctatccagtagatgctggtctacctactaaatatttct

SEQ ID NO: 400806 - DNA, 775 bp, Homo sapiens
gaagaaagtcctcggaagctgcaaagctctggatagatgtgaaagtttgtatttgaggaaatataaggaacatcaggatgttgtcctagcttagagaaagatcatgctaatcaaagactcatggttaggaggtacattgggagtggaattgacaggcttggtatgtgactgtatgtaaaggctgaggggaaggaggcagcatactggtttctgatttgtgggcttgggtggccagtggtttcatgggctgagatgggtggtttgggggtctgtaccagttctgtggggggcagtgatgtttgtggacagttgagcccctaggacatcccactggatatggacaactgcatgaacaggtaggacataggtccgagctggagacagatttggcagccatcagcgtgcgctggtggtggaaaccccaggaagctaaaatcccccaggggaagggtgtacaaaaaaggaaaagctgtagaaggatgtgcccatggacccttgggatctgccctgtatccatacactgcatatgtgggcgacgctcagcaggatgtctggatggactgtgccaggtccctgaatggtacactacagctcctgagaaggtagcctcatgcctgtcttctttgatcctagaaaaaccaaacaggacatccagatcatgaaagatggcaaatgctgatcccacaggagcacctcaagccatgaagtgtcagctggagaacagtggtgggcatggagaggatatgacatgaaataaaagatccagcccaactga

SEQ ID NO: 400807 - DNA, 1114 bp, Homo sapiens
gaatggattggaggaggtgagactggaggcagggaaacagcatgagtaatgaagaagtgccagtggcagcaggaaagctccctttctcaagaatgcccatctgtgaacacatggtagagtctccaacctgttcccagatgtccaacctggtctgcggcactgatgggctcacatatacgaatgaatgccagctctgcttggcccggataaaaaccaaacaggacatccagatcatgaaagatggcaaatgctgatcccacaggagcacctcaagccatgaagtgtcagctggagaacagtggtgggcatggagaggatatgacatgaaataaaagatccagcccaactgaaaaaaaacaaaaaaaaaaaaaaaaaaaaagggggggagcgacacaaaagagataccacaccaggggggcccaaagaataaaggagacaccaaagatatgtgggacaaagggggccccaaaaaggcgaaacaggtaaaaacaacaaagagcacgagtgccacgccagaaacaaacaaccacgttgaagacaccgcgcacaaacggcaacaacgcggggcaacccctgagcaacaggacaccaatacaaagaggggagaggaacacccacacctccgaccaaaacacaccaaacaagacaaccataaaaaacacccccaaagaagaccacatatacaaaggaaaccaagagtgaccaccaccgggctccccacacaacaaacacacaacaaaagacatagcaccccccaacaaacactcgagtacaaccggacaacatacagacagcaaacaacaaacacacaacgagggagcacccaaggaggacaaaacaacgaaagagaagccaacacagcagcaaccaacaccaacaccacaaccacaaccgcccgaaacaccaccacaagaacagagaacagaacactaacagaaagacagaacgccacaacagcgaaagaagaagccagccggagaaggggaccacacagaacacacaagcacaaaaaacaaggacgcgcaggacgacgacaaaccacacaaagaacagacagagaaacaaacagcgagacaacgaccaaggagccagacgaaaaaataaaacgccagac

SEQ ID NO: 400808 - DNA, 402 bp, Homo sapiens
ggcgcaggccccagccagctcaggctacactatcccaggatcagcatggccgtccgccagtgggtaatcgccctggccttggctgccctccttgttgtggacagggaagtgccagtggcagcaggaaagctccctttctcaagaatgcccatctgtgaacacatggtagagtctccaacctgttcccagatgtccaacctggtctgcggcactgatgggctcacatatacgaatgaatgccagctctgcttggcccggataaaaaccaaacaggacatccagatcatgaaagatggcaaatgctgatcccacaggagcacctcaagccatgaagtgtcagctggagaacagtggtgggcatggagaggatatgacatgaaataaaagatccagcccaactga

SEQ ID NO: 400809 - DNA, 548 bp, Homo sapiens
ttctgcaaatgggaggtactggaaagaacgtgagggcaggaggagagatatgccagggtatttattgccctagctccccctctgccagaccacaggtagaatagcaagaagtctacatcctgatgatcctgggcattgggagctcacctcaccttctctggactctggagggcacacacatatggtccctgctgggggatgcttcgcacacagaccgtcttccagaggcaggggcagggaaactgctgtcagaagtgccagtggcagcaggaaagctccctttctcaagaatgcccatctgtgaacacatggtagagtctccaacctgttcccagatgtccaacctggtctgcggcactgatgggctcacatatacgaatgaatgccagctctgcttggcccggataaaaaccaaacaggacatccagatcatgaaagatggcaaatgctgatcccacaggagcacctcaagccatgaagtgtcagctggagaacagtggtgggcatggagaggatatgacatgaaataaaagatccagcccaactga

SEQ ID NO: 400810 - DNA, 703 bp, Homo sapiens
gagagggagtctcgttctgttgcccaggctggagtgcagtggcacgatctcggctcgttgcaacctctgcctcccggtttcaagcaattctcctgcctcagcctcccgagtagctggaactgcaggtgcgcgccaccatgcctggctaatttttgtatttttagtagagatggggtttggttatgttggccaggctggtcttgaactcctgacctcgtgatctgcccaccttggtctcccaaagtgctgggattataggcgtgagccaccgcgcctggccaagaatcttttacatcgtagttttgatcagaattccaaagaacaaggttaacaaaaatgtggcttcctctatctgtatccctgtatttcttactttacatcatgatttttctccacatgttttataacagatccctgaggcagctgtataaatgggttttacatgaaaataaaatgaaatactttgagtaattctggcgaccgcatcagagaaatgagggattcaactgagacagctcacgtgatcagtcccttcctgtgtcctgtgccaagggccctcggtgcctcttcttttggaagctcattttctaattgtgaccaaggaaactcctgtatatttggttagcaaagacagccagtggagaccctgaaaggaagataagtgggaaagaaggaacagagcagagtaaatgcaaaaaaggac

SEQ ID NO: 400811 - DNA, 487 bp, Homo sapiens
tcaagaaatctttatggagcacctgctatggtccaggcccagtactaaatgctggaaagagagagatgagaaacttattctctgcttttaagcagatcaaaacctattaaatgaagacatgtaaatttgaaaaactacaaaacaagtattttaagtgcaattatagaaatgtataacaaggtatgggagaagaaaattctttttgtggagtgagcagttgtacagctcgaggggccaacatacacataaattaccacgtgatcagtgccctgtagagctgtgcagcatgaagggcctgggtggaaattggccaaggtggaatctggacttggcttcccacactcctggctcttctgtttctaatgtgccttcacattgctcttagagctatcatcttaaatgttaatacaatcaccttattgcctcgttttatatcatctactggctccccgttactcacagaataaaataaaaacttcttaaccat

SEQ ID NO: 400812 - DNA, 175 bp, Homo sapiens
caaactacttatgattaaatattcaaaacaacctaacaacccaattctcaaaagaaaagctccattaaaagcaagataaacataaaacttatgaaatggtatttttccgcactgtttccacacccttaagcagtgtggttacgacctacaaaatagagatatccaatagccaggg

SEQ ID NO: 400813 - DNA, 486 bp, Homo sapiens
cttagtaaataacgtctaatctcatggttgaaaatatcaataagctaatgacttcaaattcatctctccagtctagaatcttcctctgaactaatccagactcatttatcctaaggatattcaacatgtttttgaggcctctcagagttaacacatatcacactgcagacctgctgttgtctcagtaagctgcaccttctacagtcttctccacctccataaaaaacaaatccatactttaacttccgcagacccagatatgtgaatcattcttgattgtctttgtttctcacatcccctatcagctatttgaatattcaaaaatattctcagaataagtccttcatgatttccactcctcgagacacaattatcttctatcctgattgctgggggcctgtactaactggtgttcctgcttccattcttttttttctttttgagatggaatcttgctctgtcaccaggctggagtgcagtggcatg

SEQ ID NO: 400814 - DNA, 494 bp, Homo sapiens
caccattcattcctccctcccattcataaggccagaggtagccagtccagaactgagagggcccttccaaaggtccaggacccagactccttctccccagttgctgctggactaatttcccttcctgaagttgttttataggccaagatggatgctggagctctagccaacacagctaccttccagccaacaggaagttactcaagggcacttcccagaagctccacaatcttgggatcatatccaatgtgctgccaggaattagtcacacgaccacacctaggctgggaatacagtcttcaccctgggtagccacacatccagctaaaacatgcaggttgtatcattaggaaggaggtgaggctggatgccaggagaggccgtcagactctgtggggcctggccactgactcctccccacagcaaagttcctcctttcgaaacttgccctcctctcaaccaaaggaggtctctgtctttgcaactctgagaaa

SEQ ID NO: 400815 - DNA, 206 bp, Homo sapiens
actcttgaggctctgaagaatttctgtgctttccaattcaccaggagttacaaggtcctgaaaaccacaactgtgttacatcctttaatagataaagcaaagctgattttaatgtgaatatactttatagttatttctattcctgttaatttttgtttgcttgtaatacacatttttatgtaactgggagtaaggaacatcttagg

SEQ ID NO: 400816 - DNA, 482 bp, Homo sapiens
  misc_feature (430)..(430): n is a, c, g, or t
  misc_feature (466)..(466): n is a, c, g, or t
cattttaatacaagttcctataggtggaattgctgtgcccagagtatacaatgtataaaaatttttgtagtgtcagtttgccctactgaaagattatacattgtttccagcactgtaggtgagggtccttttctttccaccctaacaaacaacaaatattaattacctcaagaaacatttatctagttctttgtttttgaaacggagtcccctctgttgcccaggagtgcagtggtgccataatttagtttagttttattttggttttattagtttatgccatacttttagtttctaataggcttaaaaccttagtctttgacttgtccttttcccctttgttcagttagttatagtcccccccaaccccaagataggtttttactctgtcacctaggctaggctggagtgcagtgagctgagatcgtgngttgcactccagcttgggtgacagagtgagactccntctcaaaaaaaaaaaa

SEQ ID NO: 400817 - DNA, 950 bp, Homo sapiens
cattttaatacaagttcctataggtggaattgctgtgcccagagtatacaatgtataaaaatttttgtagtgtcagtttgccctactgaaagattatacattgtttccagcactgtaggtgagggtccttttctttccaccctaacaaacaacaaatattaattacctcaagaaacatttatctagttctttgtttttgaaacggagtcccctctgttgcccaggagtgcagtggtgccataatttagtttagttttattttggttttattagtttatgccatacttttagtttctaataggcttaaaaccttagtctttgacttgtccttttcccctttgttcagttagttatagtcccccccaaccccaagataggtttttactctgtcacctaggctaggctggagtgcagtggtacaatcatagctcactgcagcctccatgtcctgggctcaagtgatccttccaccttaccaagactacagtgccaccacgcccagtgaattttccttttgattttttgtagagatgaggtcttgctatgttgctcaggcttgagctcaagggatcctcctgccttggcctcccaaagtgctaggattataggcaagagtctgcacccagcctataaagtcttgctaattttataatgttaccattttttccctctccttataaatatgtactttttaaattatcaaaaaattggaagaggacggacaggaaataaagagataatcctgttaacattttagagtatatcccattagaattttttctttgtatgcaagtacatgtacatatatttagtgcagccctattagttttacaaagtgatgcctgtgtttcttttttcctttatttctactgctagtgtctaaacttttttttttttctttttttgagacagagtctcgctctgtggcccaggttggagtgcaatggcgt

SEQ ID NO: 400818 - DNA, 345 bp, Homo sapiens
tggggagatgaaaaaccaatacaaatacagcaattactatatgccagatattgttctaattgtttccaatatatcaactgattctatccttacaagaaacacaggaggtaggtgccatatcttgcataagtaaactgaggcacagggaactgaagtatgaactggtgaagcggggatctgaaccaagtccttgacttgagagtccttcccatctccgaggaagtgtcgccctcaataaatactagaaatagttgggttggcaactcagtgcttccattaactccatgtggctgaaacacggttggtacattgtcaaaaatggtagagaaatgttcaattacatgt

SEQ ID NO: 400819 - DNA, 256 bp, Homo sapiens
caaaggaccacataatttataattctatttatggagtgtctataaaagacaaattgaaaaatggttgcctggggtggaggtgggaataaggggtgattatgaacaggtgtaaggtttctttttaggtgttctaaatgttctaatattagtatatggtgatggttgtacaattctgtaaacatactaaaattcattgaattacatacttaaaacaggtcaatttcatattatggaaattgtatctcaataaagctgc

SEQ ID NO: 400820 - DNA, 497 bp, Homo sapiens
gttactggaagtaatgggagcagaaagggtttgtaccaaggctcctgaaatcacgcaggatgaagcagaaatctactctttgacaaacatggagggcaatattggaatcaaaggatgtgagttcaagtcttggctcttcaaattctatcaggctcgctctcaagttcttttgtgcggtgaagtcaagaatccgtacctgctcaccagcaacaaaaccacagtgaaggagcagaatgcctgtctgactcaccctgacagatcagctatggcaggtctgctgttgtagaaaattcttcaccccagaggctttatctctcctgcagggaaggctcatgagcaaatgctgtcattagcaaccatgcattgttgaagacatatagtgagaaaatatgtcaggtattgtttcaatgtaccaatgttagtagaaaatcctgaagaattttcgagatattaactgtagattaaaacaacctttaacctaaatcctgagaatttcc

SEQ ID NO: 400821 - DNA, 359 bp, Homo sapiens
gttatgccaggcactgtgccagatattttgcatgttattttacttaatcctaagaattatcctacaaagtatatcatcctcctttttacaaacaagggaattaaaagacactcttagcaaagttaaacagtgttttcaaacttcaggtcacaatccgtcagtgggtaatacatcaatttagtggactacaaccagaattttttttaactgaaaagggaagagtgtttcaggagtagtaaatatttttccaggaagcttttttttttcaggagtgtgtgtgtgtatgtgtgtgtgtgttggatcaggacgtgtaatgtatttgctactgtggattacagacaaaaacaaaaatttcaaaa

SEQ ID NO: 400822 - DNA, 403 bp, Homo sapiens
cacattctttagtcatcatctttttttactctccacttcttcattctaagttcaattttcttcttagaaaaatgcatcctttagtgtgtatgtgagtgtgtgtgtgaatgagagagctgtcttgagaataatttatttttagccaatcaggtctgaaaatgtctattttatcctcacttttgaatgacaattttgctaggtataaaatccgaggtcaaaacctatgtcctctcaattttttggagattctcttgctttctggactcttattattgataagatactttttgttagtctaaatatacttcctatattaatctgtcttttctgtctgtttctttaagactttcttattgtatgattttctatagtttaccacactaggtatggtcttgaatttatt

SEQ ID NO: 400823 - DNA, 293 bp, Homo sapiens
aaatgcacatacacacatacatgaatatttattctttaccttcgtgactgtcagggatacctctatttccacagttacctatttgttcccctagaaggaatgcctcaagacttctagtcttgtgtccttacaagctctctctttaggctgaagggtagctaaatctctcatctactaagtttgagacatgtcttattctgagaatctctcttgaagaacagttctgtgttccaactgctaggttctcatcgcctcttctctttcccactgtgatctgttttagcatggactta

SEQ ID NO: 400824 - DNA, 473 bp, Homo sapiens
aaatagcatgtgatgacaaagcacaatcccagatgttgaagtcatttcatctagagtttggatatttagactatgtgaacccggtggtggtcagtagtgtttaacttatattaggttctaatgcactaacctgtaaaggctgtgacataatgctcttagtgattaaatagtttgtatataaggctaggcgcgatggcttttgcctataaccccagcactttgggaggccaaggcaggccgaggtgggcagattgcttgagctcaggagttcaagaccagcctagccaacatggcaacaacccatctctacaaaaacctacaaaaattagctgggcatgatggcaggtgctgtagtctcagctactcaggaggctgaagcgagaggatggcttgagcctgggaggctgaggttgcagtgagctaagatagcaccactgcactgcagcctgtgtgaaagagtcagagcctgtctc

SEQ ID NO: 400825 - DNA, 349 bp, Homo sapiens
atcacaaaaaacaattctaaagaatatatatctcaaaaaagaaatttcaagaaaaatgaaaaactattctgaactaaatcaaaatgaaattgcaatgtattagtatttgtgagatatagttaaagtattgctctgagagaaacttatagtatttaatgcttattttcggaaaagaaaaaagatctacagtctgcaaacctaattttcacctacagaaactagagaaggaagagcaaattaacccaaaacaagcaagactaagtaaatagaaattacagtagaaatcagtaaaaccaaaaactgaaaaacatcaattactgaaaccaaaagctggttcactgaaaagatt

SEQ ID NO: 400826 - DNA, 409 bp, Homo sapiens
cccccatgttaatcgtagaaactaaggcctagagagattaaaaaacgtccatggggtcacaaggctaggaactgtggggtttggaaataaacccaggcaatctggctccagtctgtggctgctaactgctttccacctcagttaaggttgagtgaaagtacagacagagtggttcatgcctataatcctagcactttgggaggccaaggcgggtggatcaactgaagtcaggagtttgagaccagcctggccaacatggcaaaaccccatctctactaaaaatacaaaaattagctgggcatggtagtgggcacctgtaatcccagctacccgggaggcggaggttgcagtgaaccaaggtggcaccactgtactccagccttgggcacaatggcgaaattccatgtaa

SEQ ID NO: 400827 - DNA, 407 bp, Homo sapiens
gccacccagtgagagagggactggtattagccccgttttctcaaatgtacagtgaggcatcaaggtttcatgtccaggcccatggctagtgaccaggagagccaaggtgggcaccccatcagggtggcccagagctggtgagtgacttccagatggaagacagcctggggcaccaccatcctgccagtcacccctgggccaggcacaggtctccttggcctgtcttgaattatgacccattttttccacccagtggccatggctgacattggccttctccctgccatcactgccatggtgtgaattcaggtcccacccctctcatcagcctccttactggcctcctggcttctagtctctccactccccagcttgtcctccaatagaacctttctacagtgtgagtc

SEQ ID NO: 400828 - DNA, 349 bp, Homo sapiens
tcgcttgcaactgaaaggcggaggttgcagtgaaccaagatcgcaccactgcactccagcctgggcaacaaaagcgaaactccgtctcaaaaaaaaaaaaaaaaatctagtcggaagatgggcaattaactaattatatagttcaaaattaaaatatataaattattaaatgaaaattaaacttataacacaccaatgaaaataaatgacctacaaaatacacaatgaaatggataaacctcacaaaagtaatgtgcaacaaaaggagctagacacaagagtatacactgaatgtcttttacacaagatacaaaaaaaaattcatctgtgttgttagaggtcaggctag

SEQ ID NO: 400829 - DNA, 370 bp, Homo sapiens
cattatttataatactttttatatattataaattttatatattgtaggagagcggtcagggtgatgggagaaattacagggaaagacacaaacgttcttggaaggctgggaggttttgcaaagcttcgaaagaaaatttggctgaaggcagccaaattctcttattcggagcctgagagcaaagggtagataacaagggaatataaaggaactaacctagataaatttgtttactcctgtctccagaaacaaacctttgatcattcacacacaggactggtctctacttgggggggtgacaatgtttattacccacaaattgtgtttgccccaagcctttgtcattaaatctgtactaaataaatgtgag

SEQ ID NO: 400830 - DNA, 318 bp, Homo sapiens
actggacccattagtaggcattcaataaatgttagtctttaagagatcctgtgtagcagaaacatagacagatctatcagacttgaacatatcagcgtttaacttctggctctaccatttactaatgatgtgatttaagcaagttatctagctttctggatcttagtttcctcatttgtaaaataaagatggtattacctaccttgcaaagctttcttttttttttttttttttttttttttttttgagacagggtcttgctctgttattcaggatggaatgcagtggcgctatcaaagctcacttctgcctcaaact

SEQ ID NO: 400831 - DNA, 1068 bp, Homo sapiens
aaaacgcctcggtggcctccagtcaccctcaaaatagaatctgagctcccttcttggcctacagagcaccacgtgatctgaactccacttctgagctttccttgattctttcctctggcttccctcatggccctccaccgcggtggagcttccttctgctgtccctcacatttggcaggttcatttcctcctcagggcctttgcacgggcagtttctttctggaaggctatttgttcaggttttcacaggagggcttctccttgtcattcagatctcaggtccaatgtcacctctcagagagcgcctcaccccatgtgaaatgcacaagtacagatcacgcctcagacccactacattttcttcatgtcactcagagctatgatctgttacttgtttgttgcctgtctctcctaatagaacaaaagcccagtgagggcagaggtttgcctgtttcccaagaacctaaatcagtgtatggcacatagagaagccagcatttgttgatggattctgaatgaataagtgaccagcagcattggaacccatggtctcctttcctcaaagccagtgcccttaaccctggaataaatgaggtgcaaagcctgggaaggcacttctcagccccctgaggaggggcagacaataccacagaagtcctcagccacagacaccattccaaggagactctatttctaaggatcggttctttgatggttagttggttaaaaacatcacactgtgtcaaatgaaaagagactcatctagaatcctgctatggtctgaatgtgtccccccgaaagcatgtgttggaaacttaatcctcgaggcaacagttttgggaggtggggcctaatgggaggtgtttcggttacaaaggctctattctcattaatagatcaatgccagatctaaaaggacttgaggctgtgagttccatctcttgttctctctcaccctcttgccttccaccatggggtgatacaagaatgccctcgacagatgctagcactttgatactggatttcccaccctccaaagctgaaaaataaatttctttcctttataaa

SEQ ID NO: 400832 - DNA, 502 bp, Homo sapiens
cagttttattttaaatttattgagaaatctctatttcggttttcataatggctgttctcatttacactcagactagcagtgtgcaagcattccttttacttcacatctttaccaacacttttttttctttttaataagagtcattctaatatgagtgactttttatctcatagattttttggcttgcctttctctgataataagtgtaattgagcattttaaaatatctcttggccatatgtatgtctttttaaaatatttaagccttttgctcatttttcatagttatttgtttttttattgtatagtcactttcttacatgatcttgatattcaccccttgtcacaagtatggtttgcaaaaatgttctcccatttgtcttgttgattatatcagattctgtacagcaactttttaatatgaagtaatctgactcatctatttttcctttagttccctgggattttgaggttaaattaaaaaaaattactgttgaaacca

SEQ ID NO: 400833 - DNA, 418 bp, Homo sapiens
gattataccatctgctttctgccttccagaattcataaaatcgtctttctaatcatcacccctttcttttttcaactcctttgtggacattttattccattttctgcatctcttttgtttttgttttttttctttatttcttatttcagaggattggagtgggaaggataaggtatactgtgtttcagccttgcatttaaaccaaaagtctcaaccatgtttttttgttgttgttgttgtcttttttgagacggagtctcactctgtcgccaggctggagtgcagtggcacaatctcggctcactgcaacctctgcctcccaggagaatctcttgagcctgggaggtggaggttgccctgaaccaagatggtaccactgcactcccgtctgggagagagagtgaaaccttgtctcaga

SEQ ID NO: 400834 - DNA, 511 bp, Homo sapiens
gactctgcatagaggcagtcacttagagtaattaataatcttgatacagctgtagatcatatcttattttacatattacttttgacttccagtttaagttgtttgttatcaagtatttcaggagagaattgtgtacattaggctatgtttactgcagattatgtaacatgcttttatgagattatagtttgtagtgcttgcaaatataaaacatgtaccctgataaactataatcactactaggttgaccagcaaggacaaacatgaaaatgcttaaaaaaaagaaagcgcttaaaacaaagaaatagaaggtaatgggcatatataaaataagccaagcaagagaagagcaaagacaatctgcagggtggacatggatgtattcgtttctgatcatgagaagaggctcttgtcatacatatcgttccatttttattttaaagttctataaacttctgaggtaaactgatttcttggatgtacttaataaagaataaatgtttcatattgg

SEQ ID NO: 400835 - DNA, 394 bp, Homo sapiens
tgattacagcaacctcttatttgattacaattgttaaatatttatttttgtgcctaaagaagttagaaaaaacaggttttaagggctcaaaagtaactttcctttttagcaaaggatagaataacattacaaattcacagtgacagtgattgtgaaaactaccaccagaacactttataaatgtagccaaatcagaatgatctctctgtcttttatgccaaattcttttgtggtatccatgtttgactgaaatgaaataagtcactgggacttatacattcaaaaataaaacttaatgtttaatccctgagaatactgggaactaatgtgaaaccaccaattcttaggcttattacattcacaaacattagtctagtacaaattatttcttaag

SEQ ID NO: 400836 - DNA, 445 bp, Homo sapiens
ttgttctgctgacctcagaaggcatctttatgactactatattgaatcctctgttgggtatgtcatatatcatcacttaacttgtgttggttttaggagatctaaaccatctctccaagtcttgtcagattgacctcatgtagggaaggatcttaccaatatgtctgatgagagatttttaaggtgcctttcaaatctttgtgttttatcagactactatctatgttttcagtggccccctgaagcatagtgtgtgcctcatcctttcagcacttcgacactagtaaggtaggagtgagactctctagacatagttggaataggtgatgtgttggatgtgtgtcccagtttcttttagcctcataatgaagctaagtatagatatttatctcccactgtttcttcactaagctagggagatgatctgtggaaaatgcttattcat

SEQ ID NO: 400837 - DNA, 304 bp, Homo sapiens
agtcctgtgagtcccttgatccagctgtggagctctgcctccttctgggggtcatatttggacagaagctggttcttgacctcagcccacagcccatatgaggggcccttgttgaactgcgtggagctcatggctggcagacacggcggcgggatgggaccggacaggacgggacagtacccgtgaatttttcattcttatctgcccacttttattgggttgctttttcttactggtttataaaagccattatatattggagctttgaactttttattaaatgtaatataatcccaggctgtca

SEQ ID NO: 400838 - DNA, 555 bp, Homo sapiens
tttgttgtaaaaagttgagtatttttcaaacatcatttaataatagggtagcccctaaaacaagtaaggagctataagtctgagttgtgaatttgactagtaatggaataagaaaaccaagccaaactccatctaaatatgtatgtaaaggtaatgcttgtaaaaatttgctttttcctcattttgagatttcagttgccagttgactattggtatgcaaaattaacaattctgcctaaaggaggtaaacgatagaggttaattcttaaataaaagtccctttgtttcactattaactttttctatttgaagcataattgtgtcagctaatttattttttggtaaccacttaggaatttgggagggaggggggcactcaagtaagcaatgacagccagctagacatcaaaatccatgttctcacttcatggccgtacagataaatttcatttcctagcctctcttgcagttagatgtgggcatatgactaagctctagctagtggaatgagaatggatgtcaactactttaagctctttaagtcaactaaagaaa

SEQ ID NO: 400839 - DNA, 693 bp, Homo sapiens
gccctttccctcacatcctacagggacacacggcaccaatgtggcttcttactgaggatgctgacctcgatcaccaggctgaggtggtgtctgcaggtttctcctctataaagttactgcttctccctctccctgctctggaagcaagtcactaggtccagcccacatccagggaagtggacttaggctgcccatcctggcaggaggaggatcaaagaattagtgggcctgaggttagaaccatcaccatcattagtaaatttggagagagatactcagaggctatgcagatatcctgtgtcaccctgacgtattcatccatggataggtcattcttcttttagtgtgagtatcaaaagcaggttattcggtgcaaccagtgaacttgagagcagggactgggaagccctggagttgtcgtggctcagccccgtgcccctggctgtgttccttccctcctcactgccaagatgctgctgagccctggtctcacaaacacctttgagtggtctgctcactgctggggacatggactccgacaccttcctacccctcaccgttcccctctcctccgacttgccaccgccaaagccagcagtgacaaaggaggtgccaggggcagctgctccagcaggagctctctctgtactccggaccctgacatggatgaaaacaagatatgcttgggagata

SEQ ID NO: 400840 - DNA, 476 bp, Homo sapiens
gttcctttatgtacagaaccctgatgctaatataaaacactttcaagattattcacattatatgtgtctacagcttaaatgttatcgagtcactataattcaaacagatttaagatagcaaagggcattacctgtaagataagaagagccaggaaatataaattggctgctctcttaaactgctcaaacagattcattggtataaaggtaaatgcgttgtacttgtatgttttaattgcattattctgttggaaaaaataagagtcattctaaatgatgctgtatttatcacaatgtatacacatctgcaaaagtcacaagtcccacagcttacagtgacaaaggaacatcatctgtcagaaagatattgaggattttgtctgggtgcggtggcttatgcctgcaatcccagcgctttgggagaccgaggtgggtggatcacctgagcctaggagtttgagaccagcctggccaac

SEQ ID NO: 400841 - DNA, 259 bp, Homo sapiens
  misc_feature (64)..(64): n is a, c, g, or t
  misc_feature (154)..(154): n is a, c, g, or t
  misc_feature (196)..(196): n is a, c, g, or t
  misc_feature (255)..(255): n is a, c, g, or t
attaacatggggccagagcatggccatgggccgaaggatcaagagcgcttcccacagtgcccanaatcactgagcccgggacccagcccaggggacagggatggctgactcacaccaggtgctccttctgtgcaggcgtgcgttactgtctganccatagacgcgcaccatctgctccaggagatggatccccatnttgtcatacccatttacaagatgaggaaactgaggcttggaagacttgggacttgcacncagg

SEQ ID NO: 400842 - DNA, 1137 bp, Homo sapiens
tgctctgctgatactgtgccagaagtttgggttctgaagtccacaatctttacaacgttcttcccacatatgccagaatgagctattataaatcgggcagtcatgtcattgggagtgtattctccctctctatttgacaggaaacttgagttgttgggtgtctgactcctccatataacatgtactgcgttgaggggtgtgttcctcctagtgccatgctttctccagtttctcagtcctttatcgaagggtggttaagaatgaactcatttttagctagacccatttcacacatagccaatggtaataagagctatcatttcccaggtgcttaacatacagctcttaagtaggtagcattatacctttttacagaataagaaaccgaggccgagaagttacagtttgctcaaggtcatgcagctagtagaagtcacctccaagtcacacatcccatactgcctcattcataatgtctatgctgttgtcatcattgtctccaggttcaaaaggactctctgtgttcaaaagtgtccgttggtgaatggaagacttaaatcttagttacttctgaatagttgaggagggtgagaagatgttctcagtggtagtatatgatttttactgtttactcgcaaaatgaaacactgttttaacctaagtatatttttgaaaaatgacttttttcattgttggcattcaaataaaatcttaaaagtaccaacgtatactgctgcatttgccactctgtgtgaaggaggatgatttgccaaggagcttaagagtggctgcactttaaatcttccacttactccttaagtccaagggtatttgtccaaatgcattttaaactctcattctaaaattaaatatatttctaaataccagcactttgcgaggctgaggcaggtggatcacgaggtcaggagatcgagaccatcctggctagcacggtaaaaccccgtctctactaaaaatacaaaaaaattagcctggtgtggtggcaggcgcctgtagtcccagctactcaggaggctgaggcaggagaatggcctgaacctgggaggcggagcttgcagtgagccaagattgcaccactgcactccagcctgggcgacagagcaagactctgtctca

SEQ ID NO: 400843 - DNA, 566 bp, Homo sapiens
gcggccgcctactactactaaattcgcggccgcgtcgactttaaatcttccacttactccttaagtccaagggtatttgtccaaatgcattttaaactctcattctaaaattaaatatatttctaaatactagcacacattttgaaaatgacattttaagaaaaaataataccacttataataacaaaccaagagttgggtaaatggtacctgagactgttctctttactttgggggcgtatttgaaaatttccatgataaaatatcttttaaaaaattaagtggccaggcgcggtggctcatgcctgtaatcccagcactttgcgaggctgaggcaggtggatcacgaggtcaggagatcgagaccatcctggctagcacggtaaaaccccgtctctactaaaaatacaaaaaaattagcctggtgtggtggcaggcgcctgtagtcccagctactcaggaggctgaggcaggagaatggcctgaacctgggaggcggagcttgcagtgagccaagattgcaccactgcactccagcctgggcgacagagcaagactctgtctca

SEQ ID NO: 400844 - DNA, 331 bp, Homo sapiens
tactgaaatcaattaactctgacatgttatttttgttgttctataccgaagctatgtcaagtgttgggaatctgcccttctaagccacaagcttctggcttatagagttaagttgtctcaggaccacctggggagccttgatggtatctgaaacaaaaacagagaactaagaaacatatcctattgcacttaggcaatattcccattattttaataatgggaaagggaatctatttaagaaactcaggtttctatacaggagaagatgagggatatggaacaaatggagatgagagaatgaggtaaatggccttcaaagttaggtagagaa

SEQ ID NO: 400845 - DNA, 3053 bp, Homo sapiens
  misc_feature (150)..(150): n is a, c, g, or t
  misc_feature (854)..(854): n is a, c, g, or t
  misc_feature (1777)..(1777): n is a, c, g, or t
  misc_feature (2464)..(2464): n is a, c, g, or t
ggaaggcctttctctccatgctccttttgcgggaactccctggcaccaaggccaggggggaaaggacagtctctgatgaggatgggtctctaggctgctctgagtgctgtccctgcactgaagaagttatagttccctcccaggcggccncctccctgcccctcagctcagcctcaatcaagaagttccccatctttgaccactccaagtaggagaaaccggcccagggctcccttagagccgagaacagtggtgagttaagggccagcatggacagcaactctgggttacagttaagctggtgaggagctcacagacccatgcagaaagctcctactgtccctgactcctggctcccagctggagatccccactgatgctgcagcaggttccgcaggtcttacccttcagtgtcagcaagagcagggtcggggacatcaggggccggcatgggacagggccgggcctcccagcacctggtaaccctctcacttacggacagagctggccatgacggaggaggtatggatgggtacctggaggccccatcgcccccggggacccatcatggccctctacagcagccctggacccaagtacctgattccaccaacaacaggcttcatgaagcacacgcccaccaagctgcgtgcaccggcctacagcttccgtggggcccccatgctcctggcagagaactgctccccagggccccgttacaatgtaaaccccaagatactgaggactggcaaggaccttggccctgcctactccatcctggggcgctaccaaaccaagaccatgctgactcctggtccagccctgaagtcagcatttccatcctggacaccccntgacccgacttggtcaccacctgtgttggagcccagagccccacgcctagaatgttggggagtcctccttgagcccccaaactgggctgcatacccacctgcttgtcccagcagcccccttggctccttgtccaggtgactactttccagagaaatccaccaagtacgtgttcgactcagcacccagccactccatctctgcccggacaaaggcattccgagtggacagcaccccaggtccgcagcagccccaaccatcctcagccaaatggacctggggatcctgggtggggtgtgtgacatggggcagcccgacggctgatctccagagttgggggagagccccagggaaggagcagtgggccctgttccggcctgaggctccacgtccaccctgcaggccccgctgcgtacatgctgcccatggtaatggggcccaataccgtcggcaaggcctcccagccctccttttccatcaagggccgcagcaagctgggcggcttcagcgacgacctacacaaggcaagggccaccccaactgagaacagagaatcacccccaaccatctgaaccctcccccggaacccaggacccaccagttcggccctgccttgccaatgcccctcagccccctcagcccttcaccctctgggcacctgccacgtgctggggttacactgcagtggtgaggaggggcaggcaacaggccagaagggagacgccctggccccagcatggaccgtgctgaggacaagagatggggtttaggaagcactgtctggagagagagaggcaatcttagatagggtagcatggaaagaagaggaggaggaaaaaataaaccatgagctatttgggggaggagggtcctggtttcagaaacagccagtgcaaagcccctgggtggcacatgcctgagagcntgaggggcctgagatggggaagcagcatcatggcacccaacagccctcgtccatgttgattttgccagccccaggccctcaggtccaacagggcagcaacagcctctctcacacacgctcagcgatgttcccaggactggcacacactggggatgccattgccagcgtgaggctgaaatggaggaagtgacccccacatgaggtaccccacaagcagtggggtgtgatctccacagtgtgacagaagacagaaggggaccttgatgcacgggcaccaacttgtagctgaccctgttgactcagagcctgagtttgctccctgtcctctagggccacacgccctgggtaggccgagttggtctgagcctcctttacctctcagaccccaggtcccgcagcctaccgccaaactgatgtgcgggtgaccaagttcaaggctccgcagtacaccatggctgcccgtgtggagcccccaggggacaagaccctcaagccaggaccaggcgcccacagccctgagaaggtccaggaagagcacagctcagaggggtcagggtggggcagggtcctggcccagagggatgtgtaggaaagagcagggaggggggctgggacacagacgaggggaaacagggtcaggctatggaaggacacagccaagaaggggtggaggggtggggtggggangggaggcacctgcaccctgaggaccctgtacatttccagcactaggcccacaggtaacccttcagggacatggaagcagagaccctgcccttttccctagacactgtgacagctactactgctgagtgctctgtgttcaaacctgggagcatagcttctggccaccttggccccaggttcaggaaggacagcagcccagccccagccaggcagagacctgcaggtgggggcaggggtgctggttcctatcatagcccctcctctcccaggtgaccctgaccaagccctgcgccccagttgtcaccttcggcatcaaacactctgattacatgactcccctgctggttgatgtggaataacgccagccctgctgtgccccatcacacccggcatctacacaagatccgccgggccacagagctcgaggctgtcttcaccagctgggctgggccagcctggccctgcagggcagagcacgcttgtttgggcaattgtaatcagttactttttttctatgctattttaccattttttaatcttgttttctgctgtgcccaaattattaataaatcagattgcattaaaaaag

SEQ ID NO: 400846 - DNA, 2620 bp, Homo sapiens
  misc_feature (150)..(150): n is a, c, g, or t
  misc_feature (854)..(854): n is a, c, g, or t
  misc_feature (1777)..(1777): n is a, c, g, or t
ggaaggcctttctctccatgctccttttgcgggaactccctggcaccaaggccaggggggaaaggacagtctctgatgaggatgggtctctaggctgctctgagtgctgtccctgcactgaagaagttatagttccctcccaggcggccncctccctgcccctcagctcagcctcaatcaagaagttccccatctttgaccactccaagtaggagaaaccggcccagggctcccttagagccgagaacagtggtgagttaagggccagcatggacagcaactctgggttacagttaagctggtgaggagctcacagacccatgcagaaagctcctactgtccctgactcctggctcccagctggagatccccactgatgctgcagcaggttccgcaggtcttacccttcagtgtcagcaagagcagggtcggggacatcaggggccggcatgggacagggccgggcctcccagcacctggtaaccctctcacttacggacagagctggccatgacggaggaggtatggatgggtacctggaggccccatcgcccccggggacccatcatggccctctacagcagccctggacccaagtacctgattccaccaacaacaggcttcatgaagcacacgcccaccaagctgcgtgcaccggcctacagcttccgtggggcccccatgctcctggcagagaactgctccccagggccccgttacaatgtaaaccccaagatactgaggactggcaaggaccttggccctgcctactccatcctggggcgctaccaaaccaagaccatgctgactcctggtccagccctgaagtcagcatttccatcctggacaccccntgacccgacttggtcaccacctgtgttggagcccagagccccacgcctagaatgttggggagtcctccttgagcccccaaactgggctgcatacccacctgcttgtcccagcagcccccttggctccttgtccaggtgactactttccagagaaatccaccaagtacgtgttcgactcagcacccagccactccatctctgcccggacaaaggcattccgagtggacagcaccccaggtccgcagcagccccaaccatcctcagccaaatggacctggggatcctgggtggggtgtgtgacatggggcagcccgacggctgatctccagagttgggggagagccccagggaaggagcagtgggccctgttccggcctgaggctccacgtccaccctgcaggccccgctgcgtacatgctgcccatggtaatggggcccaataccgtcggcaaggcctcccagccctccttttccatcaagggccgcagcaagctgggcggcttcagcgacgacctacacaaggcaagggccaccccaactgagaacagagaatcacccccaaccatctgaaccctcccccggaacccaggacccaccagttcggccctgccttgccaatgcccctcagccccctcagcccttcaccctctgggcacctgccacgtgctggggttacactgcagtggtgaggaggggcaggcaacaggccagaagggagacgccctggccccagcatggaccgtgctgaggacaagagatggggtttaggaagcactgtctggagagagagaggcaatcttagatagggtagcatggaaagaagaggaggaggaaaaaataaaccatgagctatttgggggaggagggtcctggtttcagaaacagccagtgcaaagcccctgggtggcacatgcctgagagcntgaggggcctgagatggggaagcagcatcatggcacccaacagccctcgtccatgttgattttgccagccccaggccctcaggtccaacagggcagcaacagcctctctcacacacgctcagcgatgttcccaggactggcacacactggggatgccattgccagcgtgaggctgaaatggaggaagtgacccccacatgaggtaccccacaagcagtggggtgtgatctccacagtgtgacagaagacagaaggggaccttgatgcacgggcaccaacttgtagctgaccctgttgactcagagcctgagtttgctccctgtcctctagggccacacgccctgggtaggccgagttggtctgagcctcctttacctctcagaccccaggtcccgcagcctaccgccaaactgatgtgcgggtgaccaagttcaaggctccgcagtacaccatggctgcccgtgtggagcccccaggggacaagaccctcaagccaggaccaggcgcccacagccctgagaaggtgaccctgaccaagccctgcgccccagttgtcaccttcggcatcaaacactctgattacatgactcccctgctggttgatgtggaataacgccagccctgctgtgccccatcacacccggcatctacacaagatccgccgggccacagagctcgaggctgtcttcaccagctgggctgggccagcctggccctgcagggcagagcacgcttgtttgggcaattgtaatcagttactttttttctatgctattttaccattttttaatcttgttttctgctgtgcccaaattattaataaatcagattgcattaaaaaag

SEQ ID NO: 400847 - DNA, 405 bp, Homo sapiens
gttcacgaagagggtagagctcatctgttgtgatcatagtaactactgcaacctccctgagggagtttagttctacgtctctcctggattttgggttctttttcaaccactacgctctttttctcttccctgaacctgaattttgctctcctcttctatgcattggtagagagtgagaaagccagctcatagtgaaaagacaagcaggcataaggagacgcagtgcggacagcggagcctattgatgatggagcactagactcactctttgcacatccctgtcgctaacaggtgggaggggttttgctctccttacgtgatactgccatgaataagctcagacttggtcatttattatctcctgtatgaaaatgtgaacacttgggccataataatctccaaaaa

SEQ ID NO: 400848 - DNA, 418 bp, Homo sapiens
ctgcaagctccgcctcctgggttcacgccattctcctgcctcagcctcccgagtagctgggattacaggctcccgccatcacgcctggctaatttttgtgtatttttagtagagacggggtttcaccatgttagccaggatggtctcgatctcctcacctcgtgatctaccctcctcagcctcccaaagtgctgggattacaggcgtgagtgaccgcgcccggccctccataacccattttgatattgagtcaaagggagaaaatagtatcttctctccattattctcaattgttttgtatcttaaatcctagcagcccctaccctaattcctatctcagttttatacccctagaaattttcctttacatcccatatccaggttggagtgcagtggcgcagtcttggctcactgcagt

SEQ ID NO: 400849 - DNA, 386 bp, Homo sapiens
catgtaactaaatacataaaattgttaagaactcagaaattactgtcttagcgtatgataaatgaagtatagaaaaagtatgtgggaatatgaagaatttgaacgtttatttagaacagcataattaataaatatgtacaagtttttacgctactgatcatatgccttcctgtcaagcatcgtgaaacatttataaaaatcctaaaatcagaagaccatgataaaaatctctataaaattttaaaaacagacctgacatggtggctcacacctgtaatcccagcactttgggaggcagaggtaggaggatcgcttgagcccagaagtttgaaaccagcctggggcaacatagtgagaccctgtctctattttataaaagttaaaat

SEQ ID NO: 400850 - DNA, 617 bp, Homo sapiens
tgtagaggtggagtctccccagatttcccaggctgggttttaactcctggactcaggcgatcctcccgcctcagccttccaaaatactgggattataggcgtgagccactgggttcggccctaaatgtatttttgacttatgatatcttcaatttagaatggatttatctgaacataaccccatcataagttgaggagcatctatggtgtcttgtgaggtttattccatatatagaaataaaatatatgacaacactacaaaagtttgaagggggataaaaggaattaaactgttgtaagatttctctattgttgtagaagtactgatgtatttttaccgtatttactgccttattgattagtgagtataatgagtcaaatataaagaggtctcgagagtattgtgtaatctgatagctagtagccacatgtcactatggagcacctgatgtgactagctcaaattgagatgcaatgtaagaataaaacatccaccatatttggaagctgtagtatgaaagaatgtaaaatatctcataacaattttttatattaaatatgtcttgaaatgatagtatgttgggtacatttggttaaataaaaacattattcaaatt

SEQ ID NO: 400851 - DNA, 525 bp, Homo sapiens
aggcagccaggctgaagtgttagccacacagtgggtgcaactgtcaccaattgccggaaggcctctgcatggagccaagagagcaaggatttctccatccacagcagtatccccaaaacccatcaagtctcagcctggggagtttggggccaggcaggggaatggagagggaacacccaggagtggggactttttttttttttaaccctggagcccaggaatgtttcaacagtcatgctccaaaggcaaggagtgaatccagagaatcgcccaactcattcccagctctgctgacctcagttggtgaattaggtttcagtgctgcccccaaatgactctgctcctcctgggaagcccaggtgagccattcgctcagagccatcgggttcacctttgccctcggcccagcacagtagctcaaatccctacaattatggttttaaaaaagctgttggcctaggaccaggcacttttgtttttctcatttgcagtgcaaaataaatgccgatttcttgttgacaacct

SEQ ID NO: 400852 - DNA, 674 bp, Homo sapiens
gttacagggagtttcagcaattcatttttaccatgcccattattacataagtcaaggtgtcttagcctaattgcaagtcaggtctgaatccccttgtcccagccatatcacttgaccaaagaacattttgaagactgtttcactcacatggttgccactaacttctgtgctgccatggtccagattttctaaaatctctgtgttcaaacaaataataccaggaattctaagactgagaaggtaagataggattcctttggaaattatccattaagtaatataaattaaaagaactttaaaattgtatagtgaatacattgactataactgaaacaacatttggagttgcttgaatatattttaataatttttagatacttttttttttttttaaagttaggttctcactatgtttccagggctggtctcaaactcctggacacaagtgatcctcctgcctcagcctcccaaagtgttaggattacaggcttgagccaccacacccggcctaatttttagatattttttaatttaagttcataatatgaaagaatatcgtgcaatattggtgatggtttttggttctagagaagctttgaaaactggaaccttgtttttcctgtgttttacaacatatacagtatagtgccatacacagtggggttattcagtaa

SEQ ID NO: 400853 - DNA, 691 bp, Homo sapiens
cccaagtcacgatgaagccaacaaaccttgatactaaatcctgacaagaactttatgagaagataaatcacaagccaatatcttaaaatcttaggtaaaatatcctaaacaaaatgtaagtaaataaaactcagtgatatataaaaagaacagtacattataaccaagtcaggttcatttcaggagtgtaagaatggtttaatattcaaaattatattaattcaccacattaactaaaataaaaagatgaggatgataatattaatatgcttatgtcaaaaatgcatataaacaactaagaataagagaaaatttctttcaaatgataaagtttatctacaaaacaaacaaacaactaaaccctacagcaaatatgatctttaatagtaaatattaaaagctttcctctggagacctggaaaaagatagagatgcttgttatcaccacttttgttcaatatttattggaggtcctggtcagtgcaataaaataataaaattaaaagaatattggaaaggaactaataaatctgttatatgactaaatatagaaaagaattgtagcagtacaaaaagactccaaataaattataaaaattaatacatgaatctgctaaggtcattatctaaaaggtcaatatataaaaatcactttatttctgtatatcatcaattactgagtaaaattttt

SEQ ID NO: 400854 - DNA, 535 bp, Homo sapiens
ctatgctcctttgcttagtatagtgctgtctctgcacacagtggctgcttaataagtgttgaatgcctgtttagaatgtgatttgatgggccatccggaataggagataatcatgggaaacgtctacaaaatgtctttcagaggaaaatgctgttgagtaattgtccaggttttgaaacttttcaagttttcaggcgtccttgtaatagcttcttccatttcctctgctaaaggtatgacagaagagctgggcaagttttggtagtcttaaaagcagtttaatggagcaaccaatttgctgattcatatcatgattgaatagtcataactgaaagtgcttgaaagtattaaatcagatttttcatgatggctagtttaaaataaagcgaaaacaccggtactgtgaagttctggtagaaatgttactagttcaagttcttccccttactcccaataataagtaaaaaataaatatagataatgctatacattaatatgtatgatataagtaatataaataaataatttctcttga

SEQ ID NO: 400855 - DNA, 4033 bp, Homo sapiens
atccagggtgcactaggaggtcttcttactggaatcaccttgtcattttgggtggccattggggccttcatttaccctgcaccagcctctaagacatggcctttgcctctatcaacagaccaatgtatcaaatcaaatgtgacagcaacagggcctccagtactatccagcagacctggaatagctgatacctggtactcgatctcctacctttactacagtgcagtgggctgcttaggatgcattgttgctggagtaatcatcagcctcataacaggtcgccaaagaggtgaggatattcaaccactgttaattagaccagtttgtaatttattttgcttttggtctaagaagtacaaaacactatgctggtgtggagttcagcatgacagtgggacagagcaggaaaaccttgagaatggcagtgcccggaaacagggggctgaatctgtcttacagaacggactcagaagagaaagcctggtacatgttccaggctatgatcctaaggacatgaatgcacacacacacgtgcaatacacacacacacacacaaactccacatacttcttgcctacttgttagtagatatgtatagttgccattgctagaagacagggatgtctggtgcctatttctacttatttataactacatgcaaaatgactgtctctcgggatattctttgaaagactccaactttcacagagaaaagccaacctgctccaaatgcccttgactacttccttcttgaataaattagggctggatttcattaccattcaaaaaagcgaagtctttttgcttggtgtcatattaaacttcaggtttttcgttttagtagttttttaaccatcaaaatatcttggagtttagaggcagaacgggaaacagaaatatgcatatttaacactttcctgccacgagggataaaatagaggaatgacatccacccctgacctcatacctgacatacatgtagatatattttatgccacccatctcccatcctgtagctacaattggcatacaactactattaacctcccttcaccaccactgtcaggtcctcttccagtcattccagtcattagctgtcctgaccaaacattaaaaaaaaaattcagctaaatacagaagaagatggtatgtctggctagtgggagtgattataactaaaaactttgctccttttgtgctgtccatgcagtatgtcttcttcctttctatcactttacaatgaaaaattgcctcagagctcaataagaagtctagagcctttttccagggctaaggaaagagaaaaggaatgtcctatagaaggttgttaggatagaatttggtaaaagaacgttgcaaatattgtaacagaccataggagatttcatcagcaataggattcttctttggagaaaatacattgtccataagacttgtactctgctcattcaactcatgtgagcaagctcaactcactccacctgggttaggtaacagaagtggagaacttcatagttcgtgtctagaaaataatgtttaaagttctggagaatgagggtattgcagattaaaaggcgagttgacaaatgaaggagcagtgaaagatttttggaagaagtgaagaagtgaaattctgaaaaggtaaaagaaagaaccagtatgtcacaggggccaagtcagaggacagataataagaaacaaagttgtatctgagagtcatatattaggacaggtgtcagatatttattttggtggccagataaaagcaaaaggcctagaaacagtgtgttagcaaagtaagaagaaatggtccaaataggcaaggataaggaaatccaaaggttgtctttaaatatttctcaaaagagaaagccttgaaagaagcatacaatagagaaaaaataaattaccagtatttattattagaaaagatagaaagacagacaaatcagtggaggaattaaaacagagaaactggagtttataaaacagagcccaatccttgccttctctccctccactcaaatagaaaaggagaatggagaaagagaaagaaggtattaggctacagtttataagagagatgagaaaaaaatacatttgggaatagagggaaagggtcaaaaggggtcacatttggagaaatatctgaaaatgagaaggagcagaatttttggaaacattttttaaagtctggcaacgctaattaagctgttgatctaaggatttgcaaattgagaggtgcaattattttccaaatgatttgtgacactcttattaattagaatatatattttgtgaatattgaaatctgagccaaaactagttagctttattaatatcttagggaaagaagagagaaagaaagagggagggagagagagaaagaaagaaagaaagaaagaaagaaagaaagaaagaaagaaagaaagaaaaagaaaagaagaaagaaagaaagaaaaagacaggaagaggaagagagagacagaaagaataaaaaaacagcaattctgaggatgagaataaattaatggtaggtattacatatgcatgtacatatatatatatctgtacacatatatatgtaaatatgatttggaatacatcaggattgtgaacttccacttgggatagcataaaagcaaaatataccatacaatttttcattttactcacaaattttactcacaaattctcctaaagacatttcactaggtcagtacatttccgagaaagttttaaaaacgtttcttcttttatagtccctaattatcttacctggagtgttatcaaaatgtcatacaactggaaaatgcaattattattataaaaatatctctgccttctcttgtgtaatgaaatttatggcattaggagatgacatttcaagagattttagaggtcaatgtagagactccccccattcttcttaattgaacaaacatgcataaatctagggtttcaggtagagagcagatgggaatctacaggaaactgtcttccatagtgtatgaaaaccgtgtttgttgtgtggtgaagcaaaaggaaactatgaagcgcacagtcaatagattcagctagtgagtcccagcactcctttcaggccctcactaggattagcagcccagagtcatgccaaggccactggtgcagtacaaagacagttcagtgacaagttccatccataccatggaagagggttaaacttgtggctgtttttgccacagcatgaccagagacattctcaataaatggcactaggaatgatgagttttagaggggcctaaaatgttccaaacttgatactcaccactgtacctttaaagcacaaccacagatattggtaaaaatggaacagaattacctcaatacctctttaactcattctgaatgaattcattttgatgacagacattttttgtcaccatttggaataagaactacaacagcttatgattgaggtgaggaactgcagtcaaatggcttaggttcaaacacgagttctgacacaaatctaggtaattttgggcaatattttaaaatcttagtttattcaccaattaataggagtaaaaattacccctacttaatagaattattatgaagatttatataagtaaatcatataaagtgcttagcacagtgtgactggcccacatggaacatttaatacttggtctgcagtatatgaagaaaatggtgtacatgttaacttaaatggtttcattatttctcttcaggatttttaagatgtgggatcagaatatatgttactattttgagaattagaaataataagaaaaacagaatgtatacattaaaagtcatgcctaaatttccaaagagtagtttttttaatgccagagtttaaataaaatattattttccagagagtaacttttctaaaggtcctaaattctgaaaagagagaaaactactgttataaacaagtttattactaaaagatgcaattcattactatgatttattattattttgtacatgtaaaccttgataaataaacagcatctca

SEQ ID NO: 400856 - DNA, 4668 bp, Homo sapiens
atccagggtgcactaggaggtcttcttactggaatcaccttgtcattttgggtggccattggggccttcatttaccctgcaccagcctctaagacatggcctttgcctctatcaacagaccaatgtatcaaatcaaatgtgacagcaacagggcctccagtactatccagcagacctggaatagctgatacctggtactcgatctcctacctttactacagtgcagtgggctgcttaggatgcattgttgctggagtaatcatcagcctcataacaggtcgccaaagaggtgaggatattcaaccactgttaattagaccagtttgtaatttattttgcttttggtctaagaagtacaaaacactatgctggtgtggagttcagcatgacagtgggacagagcaggaaaaccttgagaatggcagtgcccggaaacagggggctgaatctgtcttacagaacggactcagaagagaaagcctggtacatgttccaggctatgatcctaaggacaaaagctacaacaatatggcatttgagactacccatttctaaggcaatacctgtatgaatgcacacacacacgtgcaatacacacacacacacacaaactccacatacttcttgcctacttgttagtagatatgtatagttgccattgctagaagacagggatgtctggtgcctatttctacttatttataactacatgcaaaatgactgtctctcgggatattctttgaaagactccaactttcacagagaaaagccaacctgctccaaatgcccttgactacttccttcttgaataaattagggctggatttcattaccattcaaaaaagcgaagtctttttgcttggtgtcatattaaacttcaggtttttcgttttagtagttttttaaccatcaaaatatcttggagtttagaggcagaacgggaaacagaaatatgcatatttaacactttcctgccacgagggataaaatagaggaatgacatccacccctgacctcatacctgacatacatgtagatatattttatgccacccatctcccatcctgtagctacaattggcatacaactactattaacctcccttcaccaccactgtcaggtcctcttccagtcattccagtcattagctgtcctgaccaaacattaaaaaaaaaattcagctaaatacagaagaagatggtatgtctggctagtgggagtgattataactaaaaactttgctccttttgtgctgtccatgcagtatgtcttcttcctttctatcactttacaatgaaaaattgcctcagagctcaataagaagtctagagcctttttccagggctaaggaaagagaaaaggaatgtcctatagaaggttgttaggatagaatttggtaaaagaacgttgcaaatattgtaacagaccataggagatttcatcagcaataggattcttctttggagaaaatacattgtccataagacttgtactctgctcattcaactcatgtgagcaagctcaactcactccacctgggttaggtaacagaagtggagaacttcatagttcgtgtctagaaaataatgtttaaagttctggagaatgagggtattgcagattaaaaggcgagttgacaaatgaaggagcagtgaaagatttttggaagaagtgaagaagtgaaattctgaaaaggtaaaagaaagaaccagtatgtcacaggggccaagtcagaggacagataataagaaacaaagttgtatctgagagtcatatattaggacaggtgtcagatatttattttggtggccagataaaagcaaaaggcctagaaacagtgtgttagcaaagtaagaagaaatggtccaaataggcaaggataaggaaatccaaaggttgtctttaaatatttctcaaaagagaaagccttgaaagaagcatacaatagagaaaaaataaattaccagtatttattattagaaaagatagaaagacagacaaatcagtggaggaattaaaacagagaaactggagtttataaaacagagcccaatccttgccttctctccctccactcaaatagaaaaggagaatggagaaagagaaagaaggtattaggctacagtttataagagagatgagaaaaaaatacatttgggaatagagggaaagggtcaaaaggggtcacatttggagaaatatctgaaaatgagaaggagcagaatttttggaaacattttttaaagtctggcaacgctaattaagctgttgatctaaggatttgcaaattgagaggtgcaattattttccaaatgatttgtgacactcttattaattagaatatatattttgtgaatattgaaatctgagccaaaactagttagctttattaatatcttagggaaagaagagagaaagaaagagggagggagagagagaaagaaagaaagaaagaaagaaagaaagaaagaaagaaagaaagaaagaaaaagaaaagaagaaagaaagaaagaaaaagacaggaagaggaagagagagacagaaagaataaaaaaacagcaattctgaggatgagaataaattaatggtaggtattacatatgcatgtacatatatatatatctgtacacatatatatgtaaatatgatttggaatacatcaggattgtgaacttccacttgggatagcataaaagcaaaatataccatacaatttttcattttactcacaaattttactcacaaattctcctaaagacatttcactaggtcagtacatttccgagaaagttttaaaaacgtttcttcttttatagtccctaattatcttacctggagtgttatcaaaatgtcatacaactggaaaatgcaattattattataaaaatatctctgccttctcttgtgtaatgaaatttatggcattaggagatgacatttcaagagattttagaggtcaatgtagagactccccccattcttcttaattgaacaaacatgcataaatctagggtttcaggtagagagcagatgggaatctacaggaaactgtcttccatagtgtatgaaaaccgtgtttgttgtgtggtgaagcaaaaggaaactatgaagcgcacagtcaatagattcagctagtgagtcccagcactcctttcaggccctcactaggattagcagcccagagtcatgccaaggccactggtgcagtacaaagacagttcagtgacaagttccatccataccatggaagagggttaaacttgtggctgtttttgccacagcatgaccagagacattctcaataaatggcactaggaatgatgagttttagaggggcctaaaatgttccaaacttgatactcaccactgtacctttaaagcacaaccacagatattggtaaaaatggaacagaattacctcaatacctctttaactcattctgaatgaattcattttgatgacagacattttttgtcaccatttggaataagaactacaacagcttatgattgaggtgaggaactgcagtcaaatggcttaggttcaaacacgagttctgacacaaatctaggtaattttgggcaatattttaaaatcttagtttattcaccaattaataggagtaaaaattacccctacttaatagaattattatgaagatttatataagtaaatcatataaagtgcttagcacagtgtgactggcccacatggaacatttaatacttggtctgcagtatatgaagaaaatggtgtacatgttaacttaaatggtttcattatttctcttcaggatttttaagatgtgggatcagaatatatgttactattttgagaattagaaataataagaaaaacagaatgtatacattaaaagtcatgcctaaatttccaaagagtagtttttttaatgccagagtttaaataaaatattattttccagagagtaacttttctaaaggtcctaaattctgaaaagagagaaaactactgttataaacaagtttattactaaaagatgcaattcattactatgatttattattattttgtacatgtaaaccttgataaataaacagcatctcaacccaagtttattactcattgcacagttcaaagcaactatgactctcaaaatagcaacagaaggtggggagggtcttttccctttgtttatatagtatttgctaaaaatgaactttactattttgtggctttatagggttacaccatttcattctaaagagaaacaaaaagtaaaccattggccatgtggctttcaaacagtatttcaaagagaatattactgaaatatttttgtgctgttacagtcttaatcaaacattattacaaagatcagatacggaaaaaatagaggagtctccccttaattgttccctttgaaataaattgttttaaattattacagaagttatagctgtatgtacatgcacatttgtatatttacaagtctcatgtacttaatctcaatattgcaaattagctaggtttactatagagttaactgcttttatctagcatttataatcttgtagtataacctattttcaaataactaaaatttaattgatgtcatcaatggtacacatgaaaatgatacaaatttataaactaataaaatgtaactcgtcattgatagtaaatta

SEQ ID NO: 400857 - DNA, 4313 bp, Homo sapiens
atccagggtgcactaggaggtcttcttactggaatcaccttgtcattttgggtggccattggggccttcatttaccctgcaccagcctctaagacatggcctttgcctctatcaacagaccaatgtatcaaatcaaatgtgacagcaacagggcctccagtactatccagcagacctggaatagctgatacctggtactcgatctcctacctttactacagtgcagtgggctgcttaggatgcattgttgctggagtaatcatcagcctcataacaggtcgccaaagaggtgaggatattcaaccactgttaattagaccagtttgtaatttattttgcttttggtctaagaagtacaaaacactatgctggtgtggagttcagcatgacagtgggacagagcaggaaaaccttgagaatggcagtgcccggaaacagggggctgaatctgtcttacagaacggactcagaagagaaagcctggtacatgttccaggctatgatcctaaggacaaaagctacaacaatatggcatttgagactacccatttctaaggcaatacctgtatgaatgcacacacacacgtgcaatacacacacacacacacaaactccacatacttcttgcctacttgttagtagatatgtatagttgccattgctagaagacagggatgtctggtgcctatttctacttatttataactacatgcaaaatgactgtctctcgggatattctttgaaagactccaactttcacagagaaaagccaacctgctccaaatgcccttgactacttccttcttgaataaattagggctggatttcattaccattcaaaaaagcgaagtctttttgcttggtgtcatattaaacttcaggtttttcgttttagtagttttttaaccatcaaaatatcttggagtttagaggcagaacgggaaacagaaatatgcatatttaacactttcctgccacgagggataaaatagaggaatgacatccacccctgacctcatacctgacatacatgtagatatattttatgccacccatctcccatcctgtagctacaattggcatacaactactattaacctcccttcaccaccactgtcaggtcctcttccagtcattccagtcattagctgtcctgaccaaacattaaaaaaaaaattcagctaaatacagaagaagatggtatgtctggctagtgggagtgattataactaaaaactttgctccttttgtgctgtccatgcagtatgtcttcttcctttctatcactttacaatgaaaaattgcctcagagctcaataagaagtctagagcctttttccagggctaaggaaagagaaaaggaatgtcctatagaaggttgttaggatagaatttggtaaaagaacgttgcaaatattgtaacagaccataggagatttcatcagcaataggattcttctttggagaaaatacattgtccataagacttgtactctgctcattcaactcatgtgagcaagctcaactcactccacctgggttaggtaacagaagtggagaacttcatagttcgtgtctagaaaataatgtttaaagttctggagaatgagggtattgcagattaaaaggcgagttgacaaatgaaggagcagtgaaagatttttggaagaagtgaagaagtgaaattctgaaaaggtaaaagaaagaaccagtatgtcacaggggccaagtcagaggacagataataagaaacaaagttgtatctgagagtcatatattaggacaggtgtcagatatttattttggtggccagataaaagcaaaaggcctagaaacagtgtgttagcaaagtaagaagaaatggtccaaataggcaaggataaggaaatccaaaggttgtctttaaatatttctcaaaagagaaagccttgaaagaagcatacaatagagaaaaaataaattaccagtatttattattagaaaagatagaaagacagacaaatcagtggaggaattaaaacagagaaactggagtttataaaacagagcccaatccttgccttctctccctccactcaaatagaaaaggagaatggagaaagagaaagaaggtattaggctacagtttataagaaagaaaagaagaaagaaagaaagaaaaagacaggaagaggaagagagagacagaaagaataaaaaaacagcaattctgaggatgagaataaattaatggtaggtattacatatgcatgtacatatatatatatctgtacacatatatatgtaaatatgatttggaatacatcaggattgtgaacttccacttgggatagcataaaagcaaaatataccatacaatttttcattttactcacaaattttactcacaaattctcctaaagacatttcactaggtcagtacatttccgagaaagttttaaaaacgtttcttcttttatagtccctaattatcttacctggagtgttatcaaaatgtcatacaactggaaaatgcaattattattataaaaatatctctgccttctcttgtgtaatgaaatttatggcattaggagatgacatttcaagagattttagaggtcaatgtagagactccccccattcttcttaattgaacaaacatgcataaatctagggtttcaggtagagagcagatgggaatctacaggaaactgtcttccatagtgtatgaaaaccgtgtttgttgtgtggtgaagcaaaaggaaactatgaagcgcacagtcaatagattcagctagtgagtcccagcactcctttcaggccctcactaggattagcagcccagagtcatgccaaggccactggtgcagtacaaagacagttcagtgacaagttccatccataccatggaagagggttaaacttgtggctgtttttgccacagcatgaccagagacattctcaataaatggcactaggaatgatgagttttagaggggcctaaaatgttccaaacttgatactcaccactgtacctttaaagcacaaccacagatattggtaaaaatggaacagaattacctcaatacctctttaactcattctgaatgaattcattttgatgacagacattttttgtcaccatttggaataagaactacaacagcttatgattgaggtgaggaactgcagtcaaatggcttaggttcaaacacgagttctgacacaaatctaggtaattttgggcaatattttaaaatcttagtttattcaccaattaataggagtaaaaattacccctacttaatagaattattatgaagatttatataagtaaatcatataaagtgcttagcacagtgtgactggcccacatggaacatttaatacttggtctgcagtatatgaagaaaatggtgtacatgttaacttaaatggtttcattatttctcttcaggatttttaagatgtgggatcagaatatatgttactattttgagaattagaaataataagaaaaacagaatgtatacattaaaagtcatgcctaaatttccaaagagtagtttttttaatgccagagtttaaataaaatattattttccagagagtaacttttctaaaggtcctaaattctgaaaagagagaaaactactgttataaacaagtttattactaaaagatgcaattcattactatgatttattattattttgtacatgtaaaccttgataaataaacagcatctcaacccaagtttattactcattgcacagttcaaagcaactatgactctcaaaatagcaacagaaggtggggagggtcttttccctttgtttatatagtatttgctaaaaatgaactttactattttgtggctttatagggttacaccatttcattctaaagagaaacaaaaagtaaaccattggccatgtggctttcaaacagtatttcaaagagaatattactgaaatatttttgtgctgttacagtcttaatcaaacattattacaaagatcagatacggaaaaaatagaggagtctccccttaattgttccctttgaaataaattgttttaaattattacagaagttatagctgtatgtacatgcacatttgtatatttacaagtctcatgtacttaatctcaatattgcaaattagctaggtttactatagagttaactgcttttatctagcatttataatcttgtagtataacctattttcaaataactaaaatttaattgatgtcatcaatggtacacatgaaaatgatacaaatttataaactaataaaatgtaactcgtcattgatagtaaatta

SEQ ID NO: 400858 - DNA, 4087 bp, Homo sapiens
atccagggtgcactaggaggtcttcttactggaatcaccttgtcattttgggtggccattggggccttcatttaccctgcaccagcctctaagacatggcctttgcctctatcaacagaccaatgtatcaaatcaaatgtgacagcaacagggcctccagtactatccagcagacctggaatagctgatacctggtactcgatctcctacctttactacagtgcagtgggctgcttaggatgcattgttgctggagtaatcatcagcctcataacaggtcgccaaagaggtgaggatattcaaccactgttaattagaccagtttgtaatttattttgcttttggtctaagaagtacaaaacactatgctggtgtggagttcagcatgacagtgggacagagcaggaaaaccttgagaatggcagtgcccggaaacagggggctgaatctgtcttacagaacggactcagaagagaaagcctggtacatgttccaggctatgatcctaaggacaaaagctacaacaatatggcatttgagactacccatttctaaggcaatacctgtatgaatgcacacacacacgtgcaatacacacacacacacacaaactccacatacttcttgcctacttgttagtagatatgtatagttgccattgctagaagacagggatgtctggtgcctatttctacttatttataactacatgcaaaatgactgtctctcgggatattctttgaaagactccaactttcacagagaaaagccaacctgctccaaatgcccttgactacttccttcttgaataaattagggctggatttcattaccattcaaaaaagcgaagtctttttgcttggtgtcatattaaacttcaggtttttcgttttagtagttttttaaccatcaaaatatcttggagtttagaggcagaacgggaaacagaaatatgcatatttaacactttcctgccacgagggataaaatagaggaatgacatccacccctgacctcatacctgacatacatgtagatatattttatgccacccatctcccatcctgtagctacaattggcatacaactactattaacctcccttcaccaccactgtcaggtcctcttccagtcattccagtcattagctgtcctgaccaaacattaaaaaaaaaattcagctaaatacagaagaagatggtatgtctggctagtgggagtgattataactaaaaactttgctccttttgtgctgtccatgcagtatgtcttcttcctttctatcactttacaatgaaaaattgcctcagagctcaataagaagtctagagcctttttccagggctaaggaaagagaaaaggaatgtcctatagaaggttgttaggatagaatttggtaaaagaacgttgcaaatattgtaacagaccataggagatttcatcagcaataggattcttctttggagaaaatacattgtccataagacttgtactctgctcattcaactcatgtgagcaagctcaactcactccacctgggttaggtaacagaagtggagaacttcatagttcgtgtctagaaaataatgtttaaagttctggagaatgagggtattgcagattaaaaggcgagttgacaaatgaaggagcagtgaaagatttttggaagaagtgaagaagtgaaattctgaaaaggtaaaagaaagaaccagtatgtcacaggggccaagtcagaggacagataataagaaacaaagttgtatctgagagtcatatattaggacaggtgtcagatatttattttggtggccagataaaagcaaaaggcctagaaacagtgtgttagcaaagtaagaagaaatggtccaaataggcaaggataaggaaatccaaaggttgtctttaaatatttctcaaaagagaaagccttgaaagaagcatacaatagagaaaaaataaattaccagtatttattattagaaaagatagaaagacagacaaatcagtggaggaattaaaacagagaaactggagtttataaaacagagcccaatccttgccttctctccctccactcaaatagaaaaggagaatggagaaagagaaagaaggtattaggctacagtttataagagagatgagaaaaaaatacatttgggaatagagggaaagggtcaaaaggggtcacatttggagaaatatctgaaaatgagaaggagcagaatttttggaaacattttttaaagtctggcaacgctaattaagctgttgatctaaggatttgcaaattgagaggtgcaattattttccaaatgatttgtgacactcttattaattagaatatatattttgtgaatattgaaatctgagccaaaactagttagctttattaatatcttagggaaagaagagagaaagaaagagggagggagagagagaaagaaagaaagaaagaaagaaagaaagaaagaaagaaagaaagaaagaaaaagaaaagaagaaagaaagaaagaaaaagacaggaagaggaagagagagacagaaagaataaaaaaacagcaattctgaggatgagaataaattaatggtaggtattacatatgcatgtacatatatatatatctgtacacatatatatgtaaatatgatttggaatacatcaggattgtgaacttccacttgggatagcataaaagcaaaatataccatacaatttttcattttactcacaaattttactcacaaattctcctaaagacatttcactaggtcagtacatttccgagaaagttttaaaaacgtttcttcttttatagtccctaattatcttacctggagtgttatcaaaatgtcatacaactggaaaatgcaattattattataaaaatatctctgccttctcttgtgtaatgaaatttatggcattaggagatgacatttcaagagattttagaggtcaatgtagagactccccccattcttcttaattgaacaaacatgcataaatctagggtttcaggtagagagcagatgggaatctacaggaaactgtcttccatagtgtatgaaaaccgtgtttgttgtgtggtgaagcaaaaggaaactatgaagcgcacagtcaatagattcagctagtgagtcccagcactcctttcaggccctcactaggattagcagcccagagtcatgccaaggccactggtgcagtacaaagacagttcagtgacaagttccatccataccatggaagagggttaaacttgtggctgtttttgccacagcatgaccagagacattctcaataaatggcactaggaatgatgagttttagaggggcctaaaatgttccaaacttgatactcaccactgtacctttaaagcacaaccacagatattggtaaaaatggaacagaattacctcaatacctctttaactcattctgaatgaattcattttgatgacagacattttttgtcaccatttggaataagaactacaacagcttatgattgaggtgaggaactgcagtcaaatggcttaggttcaaacacgagttctgacacaaatctaggtaattttgggcaatattttaaaatcttagtttattcaccaattaataggagtaaaaattacccctacttaatagaattattatgaagatttatataagtaaatcatataaagtgcttagcacagtgtgactggcccacatggaacatttaatacttggtctgcagtatatgaagaaaatggtgtacatgttaacttaaatggtttcattatttctcttcaggatttttaagatgtgggatcagaatatatgttactattttgagaattagaaataataagaaaaacagaatgtatacattaaaagtcatgcctaaatttccaaagagtagtttttttaatgccagagtttaaataaaatattattttccagagagtaacttttctaaaggtcctaaattctgaaaagagagaaaactactgttataaacaagtttattactaaaagatgcaattcattactatgatttattattattttgtacatgtaaaccttgataaataaacagcatctca

SEQ ID NO: 400859 - DNA, 3887 bp, Homo sapiens
atccagggtgcactaggaggtcttcttactggaatcaccttgtcattttgggtggccattggggccttcatttaccctgcaccagcctctaagacatggcctttgcctctatcaacagaccaatgtatcaaatcaaatgtgacagcaacagggcctccagtactatccagcagacctggaatagctgatacctggtactcgatctcctacctttactacagtgcagtgggctgcttaggatgcattgttgctggagtaatcatcagcctcataacaggtcgccaaagaggtgaggatattcaaccactgttaattagaccagtttgtaatttattttgcttttggtctaagaagtacaaaacactatgctggtgtggagttcagcatgacagtgggacagagcaggaaaaccttgagaatggcagtgcccggaaacagggggctgaatctgtcttacagaacggactcagaagagaaagcctggtacatgttccaggctatgatcctaaggacaaaagctacaacaatatggcatttgagactacccatttctaaggcaatacctgtatgaatgcacacacacacgtgcaatacacacacacacacacaaactccacatacttcttgcctacttgttagtagatatgtatagttgccattgctagaagacagggatgtctggtgcctatttctacttatttataactacatgcaaaatgactgtctctcgggatattctttgaaagactccaactttcacagagaaaagccaacctgctccaaatgcccttgactacttccttcttgaataaattagggctggatttcattaccattcaaaaaagcgaagtctttttgcttggtgtcatattaaacttcaggtttttcgttttagtagttttttaaccatcaaaatatcttggagtttagaggcagaacgggaaacagaaatatgcatatttaacactttcctgccacgagggataaaatagaggaatgacatccacccctgacctcatacctgacatacatgtagatatattttatgccacccatctcccatcctgtagctacaattggcatacaactactattaacctcccttcaccaccactgtcaggtcctcttccagtcattccagtcattagctgtcctgaccaaacattaaaaaaaaaattcagctaaatacagaagaagatggtatgtctggctagtgggagtgattataactaaaaactttgctccttttgtgctgtccatgcagtatgtcttcttcctttctatcactttacaatgaaaaattgcctcagagctcaataagaagtctagagcctttttccagggctaaggaaagagaaaaggaatgtcctatagaaggttgttaggatagaatttggtaaaagaacgttgcaaatattgtaacagaccataggagatttcatcagcaataggattcttctttggagaaaatacattgtccataagacttgtactctgctcattcaactcatgtgagcaagctcaactcactccacctgggttaggtaacagaagtggagaacttcatagttcgtgtctagaaaataatgtttaaagttctggagaatgagggtattgcagattaaaaggcgagttgacaaatgaaggagcagtgaaagatttttggaagaagtgaagaagtgaaattctgaaaaggtaaaagaaagaaccagtatgtcacaggggccaagtcagaggacagataataagaaacaaagttgtatctgagagtcatatattaggacaggtgtcagatatttattttggtggccagataaaagcaaaaggcctagaaacagtgtgttagcaaagtaagaagaaatggtccaaataggcaaggataaggaaatccaaaggttgtctttaaatatttctcaaaagagaaagccttgaaagaagcatacaatagagaaaaaataaattaccagtatttattattagaaaagatagaaagacagacaaatcagtggaggaattaaaacagagaaactggagtttataaaacagagcccaatccttgccttctctccctccactcaaatagaaaaggagaatggagaaagagaaagaaggtattaggctacagtttataagagagatgagaaaaaaatacatttgggaatagagggaaagggtcaaaaggggtcacatttggagaaatatctgaaaatgagaaggagcagaatttttggaaacattttttaaagtctggcaacgctaattaagctgttgatctaaggatttgcaaattgagaggtgcaattattttccaaatgatttgtgacactcttattaattagaatatatattttgtgaatattgaaatctgagccaaaactagttagctttattaatatcttagggaaagaagagagaaagaaagagggagggagagagagaaagaaagaaagaaagaaagaaagaaagaaagaaagaaagaaagaaagaaaaagaaaagaagaaagaaagaaagaaaaagacaggaagaggaagagagagacagaaagaataaaaaaacagcaattctgaggatgagaataaattaatggtaggtattacatatgcatgtacatatatatatatctgtacacatatatatgtaaatatgatttggaatacatcaggattgtgaacttccacttgggatagcataaaagcaaaatataccatacaatttttcattttactcacaaattttactcacaaattctcctaaagacatttcactaggtcagtacatttccgagaaagttttaaaaacgtttcttcttttatagtccctaattatcttacctggagtgttatcaaaatgtcatacaactggaaaatgcaattattattataaaaatatctctgccttctcttgtgtaatgaaatttatggcattaggagatgacatttcaagagattttagaggtcaatgtagagactccccccattcttcttaattgaacaaacatgcataaatctagggtttcaggtagagagcagatgggaatctacaggaaactgtcttccatagtgtatgaaaaccgtgtttgttgtgtggtgaagcaaaaggaaactatgaagcgcacagtcaatagattcagctagtgagtcccagcactcctttcaggccctcactaggattagcagcccagagtcatgccaaggccactggtgcagtacaaagacagttcagtgacaagttccatccataccatggaagagggttaaacttgtggctgtttttgccacagcatgaccagagacattctcaataaatggcactaggaatgatgagttttagaggggcctaaaatgttccaaacttgatactcaccactgtacctttaaagcacaaccacagatattggtaaaaatggaacagaattacctcaatacctctttaactcattctgaatgaattcattttgatgacagacattttttgtcaccatttggaataagaactacaacagcttatgattgaggtgaggaactgcagtcaaatggcttaggttcaaacacgagttctgacacaaatctaggtaattttgggcaatattttaaaatcttagtttattcaccaattaataggagtaaaaattacccctacttaatagaattattatgaagatttatataagtaaatcatataaagtgcttagcacagtgtgactggcccacatggaacatttaatacttggtctgcagtatatgaagaaaatggtgtacatgttaacttaaatggtttcattatttctcttcaggatttttaagatgtgggatcagaatatatgttactattttgagaattagaaataataagaaaaacagaatgtatacattaaaagtcatgccta

SEQ ID NO: 400860 - DNA, 532 bp, Homo sapiens
cgcagaaaaccaatgctgcatggaaaaatgtacctaacaagagcttcaagaaatagtgacagaattaaagagggaaatccacagtcacagttgaagatttcaggacctttccctcagcagttgatagaataattagacaaaaacaaacaacagcaacaaaaagtaacaaggacgtagacgttctgaacaatactattaaccaccatgacctaattgacattctagaacactgcacccgaccagtttcagaatacacattctttccttgtgcatatgctacatccgccaaggtagactgcatgctgggccataacgcacattttgataaatgtgaaaggattgagatcataccaggaaaaacaaaggaagaagtcacaccaaatatgttctctggccccagtagaattaaattggaaataggtagcaacagatataggaaaacaccaaatatttcaaaatttaacgaagcacttatcaataatccatggataaaagaagaaatcactagagaaaattaaaaatattttgaacc

SEQ ID NO: 400861 - DNA, 512 bp, Homo sapiens
taaaaaataatataatctcctagacagaacaagggttttaaaaaaagtatgcctccaatataaaacctgggttacttcttactgttgtctaaaaccttggcttttgtcttttttatctttactcagaggaaggccatcctccccatcttacttctaggtctgtccttatacttcttttgtagctcctgtaccacacaactgagatctcaggagaaagatgagaatttccactgctattcagatattactcactgggaggcatatgtgggagcactggagtcagatgcccatacctactagcttcatggccaccactaactagtcctatagccatgggcaagttacttaatgactctgtgaatcagtttccttgttggtgagatgggacaactactagtatctttctcataaggttgtgaggaatcctgagtagtggaattacaggtatttcttctttccattatatgtcgataatttcccaatttttaaataataaacatgtattattctta

SEQ ID NO: 400862 - DNA, 197 bp, Homo sapiens
gaaacaccatttgccagaaaagaatgcctttcaaaacctaagcccaccttcattggcctttggttatgctgttttctcttctgtaaatgtcttcctcaagtcatctgctctccagtcaacaccatcacttccccacctgctcaatctttcccaggctggtgaattcctatccatccttcaaagcccagttcaatatc

SEQ ID NO: 400863 - DNA, 457 bp, Homo sapiens
ctggctgcaaaccagacttatctaggagactttgaaaagtagattccgggccagatgcggtggctgacgcctgtaatcccagcactttgggaggccgaggcgggcggatcacgaggtcaggagatccagaccatcctagctaacatggtgaaaccccgtctctactaaaaatacaaaaaattagccggatgtggtggtgggcgcctgtagtctcagctacttgggaggctgaggcaggagagcgtgaacccgggaagcagagcttgcagtgagccgagatcgcaccactgcactccagcctgggcgacaaagcgagactccatctcaagaaaagaaaagtggattgcaggccaggtgcggtggccctcacttgtaatcccaacacttggagcggccaaagctggaggatcgcttgagcccaggagtttgaggctatagtgagctgtgatcataccac

SEQ ID NO: 400864 - DNA, 580 bp, Homo sapiens
cacaagccaggtaggttagggtggcacaggaggggaggcctaatataacctgccaggaggtagctaagcaggcttagtgagggtacattttgtggagcactttggtctttttggaagtttccaagatgtttcagtacagccagccttgatcgttcttaggcacatgagggaggggctcacacacaacaagactcagaagggacatcttcctgtggtgggttcatagctggatacaggtccccaactccctggcccacatcaggggaccaaaggcctaaaaaggagtctaaattaaggaggcaggagtttcccatgatttctgaggggttcttgtgcacttctgagccaataagctagaagtagctgaacctcactggattttacgggtggggaaactgaggtagggagaagtctcatggcttgcccagagccacacgctgaaggttgaccccaggtccttttgcctgcactccacttctcatacaaaaacacgcaggtggccgggcacagtgactcacgcctgtaatctcagcactttgggaggccaaggtgggcggatcacctgaggtcaggagttcga

SEQ ID NO: 400865 - DNA, 406 bp, Homo sapiens
aaattcatcaaactgtggacatttatgacctatgcattctctttatgtagattaaatgtaataaaacattccccccaaatgatacagatactacacttatacattaccatgtcagtattcactgagatgtgtatgactacatgtatttgactctacagaaaaataatatacagacatgtttattcacttggtactttttaaattgtctagaacagactgagagtgacacgcatatttgattgtgaggacagtttttgtcataatatctggttatcgtgtgatattaaactactgaagtaggggccagcaaactacagagcaaaccagatcctgcccatagcctgtttatgtctgtctttgaactaagaatcgtttttacctgaagtgttgttttgaaaaaaaaaaa

SEQ ID NO: 400866 - DNA, 524 bp, Homo sapiens
tcctaccttctattctattctattctattctattctattctgttctattctgttctgttctattctgttctattctgtttttagaataacacactaggtaaagaaactttaactgcaaggagtcagtgacttttagtgctccctgataaatgatgttattgacaaaagtaaaaaattatttcattgtttttttcctgtattactatctcctctcctgtgcttttgacagtgtgtttagtggatggataatatgtatttctctttcccactcccagattccaaattccctgcctttttggcccacctcaccacaaaagctccatagtttattaatgtaagtttgaatggatgcttctttggggaaacttcaggagttaatggaagagtttcagaaaggaatgagaatgcctcaggagttgttctgtgatggaaattggtctgttgttctgttaatgctgatggaaagaaacttacaacgcttaataaaaatctattcttttagtaaaaaaaattgtgaaataatt

SEQ ID NO: 400867 - DNA, 603 bp, Homo sapiens
aggaagggatgggattcaacctggaaaaagtaatgaagttttagtgaacttggtaaggtagactcaacaattaatgatggataatgctaggacccaacactggtaatgagtttgtattatgactcaatagcatcactttatcactttaacacagatggaggcctaaataaccatagggtaatggttcttcttagatgcagaaggacacatttatataatcttagggaccccatctctgaggtcactcataatttatattaattcattgttattgccattgccccaagaatagataaggataagacatcctgtagtacaggtagcagagatataaactattcttattcttgtgtcttgtctataggaagggagtgtatcctggtgtaagacagcatatagtagagaccattgtcaattagggcctgtgaactaagacagggtgactggctaagtccacaacccattagaaacccagaaataatcaaatcatggtgagtagtaataacacttatttataatactatacggtataaagacaagaaccaattatgttgagtagctgtaacaaatagctctatcattcgtaataactttttctgtaat

SEQ ID NO: 400868 - DNA, 514 bp, Homo sapiens
ggaaaaacttggagacagaaggaagaacaaacggactcctctcccactgaatgacctcatgtatatgtttgccacttgggactatgacctgatgcctctttaaacctctaggtcattgggaacatccacaaaacagctgaaagatgctgttttgttagaatgctcgttgtaatgcaggatgctggtgaacccagtgtgaacttttcaaaaacctattgatcccaccccacccactctctagagctctcatattgacaaaggatacctttcacagattagaaagtcagtagactccatttcttagaggaaagttgtggaaaatactctaaaaatactgtgagtagaagaaagaagcagtttagagcttcaaattcaatcgggctaagttgggcaagctactgccttataggcagtaactttctcatagaactttaaaaagttttattttgcaataattatagacttgtgggaagttgcaaaaatagtacagagagggcccatgtactcttcatcc

SEQ ID NO: 400869 - DNA, 484 bp, Homo sapiens
  misc_feature (16)..(16): n is a, c, g, or t
ccaccctaggagagcnaaccccaaaaaacccatggccaataatgagagccaaatcaggagagcattcagcaaagcaattcttgctgtagaaggaacagcacaaaaagctggaaggaaactgaggcatgcgtgaaagataacttgtcagtgtttgcagtctactgagatccccgctgcaagaaaaggcaggatttccacttgcttcttggcccgcctctgttgtccagaatccaggacaggtgacaagagaagcagatgtgatctgcacaagctggcgcagctgggttgggagttgctcttcctggacaggccgggaagggtgctggaggggagggaggaggagagaggttttaggggaggggtgctgagcagtcagggacctgtaaggtcacatttctttcaggtattctttctaggtgtactgaatgggaacattgtctgtcatccctagactgcattaaagacctaaactgcttccatttaa

SEQ ID NO: 400870 - DNA, 849 bp, Homo sapiens
atacatggtttcatttcagttttattgctcctaatgcaatttgttttcattaatgagaacccacatgtatgcatgaatcagggttttgcactgatacctcctgtgtggggtatttctttttccaggttaggtttcattctccatatttaagatctattgtgtgtatattgatatttgcctataaatattaaagatgcacctgtggttcagagaatatgttaaaattcaagaaaagctaccgatctacctaaagtagcatcaactcgttttttaaatttgtagatatttccatttgtacatggaaatttagagggaatcttaagtgacggtgaaaaataaaatggattttataatgaaccctttaacatgcttgaaaggagtggattcaggagaattaagttcatgaaagtcaggtttgaactttaaatgtttattaactttattgatttttaattaaggacaggatttttttattgcattgaaaaagcaatgagtccaaactagaggcacggaagattttttttatgaaatcagtgtttgaaagtaaggcttttttttctttgcagttctgcagagttcttctgccaaattgcatatgttctggcaagatgggaaaaggctctctgctaaggtacaaaatcagagtatctcagataagccacaacagttgtggtatgatagtttgaccatatctttgcctttgctttgacaattcccttttgatttctaccttcttcctgacatgaaacttaaacatcagttcaagggcgaaacagcatctgaaaatgtcctgcaaagactaaatggactgcattcttttttgattctgaataaagtcttagaaaagat

SEQ ID NO: 400871 - DNA, 160 bp, Homo sapiens
ctggtcccctgttcaaggctacatgtttattagtgaagactgggaactgtactatatttttcttggtatattttggtgtacaatttgtacaatttagttgttgaatatcatcttttttttcccctctgaaatgatagtttagctgggtatacgatttttg

SEQ ID NO: 400872 - DNA, 436 bp, Homo sapiens
tttccagctgaacaggcaaccaggagtggatttggagctgagagacaacaaattgataactggaacactgccaaatcatttcctcctatattcttctttttccattcataagtcaaaatggatttgttagtccattcccaaattcctaaatcccagggtttctctagacaccaccatcaaagaattccaaggtaataaaataaacttattgaggcttgctctaggataggtgtttacatacattatctccctgctgcagtggtaacatagtgagtgctatacttttggtaagctgtctataagtacttgctactactcttattatttatttatttttaaggagtctcactctgtcacccaggctggagtgcagtgagccgagatggcgccactgcactacagcatgggtgaaagagcaagacttcatctcagaaaa

SEQ ID NO: 400873 - DNA, 995 bp, Homo sapiens
agagacggggtttcaccgttttaggatggagtttttaatagggggtgttgcacattccttagaataactcacaggctccttagcttcctcttttggggttctgtacatatttgtttcaggggtacagaatgaatcacatggctacagcagagcactcttgcatgactcttgcttactcattaaagaaactcgtacatgaatcaaggctttccttatggtctcaggctgttcttcattccctgaaatggtcagaacacccatcaagtatcttggaagaatgcatatctttaaaggccataaagaaagaacgtttggttaaaaggaaaaactgctctgccacccacttgtctgagttctcctttcttcatctttaatcaatatgtacatctgttcacttgatgttttaatactagttgaggtaaattcagcttcatcatgtttttccacagaggggaaaaaagtaaccctgacttttcctctgggccttttcaaatatctacatgtagtggtggaatgagcggaggacaggaaagaccctgggaggcaggcctgtgtctcaccccactgggcctagtattccaaccaccgcacaagactaattcaagaataataggcctgggttccagccttaatcatttccattttcattatggtttacacattaattgtaaatgaccagattgattagggactctttaaagccaaacagattgggaggcagtgcagggtagtgctaactgtatatgtttgacatttccatagacctggactaaacatccagacctgtcatttactagctgtgtgaccttgggaaagtcactaggcttctctgagcctcatattttccttacctatacaatagggattgtaactacctgtatgaaaattagtgtgaataaaatgaaacaatgtatggaaaagatttcgcatagtgcctgtaaccatcgtttattgaataaaagactgtaatgcatactgctctgatatgtgtggca

SEQ ID NO: 400874 - DNA, 899 bp, Homo sapiens
gtttgactaaatgatcatttagaggaggctgagaagtttataaaccttagaaaaaatatgtaagatacaacaccataatttaaaaatgtgctataaactttaacattaaaaaccttaaaacccataaagttcaatgtagtaaaggccctcagtttaagtttttaatattctgttgcagagaagtttaacctatgcatcataaaaataactgattcataaaatcagtaatctattacttctttaataatatcagttgaaaggcctataatatttggcatgttaaacatgtaatttttctcaaactaaacctataagcaatagtagcagttcttattataatctctatacagaacaaactcatttattttcatttttaggaaagttcaatgtaaattatctcattcagtaaatacaactggccatttataaacacacaagccaatcttttcctactgaatgcagcattttaaaatatggtttcgtttaaacagtctacttatttttttgcttcttattattcacttagtccttatatttcttttgccttaattttttcatttaaaatttctcttcagttgagtaacaattattcttcagtctcttaaaatcctgctcattaaatttaatctgattcatgctgcaataacagtctgactaaagccaagtcaattacatatgcaatgactgatcattttcagctctgctatttttagtggaattatatagctcaccaggagaacaaaagtgaaaaggaaaaatacccacataaatatgacttcttagggtcatctgcttgtgactgtagaaactcatagaattacaactgcacagaattatacagtttaaaatagtttctaaaggactttctaatgaacagactatgcttattaaataataca

SEQ ID NO: 400875 - DNA, 724 bp, Homo sapiens
gggttttgaaagtaaatccttctctgtttctttacgtaataagattaacttgaagccaagcagggtcacctaggctagttgctccaccgccctgttcccaatgcttgccttggtgaataggacacagaggacatggctgtgatgcaacttacaccagcctcctatggggaaggagagcctgctcctggaggagctctcaaagtgcacgctgagatctgctgtgtcccacacaaaatctgaactgaactgcagggtgccaacgaatgattctgtttacatcgtttttctgggggaactcaaaagacgtgcatacattttgtcgacccattcagtatctctgtcaaggtaagaaacaggaaatactatttttccaaaagatagaatcatagaatttaaaatctggaagaactctcagggatagacgctgtcacataaccctctgccactgcccaagattccaaagctggggcagagctgggacaactcataagcagcagacacggctacctgtcctcttacctgcctctgtgtcagctgcactcatggaaggaggaggtctcaaaggctatcccagagacaggcttcatgcccaggattccaacactattcattttcaacaatcctcattatttttgatccgggagacgccctcaatcaggaacttacatgtccacactgcacgccatctgattctctccaagtaggggcaagaggaccggcgcct

SEQ ID NO: 400876 - DNA, 429 bp, Homo sapiens
ggccaaggtgctgtgcttgtggttttgctttacacttggtcctagccctataacatagtaaggaatagggataagatttctgcaattagttatcatgcaaagtaattggtctaggccttttttaaaaggtttagctcctggccatgagaagaatggtacttcctcctatggcatttaaagtctgtctactcagatacctttttctttccaggccttcttttccatgtgctaaaataatatctactgccttatagtaagcccactccaaagttcagcgaaagagagggagcatctcttctttatgtctccagtttaggagtgagaaaactttctcagaaaacttcccacttccttctgtgtctcattaaccaagactgaatcatatgttcacttttgaagccaatggccagtcaagggaataggattctc

SEQ ID NO: 400877 - DNA, 646 bp, Homo sapiens
ttcagagatggcaaaggaaccatggcagtcagctcatgttcatgtttcatgtttattccgtttttaattttttgtacattttacacatcgtgattgcatatctacctgctaattctaatacatgatgtacaatcggtacagtaaaccagttgattgttatttggtcatctggggctctgggtgaccaaagctcctcaggtcatgggtaatatttgagtattgatgcaagcatgcaggaatccttagggcctctactggggatgttttcccatggagagtattgctttgtgttctctaggagtcagaaacattggctgtcttctgggattccacgctagggactgactctcaggcttggctgctctgcctcccattgcccagggcctaggctttgtctttagagcagtgttgttatcatcatattcctttagagctacccagtcattttcattagtttaattcctaaatcatttctctggtgtcatttctctgtcatttatttttgagggcaaaggtggagggaagctcggatatttcatttactaactactgagcctagcaaaacttattacttctttttccagtcatggcttgaagttttcagcttctgggcttaaggagtcctctacttaccttccgtggtggg

SEQ ID NO: 400878 - DNA, 993 bp, Homo sapiens
  misc_feature (889)..(889): n is a, c, g, or t
gggaagtgaaaggcgccaggtgccagtcctggcctctgatgtaacccagcgccccgcagtcccgacacagattcctggatctcagccccatagcagctatgatcccgctgctgctggcagcgctgctgtgcgtccccgccggggccctgacctgctacggggactccgggcagcctgtagactggttcgtggtctacaagctgccagctcttagagggtccggggaggcggcgcagagagggctgcagtacaagtatctggacgagagctccggaggctggcgggacggcagggcactcatcaacagcccggagggggccgtgggccgaagcctgcagccgctgtaccggagcaacaccagccagctcgccttcctgctctacaatgaccaaccgcctcaacccagcaaggctcaggactcttccatgcgtgggcacacgaagggtgtcctgctccttgaccacgatgggggcttctggctggtccacagtgtacctaacttccctccaccggcctcctctgctgcatacagctggcctcatagcgcctgtacctacgggcagaccctgctctgtgtgtcttttcccttcgctcagttctcgaagatgggcaagcagctgacctacacctacccctgggtctataactaccagctggaagggatctttgcccaggaattccccgacttggagaatgtggtcaagggccacacgttagccaagaaccctggaacagcagcatcacactcacatcccaggccgggctgtttccagagctttgccaagttcagcaaatttggagatgacctgtactccgggtggttggcagcagccttggtacaacctgcaggtccagttctggccaaaactgtggatcctgcctctaatgncggatatcggcgagtctgaatgtgaccgatagttcctggaccgccgccaagttacagccgaggcccctcaaggggggtcccaagcccggctcgggggcacaacg

SEQ ID NO: 400879 - DNA, 430 bp, Homo sapiens
aaagcagattgtccaccctgactctgaaaaaagagcagcagctgcttctgccatctcagagggtcagctgagtagtgatgagagtggggatttgacctttagcttaaagaatttatcaaagaccccagccttgcaattggtacatgagctgttcatgaaaagcaagaggaaaagattacaggaaaatagtggacatgaattcttagagcaaggggatggggagaaaatagctgtactgcagtgtatacttgcaggactgattggcaagaaaatgggtatagaaaaactggacatcttaacagaattaaaatatagaaatttaaagcatattcttgctatggttttagagtccttgaccgcagagagcctatgcaggtaagaagtaagagttgtttatgaaataaaacttctttttttaagttgaaaagtt

SEQ ID NO: 400880 - DNA, 501 bp, Homo sapiens
acacagagacacagaagatgatgaagggaggaaaggcccattgcaactggaagcaaagggagaagggaggttctagaaaagtgacagctctcagggagcaagactccctgccgagggaggcctggctgcaaggcggagctgctgcaggctgcccatgttaggccttggaggtgtcacctaatttactgtggtccttccaggagccctgggggcctcgcccagctgacttaggagctaccacaaagttagctacctgtaagacagatggtgcttgaatagaacagcaaatacattgaataaaataaattaaaaagcctcctcctgaaccaagattttttggaaagaattctaaatagatgaaaacaaacaatttgatttcaaccaaattgttgtttttttgtttttatcctgattttcacccgaattgtcagtctcaaaaataaacactgatacattcccagaaaatatttttcaaataaaaactgactctgttaaagtttg

SEQ ID NO: 400881 - DNA, 434 bp, Homo sapiens
gccccactggggtgtgggcgagggccaggcgctgggcaggaggaggagcagatgcctcgtcagccaagtcgaggctgaacaggcaggaggggccgttactgtgtgagattactggaggagcacatggggttgcagatgaacctcctccaccatgtttgtgtgcttcatgctccagcaaggggcaggggcagggacaggggcagagacaaggttggtgaatgcccttcattgtggaaggggatgatgcagacatgggcattctctatgtttattttaaaatttcaataaaaagtaaaaaaaaaggcaggggattacctgtattttgctaaggggggtaataactacatgaagtggatttttatctctatgtagtcataaatccatgtttactatgagctacagggtcttcaataaaaaaaaatttgtctatgaca

SEQ ID NO: 400882 - DNA, 379 bp, Homo sapiens
tagtgtttccccttaagggcagacaggtctttcctggtatattcatgagaagaggcaattcctaaagcagaaaaactgagtgacctctaggtagataagagaaaaaagctctgcctcccttcttgctaaactgtaaagaatgtaggtgtccaggaaagtgagccctacagcctgggttttaacaatatcctttttcaggtggatgcagggagatagccagcaaggacaggccagcattcaaagtgccatataggatgaaagtctctaaactacttcgtttgctagattttctaaatttgttttactcttttgttaggtttctttgtaattgtctagccttgcagtaaaatcttgtttgactattccagatttgtcagcc

SEQ ID NO: 400883 - DNA, 447 bp, Homo sapiens
aggctgaggtgggaggattgcccgagcctgggaggtcaaggctgcagcgagccatgattgcggcactgcactgcagcccgggtgacagagcaagacctcaaaacctattttctcatttaggccattcatatcccttagtctgcttgaaataacccagcagccaatatatcttcattatcggaatcacccacaggaagtcagccttcatgacgttgtacttctggtagtctagtcagccactgtctgcagtccctgatcatcttctaaggtttgtttgtaaacatgtggtctgcaaccaagaatttaggatgtccaaatatggcaagtttttgccctctctgctatctagtaacatgagtaataatctttgctctccaacactttttatttgtcccaaccattgtcctaatattgtaactgtaatgcagcaaattagttgcctgagtt

SEQ ID NO: 400884 - DNA, 477 bp, Homo sapiens
ctgcaagaggaagctggagagttcccctttctcagccagaaaatgtgcttagagagaaagctggccaaggacttctgattgtggcccagacccttgacagaaatgatctgtgccattgtttaccctcctgagagacaccaagaccctgccatggctgaaccctggaaacagcttctgctccaactctctactgtggctgtgggcccggatatcccaggagacagacttcccctacatcaatcctggcaggcagcagcacagctgcggcaccatctccagaagctgttaacgacctttgccctctgactcgctgcaggaagaaagcaataaacagtggtctggggaagttgtcaggaagtgaccccaaaaggcacaggggccactgactggaaatgagcaaggcagaagtgaatttcctggcctgtacaacccctgctcagaggtttcactgcaaatacagtctccattttcagcaga

SEQ ID NO: 400885 - DNA, 529 bp, Homo sapiens
ctcttctgctgccattttcatcaaagactgatgtcacttggcatgtttttaggtttttttctggtggcttttatttttttaattttagagatgaggtctcactatgttgcccagcctagtctcaaattcctaagctcaagggatccacctgcctctatctcccaaagtgctggggttacaggcatgcaccaccacgcctggaccacattgcatgcattttatttaaatttttttttttttttttttttaagacggagtctcattctgtcacccaggctgaagtgcagtgagagactgtctcacaaaaaaaaaaaaaagaagtgtcaggtgctggcagagacactgcttttccctaattgacctgtttggtcctcacattaaccatattttacagctactctcatttacagataaggaaactgggccaatgaggaggtgagaaatcgctcaaggctgccaggtacagtggctcatccctgtaatcccagctgctttttctttttaaaaagtaaaatataacagagaaaac

SEQ ID NO: 400886 - DNA, 399 bp, Homo sapiens
ctcttctgctgccattttcatcaaagactgatgtcacttggcatgtttttaggtttttttctggtggcttttatttttttaattttagagatgaggtctcactatgttgcccagcctagtctcaaattcctaagctcaagggatccacctgcctctatctcccaaagtgctggggttacaggcatgcaccaccacgcctggaccacattgcatgcattttatttaaatttttttttttttttttttttaagacggagtctcattctgtcacccaggctgaagtgcagtggtgcgatcttggctcactgcaatcccgggttcaagcaattctcctgcctcagcctcccgagtagctgggattacaggcgtgagccactgtgcccggcctttatttaagat

SEQ ID NO: 400887 - DNA, 642 bp, Homo sapiens
tcagttgtacttttatttgcttacactattctgaggtgggtctctgtctcttggatccaaaagagttcaaattaataatcatttgacaaaaaattacctccacattcctaatgaagttgtctttgaagataatgtcttgtgatcccctggttgaagttaattactgcttgtgagcccccattaacaacgtgttcctttccccattgcttgcttgtatcagctttgctgaagatctattggctgtaggtgtgcagctttatttctgtgttctctattgtgttccattggtctacgtgtctgttattgtaccagtgccgtgctgttttggttactgtggtcttatagtttgaagccacatctgtgtgatgctgctggctttgttctttctgctttgggttgctttggctattcaggctctttctttggttccatctgaattttagaatagttgttttctaattctgtgaaaatgttccaacctctgtgaaaaatgaggttggtagtttgataggacagcattgattctgtaaattgctttgggcagtatggccatttttaaactatattgattcttccaatccatgaacatggaatgtttttccattttttggtttcatccctgatttctttctgccatgtttt

SEQ ID NO: 400888 - DNA, 688 bp, Homo sapiens
ctatcaatgattgatttctgagtctgatcatttcctcatatctgaactgcttcttgctttctgttagcactacccattattgaattataaaagcatttgagaattatgcagcacacgtaggtgtattatgtgaaaccattaggtcgttatttaggggattttgtacctttcgagagcttgtagtgcagtaaagacgatcttcatagacatatgtgagtaaagtacatagaaatgactaaattcagcaatctgaatatgtatctaaaatgtggtattaacatagaatattcatcaaaattaagtgccagacctccagtaaatgtgtacatcagtaacatgaaaatgatattaatcataggccatctaaggtaagagatcatttagtttattcattttgtaaatatgaatttagtccttgctatgagaggtgcatttgcctataacatgagctgccaagacaagtgagacaaggacctggcctagttccagctgctgggttataatcatatgtgctcttgcctttctgttctgccttcagctctgttcccttctcacactgtatttcttttgccactttttaccttgactctccctttcatttctcaatcatttcctttcatggagtgaacagtattcaccttgggctcggtgcgtgcaaaagtgaatgagactaagtagtaaagctctc

SEQ ID NO: 400889 - DNA, 1091 bp, Homo sapiens
ggaggtctggtttcaagcttgtgatacagtgaatacagacggcctagcacagagcgagggaaccagttagtgattctactcaggcatcagtggccttgcaaagctccccctgctttcatggtttttttttttttctctctcccttcttaaagagagggaaaaaaagctttcccctcgcaatttcattttttatttaagcaagcaaaatcttttagtgattttgaactgtagcaatcaggaaacaatgtttattctagtctttctttctcttcccaggagtttgaaaaataatttcagttacttgcaattgtcttttattttctcctagtttgtttggggtttggttatgcaagaagaactggtttaaaggcaataacctttataaacaacaaaaataaaaaagtaaatcacagatgctcaagcaataatgcattttaaaagtaaataataaccatttatgagatccctcttcacagcagacatcaaaggactttgttttaatagattgaaatcttctctctcctgctgtactgaattagaacccctaagttttattaccaacatcatcatcattattattgccttgcaaaatggactgccattttaatttcagaaaattggttttcccaatatactgagaatagtggcagaaggtttttaaattcctgacatgtgcctaaacatttttcctctcacagggaggaaaaagaccctcagggatttacaaacatgatttggaacctcagaaaaataaaatcaaggatgaatcaaatgagattaagttccagatctctaatataaagcaacatcaatagttctttcaaagcgattcttgaaatcagtgctcataaatatgtaatgcactttttatctaaaagacctgtttaaatcctcatatagtaaattatttatttcaagattaggtactcagcacaatgcagacaccctctgatcaagtgggaataaaatctgtgaaagcaaatggtaaggcattatgcaaatgtaaactgctgtgattatgattatcctgtgaatgggtaggtttgaaggaagaaagccaaaaaaaaagaatcaattatgtattcttcaga

SEQ ID NO: 400890 - DNA, 529 bp, Homo sapiens
ttcattttgagatgaatactgagaagtctttcattactctgcagtataaagtgtttactaaacagaattaagccacagcataataccctgccttccttcttctctatttgattcgtcctacttaacaccagcaaaagtacttctgccatttttttttttagggttagacaatttatgccatttaaagtgtaaaaatggaatttacttggcagttagagggaaaagaattgacattatctagacacaaggagttcatgggtataaagtctcagatcatcatttctgctaaagatcaagtacctaagtaaatgtaaaagactacactgagagagacatccccagttggaaaatgtgccaagtcatagaaaattgtggtagccctgaattttcaagaatggttttggccggatgtggtggcgtgcgcctgtggtctcagctactcgagaggctgaggcaggaggatcatttgaacccaggagtttgagttcagcctgggcaacatagcaagaccctgtgtcttactttttta

SEQ ID NO: 400891 - DNA, 433 bp, Homo sapiens
caaataaaggatttgttaagacaaacatgtttaatttggaaaaaggagccaacttacaaaaaaaatgttgttacactgattacttgaaattaaaccatatgttgttatgtatattttaatatctatatgttactgagagcttataatgatttttattttagggatcaaagctatactttttagaaaatattacatagtaaatataaagtatcttattattaactagagtttccatgctgtatattagatctccacaacttaccctgtatcgctgaacctttataccctttgatcaagatctccccatttcccttttccctggcccctggcaaccacttttctactctacttttacgagttcagcgttttcagatttcacatatacatgagattataaataattatttttagttgtcaagtatccttcaataaa

SEQ ID NO: 400892 - DNA, 239 bp, Homo sapiens
cttaataaaagttcttacatatttctttttttgtttcagtttagaaagaatttgaaatcagagggaaatattttttttcttaatcatgcatcctaactactcaccccaaatgaaatttgagactaggcctggtggctcacacctgtatacctagaactctgggaggctgaggcaggaggattccttgaggccaggagttcgaaaccagcctggtcaatatagcaagaccctgtctcttt

SEQ ID NO: 400893 - DNA, 445 bp, Homo sapiens
tgtttcaagtttaaaaatgaatggaaaatgaatatcaagactgaagacaaatttggatactccagtaataaatataaatcatgctatgaaagttcgtaggtgattcatagtgcctagttagagaatagcaatgaattctgtcgatgatcatgtgtggaaaattgggggtttcttttacgttgtcttttagaatgagttagttttgcaaattttcatcaaaggatttgttaaagttcagatgtttcctgtttttgacaatgaaagttattctttttttcctttttttctgtgttgggtggtgtttctaacatttgttggaaggaaaaaagccacttaggttctatggagataggttgatttcctgctagagttcatttttatgcccatgtttacctaaaattgagatctgggagcattttgagagaaattctagaccttttagtaa

SEQ ID NO: 400894 - DNA, 403 bp, Homo sapiens
aaacacagatttggggtgtcaaacaacttcatacagcctaataagtaactgtaattataaaaaaaggggaggcaattattgaagaaataattgccaaaatatttcgaaatttagtgaaatctaaaacacacagattcaagaaactcgacaaactctaatcataagaaatgtgaagaaaaaattgtaaggcacacaatcatcatactgcttaaaaccagtgacagaaatttgtaaaagcaaacagactgacacataaaggttattatttgaaagtaatattgtcggcctgatgtggtggctcatgcctgtaatctcagcactttgggaggccgaggaaggcagatcacttgaggtcaggagttcgacatcagcatggccaatatgacaaaaccccatctccact

SEQ ID NO: 400895 - DNA, 396 bp, Homo sapiens
ggatactgcccagtgattggattcagttttctgtaccgttttgcctccctcctgccactcttcacacatttccaacatttgaaccatcctgagctatgcagttccctgaaaaacatcatgctcttctgtggctccttttcttggctcctgctgttcccttatttgtttacaattagggaaattcttgcacttcatttaagacttagctcaaacgctgtttcgtctttgaaccctccactaggccatgttaactgccttgattttaaaccatcgtggaaataaatatactttctagaaaagaatttacatttcttagctggaaaaacataacccaacttggaattcctgagtatgcatctcttgtccccaccccttgatctgggggttctctagact

SEQ ID NO: 400896 - DNA, 448 bp, Homo sapiens
acatccaccaaagtccctgcggcggggggcggggtccgcccgagctctagctcggtatagggggctgccgcagcctgatcacgtctccgcctccctgactgggctggctcgtcgcctgctgctccctggcagctgtctgccgctgccgggaaggtgattgccatgtttgcagctcctttccttgtttggaaagatctggaggcaggtgaggctgccgggaaagcgcgactgacaggttgtgatctgcaggtttcggcgccgggctccgagctccaagcagtctggggaaggctgtccgtctgctgcgggctgcgttctgcctctgcgccccgtacgtgccccctctcgcggaccgggtgccggccttttcctctgggccccgcaggccccccacagccaccagaccccagccagggtcgcctggccctccctctggacccgagagacc

SEQ ID NO: 400897 - DNA, 387 bp, Homo sapiens
ctgggggagcctcgagacttgcaacgacccagacccaattccctgaggccccagcctgtggtggcagggcccacagcctgcgatctctgcataccctggatttcagaggtcactgcagtcaggccacctgaggacacacacctgagggtggtgcccaagccaagactctctctagggatgtccacgtgaccccagagaagcagcccaccccacagtccacccacagccttcgcgcctctccaggagctgggccacttttcacacacaggatccacgtcttggttattatcgaacactcttggagcttcccaagactgcagttttaaaagaaatggcggagttggcagtatttggaggtagtaatgaattttcatctttgttctccta

SEQ ID NO: 400898 - DNA, 253 bp, Homo sapiens
gcccggcaccgattgaggatctctttaagaaaaaatacaaaattgggtacaggaccttggacgggggcctgaagcttcagttactttaatattgcagttattgtccctggagccgtggttcgcactgtaatcccagcactttggtaggccgaagtgggagacccgctggagcccaggagtttgagcctgccgtgagttatgatctttggcactgcaccaccgggcgatagagcgagacactctacattaaaaa

SEQ ID NO: 400899 - DNA, 459 bp, Homo sapiens
attttaactgttagtatttctgtggtagtacctgatgatgaaattattagctacttcttcctcttcaccatagatactgataagtttctgtcttttgtcagtctgtaatgccagcatagtcaggtgtctttgatgcttttcatccaggtaaattttgtgaagcatgtctagcaaaatctggtagcaaattatttcccttgctagaagagtaaacagaaattaacatgactcaattgaactcctttccaaataaattctgtaacaatttagagctgaccatgagacttaaataaataaataaataaataataaataattatcgttttaaaagtaacaacttagtttagggctaagagaagataatgttgcttctcttgggcttctgttaattttcaagttctaatactagagctccagtacttcttcaaatactaccttcacacaatcaattttacatga

SEQ ID NO: 400900 - DNA, 436 bp, Homo sapiens
atgggtgctcatgagattaagtggggacaagatgggagagaatctttaagtgcaggcctaggggaggagagcagttgctgctgtgggaaaggcgtgaagcctggattcttctctcctgtagaacaaagcctaaagaccttgagacagaaaacctttcctggggaagggaagagataaaaccaccccttttgcgggaggggcaggttcttctaccactggaggaaaagacccctgagaaagtcttgtccttgatatccagggacagaggctgatctacaacaacaaagaatgcctccacaagcccaccattagactagcaagcaccaagaaacaggtctcaaatgtgtggggatgggtcaataatatggagagagaccttctctgaggcatagcctctgagcaaaagcctaaagctgagagtggaacaagagcattg

SEQ ID NO: 400901 - DNA, 538 bp, Homo sapiens
agtattcaaaatagaaaaattcactttatttctatgtacttagaatagacatgtgaacaggaaattcaaaatacaatgccatttacaatctctctcaaaaattaaattgcttaggtataaatctaacaaaacatgtacagaccttgtatgctgaaaaccacacaatactgatgaaggaaaacaaaatttaactgaaatgaagtgaagtgatcctgtgatcatgatcgggaaggcttaacatggtaaagatgtcaaatctccccaaattgatgtataggtataacatagttcctgtcaaaatcccagtaagatatttgaatagatacagacaagattattccaaagtttatacgggaagacaaaggaactaagtggctaaaacaattttgaaaaagaaagtggaataaaccagcctatttgatttcaagacttactacagtaatcaagattttggtgttggtggaggtatagacacatagtctaatggaaaagaatagaaaacccagatatagacccacacgaatgtgcccaactgatt

SEQ ID NO: 400902 - DNA, 526 bp, Homo sapiens
ttaaaaggtagtaaaattttctgggacagagattgaggatgttcttcagcaatcttacaaatgatttattggtttatttacataaaatcaaatcagtgtatattctatcttacattagctgaactacagtagcttccacaataagtcaagcacaaattttaatccatttaacaatctttagcaaacatttatttaaggactctaatgtttcagggatagtaatggttactaggtatacaaagcaaatcaatctcagttcgtgcctaaaaagtacataatctttaataagtttcaagatcatagagccatataatctaataaaataaataaattcatctgttttattgagcaattatttggtaccgactatgtgcaagctattgtgtatattttggtatgtgctaaaagtctatgattctgtatatgtttttcatgtacctatttttaataaatttgtattttttcttaatactatgacacaatttgcatttttaatctttaaagcctttcactattattcagtttt

SEQ ID NO: 400903 - DNA, 323 bp, Homo sapiens
ctattaaggatgttatctgcaaacctgcatatactgcacatatacccctgaacttaaaagctgaagaaaaataaaaataaatagccatcaccatacccaccctcaccccccaaagaaaggatgtcacattgctcaaatgaagagaataagcctgtttcaggcttccatctacatagctcatacataatttgtggtactcaaatttgtattatttggcatcctgacattaatggagttggaagccattatcctcagcaaaccaacgcaggaacagaaaaccaaagacagcatgttttcacttataagtgggagctgaatgatga

SEQ ID NO: 400904 - DNA, 548 bp, Homo sapiens
tcaaaacatcagctctcatgagaacttcctcactatcaagagaacagcatgggggaaactgttgccatgattcaatcacctcccaccaggtccctccctcaatacctggggattacaaatggagatgagatttgggtggggacacaaagtgaaaccatatcatatgctgacttgtaatgaatacctttcctaatactaatctatcctggcatttctgaaatggaaactttgtggtcctgctactagtcttttaatgagctgtttgaatctaattgctgttgttatatttacaactgtaatatgtatatttgcaagtgagattaacatgtaggtttttttgtacaatttttgttacatgttggtgtcaacgttatccaccttatataaaaaattttgcaactttttatatgtcctggaaaagttcaaatagcattgtaataacctatcctatggaagcttagtaataattcttatgtgaaactatctgggctgatatatatgttctatgagttgatggaggcttattctttaaatactttatttctcta

SEQ ID NO: 400905 - DNA, 358 bp, Homo sapiens
gatcccttgtggcccctatgcctgcctgccaggactcagctccctcggcctacccagtcctgcacacttaggccagtttgtctatgacaaggagagagaagaatggctgttttgtccacttgattgccttgctttctagaccatcttgggcccaaaggtctaggctttgcaaactcttcactgcctcgctccttggaggtgcttggaaactttttctccccctgttttctctgtaattgaaatttgccctttcgttacctgggcatgaattattttttgcagtgttgtcattccctatcctgctgtgaggtttatctcttctgttgatcctaattaaataaaacatactgttcaccta

SEQ ID NO: 400906 - DNA, 718 bp, Homo sapiens
ctgtgaagtgacaagcccagggcctggcagacagtaagtgctcaggaagcattgtctgaacagagatggagcagtctagtatgtaaggtgggaaagaaatagggtctttcatgatctaaatctaccaaagcttaatgccagagaaaagagagttaggaataggattttttggtgaatatcaaaatccaagtttaagccactagccatctgtatatagtcatcttggaagcggttatgaaacacccatatttgcacgaggttttatttgtccccacattgtttccctgttcctttgtaaaaccacaagcagtttttgtgtttatcactattggccttgaggaaatagaatattttgctttattttttcgatgtgtattatacattaaagaaaatacaataacatctcatgcagtttcaaaagtaaagggaacagtctttcccatgatttcatcaccctaaacaaacaatacttagacatcttttgtgctcctcctatctttgtctgtaaaaagagtgtactgtggtcttgctttcatcccttctttttctttcttttcgtcgtagcacaagaagtttttcatgttgtcacagtttaaataagtctcatttcttatggcctcataaaggttcatctggcattttcttgcaagtagacattttcgttgcttccagtattacattattttcaactaaactataatgagcagcttcatgaata

SEQ ID NO: 400907 - DNA, 422 bp, Homo sapiens
cacgaggggtctcgaacccctgacctcgttatccactcgccgcggcctcccaaagtgctgggattacaggtgtgagccactgcgcccagcctaagtttttgaatttttagtagagacggggtttcactgtgttagccgggatggtctcgatctcctgacctcgtgatccgcccgccttggcctcccagagtgctgggattacaggtgtgaggcaccatgcccagccaccctcaaatatttgctgaatgaatggctatcgttctttgtcaaatccctttctcattaatcccatgcactgagtagaatggcatgaaatatgtttggtttctctgtctagtttgagttcctgagatctagttggtgagagacatgatgttctaccggttgctgtcgattgttggaagacaaagagccagcccagg

SEQ ID NO: 400908 - DNA, 241 bp, Homo sapiens
ggctaaatcccttattaatgccctaccaggagtgaatgaataaagccaagttaaaggagaactgggtaccagatactgtgctaggtttctttgcatgtaccctttcattctgctggagctaaagattttctgcctcctctccataaaacgcacccaaactccaaaaccaggaaattctccatagaaaataggagtgaagagagaaaagactaacaggataaaacccaaagcaggaagaaag

SEQ ID NO: 400909 - DNA, 516 bp, Homo sapiens
gtttggacaggcttcacatttcttccacaaaaccattctcctcctcttttaacctcgtctagacaaaaatggaaggtctatgccaccgcaatttaaaatcagaagagtcaggatttgttaaaaataagggggatttgagaatcacatttctgcatgaagattttaggaagggactgaaaccaacaacaattgagaatttctcttcacctgatttaaccactagcacaaaaaagtccacctaaatctttacaccaaaatctcatcaaaataacaaaactgtggctcacgcctataatcccagcactttgagaggccaagacgggcagatcacctgaggtcgagtttgagaccagcatggccaacatgttgaaaccctgtctctattaaatatataaaaattagctgggtgtggtggcagatgccttcttgggaggctgagacatgagaattgcttgaacctgggaggtggaggttgcagtaagctgagatcactccactgcactccagcttgggcaa

SEQ ID NO: 400910 - DNA, 500 bp, Homo sapiens
gcatacaagtccttggtgttttagaagtttgcccctgcttggatgtgagctgtcttcaagctttgttctacttaattgtataataagataactatgtctgatgtgatattatttaaaaacttggtgactgaaatatctaacccatgagcccatgctccataactttatgtgtttccaatccctgtgtgaatgttagattagcccttcaaaaaatccagagacatattagagatccactgactcaaacatctctggcttagaagcttagcaatcacagttgagagtgtgccaggataggagtaaagaacaccaaactctgctaacttggaggaaaactatgtatgtgtgtttgacccagctgaggtcaaggctggatgagatcatgttaatcatggccatgacatggataaagaagaacagagaccatgctcaaaacaggaagaaggagaagaggaagagataagtaaatttttgagataggaaatacaggtgaaattgag

SEQ ID NO: 400911 - DNA, 678 bp, Homo sapiens
  misc_feature (13)..(13): n is a, c, g, or t
  misc_feature (28)..(28): n is a, c, g, or t
  misc_feature (50)..(50): n is a, c, g, or t
  misc_feature (60)..(60): n is a, c, g, or t
tcccggcgttggncgaactagcactagnggatttcccgggctgttggaanttgcacgagncgctatgaagaggggaattaacaactatatatgaagagatcatgagagaggagagattaaggcaatacagacggaaagacagaaatgtcataagatccaaggaggtagagggaacacctgatacctgagttgctttctggaagccaaagaaccactattcctatggtttttcctttccattcactgtctattgtctcccagccttctttgcagattcttctctatttttcctttaaatattagtcttcttcattcagagctctgaccttgggctttcttcaacctattctctttccaaggggcatggccatggcttcccatactgccaatatactgatgaggcccagatattaatttctaggatctctctcctgagttcgagtcctgcttatccagatgcctggtgaatattgccgctccccaaatacattttactagccctcaaaatgaaattatctaaaatggaacttccctgtcaaaacttcccttttttttagtacttctttttggtgaaggaaaccctcagctgaaaaccaaaaatcatcctaggaagctctctccttttaattcacttaaacattgttatattcattctacctttttcatttcttttgactc

SEQ ID NO: 400912 - DNA, 381 bp, Homo sapiens
ttttttttttttgagacagggtctcactgcattgcctaggcttgtcttgaactcctgggctcaagcaatcctcgtgcctcggcctcccaaaatgctgggattgcaggcatgagccactgtgccaggccccctttatgtctatacataataaaacttaatcacataaaaggaggtatagggaaaatgagaagtacaagatggtattctgaggccacattaaaaaaagattgaaatttttaaaaatagccgaaatcattattgcttataccatctatacaagcatctagtggattctgcctaggcattacattgagatacagaaacaaaatcttctaaaatttcaatatcagaagtgccaagtcaactgtacttcaaattttc

SEQ ID NO: 400913 - DNA, 430 bp, Homo sapiens
caggctgattatttccacatgcgaactgcaagcatatgttatgcgtctctacttccaaatctaaatggtaccattttcattagaactctgagaaccatgttttgtctttttgaagtagatagttcacagacatctttgtttagtaaatacctccgtaagtttttccctcgcactttttaggcgttaataatgttattttttttttccttttatgccttctcactgttaaattccttgcactcactagaagaagctgcttccctagaaacaaaaggctcctggaagctgttactttgccactcacagtccacaggttgtgccttacaggaactttgatctggatagtagcctctggctgaagaccacagggctgtactctggagaggccctgcagtttatagcatttctctacacccctccgcttccccag

SEQ ID NO: 400914 - DNA, 565 bp, Homo sapiens
ttccagctctccccgaccgcagggctggggcgaccagaaaagccagactaatcaggacgagttcgggcgtggaattgggcctgaagccctcatgcccagccaggcctgaatgccccagaccccaccgtcacccccgtggcctggatggagcaggggacggccggcgaaggcgcggggtggaaggggagcggcgacgaaggcgcgaggagctgactgggaatccccaagctacccgaggcaagacactgaacttgagtcgcacttttcatgcctgtagaaatgagaatgacagctgtgataaaaaaaaaattcatctgggcggtatctggaacttggtaagcttaagaagagaaggggggggggaaacaccatgctagaactctgcgtttttaaacaaagcgaggcagggtcgttttctatccccttagccagatctaaggcggagccaaagaatgagtaccctgtaagagccgcctctatcgccgccccctgcccccggcccgctgaagaattaagaatacaaaaagctgaacccacagataaagcatttgcaatttaacttcca

SEQ ID NO: 400915 - DNA, 265 bp, Homo sapiens
tctgtccactcttcctaccacgaaactggtccaggccttgtcctcgtgtacctgcaccctcaggttaacctcctaacgagattccctgctctccatttcactgtcactccaagaactgctgccacacagctcctccctgcctgccttcctaccctgtctatgtccttccattctgggttttcctcccagtcttatttgcagatttctctttctctactgcctctttaaagggtggcattccttaggttttctttggcccttttca

SEQ ID NO: 400916 - DNA, 414 bp, Homo sapiens
agactcgaaagcactaataatcacaactttgtgagaattataccaccagagagcttgcttattgtaatagctaagaaaggatgctatgaatggatttaaatttttccttgaaacacttcacttccaggagatagatgctattctaatcagtttaagttggaaggggtttaatatagggtataacattgcctacagagggttaggaaaattaataaagtagtgtaaattgaatgtctaagtattacttccaaagccacacaacaaacctgggctgccaaggtgaccactgactattctatgatgagaaaagcttatacaatctggatatgactacatttgggataccgtaatgccccagtcaggaagccagttccaggactctgaaccacacctgttacaaaatgcatcagaaaa

SEQ ID NO: 400917 - DNA, 381 bp, Homo sapiens
aatggagataatcggtcaggtgcggcggctcacaactgtaatcccagcactttgggaggccgaggccggcagatcacttgaggtcaggagcttgagaccagccaggtcaacatggtgaaacccccatctctactaaaaatacaaaagttagccagatgtggtggcgtacacctgtaatcccaactactcgggaggctgaggcaggataatcccttgaactcgggaggtggaggttgcagtaagtcgagattgcaccactgtactccagtctgggcaacggaatgagattctgtctcaaaataaaataaagtggagataatcatagcacttgcctagcagggttgctgtgaggggcactgaggggatgtgtggtgaagctta

SEQ ID NO: 400918 - DNA, 450 bp, Homo sapiens
aggctcacttggcatgcattcagccaccaagagagaagattttcttaccagccatctgccctggcccccatgaagagatcagtagcctgagagcagggagatgtccatgtgggcctccccaggcccctgtgcagagcgacaaggattttcacccctcctggtttgcctgagtcagactttgaaggagccatcactagggatttttatgaaattctttagttctctgggaatggagccctcccaccactcccaatgccatgtaagtctaaacttgagtgtgtgaattgcacgcacatttttggaaagtttgatgaatgaaaataagaagctgctattattctttggaagtcccaattctgagtcccttcactattcaggccacccttgggttcagtttgtccagattccacttagccatcttgctacttattgggtgacatttgtcataaa

SEQ ID NO: 400919 - DNA, 334 bp, Homo sapiens
acatgttaggaagttaggcctggaaacagatgatccaacatatagatggtaattgaaacaaggattccctagggagatcatgtaggatgggaaaaagatggaatccctgatgaactccaaaaatcaagaagtagctgtagtagaggtgagaaattgtatttccttaaagaattggggtggaggatgccagatggagaatgttaagggcagtataggactgcttatcctctttatttagatttaattcccttaaatcttctctttagaaataacatgttaaggattgagcttatttttctgcattaaaaaaattttaccgctcttttccagactt

SEQ ID NO: 400920 - DNA, 279 bp, Homo sapiens
tggcagccactgggcacatgtgacttatttaaataaaatgtacagttcagttccagttatgctgccacattccaagtactcaacagtcacatgtggctggtgatcgccaaaatggaaaagtgcagatatagaacatttctactattatataaaattctaccgggcagtgcggggattacaggtgtgagccactgtgcccggcctagaacctactcttaagcacagtaggtagtccatatcttgatacttgtgttcccaattaagtatgggaaatggtct

SEQ ID NO: 400921 - DNA, 426 bp, Homo sapiens
ttagaatcagtgggagctctgagcttgttttcctgcaactaggtggtcctctctgggggtgatgagagacagtgacagatcgtcaggcattagattctcataaggagcgcacaacctagatccctcacatgcgcagttcacaatagggttcatgcttttataagaatctaatactgcagctgatctgataggaggtggagctcaggtggtaatgcgagcaatggggagcagctgtaaatacagatgaagctttggcttgcttgcctgctgctcacctcctgttcagcccagttcctaacaggccatggactggtacccatctgtgacccggggtttggggaaccttgttctagtctttccctttactctgttgccagatcaatctttttgaagccttgctctgatcaagccactccgctgctaaaa

SEQ ID NO: 400922 - DNA, 270 bp, Homo sapiens
agtaacaaatgtctctgagtcaaatctctcttctgaccagccacactgaatgagataatttgtcatttcaatttaagtgtttgtgtgatgatgagaatactgaaaatgtgacttttaaagcacttgatgatactttgaattctttagtttttgtagttttggtccaaatttgcttgctttatttcctcataggtaatgaaaatataaatccttagcctaacacttttgcaaattatttcaaaatgagaataaatgaagtttaaattcatt

SEQ ID NO: 400923 - DNA, 357 bp, Homo sapiens
caaaaaatgaggagattggattaagaatttgtaggattccttacaactcaaaagttatggagaaaaatatctataggctgaaaattgttctaagctgcaaaaatggccttgagtaacttcagaaaataaacattaaagcaaatcatcttttatatcccttttttgaatgttttatttatttaatatcaatcaaaatactgtaatagattaaataaatcaaaacacatataatcttgtctagaagcagctttggactaaaaattttcttcgcaaaatattaaaggtgtgacttttaaagaaaatctcttaatacaggacctaaccccattttatatagcattaagttaatataactgt

SEQ ID NO: 400924 - DNA, 1194 bp, Homo sapiens
  misc_feature (633)..(633): n is a, c, g, or t
  misc_feature (635)..(635): n is a, c, g, or t
gaaaatgattttgttacatttcctttgaacttttcttttaaaatttgtttttatttggttgaaaataattttcataactactgatattttatattagtagaatggtttcttgattcgtctgtataaaatacaaatctaagaaccctgctacagtaagttactctaaatctatttgatcttaatttagaagagtaagataatctttaggccatgttggatgtgttctggtcagaaaacatgtagatttcatacctcagtcctcatcccatgagtgtctgatgaagcttaaatcttcctgcaagaaagacttgaatgattttaaacatgagagacactgtatttagtggtaacatcttaattttagtgttaaattgtattgcctaagaagaacatctagggcgggcgtggcggctcacgcctgtaatcccagcactttgggaggccgaggcgggtggatcacgaggtcaggagatcaagaccatcctggctaacacggtgaaaccccgcctctacaaaaaatacaaaaaaattagctgggcgtggtagcgggcgcctgtagtcccagccccttgggaagctgaggcaggagaatggcgtgaacccgggaggcggagcttgcagtgagccaatatngnccactgcactccagcctgggcgacagagcgagactccgtctcaaaaaaaaaaaaaggaagaacttctaaatctggctcctcttatgatgaaccacttagacttaactagggtacggggggccaggggaagtcatcatgttctggaaattccattaatgtacatcatcctagtgtcaggtaatgtggtaaatccctgtactttaagaaagggtggccgggcatgggggtcaggcctgtaaccctaaccttggggagacgagatgggggccacctgaggtcagagtcaagacaaggcgtgggagtggtaaacccattttgtgtaagaataaaaaattaagtgggatggtggggctgctgaatccagctactcggaggtcggggttgggatggttggccgggtgcaggtggtgaccgaatctgctgtcaggggaaagagggtcgtcaaaaaaaaaaaagtgttaaggggggaattccgggacgtagacttttaaggctaggggttaaagcggggaaaggaagtgttagtcttgggccaacaatatgttaggatgtaaaattt

SEQ ID NO: 400925 - DNA, 414 bp, Homo sapiens
cttaatgaagacttcagcctttaggggtaaataaaacatcactaaacagggatggcttgaatatttcttaccggctgtaataattaaagccatgaaaaaggtggtggggttatgttactcattaactggaatcgctcttagatttgatcaagacgcggtggcccctggcgctttgtttcatgtttgtcctttgtttcattgacacgctttgcctcggcctccgtggcgctataaaagcagcagagcagttaaagaaccggacccagaaggcccgtagacctcctatctagccgccttttctcccctccccccaaacccaacaaactcttcaaccttcagaactgagcctgaaatcatctataaagcagcacacttagggatctgggagggaacgggaagaaaccttcctctttt

SEQ ID NO: 400926 - DNA, 361 bp, Homo sapiens
atggggtttcaccatggtctcgatctcctgacctcgtgatccaccagcctcggcctcccaaagtgctgggattacaggcgtgagccaccgtgcccggcgagttcttaaatatagtttttaatgtctgttttgggctgatttttaagtgtacttatgtattttattttaaaaaggtacagatagtgttaagttttttcttttgattattcccaacagctaatttgtattagagataattttcttatctaattaacctattttattttaaataggggctgataatcgtagggctcttgaatactataaattttgaggtcatcctgtggatatatatcagaaaggaagaaacaagttatcattt

SEQ ID NO: 400927 - DNA, 452 bp, Homo sapiens
gggggcgctgtacacagggccgccttcctccagcttcttgttcttgtccttcaaggacttgagggacttctctactaccgagtcatcaccaacagggcgcgaagagtgccagccgcgggcaggaaggcaccgaggccccaggaccacaaaacccacagaggtggaggtccatggcgctctcgacacggtgcgaaggcactcgggcctcagagtccaacagctgaggtgatcgcctctgaagcacgggtaggcagggtgggtgggagtgcagcagccaaatgaaactttcgggcagctcctcaaccccagggtgctggcaagctgagatgagcaggatcccccggactaccccgcggggcggtgacccgaggcggcggcgggaggctggcgggcgcccagccgcggcagctcctcagtaagatggacgccgtgtgtccgggcgtggcggccgc

SEQ ID NO: 400928 - DNA, 425 bp, Homo sapiens
aggaaactacaacatttcactgggatgtcacatgagccagagtggctggaaataagtgatgaggggcttctatgcatagagcgtcttctatgctgtgccaaagaacttgaacttttatactaatggatatggggagccacttaactttaagcaggggactgagatgagtagatttccagcacagaaaaaaataacttgggcaaatgtggaggggcaaggctggcaagcagccccaaaccgtagtctagaagattgccccaagtgactactcgatggaggcatcattcactgatatgggacaaacaggaagagaaatgctctatcagaagggtcattctgcgacactggccatagctgagcaacatgaaagatttatgctagaaatggaacagaagggccggcttcagacaagcttgactgaacca

SEQ ID NO: 400929 - DNA, 606 bp, Homo sapiens
ccaaaacctcctttgtgccatcacagtcccctctctgcccctctgtcatcacccaccactgccctctgtcatcagccactactgctgtgatttctgtcaccataggtaaatttgggccttcatttttgaatatttgagggtaatgtatatggtccaaatcactctcccaacacaaccaactaactgaagaccaactctaatattataagaaattggaatttaagtaagaacaatgccattttattttaaacacacacagttgcgtccaaatctaacctcttccttcaggagtaaggagagaagatgtgttgtcttctagaatttccttcataaccagaacttcatgtcagttaaaaatttctgccatgaaaaaaaactcaaggaatcaagaaagagcctcaatgtcttcgaacaaatatcacgtctcctcagatcttccatgtcatattcccctttgttgttctcaacaaaaacagagacttcccatcttaaaaatgtatatgtgatgtcttattaaaaaaaaaaacatgttattagccctgctttcaaataaccctctaaagttgtatacttgagggcagaggcccttgtggtggggttgtggga

SEQ ID NO: 400930 - DNA, 452 bp, Homo sapiens
aaggaagtgggctgctcctgcaggacccgggagacccccgcaaaagtctgaatgcaacagcccctggtttcctgctctgtgaggaatggctagaccacatctcctgctggtgacaagtgtcagaagtattgattctgcaacaaactgagaagaaacctggcgattcacaacagagagctgagaaatcctaagtctggattccagctaaatgggagcagactaaatagagcggcagtcggcgaactacatgtagcccatgaacaaaatccggtccagcacgtgtgtttttttttacggcccacaaatgagtctgtctttacagatgaatgttaaaactgggttgacaagagagaacactcactttgaaccgcaactaaacaaaatattatcacctttcccctcaaaaaaggtttttgttcttctcattagtaaatttgtattatgacaaaatc

SEQ ID NO: 400931 - DNA, 383 bp, Homo sapiens
gctgcaaagctctttattatctttttgccactatataaatatggaaattgaaaatagtattgattctgcaacaaactgagaagaaacctggcgattcacaacagagagctgagaaatcctaagtctggattccagctaaatgggagcagactaaatagagcggcagtcggcgaactacatgtagcccatgaacaaaatccggtccagcacgtgtgtttttttttacggcccacaaatgagtctgtctttacagatgaatgttaaaactgggttgacaagagagaacactcactttgaaccgcaactaaacaaaatattatcacctttcccctcaaaaaaggtttttgttcttctcattagtaaatttgtattatgacaaaatc

SEQ ID NO: 400932 - DNA, 1021 bp, Homo sapiens
ctttgagccatgataatgttactggttggatgtcaggagcaggccatgtggatgattaaaagatgaatatcatatacagcatggatatgttggacaaaaagatgattcacatcccagacagaatggagcagcacatttattaaaagccagaagctagaagacgaggaaagaagaggtggttaaagaaagatacagtaacagcagtaatatctaacaggaaggctacaggggaaaatacagaaattccataaagaacaaacactgtaactcaaaaccaaagctttgctagtcactagtgcccgctacatcctaacaggtgccgcgtatttaattgtgaagtctttaacaatcacaagaatatctctgaatcattaagagaatgttgaaaaatagccacataaagaaagcaataaaggagctaaatgacttagtagaaaaacagactttataaataagtttaattttccaaatattttattgcttaagaaagtgacttccctgatttggagaatttagttccaagaagggattcatttcctagtgatgttgagggttgctctgcccaggtacccttaagatatataattggagaattttttattagtatgacacaaagagactcagccttaataagaattttatgctcaacatgaaattaatattttgcttttgaaatagtgtagtgccattattttactcttaacatttaacaattttttttaaaagaaagtaacacgccatttttatttcttgttaaaataatgttaattgtaaaaatgtagacagtggggagaaaaatcattcatagtcccaccagcaaaagacaaacactgttaaaacgtatgtgtgttattttagcctcttttttttttttacattgctatgctcttctaaagattcctcaggttatctaatttttattatcgatagcaactaaagttattaccctttgtgtttccaaatgtgtgtaacatctcaataatgtgctttaaaagaataaattatttcaatatccatgaac

SEQ ID NO: 400933 - DNA, 1242 bp, Homo sapiens
ctttgagccatgataatgttactggttggatgtcaggagcaggccatgtggatgattaaaagatgaatatcatatacagcatggatatgttggacaaaaagatgattcacatcccagacagaatggagcagcacatttattaaaagccagaagctagaagacgaggaaagaagagatgcagctggagagcctggggtgagaacatgagcagtctataatcagaaaatccctttgggataaattgacaaaaatataaaccactccacaaaggagaaattgtaaatgagttgttatgtaaaacctcccagcgaaagaaatagtccagaaagcttgaagagaaactgaaatttgaaaaatctacctaaaaaggtgataaaggattttcagttttgcaaaaaacgcaatacagagtgtctttggaaagaaagttctcatatggatttaaaatatgattcaatttacagaagtcagagttgttcttccagatggcatgaatccaacagtgaagaaatcagaatacgttgcttttgtgaggggcagctgctgattttctctgagctccgtttccagccttcacatgctctgctattcatcacagggtaaattctgactataggaggtactgacagaagattagggaagaacagagggctaaatgtttattgacttcttgaaaaatgctatgtgtcttgccagacttagcttacaagtttggttaaagagagactgacatgagcataaaggaagggacattgaaagaggcagagatgaaggaagaaattgtaacttactccttttatcccacccatcaaaggaaagacaagttgacattcccagggtggatggatccaggcaggacaggatcagaagttgcagtcttaattgcaccaactcacgcatgtcaccagccgagtagtattgattctgcaacaaactgagaagaaacctggcgattcacaacagagagctgagaaatcctaagtctggattccagctaaatgggagcagactaaatagagcggcagtcggcgaactacatgtagcccatgaacaaaatccggtccagcacgtgtgtttttttttacggcccacaaatgagtctgtctttacagatgaatgttaaaactgggttgacaagagagaacactcactttgaaccgcaactaaacaaaatattatcacctttcccctcaaaaaaggtttttgttcttctcattagtaaatttgtattatgacaaaatc

SEQ ID NO: 400934 - DNA, 609 bp, Homo sapiens
ggtttactgtactccagattggtttatacctaggaagataattctcactttattaatttccaatgtgtatgatttagtgatatctaaaccaaatctttaccccacctttaggcgtctcactctgagaattctttgtatgatacagacagatatgattccaaccaaatctggttgctttattctaagtgccaaatctaaacctgcctttctatgtacacatttaaaaacaaatagaaagacaaggcttaacccttacatgttattcctttttttttttttaaatatactgtgaagaaatggttgagctgtcaggcaaaaacagacaaatggaaagatgtgaggtcataatggactcttgttttcttgtccttttaaaagcagttgtgatttcaaagtatttgatggtggcatagaaacttttccaaagcaaaaaacaaaaacaaaaaacttacttttcaagccctataaaacatgtcttctctgattccctggctgtgatactgacagtctttgccttccccttaaataggaagtactagtattgtcaccagtcttggcagcccttgtctcctttacatgtcaatgcaagtaaaagcatgttacactctc

SEQ ID NO: 400935 - DNA, 825 bp, Homo sapiens
atggggaaagccctctggaactggagcagctggaccagcaccatgagatgaaggtagagcatgagactagctcatgagcagggaaaaccctgcctattcgattgttgtcttaaaactctttatttattgcacccctgaaatgtatgaatcagatcacccacactggcagttaaacgattttcaagctctggctgctgattagcatttcccctatgctctaagcagatatttcactttttcttttcatgtagtttctgttaatatctctgttgtaatttcaggagtcagaacagtgtggaaactttaatataggaaatccacaaatgtattgtttttacatagaaagaaaatgttccttgttgctctagatgttggtgctgtatccctaatacttacgggccaagcaagaagaaattgtataatctttgttgttcagaagtttctaatagaataaataggcctgtaagatgaacttgccactagtaaatgttacttttaaggacatgaatatggaagtataaagcgttgagctcaacgctttatacttcgtgcatttagttgagtatttgttctgctcataatttccaatatgtaccagaccttccctgtgttcagcacctccatgacagtatttctgttttctgagcccttgctctaaacagagtattttgaccactgaaaacatcccagaaccctgctgcagaaggccagtgagggtggtcccactgcacagtgatcccctctgtgcatctgctcagccgaggctgccagcgatctgaataaacctccctactagcgtcaggtcttgaagtataaagcgttgag

SEQ ID NO: 400936 - DNA, 688 bp, Homo sapiens
cagtgtcaccaaaaggctaaaagtcttaaactaatttattttcactggatatatttcatctgctgctataatcaaacatgatttaatgaacttaacatcaataaaatattttgccttgcttgcataacaaataagccacttggaaacttattctggttgtagtctcattttcactttttattattttaaagaaattgtgctgtgatgagatattctgttttaaattttctaatttttcttgtcattgcttttgtgtaagttggaaaagatgtgatgagtgcttaatctattatattgtttggagtgtcaacatgtaataaacacaatgctttctcctctgctttgtttgttttgtgctgctataacagaatgctacagactgtgtaatttatgatgaacagaaatttatttggctcacacctctggaggctgggaagttaaatatcaaggggccaacatccagcaagggcatttttttgctgtgccatcccgtggtggaaggtgacagggcaagagccagagagcaagagaagcccaaactcacttttataacaaacccactctcacaataactaaccactccctcaataactaacccactcctacgataacaacattaatctatttatgcagagccctcatgatctactaattacatcttattaggccccaccttccaacactgttg

SEQ ID NO: 400937 - DNA, 362 bp, Homo sapiens
tgagcagtatcaagctgtcatccagtgggtgcagagaccgacccccactcctggaactaactccctgagctcactggccaaacaagaactgctgaggtctcagagtcctaacctgtaaaatgggtacaaagttggaacaagacagtctatggaagccctccaactctgacagcctgaagaatccaggtatcctccttcaacagagaacttagcatttcctaatccattttgcctcccctaaaagtcctacttggcagttcatcccattgtctgctttctggggctagtttgtctcacccaattactagatgaaggaaaaatgattttttgattgggaacatcctaattttaacataaattca

SEQ ID NO: 400938 - DNA, 477 bp, Homo sapiens
gattacaggagcacaccacagtgcctggctttatcctgataatttaccctaaggaagaaatcagacaactgtgctagactatacttacagaaggcagtttatcatagcgttgatgatggtagatgaaatgtggaaagaatctcaatgttcagcaacaggagactggctaagacatcatgccacagctatgcaagggacagatacacggccattcaaaacagtgaccctcctgattgaatcaaatcccctatcaccactctcacagcaccacagatctctctcctttgtagcatttattaccatcataattttacatttctttgtgaatttctttgatgaatttctatctccttcattggacgctaagctctgtgaaggcaaggactctattacgttcattattgtgccctcagtgcttagttaagttcctggaacacagtatcctctcaataaattgttgttaaatgagtgagtgag

SEQ ID NO: 400939 - DNA, 437 bp, Homo sapiens
gtctagttctttttaaaaaaaattagtggtatgtttattggaatcccattaaatttataaattacctaatttctttttaaaatataagggttaagtctaactaaccataccatcacctctctttttgtgtcctttaattatctcccaagttttctttatgtgactcttgtacattttttgttgagtatttctaggtattaaacttgctgctgctgttgggctttttccacattttgtcttctgttttgtaccctgctaccttactgcattgtcttcatgttttatcagtttctcagtacattcttaggagttttccagctgtgtaattatactgtctgtagttattaatggttttaccttctatccagtctttataactgaagcttctttctcttttctacctactttatttatttattttttggttgggcggggga

SEQ ID NO: 400940 - DNA, 461 bp, Homo sapiens
tcgagtaggggctcagaaagctgtgaaactcactcatttcctgcatcaggacttactttggtcctggataaataatattgaagatatatacttaaaatattcctaacatcagaatttgtccatgtgttttcttcctcaagaaagtgggatcaaagccagaaaggcatggagtcagaagaaaataggagggagttaatacatattatataacatattacgacccccaaggcagcagatcacttcagcccagaagtctgagaccagctgggcaacgtctcgaaaccccgtctctacaaaaaataacaaaaaaattagctgggcatggtgacctgcacctgtattcccagctactctgtgggggtgggggaggctgaggtgggagatagaggctgtactgagccacgattgcgccactgcactccagcctgctccagacagagcaaggccctgtctcaaaaaaa

SEQ ID NO: 400941 - DNA, 381 bp, Homo sapiens
tctggaccccatccctcctccctggttccacccagggctaggctctcccatctgccccggccaccccagagacagacgttcaagctgaggcatcaggagattcaagatggcttttctggagagtttcagtttgaaagagcagcctgctcaagaaagtaaatccctaatagtggactgtggtggtggtggtggcattttcaatttgattattgctggaacataggaaaggcctacattagcttgttgctattgtaacctagccagcatgctaaattccttcattaattttaatcatttgccaaataatgttcttgggtatccaagtagaaggttgtaccatctgctaataaaacaattttcttcctttccagtacctatgca

SEQ ID NO: 400942 - DNA, 480 bp, Homo sapiens
ggatttatttatgattttctttcttcatctgtcgagcatattaaactgcttaacagcatcaacctgaaatggatcttaatgtgcaggggatttaactctttttattgtaaagttgtggataaaatatttaatagatatggatgaggactcatatcagtaacaacccaatactttatttcaaaatgaatagatctgtattacaatcacttgtgttgtgtgcagtagattttttccctttaacttaggaagcagttaataattaatggctccattttttagaacgagcacttcgcccaaacagaatgtattggcgacaaggcatttacttaaattggtctcctgaagcttattgtctggtaggatctgaagtcttagacaatcatccagagagtttcttaaaaattacagttccttcttgtagaaaaggtaaggaaatcaatttgaatgttttcaattgtaacactaaagaaatttaaactt

SEQ ID NO: 400943 - DNA, 386 bp, Homo sapiens
aatcgcttgagcctcggaggtcgaggttgcagtgagtggagattgcgccattgcactccagcctgggcgacagagctagacgcagtctcaaaaaccaaaagcaagcaaacctgtgggaacaagtcctaactgatggggatgtgtctgaattagatgaagcatataaattgcctagcaaactgcctgatgtggtaccttaagaaaggcctcaataaatgttaatctcttccccttgatgatttaagttacacggtttagattcatattcaatattggtttttctctagatttcttctatttttacatacaaatatgtgtttcatttgtgacttagtgtttcattttttaataacaaaaataaaaatctggcaagcattgaaaaaact

SEQ ID NO: 400944 - DNA, 294 bp, Homo sapiens
acgaggctgcacccttggcgtaaagaacacctgacatggctgaaagcttggtggaaagaacacctgaggaataggatacagcgaattccttttcaaagattttagcctgtaaaaatcctttaaaattcaagagggggaagattaagtacaatgagttctgagttcctcatcaaagagtaaatatgtcagtatgttcagcttctctgttctttgttctccgttttaaagtttaacttcctcattatttatgcctccttgcccctagtttcattaaacaacccccttctaacctct

SEQ ID NO: 400945 - DNA, 698 bp, Homo sapiens
ggcaatgtcttttctttctacagttattaatattttttcattattcttaatattctggggtttattataaatctagatgtcattcatttttatttatcttgcttagggcttaaaatatactttgaatatgatgattcacatcttcatttctaaaaagtcttcagctattatattctcaaatattgcttctccactattctcgcaattctatttctccagaactccctttacatgtcagttgacacatctcaacttatcctctgcgtcatttaactgctgattaattgatagatacattcttctttttcctgctctatgtgcatcagaactattcactaaaacattaactaagttcctcatcaactgggttcaatctaagagttccaggtatggaattatttcagtagctattttttattccaagttttatatttagttcttttattctgcctattttctgtcatagtttattatttcttcactgacctctttgaacatcctaaacacacattttaaaatgcttttgtttgttataaaaaattaactcgagtcaatttatatttcatttcttcatattgttgcctcctttctttccattattcatattctttagaatttgagtttgcaggctcattttcacagttgcacacacatgggtgtgtcaccttgggcagaaggcaagaagagagaagcacttt

SEQ ID NO: 400946 - DNA, 329 bp, Homo sapiens
gaggctactcctttaaagagaactatctgtggcctttacctttatgattccaccgctccgtctgttcccctcccatgcaagggggaacatggaactaaattaagaactggttgtcccgaattgtctcttcctacacttcagaaagatagtttatttcctggaaggctgaggggcttctcctgctgtctcccattggtggcgatggactgtagtatttaacagcattgctgtccaatgcggagcaggaatccacctaccttaactcttcctaattaagggtgttctggagaaagtcccaatggcagtgctattagtgattccaagcctgc

SEQ ID NO: 400947 - DNA, 638 bp, Homo sapiens
tggtgaatggctgtaatcccagctactcaggaggctgaggcaggagaatcgcttgaacctgggaggcggaggttgcggtgagctgcgatcacgccattgcactccggtctgggcaacgagagcggaactccgtctcaaaaaaaaaaaaaaaaaaaaattaggagttacttacatgtctattacgaaggctaatgttttgtgttagataagatctctgtctgatgtatcctatgttacttacagtatgtatatgtatccagagcagttaagagtttcagctactatttgaccttgggaactttaaaatggacttcacgtttatataaacacttatttttcttgttttgaaaagaaggtaacatcaacctcctggagatgggatgaggactaaatgagatgaatgttaaagaaactgttggccgggcacggtgactcatgtctgtaatcccagcactttgggacgccaaggcgagtggatcacctaaggtcaggagttgaagaccagcctggccaacatggtgaaaccctgtctcgactaaaaatacaaaaattagctgggcatggtggtgggtgcctgtaatcccagatactcaggaggctgaggcaggagaattgcttgaactgggaggccgaggttg

SEQ ID NO: 400948 - DNA, 513 bp, Homo sapiens
gagtcttgctctgttgcccaggctggagtgccatgtcacaatcatggctcactgctgccacggcctcccggggctcaatccatctgtctacctcagcctcctgagcagctgtgactacaggtgcacaccaccgtgcctggctaatttttatatttttttcgtagagacagggttttgccacattgcccaggctggtctctaactcttaggttcaagcaatccacctgcctctgcctcccaaagtgctgagattataagcgtgagccactgtgcccgaccaccaattacaggcatttttaccgttcttttaccaatgcctcaaatggcataacaacttcaattgctcaaacattttgcccactttaagaatgggcttccttcttaataactgaggcatatgagttcttcaaatattctacataaaagtcctctgacaaatacatgtctggcaaatattttctcttattctatagcttgcccttttattttcaaaacagtttttgaaagaacaag

SEQ ID NO: 400949 - DNA, 354 bp, Homo sapiens
tctctttccaatgtctatttctgttagaatatggaacttgtaaagaaaagtatttgcaaacatttaataacattcttagggatatttctgtttggctgtcttcacatttctattaaggaagctcagctgggcgcggtggctcacgcctgtaatcccatcactttgggaggccaaggcaggtggatcacgaggtcaggagatcgagaccatcctggctaacatggtgaaaccctatctctactaaaaatacaaaaaattagccgggcgtggtggcaggcgcctgtagtcccagctccttgggaggctgaggcaggagaatggcgtgaacccaggaggcggagcttgcagtgagcc

SEQ ID NO: 400950 - DNA, 325 bp, Homo sapiens
gaattcaagtttattttgaaaaaatgcacaccaatacagaaatatagagaggaaaatggcaactcatcctcctcaccacaccaccagctccagtctcatgcctctggaccaagttccaacaggtaacaaaaagccacaggcagaactgatacctgaactctatgacatttgccatgtgagtctgaaaatgggatgacaaaactaagacatgccatctcctcattttcatgctgaaaagaaattaaagagaatctgcacaagagttacatttttcaataatgttttactactggaataaataaactatactttttaaaaaatataa

SEQ ID NO: 400951 - DNA, 379 bp, Homo sapiens
agatggatcatgtacaaaacactatctttattgatattaacatattatttggggtatctcatccagtacctgtgggatggtattgtttctggtctgtcaaatatatgactttgaaacattttaacacaggtcaaaaataggaatgtatttaatgaaatctctctctatgacctcttttctccttgtttccagcatacattatcccttgctcatctctctccttcagttaatttagtcactgcttaagaaaacctaggtcaggcccagtggctcacacctgtaacatcaacactttgcaaggccgaggtggaaggactgtttaagcccaggagttcgagaccaacctggacaacttggtgaaaccccatctgtattaaaa

SEQ ID NO: 400952 - DNA, 262 bp, Homo sapiens
ttcctctcctcccacctccaggctaatggtgggcaggcacctgacccattaatcaggaagtctcaagcactaaggaagctcacagttacgtggaacatgttcaaaactagtttctacatggcatattattataaagtgctgtggcccctggggaagtatgagttgaggactgttagtcccaactgttggagaattggactttgaagagcagtggaatcttgctaagtggaaactaaagacttaggaggtgggaggagaggaa

SEQ ID NO: 400953 - DNA, 421 bp, Homo sapiens
ttcctctcctcccacctccaggctaatggtgggcaggcacctgacccattaatcaggaagtctcaagcactaaggaagctcacagttacgtggaacatgttcaaaactagtttctacatggcatattattataaagtgctgtggcccctggggaagtatgagttgaggactgttagtcccaactgttggagaattggactttgaagagcagtggaatcttgctaagtggaaatgaggggtttggtgaattcagttggtatgtgtctaaaatattctgcagtcccttgcccctctaaggcttgctttctgtgttcttagaccctttggactgagtacaaaccatatcccagagatccaaagctggctatgggtcacgctagggtatggtggctggtaataaagaagtagaccatatctgaaa

SEQ ID NO: 400954 - DNA, 403 bp, Homo sapiens
ctttccttgctcaggtagctggaaggcagtcctctgtcagagagacccaggtattgattgtaggcagggaaagcacactggtatccaaggtgtacaaaaatgacaaagggggccgggcacagtggcttatgcctgtaatcccagcactttgggaggccgaggcaggtggatcacctgaggtcaggagttcgagaccaacctggccaacatagtgaaaccccgtctctactaaaaatacaaaaaaattggttgggtgtggtggcaggtgcctgtaatcccagctacttgggaggcttaggcaggagaatcacttgaacctggtaggcggaggttgcagtgagccgagtccgtgccattgcactccagcctgggcaacaagaatgaaactccgtctaaaaagaaa

SEQ ID NO: 400955 - DNA, 1452 bp, Homo sapiens
agacaatctgtgaagaaagtgaacaaggcagatggagataaattcaaaaacagagatccgaaaggctgctaagagagaaaggaacaggaatctcccagttcctgagagcctcccaggctttctccctcgatgtttggagttttatgcctatgtaatcagtgcagacagccgttaagtaaatgaagaggcaactaacaatgtcagaaaagagaccgggcggttccggctgacactaccctaatcttccaggacccattaaatgaaaatttggaaaacaggcttttcctatccggatgaacagagataatttgtgtcgatggatgttctgtgaaggcctattgtgtcgagcagcgtattaaaacataaacatggctcttcccccaagaaacttacatttcagtaagggagcctggccaaaatggaaaactgcaaggttcaaatcctggagtgcagaagaagcattaggcattgaccctgtggcttcctaatagatccgcaaagtgctttgttcctggaaatcatccgatgagtagttcagtgctattgtatatcttgttagagcagccgaagtgccacaaaatgaactaaaatctccctgcagagttgctgtatcatatgctgagaacattcggaactttcaacaaattcatgttacgatcctgggtagccatggttaaatctgtacaggggttaaatgagaaatatgagcctgctgttaagtgtcttctgagagtgacaaagctctggccataagggatgggagaggagggatttcttctcagccttccagccctttccagctgtatcacagacaggagacataatgcaaaggggctcagacattgacttcctggatctttgcggccccaggcattgaccccctctacctggcttttcctacgctgtaaaatgaggatcctcctatattatggagtttattgtgacaactaaatagctgagaagaaggacatctcatttgttttaactatgcagtttcctgtctatctatctatctatcccatcaatctatcaatcaatctatcaatctatctgtctatccctatctatctatccatctatctatatctgtctatatctatctaacatttatctatcatctattcatctatcagctatcatctgtctatcaatatttcaatcaatctctctatccctatcaattaatctatctacctacctatcaactatccatctatctctatcatctatcatctattcatctatcatttatcatctgtcaatccatcttcctactatctatcaaaagcaacacattttcttcctgactttaaaaatatttaagtgggccgggaggatggctcacgcctgtaatcccagcactttgggaggcctaggcgggcggatcacgaggtcaggagatggagaccatcctggctaacatggtgaaaccccgtctctactaaaaataca

SEQ ID NO: 400956 - DNA, 660 bp, Homo sapiens
agacaatctgtgaagaaagtgaacaaggcagatggagataaattcaaaaacagagatccgaaaggctgctaagagagaaaggaacaggaatctcccagttcctgagagcctcccaggctttctccctcgatgtttggagttttatgcctatgtaatcagtgcagacagccgttaagtaaatgaagaggcaactaacaatgtcagaaaagagaccgggcggttccggctgacactaccctaatcttccaggacccattaaatggtagtttcaacgcattacctaccataacatccttgaatatcactgattttatttgcagtatcaaacattccatttcatgccccattaacagtgggagcctgggctttttgacgcagctaaacattttactaactacctggactaagtaaccaattaacttttggagacaatacggccaattaagcgcgaaaagaaaatttggaaaacaggcttttcctatccggatgaacagagataatttgtgtcgatggatgttctgtgaaggcctattgtgtcgagcagcgtattaaaacataaacatggctcttcccccaagaaacttacatttcagtaaggggtatgtatattccagtgaagtgtacaaacaataataaaaggtgtgtttaatgatcctttaa

SEQ ID NO: 400957 - DNA, 481 bp, Homo sapiens
actactactttgatattctaggtgatttcaataaatacataaatgatcttttaaacaccttaaactcctcccgaccctacttctagcactcatagtcacagtctaaccttgtcattacaacggctgcaacctctataattttggccttgtacatctcactctctgatcaccacctcatccaccttcctttccacttcacttcctctagtatcctgactttaacagttttcctattccatggggattccagtctactcatctaccacttttcactgccccttgtcctcttgatgtcctctcttcactttcttgccaaattacctgccatttgatcattataattatttccttgtgcctgggcatggtggctcacgcctgtaatcccagcattttgagaggccgaagtgggcagaacaccttagctcaggagtttgagaccagcctgggcaacatgctgaaacctcatctttacaaaaaaata

SEQ ID NO: 400958 - DNA, 461 bp, Homo sapiens
gttgatgtttggttatttatattgagaaaagaagtgagaagatgtcataattagttaactactcagtcctgcagttatcatcaaaatggaaacagggaccaatgcccaagtaatatccaaccttttctttaaattttgatatgtctgcagggaaggaaataagagtccatggttaggctgggcgtggtggctcatgcctgtaatcccagcactttgggaggctgaggcgggtggatcacctgaggtcaggagttcgagaccagcctggcaaacatggtgaaaccccatctctactgaaaatacaaaaattagccgggcatggtggcctggcctatagtcccagctactcaggaggatgaggcagcagaatcgcttgaacccgggaggcagaaacctctgcagtgagccaaaatggcaccactgcactccagcctgggtgacagagtgagactccgtctaaa

SEQ ID NO: 400959 - DNA, 728 bp, Homo sapiens
ccgctctccacccacccctggtctgtgtctgtttttatgccagcaccatgctatagctctggagtataatttgaagtcacataatgtatgtaatgtgattccttcagttttgttctttttgcccaggattgctttgcctactctgggtctttgtggttccacaaaaattttaggattgtttttccaaccctaaaacataattctctgaagaatgtcattggtgttttgacaagggttgcaatgaatcatgtaaattcctttggggtagtgtgcagagcgattttaacaacactgattccaacaatactgaatccatgaccatggagtatctttccactttttggtgccgtcttcaatatctttcatcagtgttttatagttttcattgtagaaatctttcacttctttggttaagtttattcctaggtattttattttattttatttgtagctattggaaataagattattttcttggtttattttctagattgtttgctcttggcatacagaaatgctgctgatttttatatgctgactttgcatcctgcaattttactaaacctcagttctaacagttttctggtagagtccttaggtttttctaaatttaagatactattgtctgcaaacaagggtaatctaaatttttccttccaatttggatgccttttcttttcttctcctgtttaattgctctggctaggacttccagtaccacgttgaag

SEQ ID NO: 400960 - DNA, 173 bp, Homo sapiens
cacagttagaggacaatgcaggcctggcccaactctctgctctttattttgaatcctacattttcctttccgaaacaccttggaagccacttagccaaggtaagaggaaaagaaaaaggcagctatctggcaggcctgcctgcacagagcaagagctttgctgggccatttga

SEQ ID NO: 400961 - DNA, 370 bp, Homo sapiens
ctcttttttttttttgagatgactaaagaaaataatatccatgctattatacacatgaaggtaattaatatctgattgtgttatattttataattatgtgattacataaaaattccgtaattatagatagaaaaatatgcccaggtgaaatgttttccaaaaaaacaagagttggcctatttcctaaggccggggaagaattgagcaaaaaccacatgaatgaagccagaagcaggggcaacagagcacgacaacaaacaactgactttgcgttcaataaagctctgtgcatgcagggatccgcagcgcgccccataagcggcaggaatggaatcccaaagtgcactcaggcagacgtggagggattcaa

SEQ ID NO: 400962 - DNA, 461 bp, Homo sapiens
ttccatagtactatcaccccctaacagcctacatatttaacttatttatcttatatattgcctatgtcccccaactagaatatatgttctagttgaatgtcccccaactagagggctggattttttttgtttgttttgttttgttttagacagggtctcactttgtcacccaggctgaagtgtaggagtgtgatcttgactcactgcagcctcgaattcctagactcaagcgatcttcccagctacttgagaggctgaggcaggagaatggcatgaacccatgaggcggagattgcagtgagccgagatcatgctgttgcactccagcctgggtgacagagtgagactccatctccagaaaaaaaaaagccaaacaaaacaaaattatttgacaatagaaaggaatgaagtactactcatatgtgctacaacatggatggcccttgaaaacattatgtgaa

SEQ ID NO: 400963 - DNA, 589 bp, Homo sapiens
cacctccaacactggggatcacatttcaacaagagatttagagaggatgacatcccaactatatcagcaagcaaaagactagaaaaaggtagcaatctacattatgaacggttaatggccttaatatatgaagagttcttacaaatcaataagacaaacatccctttaagaaaaataggcaaagaacataaatggttcacaaaagacatattcctccatcagatgtgaaatagccacctcaatatactgctagtttttcaagttgggagtataataggtaacctcaaatttaaattatgtatttgtctataaatgcattgtttgcctccctctgagagaccacaagccccatgagggcagagctttatgtctgctgtgctcactgctttatccccagtgcctgaaacagtgcctgacacaggcatagcatgtgtacaataaacatatattaaatgaatgaatggtttaaaagtcagcaataataggctgggcacagtggctcacgcctgtaatcccagcactttgggaggccgaggcaggtggatcacctgaggtcaggagttcaccaacatggtgaaaccacatctct

SEQ ID NO: 400964 - DNA, 746 bp, Homo sapiens
tatataattttataatatggtattactgtaattttatagtaagttctaacttaaaacatgtaaacttaataaacaagagtaaagctgttcttgtgaacccatttaaattggttatagatttaataacctcaataccaaatttatttcaatattttatttaggataagcagtgccgagaggatactaattcacatagataaaaatgtaatggtctggattttacaattttacataaaagaacatttgcagtctgaatgcaaaaagaaaggaggtggggatgttggtgtagaaagaaactaggataagctgggtgtggtggctctcgcctgtaatcccagcactttgagaagctgaggctgggaggatcgcttgagcccgggagtttgagactggcctgggcaacatggggaaaccctgtctctactaaaaacacaaaaaattaaaaaaaaaaaaaaaaaaagaaaataggaaaaaagaaggaaacctgaatagaactaaactattcttactcttcttcatcagtgatattttgtagaattggcagaataagctctatttcagtatctccacaaaattatgttaatttggcaatccacatgtggactgccttcgatgtagtaaaagttgatatagaataaactgcattaatttttagccagtttaaaacgtgtgtgaatatcaaactggaatcagacatctgtggcactgtattatgtctctgtcaccctcaggttctatgaaacctt

SEQ ID NO: 400965 - DNA, 478 bp, Homo sapiens
atattctgtagattctccaggttatccaatatatgaaattttattgtaaaaccgggtctaatcttaataaccaaacagtaaatgtcgattttattagtctagttaaaaagcagtgatattaaatattcatccttatcatataactaatcattgaacaataattcattttttatataggcatttgaggaaaattacttctctttggggatagaagtgtatccacagtctccatttgtatgagggttggataaaagtaatttgaaataatttatttactgaaatatagcattatctctggtggtttcattctgttacttcataaagataatagactgtgagggaagatacatggatttctagcttgaaaattctaatgttaataatcacaaagtgtaactttgtttcagtatgttttcaacagggaaataagaggaaaaggaaagaaatgataaattcactagagaaattcaatcgtaaa

SEQ ID NO: 400966 - DNA, 799 bp, Homo sapiens
  misc_feature (10)..(10): n is a, c, g, or t
atgggtgaanggaatgtctttttctttgcttgggagaagaatctagaatccttgaagcagggattgggaaacttgattctgatgccacacataataaatgaaaaagctgtgaaaacattttgtgacttcttaaagaggccaattgcactgttaaaaatgctgtttaagatttatgggatttttattagtagtagttgaattcaggtattgccagcccacccccctcactttttcagacctatagttgtcctttttgattctccagttaaaactacaaaaaagatccatgcaacctttgcttatcctaaagtgacagatgttatagcctagtgctgtggcatatttctgccttggaaataaggagacttgggttctggttgatctggagccctaatcagtgatttattttttctctatgcctgcagtgtctataaaacgactgtggggagttgaacagaatgatttatgagtttctttaggtctgtcataactgctttattttgttgtactatcgcttcatgcatttacaccctgtcttagaggtggactaatgaagggacaagtgatttgcagttaggtgttcacctactttctgggtacatggaaatgaagagaggagagtgaaatttcttttttatttatgaattcatgtagaaatttaatattaaactgctttttgctttgtttttctttaggtatgaatattaaaaatgattatcaaaaagattggtgtcagattattttttggcctattaaatcaatattactatccactaaatttttaaatttgtcttcaaca

SEQ ID NO: 400967 - DNA, 431 bp, Homo sapiens
tctgctctctcttggaagctgccggggcgaggctcaggctgtggctggtccatcctatgctggaccaagttgtccctaaccctccagggctctctcacatctggggaaagatctgtgggcttctggacagcatttcatttggctacgtcttgtgcttgtggcactatgcggggcctctggggaacttcttttgctcaccatatttcctcatttcccgacctgtcccctgcacagccaggttccctttgaaatgccatctggagcagcaatggcccccagacaggccggctaagcagcagggcagccactccccagagcaagcctggtggccgagccggtgtgggcaaaacaagaagactctttctgcttctgaatgatctggccctgctgccatggggtcctttataaactctctcctgagttattctcta

SEQ ID NO: 400968 - DNA, 635 bp, Homo sapiens
gagaaagagagattttttacaaggaaaagtgtaaaggactgcttagctaatactaaaaaagcttcaatggtgccaaggaatacaaattaagaactcacatggagaaggccaataggatgtccttgtttattgaagagtaataaatatttttaaaaatagatttaattttgattaaagcaaagcctttcattgggtgcagcatttaatctataggaattctgttctataggactagttaagacagaatttgctcagcagaataaattcacctcttctgttatcaagttatataactactatggtgataagaatagttctctctgattttagaaatggtattagtaaacaatggcacatatcatgcatggaaggaagcacatattatgataataccatcctccatttgaattgtgtttttagattttcagtacactgaaataccttcaccagtttgaatctcccaagtctctggaaagtaggacagcaggcgttagtgtttttactttctagatgagacaggtgatcctgaactgaaacctgcttctcattagctcttagccttgtattagttcaactggaggaaacgtcaactcacttgtctttaagcctaaattccataacatttcaactggaag

SEQ ID NO: 400969 - DNA, 395 bp, Homo sapiens
ataccactttatttaaggaacttgagtatctgctcattttggtgtctgtggggtcctggaaccattccccctgcaaataccaagagacaccggtacttggttctttgatagtagcttcacactacttgaaattctacggcccttagaaaccctcacatctttaaaggggcttttacctcacagattggggtgaggtggaagtcaggagaaactactttctaaatcagtttcactttgagttattgtcctttgaatttcaatttctttggagttcttactttctaattatcacagacttgtgaaaacagatgatttaccttgtcaagtttatctttacatgctctaaagtttcattcatgatttattgtgaggatttaaaaatacaaaccattttt

SEQ ID NO: 400970 - DNA, 874 bp, Homo sapiens
caacctcctgggttcaaaccatcctcccacctcagcctttggtagtagctgggactataggtgcaagccaccatacctggctagttttttttttacattttttgtagagacagggtctccctatgttgcccaagctttgatccttcttgataggtgggaaagcaaaggtatctagaggcttggtgcaaatagtaacagatctgaaaaaaaagaacccaggctcctgggttcctggcctgtggttttgcccactaggctgactcgtgtttacagatgaatgtaagtttgattcttcctggccaactttggggttgatgacccctatttcaaggaagcccagatcctctgaggagcttcatttgtggcctctcaccagtgcctgagtctgcagggtcaggagatattggtgattattaactagtcttataggtctttaaaaaaagaaataaagatagggggaaggagtgggaaagtttagggggaaagtatatttttctcctaaggttcagaaaagtgggggaaaaatagatgagaataatcaggggaaaggaatatctctctagatttggaccgtggtgtgtttctcccatggattttgttatctttattcttgtgtagattccttctcataatcacagccccttcctgagggttccctctagcttttgttatcctggactattgagagttcttttaggggttactgatgagaaaaacccctaaaagaacttggggagaatcagctgcatctcactagttgtttgggagatctttatgtgtccagttgattttcaaaagatgaattaaacctttgagatcagttcaaaggctccagaaaagtactttaatagaatggcaaatctgtggagtagtt

SEQ ID NO: 400971 - DNA, 472 bp, Homo sapiens
cacgaggtttttcatcatcctaaactgaaactctgtacccactaaacagtaactccccactccccctgtccccagtccctggtaacagggggagtggggagttactgtttagtgggggaaaaatagatgagaataatcaggggaaaggaatatctctctagatttggaccgtggtgtgtttctcccatggattttgttatctttattcttgtgtagattccttctcataatcacagccccttcctgagggttccctctagcttttgttatcctggactattgagagttcttttaggggttactgatgagaaaaacccctaaaagaacttggggagaatcagctgcatctcactagttgtttgggagatctttatgtgtccagttgattttcaaaagatgaattaaacctttgagatcagttcaaaggctccagaaaagtactttaatagaatggcaaatctgtggagtagtt

SEQ ID NO: 400972 - DNA, 559 bp, Homo sapiens
aaaaaaaaaaactacctgatatttctaatcgcatcttcctttcttttcaggtttcagatttaagattttagcacttttttccaggccaaaaagggtcacatggttgctgctgtcttggctcctagaaacagtttccgtgatgaatcttttgttccaatgcttagtttcctatcagatggggttgtatctagtattagtaggttgtaagtttagagaattcagttgcttgatatattgctgcaaagtttagtcctcatgaccagttgaggatagagcatgtggtgcatggatgatctgagatgtgacttctgatttgttcctttttcatgtttgctgccgtggagaattggaataggctgttaattgatctgttcctttctagtctgatgctcctctgtgccccagagatggctgagtgatctttctgatgtatgtatttaggcatgccactcttgtctgcagttcttcagtgacaccaatttgcctttaggataaagaccaaacaccctgcagactgtgtgtcctgtgatgtcctggactttgcctagccatgcggccg

SEQ ID NO: 400973 - DNA, 365 bp, Homo sapiens
agctcctgcagggaggttgcatgatgcccacaaacccacctgtgaggcccataagcctggatgttctctcttagctgcttaggctctgcccctcaaaagcggaaatgttgagtgtggagtgcagcttgttctatgaatttgaagtacgtggtccctggggttggaccagcaacaagtgactcagtccctctgagactctgtttgctcctctgaaaaatgggtggtgttgtgggggacaattttctacctgatgagctcctcatgaggatctatgtaaagggtagtatctgattcattaccaggattttgtatgctttataggcatgccaaatacagctgtatcttactttattaaatcgaacgga

SEQ ID NO: 400974 - DNA, 702 bp, Homo sapiens
cagtttcaatttttatacaaatattaaatcactgattcttctatgatccaagcacagatatgttactttttaaggataaaaataatcaaatcacttaggttaaactggttgtctacagtcacacagtaagttagataaagcaaaggaggtgtcaaagggtaacactaaattccattcactagcatcttgcctcactaacactctcataagatagattactaaataatataagtattaataaatggaatttccaagaactttcaactaataaagggtgggattataagattagtttttgttttactaattacaactatatcctggaactatttacatactacctaggaaataaagtttgtttattcttgcaggattgtttttaaaagcagtattttcccaaatattaatttaacagtaatcctaaaagtaactcaggaaataaaaaacttatcacttcagtacattttattcataatgaggtaaagtttttgttttttctctatatatgtagatatatatagcaacacaggttaattgtgcttgaggattcctatgaattacaagattatacatgttcccattctatttttctactcctaaagcaatcgtatatacattatttcctaataactcaataaggtaaaagtcttaaataattttattttatcctctactcttctgagaccatgtattcccatgttg

SEQ ID NO: 400975 - DNA, 569 bp, Homo sapiens
tagaattaaaagcaacttgacttttgggttttgcttggaggtacatggtcaggctcaggagcaacaacatctcataaaaataaaaatactcccacattccagaggaatagtccatgtgtttcaagcagtatccagcaaagtgcagtgattctattgaatctagctatccctgtgtactttgtcattgggagattagacttctatgttgcctttgcaaccaggatattaaagtagaagatttcatgtctttcagaataggcttcaccagaattttctccaacctaaaggatgatcatgcctatgggatgatgcctatgggataattccactgtgaccagcacctatataccatagtggcaaaccctcacatttgtcgtatctgtttgtcatatttatcaatgatgacttttcattctaaaagccctccttccctccctgagagctagtaaaataattggatattggcaattaaggaaaacaaagcaaggaagggaaatagcgaatgtcagagaagtgctgaggagcagtctctggaccacttttcctgaggattcacaattaaaaaaaaa

SEQ ID NO: 400976 - DNA, 416 bp, Homo sapiens
tactaacaacagttctcttattccccttcccttcatttttcaggtttaattatctgccaggatctcctctttaggcacagagagaaatgaggtttttactttacttttcttttaatataagaaataatttggctaggcacggtgcctcatgcctgtaatcccaacactttgggaggtcaaggcaataggattgcttgagttcaggagttcaagactagcctgggcaacgtggcgaaaccctgtctctacaaaaaatacaaaaaaattagccggatgtcctggtgcacacctgtggtcccagcttttcaggaggctgaggtgggaggatcacctgagcccaggaggcagaggttgcagtgaacaaagatcatgccactgtactcaagccactctgggtgacagagtgagaccctgtc

SEQ ID NO: 400977 - DNA, 345 bp, Homo sapiens
acagttttgtaaacctctcctgagtgtctcccatagtcaggagctgtgaatacaaaggtaagtaagagtctgtgcctcatacagagagacaggcaaacatggagttttaacataatatggtgaggatacagtggcactgtgagtagaggctggtcacatggaaacacaaagaacagatgtttttcctactccagacattctcaaatattggtatgggtcagagtcactcaaagggatgaaaagagcagaatgctggacccacccccagagtgcctgactctgtaggtctggggttgggcccaagagtttgcattctgaacaaacctccagtgcacgctgctgctg

SEQ ID NO: 400978 - DNA, 468 bp, Homo sapiens
gcccacatgacctatttctattgtaactgccactggaacttttgaccagggtaaatcttgtgccttcttccagtgcctcctgctcccctcatcagtccccatctgtcctctaaccatgctgacttctgtccaaactgcttctggactggccctggcatagacctgcattagagatgcaaggcagcaaggtgtttatttatttagttagttaggaaaacagaacaaattctgggatgtaatgagaaatgacatacacataagaggcttatgaccaaaatacgttaatactcattgcaaaagaagttctactttttagctttacatttgaaggctttaaaaatatgtctgagagtgctatagagagttatactttcttcctccccatgtgacctaaacctccaattcagctgcttaaatagctgacaccgaccctaaaatggaaagctcatattacagaggagaaatatg

SEQ ID NO: 400979 - DNA, 442 bp, Homo sapiens
tgagacagggtgttgctctgtcacccaggctggagtgcagtggcaaaatctcggctcactgcaagctctgcctcctgggttcaagctattatcctacctcagcctcccaagcagctgggattacagatccacaccaccacacctggctaatttttgtatttttgtagagatggggtttcaccatgttggccaggctggtctcgaacgcctgacctcaagtaatccgcccacctcagcttcccaaagtgctgggattatacgtgtgagccactgtgcccagccaatttttttttcaatgttttaagacttgttttgtgacctaacatatggcctatccttgagaatgatccatgtgctgaggaaaagaatgtgtatcctgcagtcattgggcaaaatgttttgtaaatatctgttagatccattaggtgtatagtgcagatta

SEQ ID NO: 400980 - DNA, 442 bp, Homo sapiens
aaagaagcatgctgtgaacactgcaaagtaaactattagaaattaatggtcactacctataaagatagcaaaatactaaaggggtggtattttatgagcaatggaaacttttgttgtagatatttcaactgacactgtgcctttattactactttatacctacatctgaagatccagactctagtagttgtaatacaatagatgcaaacagtgggaacatctagttcttgtcaatgtgtcaccaaaacatattatcaaagctaatctcataagggtgtcagaggaaattaaagttcctttggctgcatgttataagaactgactgaaattttaaactacctcagtagctgactatatacagcagcaggaagccttcaattaactgcaccagttctatttgtagtacaaaggatctatggcttaggatagcctacataactta

SEQ ID NO: 400981 - DNA, 2697 bp, Homo sapiens
gaattccgggccatgagctgccccgtgcccgcctgctgcgcgctgctgctagtcctggggctctgccgggcgcgtccccggaacgcactgctgctcctcgcggatgacggaggctttgagagtggcgcgtacaacaacagcgccatcgccaccccgcacctggacgccttggcccgccgcagcctcctctttcgcaatgccttcacctcggtcagcagctgctctcccagccgcgccagcctcctcactggcctgccccagcatcagaatgggatgtacgggctgcaccaggacgtgcaccacttcaactccttcgacaaggtgcggagcctgccgctgctgctcagccaagctggtgtgcgcacaggcatcatcgggaagaagcacgtggggccggagaccgtgtacccgtttgactttgcgtacacggaggagaatggctccgtcctccaggtggggcggaacatcactagaattaagctgctcgtccggaaattcctgcagactcaggatgaccggcctttcttcctctacgtcgccttccacgacccccaccgctgtgggcactcccagccccagtacggaaccttctgtgagaagtttggcaacggagagagcggcatgggtcgtatcccagactggaccccccaggcctacgacccactggacgtgctggtgccttacttcgtccccaacaccccggcagcccgagccgacctggccgctcagtacaccaccgtcggccgcatggaccaaggagttggactggtgctccaggagctgcgtgacgccggtgtcctgaacgacacactggtgatcttcacgtccgacaacgggatccccttccccagcggcaggaccaacctgtactggccgggcactgctgaacccttactggtgtcatccccggagcacccaaaacgctggggccaagtcagcgaggcctacgtgagcctcctagacctcacgcccaccatcttggattggttctcgatcccgtaccccagctacgccatctttggctcgaagaccatccacctcactggccggtccctcctgccggcgctggaggccgagcccctctgggccaccgtctttggcagccagagccaccacgaggtcaccatgtcctaccccatgcgctccgtgcagcaccggcacttccgcctcgtgcacaacctcaacttcaagatgccctttcccatcgaccaggacttctacgtctcacccaccttccaggacctcctgaaccgcaccacagctggtcagcccacgggctggtacaaggacctccgtcattactactaccgggcgcgctgggagctctacgaccggagccgggacccccacgagacccagaacctggccaccgacccgcgctttgctcagcttctggagatgcttcgggaccagctggccaagtggcagtgggagacccacgacccctgggtgtgcgcccccgacggcgtcctggaggagaagctctctccccagtgccagcccctccacaatgagctgtgaccatcccaggaggcctgtgcacacatcccaggcatgtcccagacacatcccacacgtgtccgtgtggccggccagcctggggagtagtggcaacagcccttccgtccacactcccatccaaggagggttcttccttcctgtggggtcactcttgccattgcctggagggggaccagagcatgtgaccagagcatgtgcccagcccctccaccaccaggggcactgccgtcatggcaggggacacagttgtccttgtgtctgaaccatgtcccagcacgggaattctagacatacgtggtctgcggacagggcagcgcccccagcccatgacaagggagtcttgttttctggcttggtttggggacctgcaaatgggaggcctgaggccctcttcaggctttggcagccacagatacttctgaacccttcacagagagcaggcaggggcttcggtgccgcgtgggcagtacgcaggtcccaccgacactcacctgggagcacggcgcctggctcttaccagcgtctggcctagaggaagcctttgagcgacctttgggcaggtttctgcttcttctgttttgccccatggtcaagtccctgttccccaggcaggtttcagctgattggcagcaggctccctgagtgatgagcttgaacctgtggtgtttctgggcagaagcttatcttttttgagagtgtccgaagatgaaggcatggcgatgcccgtcctctggcttgggttaattcttcggtgacactggcattgctgggtggtgatgcccgtcctctggcttgggttaattcttcggtgacactggcgttgctgggtggcaatgcccgtcctctggcttgggttaattcttcggtgacactggcgttgctgggtggcgatgcccgtcctctggcttgggttaattcttggatgacgtcggcgttgctgggagaatgtgccgttcctgccctgcctccacccacctcgggagcagaagcccggcctggacacccctcggcctggacacccctcgaaggagagggcgcttccttgagtaggtgggctccccttgcccttccctccctatcactccatactggggtgggctggaggaggccacaggccagctattgtaaaagctttttattttagtaaaatatacagaagttctttttctgaactca

SEQ ID NO: 400982 - DNA, 1527 bp, Homo sapiens
ctggtcgatgggaaagggcatctacgtctcacccaccttcaggaggtcctggaaggtgggtgagacgtagaagtcctgaaccgcaccacagctggtcagcccacgggctggtacaaggacctccgtcattactactaccgggcgcgctgggagctctacgaccggagccgggacccccacgagacccagaacctggccaccgacccgcgctttgctcagcttctggagatgcttcgggaccagctggccaagtggcagtgggagacccacgacccctgggtgtgcgcccccgacggcgtcctggaggagaagctctctccccagtgccagcccctccacaatgagctgtgaccatcccaggaggcctgtgcacacatcccaggcatgtcccagacacatcccacacgtgtccgtgtggccggccagcctggggagtagtggcaacagcccttccgtccacactcccatccaaggagggttcttccttcctgtggggtcactcttgccattgcctggagggggaccagagcatgtgaccagagcatgtgcccagcccctccaccaccaggggcactgccgtcatggcaggggacacagttgtccttgtgtctgaaccatgtcccagcacgggaattctagacatacgtggtctgcggacagggcagcgcccccagcccatgacaagggagtcttgttttctggcttggtttggggacctgcaaatgggaggcctgaggccctcttcaggctttggcagccacagatacttctgaacccttcacagagagcaggcaggggcttcggtgccgcgtgggcagtacgcaggtcccaccgacactcacctgggagcacggcgcctggctcttaccagcgtctggcctagaggaagcctttgagcgacctttgggcaggtttctgcttcttctgttttgccccatggtcaagtccctgttccccaggcaggtttcagctgattggcagcaggctccctgagtgatgagcttgaacctgtggtgtttctgggcagaagcttatcttttttgagagtgtccgaagatgaaggcatggcgatgcccgtcctctggcttgggttaattcttcggtgacactggcattgctgggtggtgatgcccgtcctctggcttgggttaattcttcggtgacactggcgttgctgggtggcaatgcccgtcctctggcttgggttaattcttcggtgacactggcgttgctgggtggcgatgcccgtcctctggcttgggttaattcttggatgacgtcggcgttgctgggagaatgtgccgttcctgccctgcctccacccacctcgggagcagaagcccggcctggacacccctcggcctggacacccctcgaaggagagggcgcttccttgagtaggtgggctccccttgcccttccctccctatcactccatactggggtgggctggaggaggccacaggccagctattgtaaaagctttttattttagtaaaatatacagaagttctttttctgaactca

SEQ ID NO: 400983 - DNA, 938 bp, Homo sapiens
tgtgacctcttcaactttgccctcacttccgctcatttccagtgatccactcccattggcacaagtttggcctacttactataaatcagaattattctatccttgaaatcttaaactttaatattctactttatgacttcaatttagttttccagctcaccacctttctttcttccaacatctcaaccaccgtagaaagaccccataataggccctctatcttccagttaataatgtttctcttaactgcattttctcattttcatttctatctagatgatagttactccatagtccattactttatgcattggtggatgtgggccactggctctttgctgttgtatagaatctgtcctgtgaacagaagcattgtagatactccagcagcacagttaactgttgcctactgctgcatacaatcccccagccatgaggactggaaccacaatgaagagaagatcccagccccaccagaagtcatctctccctccaaattccctcaatagccatttcaaaccttcactgccattctcaaatttccccaattcttgcagttgtctcttgtcacctatattattaggaattgaggctattaagacagaaaggcctagttacccatccttgccaactattgacttatctccagttgtacccaagattttctcctgactctgtggaagccagcctctcttacctgcactgaatatcactaccaggtcccatcaacactagccttctcaaggtctttaatctctattttttgatctgtaaattataaacattaataataataaaattaggagtaatcattttctctaaagaagcaggtttcttagcagaaatccaagacaggaagaattcctagcaggttattaggtctacaacataaagaggcctcctgggcagatggccaaaccagcaatgttgaaagagct

SEQ ID NO: 400984 - DNA, 415 bp, Homo sapiens
ctgtcacccaggctggggtgcaggggtgagatcatagctcactgtagcttccaactcctgggctcaagaaatcctcctgcctcagcctgctgagtagctggtactacagactcatgccactgtgcctggctaatattttaaaaaaactgttggcagagacagggtctcactatgtagcccaggatggtcttgaactcctggccttaagggatcctccctccttggactatcaaattgttgggattataggcatgagcacactgcaactgaccagagctgacttttgaagtcaggactcagtcctagtacagtctttgcaaatcttactgtttagatgatgtcttaaactcatttttctagaagtgctactaaaatacatattacttgtggcaaaatgttggatactaacaatatt

SEQ ID NO: 400985 - DNA, 792 bp, Homo sapiens
gcggccgcctcgcccccgcccctgccccccgcccgagcagctgtcagcggcgcgcgcggccagctcggccccagcgcgcgctgtcaacagtcattagcgcggcccactcccctccccctccagccccacctcttcccccggccctgggtggggcccgcacctggggctctccgctcgttagcgcgcccagggcgcctcctcggcccgagagggacccgcccgcggggcctggctggctcagggctacctccttccgcctaggacccccccttcggtgactcccgattccctgtcctaggctgcggtgccccgggaggcgggtcgccagagtagcagacagagctctttaatgggtgtcttctagggcgggtgctgtttgtgcatcatttgggttcccacacacttcctatgaggtggcgaaagccattatgcctatggtgtctgctcacacagggggaaactgaggcccaggcaggacagccccttgcctggggtgggggctgggttgtccttaggcctgtgacttcacctctacagcaccctcctgtggaccctctccctgcccccgccaggccagagtcctgcagccaggcccagaccctggcctgtccgtccggggatgctggacagtactcctccctccagccctcataagtcattgtcattcggatctgcatttccccagcccctctccttctaactggggggcactgtggcccactgtgcccctttctcttcccattccttccccctacacccattccagacatcccagagttaacaaaacccaaa

SEQ ID NO: 400986 - DNA, 380 bp, Homo sapiens
gggcaaaaaatttctttctgccacctatcatctcaccatttctaatacactcaccatgtacactctgccttttgacatctgggtataatcctcacccagtttgggaagtctgtcttcaaggaattgtggaagacaagcactgcttcagcataggaaggcgggattccagtcttgactattgctgattttatcctgatatttcgctctggtaaatgactttcccttgagtaacttggaatgggattgcgtttgaaaccataatgattaagtttgaattgtagagtggccttcctgaatgcttgtggaattcctctgagaagaaactctacggtcacttttttgcacgtccttgagaaaaataaaatatctaactgcttctg

SEQ ID NO: 400987 - DNA, 359 bp, Homo sapiens
ccgggcaccgacctgggtcaccaccatcagaattgacgcacagaacacgcctgtcacccagaaagctcccctgggctctccgctccgtgcccttgccgtgttcccggccccaggcaacggatgacctgcttcctgtcactgggcatgcgtttgcattttccagaattcctaggaatggaatcagacagcgtgtgctcctgatgggctggcttctctcactcagcataattaaacgtggcttcctccacgtgccgcgcatcaggagctcattcctgtttcctgctgagtcgtgttccgtggtggggaaggccaccgtttgtttacccactcacctggtgatgaacgtttgggtggttccc

SEQ ID NO: 400988 - DNA, 660 bp, Homo sapiens
agttactttgaatcctgccaatttcaccagattagtcaacctaaaaggaagaagctgaggccaacataatgtaagtagagtttatttgggccaagcttgaggactccaacctgggagcatagattcaagttgccctctgattagcaacagatacgagttgatttttaaaggaaaagaagaggcagttcctaaattctttaccaagaatttacatttaaataacataagctattgattggctatccattgttctttgtccagggacatgaagataatggatgaggcagctaatcaggaacaaaatgactttaagcaattgccctcagacatggatgcatgtggtgaggtgtgactgaagtcccatactcgtgtctctctggacctgcatatctcacacagctcagacttctgtcagctgtttttcttttctcagaagaaatgacgtacagatttattaatgtgcacaaggagaaccacagagtgattactcccaccctttcatggggttcagaagcttgtgtaccatcttgaggttacagaaggaatgccaccttggattgtggcacagccctcagaaagaatagaaggtagatgtttctttcagacttttaaggtgtcagactttctaatcttgcccagatccagataggggagggcttc

SEQ ID NO: 400989 - DNA, 236 bp, Homo sapiens
agccctgaaggcatctaggctggcagaaaattacattagtaatgagaagtttattaacaatataattgggttaatctcatcatttttagtcaggattctttgggttgcaagtgacagtgacccaccccacaccgttggttcacaaaataaaggaaaggagggccagcagagcccaggatggggagggctgtggccggtctgcaggacaactgggctcagcgacctgggtatcacca

SEQ ID NO: 400990 - DNA, 491 bp, Homo sapiens
agctcctacgtattcagaccctcagcctcgtgggggaggggagaagttggaaggtgcaaccccctgcccagaccctctaggctgtgaaaagcctttcccgcactgttcaaccaaaacttcttttctgatcctcttgggttatgaacgtctgtgcatctgagggtggtcctgatttcattacttgctcgtgttttggatgagaaagctgaggcccagtgaaagccaagttcaaacccaactttagcagaccctgtgctgtgctggtaaactgcctccagcaaagtaaaaagccccggtttgtagcatttgctaattactgtggtgtaaatactcccaccatggctgatttccaactacccacatttaacaaccagctattaacaatattcctggccgggcatggtggcacatgcctgtaatcccagctactcgggaggctgaggcaggagaattgcttgaacccgggaggcagaaattgtggtgagccaaga

SEQ ID NO: 400991 - DNA, 341 bp, Homo sapiens
tctcactctgtcactcaggctggaatgcagtggtgtgatcatagctcactcagcctcaaactcctgggctcaagcaattctcccacttcagcctccaaagtagctgggaccacaggagggcactgtattgccaggtccctggatgtggtgtgaagactgttctctacaaaactctagaaggcacgattttcatcagattcacagccagcgtggccatacgcagtaagcctgtattaggtagccatgtttattgccccaaatactaccgagccataggcaataacctggctttcttttctgtaaaaattatgttagtaaaacttgactaccttatttagaag

SEQ ID NO: 400992 - DNA, 380 bp, Homo sapiens
gtataaagcagagaagtgctccttggggcaaaaggcaattggcaaaaagctaaggaacattttcataatgagttagaaatacagatcatcaggaatatccaggaagcgatagtgaataccaggcaggcttaagagacaggaaacatttagcatgttggtaaaccactttagcacatcagcaaaagcatataaacagctttaggattggaaattattgccatggggaaaggcaacaatttagaggagcaattccaattaaaaatataaagatcgtttctttagattaattcttgagttgctcccctatgcctgtgtagcagaatctaaaagataatcatgtgaacgggagattatattttaaaaataaactttgaaattca

SEQ ID NO: 400993 - DNA, 283 bp, Homo sapiens
gggctccagcaatcctcccaccacagcctgcagaacagctgagactacagatgcatgccaccacacctggctaattacaaattttttcttttcttttctttctttttcatagagacagagtctcactctgttgcccaggctagtcttgaactcctgggctcaagttgtctgcctgcgtcaacctcccaaaatgctgggattataggcatgagccaccacacccagccctgatctgtttatttagaagtggtagtctaaccactggcaaaaacaaaacaatacg

SEQ ID NO: 400994 - DNA, 511 bp, Homo sapiens
taaaggataaataattcccttatgtagatgtatgatattttacttattcatctgtgaatggacaacacttgggttgcatctaccttttggctctcgtgaataatgttgatatgagcatgggtgtacaaatatctagtctctactttcagttcttttgggtatacacccagaagaagaactgctggatcatatagtaattctatgcttgatttttttgaggagctgccatactgttttccacaatgactacaccattaaagggatattttaaatgaacgaacaaaaaaacccagcaggaaaaccctctattcttacagtctttggaattttacaatgaactttctaaaataggatgaagatagcttcattggatttcttgtgtaactaataattctaggaagtgtggtctctgtccttagaggtaagtggtgggcagatttaaaattaatatatcggtttctctttggataattacggagtttggagacattaggggaataacaaaggtgag

SEQ ID NO: 400995 - DNA, 669 bp, Homo sapiens
gccggttttcctatgtgctctagcaagatagcactgagcttaatgcctcacaattgctgtgttctccctcctgcagtgcccagagatgctctccacaccatgatgctgctgctaggtgtggggaggtgtggtgatggcaattcaagactgtttttttaatttctttggtgcctctttaagcaatataaagtttaaactaggtactataagtgctcagttgatttttggttttaatggtgtttttttctggttagatagttgttaaattggtgtccttgctgggggaacaatggatggaaccctttattctgccatcttgcttcacctctctattgttaataatttaataatggtaaattggaattttttttaacttctctggactttatagttttctcatttttaaaataaaaagctgaaataaaacactattgcaactgtaaattatttcaaggaatatttatttgctatttcattttttaaatatatatgttattttcagagcagttttatgttcacagcaaacttgattggaaaatacagtgttcccatatacacctttcccccatgtaggcatacgctccctactatcacaatctcctgacagagaggtatatttgttgcaattgatgaacctatactggcacatcattctcaaccaaagtttat

SEQ ID NO: 400996 - DNA, 428 bp, Homo sapiens
caaaattcagctatctgtatgttaggtaaggaaatggctgttttcactttccacctttcagtatttcaaggtttccatgttgtacattaatgcataacttaatgacagggatatgttccaagaactgccttagtaaagcagtttggtccttgtgccagcatgctagagtgtacttacacaaagctacgtgagagagtctactactcacctaggctgtatggtatagcctgttgctcttaggttacaaacctgtacagcatgttactgtactgaatactgtaggcagttgtaacacaatggtaagtatttgtgtatccaaacatatctaaacatagaaaaggcacagtgagaatatggtatcacagtcttatgaccacctttgttcacgtggtctgtcattgactaaaatgttgttagtgcatgacctt

SEQ ID NO: 400997 - DNA, 440 bp, Homo sapiens
cttaggataatggcctccagctccatccatgttgctgcaaaggacatggtttcattcatttttatgccagccagcccttcttgcattcacaatcatcttcctaaaagaaaggttcctttaaaaaaaaaaaaaatcacccttccatgtataaaccacatgctcaaaacgacacatccgtgtctctcttatgctgttttcctggcctgtaatgtccttttcccaatggaatgtcccgagtccacagcagcgttatggagaggcgatggattccacacttgagacccgggctcccttcctcaccagctacatgaccttggttaactcatttgacctttcctcacttctaaagtaggggctatatactaaccattgccgacctcaagcactatagaaaggcactaaatgggttaatgcatgtaaaacccttgtcaaattcaaag

SEQ ID NO: 400998 - DNA, 2523 bp, Homo sapiens
aggacagcccaagaactggtctagcctggcagccttttccctcgggtagtagaggctgcccctctgacagggagtttgtggtcagcgagtgggcccttgggggtcttgggctgtcacagggactccagaaagccatgcagagccttgtgccatgaaggacttctcagatgtcatcctctgcatggaggcaacagaatcgagcaagaccgagttctgcaatcctgccttcgagcctgagtctgggccaccctgccctcccccagttttcccagaggatgccagctacagcgtcccagctccctggcatggtcggcgtcctcgagggctacggccagactgccgcttctcctggctctgtgtcctcctgctctccagcctgctcctcctgctgcttgggctgctggtggccatcatcctggcccagctgcaggctgcacccccatctggggcgtcccatagcccactgcctgccggaggccttaccacgaccaccaccacccccaccatcaccacctctcaggcagctgggacccctaaagggcagcaggagtcaggcgtgagcccctccccacagtccacctgtggaggcctcctctctggcccaaggggcttcttcagcagccctaactacccagacccttacccccccaacacccactgcgtgtggcatatccaggtggccacagaccatgcaatacagctcaagatcgaagccctcagcatagagagtgtggcctcttgcctttttgatcgcttggaactctcccctgagcctgaaggccccctcctcagggtttgtggaagggtgcctccccccacgctcaacaccaatgccagccacctcctggtggtcttcgtctctgacagcagtgtggaaggatttggtttccatgcctggtaccaggctatggcccctgggcgcgggagctgtgcccatgatgagttccgctgtgaccagctcatctgcctgctacctgactcagtgtgtgatggttttgccaactgtgctgacggcagtgatgagaccaattgcagtgccaagttctcggggtgtggggggaatctgactggcctccagggcactttctctactcccagctacctgcagcagtaccctcaccaactgctctgcacctggcatatctcggtgcctgccggacacagcatagaactacagttccacaacttcagcctggaggctcaggacgagtgcaagtttgactacgtggaggtgtatgagaccagcagctcaggggccttcagcctcctgggcaggttctgtggagcagagccacccccccacctcgtctcctcgcaccatgagctggctgtgctgtttaggacagatcatggcatcagcagtggaggcttctcagccacctacctggccttcaatgccacggagaacccctgtgggcccagtgagctctcctgccaggcaggagggtgtaagggtgtgcagtggatgtgtgacatgtggagagactgcaccgatggcagcgatgacaactgcagcggccccttgttcccacccccagagctggcctgtgagcctgtccaggtggagatgtgcctcggtctgagctacaacaccacagccttccctaacatctgggtgggcatgatcacccaggaggaggtggtagaggtcctcagcggttacaagagcctgacaagcctgccctgctaccagcatttccggaggctcctgtgtgggctgcttgtgccccgttgcaccccactaggcagtgttctgcccccttgccgctctgtctgccaggaagcggagcaccagtgccagtctggcctggcactactgggcaccccctggcccttcaactgcaacaggctgccagaggcagctgacctggaagcttgtgcccagccctgaccctgaagccggcccctgccctcttcctgcccgtcctcttttgccggtcagggctggcacgcaggggaacaaaggaaggagcatcagcagggtctctacccatccttctctggggctcccagggagggggaagagaagtcctcagctggggctcatgggaccctaccaccctccctgctccttcctgtccctttaccggtcccaggctgctgactggccccacactgtgccaccggacaatcgagaccacttcccatccaggcctcttcccctttccatctgctttttcagcttctccatcgcctgccttctgaccttttccttgattcaacaaaaatgtactgagcatctattcatgtggcaggcccctgtcctaggccctagggatccaactggctgtctgcctctagaactctccaccctcatctctctgcgtatttctccctgaaatggggtctggtccttggtctctgccactgccctgcctctcctctggccctgggaacaggaggtgccctgtgtgtccgtctctcgaagttctgcctctctgtgcccagctcaagtctctctccccctcctttctccccctaaactttggccggccgccgggcgacaccacgagttatttccca

SEQ ID NO: 400999 - DNA, 1532 bp, Homo sapiens
  misc_feature (405)..(405): n is a, c, g, or t
gccgtcagcaccctgagccaggccagctgcgtgagccaggtgagcgaggcggagatcaatgggcaattcgagtccgtgtgcgagtccgtcttcagtgaagttgaatctcaggccatggatgccctcgacctcccgggatgtttccgaacaaggagtcacagctaccttcgagccattcaagccggctactcccaagatgacgaatgtattcccatgatgacaccctctgacatcacctccaccatcaggtcaacagcagctgtctcatatacaaattacaagaaaacgcccccaccggtgccccctcggaccacctccaagcctctgatctcggtgacggcgcagagcagcaccgaatccacccaggacgcctaccaggacagccgcgcacagaggatgtccccntggccccaggacagccgcggcctctacaactccacggacagcctggacagcaacaaggccatgaacctcgcgctggaaacggccgctgcccagcgccacctgccagagagccagagcagctctgtgcggaccagcgacaaggccatcctggtgtccaaggcggaggagctcctcaagagccgctgctcctccatcgggattcaggattctgaattcccagagcatcagccatacccaaggtcagatgtggaaacggccacagattctgacacggagagccgcggtctgcgggaataccactctgtcggggtgcaagtggaagatgagaagcgacacggacgttttaaacgttctaacagcgtcacggccgccgtccaagctgacctggagctggaggggttcccaggccacatcaccacggaggacaaaggccttcagttcggctcatccttccagcggcactccgagcccagcacccccacccagtacagcgcggtgagaactgtacggacccaggggctcttcagctatagagaagactatcggacccaagtggacacctccaccctgccccctccagacccctggctggagcccgccatcgacacggtagagactgggaggatgtctccgtgccgcagggatggctcgtggtttttgaagctgctgcacgcagagacaaagaggatggaaggctggtgcaaagagatggagagagaggcggaggagaacgacctctcggaggaaaaattgttaccagctcatgctttacaagaaaatgccttggcattatgccaaagagaagtcgatggaggtgacgatggacgccgaatgttggggagatgctgccttccacgtgacccacagtccccgcagcacggctgcatggggctggtgcaagtcagcacagccgtgttccgatcgttcacacggcgtttgcatttctcatggctggctggtaaatcagatccaaggaagagcagcctgtcttgaagtggatttgtgaacggcacaaggccccggtgttaagatgcccgacagacaaccttccatccttcttttcaagacagaaacaatgccaaagtgttatccgagttacttgcttttattaaaagttatgctttttt

SEQ ID NO: 401000 - DNA, 1734 bp, Homo sapiens
  misc_feature (405)..(405): n is a, c, g, or t
gccgtcagcaccctgagccaggccagctgcgtgagccaggtgagcgaggcggagatcaatgggcaattcgagtccgtgtgcgagtccgtcttcagtgaagttgaatctcaggccatggatgccctcgacctcccgggatgtttccgaacaaggagtcacagctaccttcgagccattcaagccggctactcccaagatgacgaatgtattcccatgatgacaccctctgacatcacctccaccatcaggtcaacagcagctgtctcatatacaaattacaagaaaacgcccccaccggtgccccctcggaccacctccaagcctctgatctcggtgacggcgcagagcagcaccgaatccacccaggacgcctaccaggacagccgcgcacagaggatgtccccntggccccaggacagccgcggcctctacaactccacggacagcctggacagcaacaaggccatgaacctcgcgctggaaacggccgctgcccagcgccacctgccagagagccagagcagctctgtgcggaccagcgacaaggccatcctggtgtccaaggcggaggagctcctcaagagccgctgctcctccatcgggattcaggattctgaattcccagagcatcagccatacccaaggtcagatgtggaaacggccacagattctgacacggagagccgcggtctgcgggaataccactctgtcggggtgcaagtggaagatgagaagcgacacggacgttttaaacgttctaacagcgtcacggccgccgtccaagctgacctggagctggaggggttcccaggccacatcaccacggaggacaaaggccttcagttcggctcatccttccagcggcactccgagcccagcacccccacccagtacagcgcggtgagaactgtacggacccaggggctcttcagctatagagaagactatcggacccaagtggacacctccaccctgccccctccagacccctggctggagcccgccatcgacacggtagagactgggaggatgtctccgtgccgcagggatggctcgtggtttttgaagctgctgcacgcagagacaaagaggatggaaggctggtgcaaagagatggagagagaggcggaggagaacgacctctcggaggaaaaattgttaccagctcatgctttacaagaaaatgccttggcattatgccaaagagaagtcgatggaggtgacgatggacgccgaatgttggggagatgctgccttccacgtgacccacagtccccgcagcacggctgcatggggctggtgcaagtcagcacagccgtgttccgatcgttcacacggcgtttgcatttctcatggttagggtacatttaacagagtaacttcacaattttgatatctaaaaatcactcattttctgcagcatcttccacccttgttagtatatgcctcaacttggccaaattgtcttaattataaaagggatttataatctttagcacaaagataaaacacagaaaaactgcattgcctaagttgacgccaaattaaattgccagctctggttttgtgcatgctgacaggggcagcgtagggctggggtgccttccttccaggatgagagcaggtgatgagacctgcatgtcactcaatcaagctgtgttttctacaccatgtgtttcctcaaaagaacacctttgaggaggaggagagaggaaaaaatttaggagagagaaa

SEQ ID NO: 401001 - DNA, 776 bp, Homo sapiens
caagtgaatagtggttttataaatatcgtccacgtcaatgggattttaggccaattagcgaatcgggccagtgtttccccgcacacccattcacgtaagatggttttcatgaacatactggaatcccagagtctgcagaaaaccctgcagtgttgaatagggatgtccagcgatggtgtccaaaaccctcgcgatgctcggagatgacacagggctttgggaagcgcaggaatcgggcgacaatgtcagactagcgcagtgactgcagagacgcaaggtgcgaatctgcagaatttctttcctgatttgtccacgctgcccctgacgcctctgccccctttggagagtgcgagggagcttccacaaatcccatcctgtgcagaaggcaggcctgtggcctgggagccggggaccagggcagacgggggacgggagtgaaggatgcggccctgggggctgcggtcgggaagggtcaggccaggccccagggccgctgagctcgcgagctgctgggaccctcctccgagcacctgccaacggtgacttgcgctgcttttcaggaagaaagaaaggtcccgcctccaataccaaagaagcctcccaaggggaagtttcccatcacaagagaaaaatccctggacctgcccgacagacaacgccaggaagcccggaggcgcctcatggccgccaagcgagcggcgtccttccggcagaattccgcctccgagcgcgcggacagcatcgagatctacatccccgaggcccagacccggctc

SEQ ID NO: 401002 - DNA, 1740 bp, Homo sapiens
  misc_feature (405)..(405): n is a, c, g, or t
  misc_feature (1179)..(1179): n is a, c, g, or t
gccgtcagcaccctgagccaggccagctgcgtgagccaggtgagcgaggcggagatcaatgggcaattcgagtccgtgtgcgagtccgtcttcagtgaagttgaatctcaggccatggatgccctcgacctcccgggatgtttccgaacaaggagtcacagctaccttcgagccattcaagccggctactcccaagatgacgaatgtattcccatgatgacaccctctgacatcacctccaccatcaggtcaacagcagctgtctcatatacaaattacaagaaaacgcccccaccggtgccccctcggaccacctccaagcctctgatctcggtgacggcgcagagcagcaccgaatccacccaggacgcctaccaggacagccgcgcacagaggatgtccccntggccccaggacagccgcggcctctacaactccacggacagcctggacagcaacaaggccatgaacctcgcgctggaaacggccgctgcccagcgccacctgccagagagccagagcagctctgtgcggaccagcgacaaggccatcctggtgtccaaggcggaggagctcctcaagagccgctgctcctccatcgggattcaggattctgaattcccagagcatcagccatacccaaggtcagatgtggaaacggccacagattctgacacggagagccgcggtctgcgggaataccactctgtcggggtgcaagtggaagatgagaagcgacacggacgttttaaacgttctaacagcgtcacggccgccgtccaagctgacctggagctggaggggttcccaggccacatcaccacggaggacaaaggccttcagttcggctcatccttccagcggcactccgagcccagcacccccacccagtacagcgcggtgagaactgtacggacccaggggctcttcagctatagagaagactatcggacccaagtggacacctccaccctgccccctccagacccctggctggagcccgccatcgacacggtagagactgggaggatgtctccgtgccgcagggatggctcgtggtttttgaagctgctgcacgcagagacaaagaggatggaaggctggtgcaaagagatggagagagaggcggaggagaacgacctctcggaggaaattctcggtaaaatcaggagtgctgtngggagtgcccagcttctcatgtcccagaaattccagcagttttattggctttgccaacagaatatggaccccagcgccatgccgaggccgacgtcgcaggacctggccggctactgggacatgctgcagctctccattgaggacgtcagcatgaagttcgacgagctgcagcggctgcggctcaacgactggaagatgatggagtccccggaaagaaaggaagaaagaaaggtcccgcctccaataccaaagaagcctcccaaggggaagtttcccatcacaagagaaaaatccctggacctgcccgacagacaacgccaggaagcccggaggcgcctcatggccgccaagcgagcggcgtccttccggcagaattccgcctccgagcgcgcggacagcatcgagatctacatccccgaggcccagacccggctctgagggcggaggccggcgccttcccctcgtcgcttccgctttcccggacgcttgtgcagcgcggcgccgccctggtggtttctgtctcctcctcccgctgaacacgtcctcgctcccgcgctcccc

SEQ ID NO: 401003 - DNA, 1290 bp, Homo sapiens
  misc_feature (405)..(405): n is a, c, g, or t
gccgtcagcaccctgagccaggccagctgcgtgagccaggtgagcgaggcggagatcaatgggcaattcgagtccgtgtgcgagtccgtcttcagtgaagttgaatctcaggccatggatgccctcgacctcccgggatgtttccgaacaaggagtcacagctaccttcgagccattcaagccggctactcccaagatgacgaatgtattcccatgatgacaccctctgacatcacctccaccatcaggtcaacagcagctgtctcatatacaaattacaagaaaacgcccccaccggtgccccctcggaccacctccaagcctctgatctcggtgacggcgcagagcagcaccgaatccacccaggacgcctaccaggacagccgcgcacagaggatgtccccntggccccaggacagccgcggcctctacaactccacggacagcctggacagcaacaaggccatgaacctcgcgctggaaacggccgctgcccagcgccacctgccagagagccagagcagctctgtgcggaccagcgacaaggccatcctggtgtccaaggcggaggagctcctcaagagccgctgctcctccatcgggattcaggattctgaattcccagagcatcagccatacccaaggtcagatgtggaaacggccacagattctgacacggagagccgcggtctgcgggaataccactctgtcggggtgcaagtggaagatgagaagcgacacggacgttttaaacgttctaacagcgtcacggccgccgtccaagctgacctggagctggaggggttcccaggccacatcaccacggaggacaaaggccttcagttcggctcatccttccagcggcactccgagcccagcacccccacccagtacagcgcggtgagaactgtacggacccaggggctcttcagctatagagaagactatcggacccaagtggacacctccaccctgccccctccagacccctggctggagcccgccatcgacacggtagagactgggaggatgtctccgtgccgcagggatggctcgtggtttttgaagctgctgcacgcagagacaaagaggatggaaggctggtgcaaagagatggagagagaggcggaggagaacgacctctcggaggaaagtaagagctcaggcttccctagggcctcttaaatatcatttctcagtaatgcaaatatgcacatcacagcattagtggagaaaagttcctccctttggtattcaagtgaagggaaataaatgtgctttctagtatat

SEQ ID NO: 401004 - DNA, 472 bp, Homo sapiens
cgtggaggatggtccagggtgtggctgccagagggcatcgggggccaggcaactccagaaaggagctaggaatgttagagaaaactgcactaacagccagcatgcgtgaagaactgattcatactacaccgtggatgaacctcaagaacattattctcggcaaaagcagacagacacaaaaggtcacatagcaaatgcttccgttgatatgaaatgtccagcactggcaaatccacagagacagaaagtagatgagtaatagccagcggctgcagacagggaaggaggggagtgatgacttaatgggtacagggattttattttggggtaatgaagatattttggaatgagacagagctggtggctgcatagagcactatgaaagtgctaattgccattgaattattcacttcaaaacagttaatttaacgctatgtgaatttcacctcaataaaaaaggtacaaaataaaa

SEQ ID NO: 401005 - DNA, 397 bp, Homo sapiens
gtatttccgaggttacgtgcggtcttctcttctcccccatccctcttccctgcctccctcctgccggccttgaggcccctgaggagcagtggagaggccaggtgtcttctctgcccagcgctttctgtgacttctttgagtggctacaggttgagggttgactgtgcgggcgattgcagcgtggccctttcacctctttgcacactgccacatgctgccacaggatggcagtgcaggtctggctctgtttctctgtttggtgccctctatcgatcgtcgtgaggcttgggatgggcctagattgtgagcagctgccagaaagcccagatttgacccaagctatttatatgttataaagttataataaagtgtttcttcctgtttgtcccccctggta

SEQ ID NO: 401006 - DNA, 450 bp, Homo sapiens
gtatttccgaggttacgtgcggtcttctcttctcccccatccctcttccctgcctccctcctgccggccttgaggcccctgaggagcagtggagaggccaggtgtcttctctgcccagcgctttctgtgacttctttgagtggctacaggttgagggttgactgtgcgggcgattgcagcgtggccctttcacctctttgcacactgccacatgctgccacaggatggcagtgcaggtctggctctgtttctctgtttggtgccctctatcgatcgtcgtgaggcttgggatgggcctagattgtgagcagcatgggtgccaaggccagggcaggagctggcatggggcctgtgtgggccattgtggtaggaagcctggcagtcgactggcccagaggatcccaggctgctttccttcttgaggctggtggcaggagggctgctgacgga

SEQ ID NO: 401007 - DNA, 356 bp, Homo sapiens
tctatctacaagcctaggtcccttagtttcttggaacttccatttcttcaactgtaatataaggaaaataatagtactgttaccggaatggggtcctgatcaagactccagagatggttcttggatctcacacaagaaagaattcaaggcaaattcatacggcaaagtgaaaatctcttgccactcagctactaacccagtttttctctccaccgccacctgctcagcttttaatgtatgaaacttctagggaagtttcagatgggagaaataaaggagttaaaaacatgctgcctcaaaatatgctcctctggcatattgactattatgaaataaaggtacttgaaaaacagcag

SEQ ID NO: 401008 - DNA, 205 bp, Homo sapiens
taccatagctatatacatggtatatgtgtatagctaaactcaagtgatttagtctttagaattaggaaaatctattcattagccacagagtcaaaatgaagatgaacatgaagccctttttatgatctcatgaagcagagaaaatttcattataccatggtggtgctatttctcaagcaaactattaaaccaggattttatggta

SEQ ID NO: 401009 - DNA, 613 bp, Homo sapiens
  misc_feature (613)..(613): n is a, c, g, or t
ccatatgcagggatcttgtcttgtgttttggtgaatgttgcaactcttgtgctgaatccaagggccaaaaaacatgaagtataggtaataggccctaagggtatgacttgagatcaatcctgtctcttccattcacaaactgatttccttgtgaaattcatttagcctcactgggcctcagtttttgcatctctgaaatggtcaaggtaggatggttgtatttgagcgttcagtaatatgcttataaagtgtcagcacagtacccagtgtgtggtcagggttcagtaactggtaggtgcccctgctactgtaatccctactgtggaagagcaagtgactgggaggcaggaatttacgtcccaatggtggggcgctcagaggattgcagagcaggaaggaagaacttggggcaggtgtaactgaggagggactgtgaagggtaagtgctcaggcctctcctccccttcctggagtgctcaggggtacagagttttgtaagcacatggcactttcaggatgaatgagaggctcaccgtctcgtgccgttcggcacgaggttttttttttttttttttctctttagctattgcctgacttctatttctttgtcttn

SEQ ID NO: 401010 - DNA, 459 bp, Homo sapiens
tgcactccagcctgggtggtagagtgagagcctgtctcaaaaaagaaagaaagggaatcagtactcagagcacttaacagtcctttgcagacaggcacacattagggagaaacgggagtccctgtgctggctccccacagaggtgggacaaggcgatgctctgccctcctcttcacctcctacccagatgcccggagaggagacaggagggccaggcagtgtcacgtgtcacgcatgaggccagttctagggttagttccaggggctccaagcccagctgtggcacctgttagtggggtggctagtcaccctatatttccaacttcctttaaaataaaggaaatagaactgaccaggatgcattgctttgaggatttcctgttagtagggtggccagccaccctatatttccaacctccttttcgtttttgtaaaataaaggaagtagaactgaccgga

SEQ ID NO: 401011 - DNA, 448 bp, Homo sapiens
cgagaggagagagaaggaaattaaaagacttaaaggatatgtcaatcattttcagtatgcagttcttatttgaatttgactcacacaaacagtttaaacaatatgataacatctctgtggcaattggagatgttaatgctggctggatatttgatgaaattctagaacatgtaaaacttacttatagcaatggcatatcagtgacacttggggacagggatggagtaagccggggaagactgactgcaaagaaacacaagggaactttttgggtaatgaacatattctatgtcttgattgaagtaatagtatatatacttgtcaaaattcattgaattgtacacttaaaaattgatatttttatgcatattcttcctaaataaaatttatataaaatgtgcaaaacaaaacacaaaataaacgataatgacaaaactaaaaaaaaaaa

SEQ ID NO: 401012 - DNA, 696 bp, Homo sapiens
cagtggcatgatcttggctccctgcaacctctgcctaccagattcaagcaattctccctgcctcagcctcacgagtggctgggattacaggcacccaccaccatgcccagctaattttttgtatttttagtagagacaaggtttcaccatgttggccaggctggtctcgaactcctgacctcaggtgatccacctgccttagcctcccaaagtgctggattacaggcgtgagccaccgtgcccggccatatatactatttttttaaaaaagagagaagtcattttagcttactctaaaaggaatggtttgcctaaaacctttactgagataaagacattccaggcagaggtcacagcacatgcaaacgtctaaagatcatggcatgcccaggtaactacaattcaccattaaattttgagtcgatgtaaaggtaaactataaactaaagaataagttgagaatctctctgattcacaaagcgagtaaaaaagacaagtaagattccacttggccaggtgcggtggctcaagcctgtaatcccagcatttttgggaggccgaggcaagcagatcatgaggtcaggaattcaagaccagcctggccaacatggcaaaaccccatcttttacttgccattacgcaggtttgcccgggcttgccaggcatccccaggccctagtcattctttacacacgt

SEQ ID NO: 401013 - DNA, 425 bp, Homo sapiens
tcaaattttatcttaactttatagactcaatgtggcacatttattacttaatcagagataggagagagagaagaaaggtttcctaaagctaagaaccctggaatccatgagccctcttaaatagcatctttaattttattttgtattgtggccatttttcagaagcattgagggtaggaaatgatctattaagctatttcacttttatagctaattctacactatcaaatgcttgccagattctcccctttatttgagtatatggcaaattacataggtattgaaccattttgattacaagggtagggtgtcaatttggtctgtaaacattgttgttcgcacttttatttattttacatttaaaaatctggcttgtcagtgcatcctccccaactaaatttgtttgtgtcataaattattaggaa

SEQ ID NO: 401014 - DNA, 544 bp, Homo sapiens
cgaggcgagtgaatcacttgaggtcaagagttcaagaccagcctggccaacatggtgaaacactgtctctgcaattaatacaaaaattagccagacatggtggtgggcacctgtaatcccagctacttaggaggctgaggcaggagaatagcttgaacccaggagatggaggttgtggtgagccgagatcataccactgcactccagcctgggggacagggtgagactctgtctcaaaaaacaaaacaaaacaaaaaaagaacaagcaagcaaaaacagccctggccagtccagctcccttcctggagggatgtttcacattttctccagatcatggcataaagtagaagtcagtatgaggtaaaaagatggagagccaagagggctttctaatgcctctcagcaagccgctccaccctgcccaggtgagagggcccaggttaagagataagctatggtgcaaggagtcttggcccagggctccttctggacttctttgcactcactcctatggctgccctggcaggacatggcagcccaaaag

SEQ ID NO: 401015 - DNA, 391 bp, Homo sapiens
tactatgacgaattttgacctgttttctttgttacttgttgaatattgtcagacagagaacccaaagaagctatgtatagataccagcactctggtagaaatacacgaatgtaatttttttttctccaagtatttggtttattctactacttctggatttggtttttcaaaatattgattattatcctcaggaacatttttaatgtgagttatcaacaggatagctttttgtaagtggctaagttgtagaatctcattttggagccatctctgccaatccagcttgttgcatgtgaaggcaagctgtgggtcagagcacagaaatgtttacagaggctttcctaagcctggaggcctggagagatttgaaggaacaaatagagcatactta

SEQ ID NO: 401016 - DNA, 837 bp, Homo sapiens
ggtgttacaaagcataatatgcctccaagccaggctgcccaaaaggtcaaatccagaaaccagtctaatagactgaggaaagcaagtgaaggtaacttgacacgccataaagaactgttcaagtgagtggactcattgtgagatgcctgatgcactccagagaaatcagatttaggtccaatagcataatacaagaagtcaagcacgtgagggcctcctgtgagatctcgatggggcagccaggcacggtgactcacgcctgtaatctcagcattctgggaggccaaggctggaggatcatttgagcccaggagttcaagattagcctgggcaatatggtgaaaccccatttctacaaaaaaatacaaaaaaaattagctgggtatggtggtggtgtgtgcctgtagtaccagctactggtgggagctgaggtaggaggatcacctgagcctggaaggttgaggctgtagtgagccatgatcacaccactgcactccatcctgggtgactgagtgagactctgtctaataacagcaacaaaatctcaatgggacccagcatggtggctcatgcctgtaatcgcagtgctttagctgactgggatggaagatcttgcctgaggccaggagtgtgagaacagcctgggctacatggactttaccaaacactctttttaaaaattagtcaggtgtagtggcgcatgcctgtagtcctagctactcagtaggctgaggcgggaggatcgtttgagcccaggaagttgaggctgcagtgagctaggatggcgccactgcactccggcctggacaacagagctagtgagactctgtctcttaa

SEQ ID NO: 401017 - DNA, 218 bp, Homo sapiens
tgctcaggacatatttattgactgaatgaatggtgtttcactcaggcttttgatgtgggagaacccaggggatgctctagacagagggaacagcatggcaaaggcctggaggtgggatggcaagtcctgacaggtcccttatggttggagctcaggaggcaagggtgggggagttgaagcagggtggggtgcctgggggcatggaggacattggatct

SEQ ID NO: 401018 - DNA, 670 bp, Homo sapiens
ggtaacccggaaaagtcctctgagcctgataggaattcagatctgccttgtgtgaacagaacctcccgcacgcaagttctgagctgagaaattatttaaatagcatcaaaatcaatttccatgccattaaatattctggtctgtgttttaattgagacgattacatattccccaaaaagagaagagctatttgaagaatcgtgtcttttctctcttcctctcactggaactgacaaggaaagcacctcagagagctgcaaaccgcctgttagcctgccttcgttcctatccatcttctttagagctaacctggtttattatttttctttaagaaataaaaatggagctctaagaggcacccagggcactgggaactctgagttcttcaaatagaataaaccaggtcattctctcttcttcttcttaagggcttgggtttgtggtcggtggcaagaggcagacatgcctttgatgtcctaggagcagatagggaggtgaggatcattcccaacctctgctgctcccaggccttcttcctattcagtaaatattttgggtgcatcttccatggtccaagaactcactgtggctccctggaggagctcccagtctgatggggggatgttcctgaaaacaagtcattataatgcaacatacaaggctctccacc

SEQ ID NO: 401019 - DNA, 1240 bp, Homo sapiens
cccaagaagcaatgtaaagtttgaaacgagccgagcgcggtggctcacgcctgtaatcccagcactttgggaggccgaggctggcgaatcatttgagtagagacggggtttcaccgtgttagccgggatccatctcctgacttcgtgatccgcccgcttcggcctcccaaagtgctgagattacagacgtgagccaccgcgccctgcctatattaggtttttaaatagcaggaggcaaagcttttcggtgtgatcctgacttcacttggggaaaaagggcagacacagggtctcactgtgttggccaggctggagtgcggcagtctggaactcctgggcccaagtgatcctccaatcagcctcacaaagcactggaattacaggtagctcagagagctgcgctggaggagaaaagccagtcctggcaggagctctggtacctgggaagctggatggagagcctgggccagaatcccggacccctcacctctgcggcctagctttgtgaccttggcaaatccattctatgcacctccatttcctgtacagtggggatccttatttctctggcacagattggtatttgttctgtaaagcccagtaccactttattttattttagttattgatttttttgagacagggcctcactctgttgccaaggctggaatgcagtggcgagatcatagctcactgcagcctcaaactcctgggctcaggccatcctcctgcctcggcctcctgagtagctgggacgacaggcgtgcaccactgcgcctagctccagtaccatgtttaaacggtgctcagaaaacgtgctaaacttggtggatgggaattgaaaagagatttaatgttttaaaaatcaaagtcactcagctgcagtgccacatgggaaggaggcctggatgtgaatgttcctgggagctgagagctcctgtgactgtcgccagtttcctgtggtctcccacagactcaggacatctccctctgctccaggacacctcaggaccaccagagggcactcatcgcaccttcacccctggaagggagctggtcctggggccaaaacccactgtgcctgggaagcccttcctggcttctgctctcctcaatgtatgacagccctgatttacccccagggactgttgccactcggggttgtagagtaatatgtaaccagactggagaaccacagcaatgctctctcctctgcccatcacctccccttggcccctcc

SEQ ID NO: 401020 - DNA, 900 bp, Homo sapiens
aagtttttctttactttttaaagagtaaattctctcacctcaggtagctcagagagctgcgctggaggagaaaagccagtcctggcaggagctctggtacctgggaagctggatggagagcctgggccagaatcccggacccctcacctctgcggcctagctttgtgaccttggcaaatccattctatgcacctccatttcctgtacagtggggatccttatttctctggcacagattggtatttgttctgtaaagcccagtaccactttattttattttagttattgatttttttgagacagggcctcactctgttgccaaggctggaatgcagtggcgagatcatagctcactgcagcctcaaactcctgggctcaggccatcctcctgcctcggcctcctgagtagctgggacgacaggcgtgcaccactgcgcctagctccagtaccatgtttaaacggtgctcagaaaacgtgctaaacttggtggatgggaattgaaaagagatttaatgttttaaaaatcaaagtcactcagctgcagtgccacatgggaaggaggcctggatgtgaatgttcctgggagctgagagctcctgtgactgtcgccagtttcctgtggtctcccacagactcaggacatctccctctgctccaggacacctcaggaccaccagagggcactcatcgcaccttcacccctggaagggagctggtcctggggccaaaacccactgtgcctgggaagcccttcctggcttctgctctcctcaatgtatgacagccctgatttacccccagggactgttgccactcggggttgtagagtaatatgtaaccagactggagaaccacagcaatgctctctcctctgcccatcacctccccttggcccctcc

SEQ ID NO: 401021 - DNA, 1954 bp, Homo sapiens
gctgagcagctctctccagctccagctggacctgaagtctcagagctgccaccagcagcaggctcagacactgggctcccagctggggactgctccatggccatggagatagacagcaggcctggggggctccccggcagtagctgcaacctaggtgcagcccgagaacacatgcaggcggtcacccgaaactacatcacccacccccgtgtcacctacaggactgtgtgcagcgtgaacgggcccctggtggtgctggaccgggtcaagtttgcccagtatgcggagatcgtccacttcaccctcccagatgggactcagaggagcgggcaggtgcttgaggtggctggcaccaaggcgattgttcaggtgtttgaagggacatcagggatcgatgccaggaagaccacttgcgaatttacaggggacatcctacgaactccggtgtcagaggacatgctgggtcgggttttcaatggctccggcaagcccattgacaaggggccagtggtcatggcggaggactttctggatatcaatggccagcccatcaacccgcactcccgcatctaccccgaggagatgattcagacgggcatttctcctattgacgtcatgaacagcattgcccgcggccagaagatccccatcttctcagcagccgggctcccccacaatgagattgccgctcagatctgccgccaggcggggctggtgaagaagtccaaggctgtgctggattaccatgacgacaacttcgccatcgtctttgcagccatgggggtgaacatggagacagccagattcttcaagtctgactttgagcagaatggaaccatggggaacgtctgcctcttcctgaacttggccaatgaccccacgatcgagcggatcatcaccccgcgcctggcgctgaccactgctgaattccttgcctaccagtgtgagaagcatgtgctggtcatactgacggacatgagttcctatgcagaggccttgcgggaggtctctgctgctagagaggaggtgcctgggcgccgagggtttcctggatatatgtacacagacctggccaccatctacgagcgggcgggccgtgtggagggtcggggaggatccatcacacagatccccatcctcaccatgcccaacgacgatatcacccaccctatcccagacttgacgggcttcatcacagagggacagatctacgtggacagacagcttcacaacagacagatctacccccccatcaacgtgctcccttccctgtcgcggctgatgaagtcagccattggggaaggcatgacaagaaaggaccatggagatgtctccaaccagctgtacgcctgctatgccatcgggaaggacgtgcaggccatgaaggcagtagttggggaggaggcgctcacctctgaggacctgctctacctggaattcctgcagaagtttgagaagaacttcatcaatcagggcccctacgagaaccgctcggtgttcgagtcgctggacctgggctggaagctgctgcgcatcttccccaaggagatgctgaagcgcattccgcaggccgtgatcgacgagttctattcccgcgagggggcgctgcaggacctcgcgcctgacactgcgctctagccccgcgcgccgtggcaccccaacaccggcagggaacctaccctcggctcccgggtctcccctccctcgccaccccaaccagcggcttttgcgccgccctccgccctccgctggctccgaggtggtgggggcgccgcacgctccatccctttccctcgctcgattccttttcccgcgctccatgcctccccctcgactcccggtgctgcggaagaactgaaggttgcgatgccttactctgacgggagcatctgtatttttatgttaaaagcccacaaaataaaaataaaaagtaactgagatgaaaaaaaaactt

SEQ ID NO: 401022 - DNA, 1820 bp, Homo sapiens
agggaaggcagaggatgcctctgtgtgtgtgagcagggtgtttggggtgagacccctactcacccccgcccctcccccagcctacaggactgtgtgcagcgtgaacgggcccctggtggtgctggaccgggtcaagtttgcccagtatgcggagatcgtccacttcaccctcccagatgggactcagaggagcgggcaggtgcttgaggtggctggcaccaaggcgattgttcaggtgtttgaagggacatcagggatcgatgccaggaagaccacttgcgaatttacaggggacatcctacgaactccggtgtcagaggacatgctgggtcgggttttcaatggctccggcaagcccattgacaaggggccagtggtcatggcggaggactttctggatatcaatggccagcccatcaacccgcactcccgcatctaccccgaggagatgattcagacgggcatttctcctattgacgtcatgaacagcattgcccgcggccagaagatccccatcttctcagcagccgggctcccccacaatgagattgccgctcagatctgccgccaggcggggctggtgaagaagtccaaggctgtgctggattaccatgacgacaacttcgccatcgtctttgcagccatgggggtgaacatggagacagccagattcttcaagtctgactttgagcagaatggaaccatggggaacgtctgcctcttcctgaacttggccaatgaccccacgatcgagcggatcatcaccccgcgcctggcgctgaccactgctgaattccttgcctaccagtgtgagaagcatgtgctggtcatactgacggacatgagttcctatgcagaggccttgcgggaggtctctgctgctagagaggaggtgcctgggcgccgagggtttcctggatatatgtacacagacctggccaccatctacgagcgggcgggccgtgtggagggtcggggaggatccatcacacagatccccatcctcaccatgcccaacgacgatatcacccaccctatcccagacttgacgggcttcatcacagagggacagatctacgtggacagacagcttcacaacagacagatctacccccccatcaacgtgctcccttccctgtcgcggctgatgaagtcagccattggggaaggcatgacaagaaaggaccatggagatgtctccaaccagctgtacgcctgctatgccatcgggaaggacgtgcaggccatgaaggcagtagttggggaggaggcgctcacctctgaggacctgctctacctggaattcctgcagaagtttgagaagaacttcatcaatcagggcccctacgagaaccgctcggtgttcgagtcgctggacctgggctggaagctgctgcgcatcttccccaaggagatgctgaagcgcattccgcaggccgtgatcgacgagttctattcccgcgagggggcgctgcaggacctcgcgcctgacactgcgctctagccccgcgcgccgtggcaccccaacaccggcagggaacctaccctcggctcccgggtctcccctccctcgccaccccaaccagcggcttttgcgccgccctccgccctccgctggctccgaggtggtgggggcgccgcacgctccatccctttccctcgctcgattccttttcccgcgctccatgcctccccctcgactcccggtgctgcggaagaactgaaggttgcgatgccttactctgacgggagcatctgtatttttatgttaaaagcccacaaaataaaaataaaaagtaactgagatgaaaaaaaaactt

SEQ ID NO: 401023 - DNA, 997 bp, Homo sapiens
attgattattagaaggtattagaagggctcctctggcagaaccagttttcatctactcaacaacctcttactcatgggtctttatataacttaggtgaaagtatgtccataggggaacagaaaagaaagctgagaaagatgtgccaggagacttgtgggaactaatccaagtgcaacacctccttaccacaaaggaaaaggacagggtaaaggaaattggaaaaacccataagatgtatttgaggttctttctattccagggaattcttggtatgataggacatgaaagctgagagaaaacccttctacctaggaactccggagtttcaactaccagagactgaaggcaggagagaaaaactaagacaaatgacttcaaagcctttctgaaatgccacagagggtcaggattacaatctgcctattctgattcttctactatgggaaaaaatctttttcagaattgatgtaaagcctctgttaatacttttcctgttaacaacctaactattcaactgctgaataaaaaccattaggacaactaaagaaactgagagattttggcaagaaatagtcattccaatatcaatgactacggaggaaatgcaattacttttctttgcttaagttttccaggtttgtgttcttaagtatgagccacagcatttataacaaccccagaatgtaccatttttatacaagaattaaataatagcccaaattaagtatttggctcttaggaatttgagaacttttgcaaaatgatatctttcataaaaaataaatgttgtaaaactatatatatttaataaacccattgcagtaaccagcaaaaataaatttagctttctgaaatgcgtaattgcatactgaatgtttctctagatactctctgaaacttggaaactaagtttaaaaacataaactgtctttctttaaataaataccgatgcggcagggtgcggattatatcttagtcgcggcatcgcataaaaaa

SEQ ID NO: 401024 - DNA, 1012 bp, Homo sapiens
agtgtaccaagtgcaacaaacgtttgagcattgttctgctgccaatattgaagacagccactgctttgaagtgtggggaggagagctagagcatatttgcctgccacagttagttttgtgtttccatggaatttgagcaaaactgatgcacttgtctcccaggattaatccatacaagtcacctctaaaattatcttttcccattcgttgactgagcaaaatggacttcaaggacctaaaggaggttaaataccacaagatggaggagcttgagtctctgaatcattgtgtgtgaagtcatctgccaattacataaattgaattcttggaactccggagtttcaactaccagagactgaaggcaggagagaaaaactaagacaaatgacttcaaagcctttctgaaatgccacagagggtcaggattacaatctgcctattctgattcttctactatgggaaaaaatctttttcagaattgatgtaaagcctctgttaatacttttcctgttaacaacctaactattcaactgctgaataaaaaccattaggacaactaaagaaactgagagattttggcaagaaatagtcattccaatatcaatgactacggaggaaatgcaattacttttctttgcttaagttttccaggtttgtgttcttaagtatgagccacagcatttataacaaccccagaatgtaccatttttatacaagaattaaataatagcccaaattaagtatttggctcttaggaatttgagaacttttgcaaaatgatatctttcataaaaaataaatgttgtaaaactatatatatttaataaacccattgcagtaaccagcaaaaataaatttagctttctgaaatgcgtaattgcatactgaatgtttctctagatactctctgaaacttggaaactaagtttaaaaacataaactgtctttctttaaataaataccgatgcggcagggtgcggattatatcttagtcgcggcatcgcataaaaaa

SEQ ID NO: 401025 - DNA, 401 bp, Homo sapiens
ggtgtaacttagtcatttactcttatttcttttcagatgtaaagcctctgttaatacttttcctgttaacaacctaactattcaactgctgaataaaaaccattaggacaactaaagaaactgagagattttggcaagaaatagtcattccaatatcaatgactacggaggaaatgcaattacttttctttgcttaagttttccaggtttgtgttcttaagtatgagccacagcatttataacaaccccagaatgtaccatttttatacaagaattaaataatagcccaaattaagtatttggctcttaggaatttgagaacttttgcaaaatgatatctttcataaaaaataaatgttgtaaaactatatatatttaataaacccattgcagtaaccagc

SEQ ID NO: 401026 - DNA, 604 bp, Homo sapiens
agcagtgatcctcaacatgtctatgatcaaatacgaaatttgcatttctaattctttgaggttaaatattttcataaaatgtaatgatattatggccattccaaagtgcagtaaaattctttcaatgcttattctcaatatctacactttccttttgacagacggttccccagggcatgttcactgacatcaaggtgcagaacttactttaagtagcactacgtatgagggctgtacatctcacaaacaaaacagaaagacaataactttagtaaaaagtaagttgacacttttgtcattaggtctggcagtcagtgcaggcaccatacgactcctaattctaaacatctactctcaggatggataccattcaagcccaaggaaaaccaatgcttcttttcatctatggactcaagtctcagaaagcagagaagtgagtgtaccaagtgcaacaaacgtttgagcattgttctgctgccaatattgaagacagccactgctttgaagtgtggggaggaggtaagcaaaggtagcattttcctaagagaaaaaaaaatagcttgtcaaatatttcttctttgtcagcatgactgtaataggttcc

SEQ ID NO: 401027 - DNA, 361 bp, Homo sapiens
ttttttttggttttgaaatccaagttgacacctatttaacccaatctcttgggcataatatgcaaaatacccggtgtctgccacgcccggggatgggagtacaggtatgctggagttggaaactggagggtcagagttggctgatgctctcaggagacaccaggcaaggcagccgggctgagacgcctgcacttactcctgccgtgacgggagcacctaccaaacgtgactctaaggtccccaccagtgctgtgtgttacaaggaccgtgcagggtggccgggtccatgcgagcatgtggtgcttgtgtgatttagtcttttttgggagatgaaggggcagtgggggcagatgactagagt

SEQ ID NO: 401028 - DNA, 362 bp, Homo sapiens
ttgcttttggggtgggatattggcaggtgaaagccagagcagcgccctctaaagcatgggacccagaggagaggccccttgtctgagggccgcactggtcctagagatgaatggcaaggacccacacaacctggtgtctggagaactccctaacctcatttctgttgcgctttccctcagcttcaggacctcctcctgcctccggactattctctgctggaaagctctttcccacatatccttatggccaccctcctcactgccttcaggtctttgcttcgatgtccccttcttggggaagtctcccctcaccagaatattcaaactgcaaccctctacttccaccctgcattctatcccct

SEQ ID NO: 401029 - DNA, 488 bp, Homo sapiens
gtattgaaacagtaaccataacccacagagatatccatggctacaaactacagggcagccagaattcacagaagtagtccagacaggtagcccaccaaccaaacaccaagagccaaaccaaataataactttactcacactagaaaccaacccaatttccattagaatggattgagtttaaaaataaaaaaaattaaataaataaaaaggatgcgctttgggaagaaaaggtgggaggatcgcttgagcccaggaggttgaggctgcagtgagctatgatggcctcagtgtactccagcctgaaaaccctgtctcaaaaaaaaaaagaaaagaagtgggttggtctctttcgcaatcaccattgtaaaggattttctgatattaaatacatatgctctattgtgtgtttatttctgggagaactaagaaaactgttggaaatgtgaggatttttagtgtagtcggaagctgagaataagtgatcatat

SEQ ID NO: 401030 - DNA, 642 bp, Homo sapiens
tgaatttttatccagtatgtattatctttattatatacatgtagtatatatatatgtatagtacatatgtgtatatatatgtatatgtgtatatatgtatatagtatacgtgtgtgtgtgtgtgtgtatatatatatatacatatatatatatgtatatatatatacatgaagtaaaagaactattagaagtgggttggaggccgggcacagtggctcatgcctgtaatcacaggactttgggaggcccaggcaggaggattgcttgagcccaggagtttgagaacagcctgggcaacatagtgagaccctgtctctacaaaaaagttttataaatcagtcggtggcacgtgtagctgtagtcccagctacttaagagactgaggtgggaggatcgcttgagcccaggaggttgaggctgcagtgagctatgatggcctcagtgtactccagcctgaaaaccctgtctcaaaaaaaaaaagaaaagaagtgggttggtctctttcgcaatcaccattgtaaaggattttctgatattaaatacatatgctctattgtgtgtttatttctgggagaactaagaaaactgttggaaatgtgaggatttttagtgtagtcggaagctgagaataagtgatcatat

SEQ ID NO: 401031 - DNA, 437 bp, Homo sapiens
tggtcagagcttggctcagcagtcagactgctcttcttcaaatcctggctgcattgcttactacagctgtgtgactccagatgactgaatccacctctctgtgctgcagcttcccgtctagagagatcacctggagcagagggtggtcaggagactcaatctggttactgactcacagtgcaggagtactcatcccatagtaagcatccagctagagatgttgatttctattttcaggtaataatgatgatcgtaaaattagagacagataaaaggtatgggcattaggccagggcactgcaatttctaagctgtgtgacctcaggcaagttactcgacttctctgagcctcagcggtttcatccgcaatatatggataggaaaaccgacctcagtgggttgtctgacagtggagggcacttgattaaaaaaaaaaa

SEQ ID NO: 401032 - DNA, 390 bp, Homo sapiens
acaaaatataaagccatgattctggatgagatcgtctagggaggtaatgtagatagagaaagggcttagtactaatactggagacactcaagtatttagttgtttaatagaggaggccccagcagaggagaataagaggaaattctcagagaggcaggatgaaaatcacaattacctggtgcaataaaatccaaagagaggcacgattttccagaagaagggaagagtaacatcggtcgagcaaaggaagtgaagtaagatgcagagaagtaaccactgaacttagcatgggagtcactggtgactttgagaggaggaattaatatgaacagaaaccagactggagagggttgaataataaatatgatttggtaaagagggaaatgcaaa

SEQ ID NO: 401033 - DNA, 405 bp, Homo sapiens
gaatatttcccaactcatttataaggcatgtttgccttataaataacaacaatacctaaacatgacaaggatgttacaagaaaattattagccaatatctctcataaattatagacgtaaaaatttcaaatgatattagcaaactgaatccagaaatatataaaagaatagcatatcataattaagtgtttgcagtgtattccaggaatgcaggtttggattaacatccaaaaatcaaacaacataattcactatgtatagataaaggagaaagctatataattatctcaatgattttgggaaaagcatttgataaaattcaacactcaaacatgagaaaatcctctgcagactaggaataaaagggaacttcttttacataataagagattttacaaaaaaaaa

SEQ ID NO: 401034 - DNA, 478 bp, Homo sapiens
ttgtatatcccttaacgaatgatccttgagtgcatgatctgtttcagccactgttctaagctttagaggcccagctgtggatgatgtaaacacattctgaaagggaggcagattataaagaagtaatattaaggtgatgtgcttctcttccacacctcacatttctatttagggaaggaaacctctatgcccctggataaaattgttttagagtatacctgcctctctctttcccctaatttatatgatttgtgaaacaggaaagagaaactgagggtgacctttctctgttctctgtttcacctgcatgcatttctatctgcttgggattaaggtatcaggagcatgttcagtcccatttggaggtggggaaggggtgtcagctaatggttgtgattttaatttggagagaaactttgttgaaaatataaaccatgcttttcaacagactttattaataaaatacctttttgaatta

SEQ ID NO: 401035 - DNA, 395 bp, Homo sapiens
gtctttacaggtaaagtggttttcctgtagccagcatgtagttgggtcttgctgctttatacattcagccactctgtgtctgttaattggaaaactgcgtctattaacattcaattttcttattgataagtaaggagtaccatgttgtttgtttttgggttgttttataactcctcttcctttctttcattctcactctcttcctttctttcattcttactgtcttcctttgtagttaagtgattttccctggtagaatgtttaatttgttactgttttaaaaaaaatacatgctacaggtttttgcaatgtgatttccatgaggcttaggaaaaaacatcttatagatgtaatgacttattttaaagagatcacaacttaaaacaaagaataga

SEQ ID NO: 401036 - DNA, 564 bp, Homo sapiens
agattatcatattcataattctctgagatagcttttattactccattccatagacaaagataccaaggataacagaggttaagtaccacaattaccatgtcatccgtctgactccaaagtccttgttcttaactactgcaccacggtacctctccgtaacaatgattacacccatccataatcaaatctgaatctagtatgttaatcaaactttatgtcataagtactattttcagagcaaggtttaataaaacattgatataatccatttaatcagtgcttacttataatttgctattaaaatcttttatcactatttttaactaactttaaatttacgattaatctatttatgagaagtaacagtgactcatttcagtcaacctcaatatttcacttgccttaaaaataatgaatgtattcagtctttattctattatttgattttcctagatatgactgattccacatatataggcttttatattataggatcttagtttatttctaatatgattctaaattagaggcattggggaaaatttttcaaagaatttggtccca

SEQ ID NO: 401037 - DNA, 449 bp, Homo sapiens
gtaaatgtactgccttagttgctgctggtgtaaaatgaagtctaagcctgacctccccgtaaacagcagtgatttccaggtggattaaagatctaagtacacaattacgaggacaacagaatgcagccgggtgtgctggcacctgtggtcctagctacttgggcgtctgaagtgggaggatcacttgagcctgggagttcaaggatatagtgagccatgattgtgccactgcactccagcgtgggggacagagcaagaccctgtctcagaaaaataagaacgtcaacaaaggatagtagaactggaaaaggggccgggtgcggtggctcatgcctgtaatcccagcacattgggaggccaaggtgggcggatcacgaggtcaagagatcgagaccatcttggccaacatggtgaaaccccatctctactaaaaatacaaaaattacctg

SEQ ID NO: 401038 - DNA, 600 bp, Homo sapiens
tttctctagcttaccttattgtagaatgtgctatataatacatataaaatacaaaatatgtattaatcaacagtttgtgtcatctgtaaggcttttgggcaatagtaggctattagtggtgaagtttttgtggtgtgaaagttatatgtgaattttcacttgcagtgaggtttggcacccatacctcctatgttgttcacaggtcaattgtgtatcacaagtaatactagttagaagtattcaaatgaaagtattgctgcttgtattatcactaagatttgggtacttatcactgccaataactttcacttcatttataatagtaacattggaaaggaggcgctctcaaatacttgacgtccttcttctttgctattttatctattaattgttttttaattgtctttaagctttccctcattgatccctctcagaggtatatctctataacctaattgcccaatatattccacatgtagctatgtaaatttatattcaaattaattaaaactaaagttaaattataaattcagtttctcagtcatactgattacacttcaagtcctccatggcctccatgactttttcaaaaaaaaaaaa

SEQ ID NO: 401039 - DNA, 440 bp, Homo sapiens
ctgggaaattggtaagtaaaataggacactttgtaaaatggattattatgcagccatgaaaaccagcagtaactctatgcattctgacacagaactatgtctaagatatgctatgctgttgagtgaaaaatgaaactttcactgaagtgtttctaaaatgacaccacgaatcaaaataaacagagtgaaaacacacacattctgcatgcaaaaacactcaaacatacatatacgcatgtggatatgtatgcttacaaataaatagactattttggaaagcatacacaatctggtaacaatgtttacttcaggagaaaaaatactgagagtgttgggtgtgaatgtggggtaggtaacagcagaataattttttcattttttttttctgattcaaataagaatctatgcatcattaaaaaataaactagttgatttttaaa

SEQ ID NO: 401040 - DNA, 589 bp, Homo sapiens
cggagctgccttcctgcagttcaagagcactgtctcttttctgggcctcctgcctggtgcaagggccccagctgagcctcctccagctctgacctctggtggttccgggctgccccagagggtcttgcccaggctctgacacttggcatggtctgggagctccagcagccacagcccagccctggggaggctttgtggtctctgagggggcaggtgcactcccccaactccagttcatgtttttccctccaactctaagcctttttcttcctctgctattacccaggcaccctaccctgtcaacaacactggccttcaagaccctttgtagcataactcccacctataactcccacctgaagccagcccttcccacctctgcgcctctgatgcccaggacagctctgaccatgggcagctctgacccaggacagctctgaccttgggcagccctgatctggggcagctctgacctcgagtagctgtgaccctgggcagctctgactctgggtagtcgtgaccctggggaactctcagcacgggggttgcatgctcctgtttagacagctgctgtcccccaagctggctc

SEQ ID NO: 401041 - DNA, 165 bp, Homo sapiens
tcctactagctgtcggcaacaggctcagccctaccctcagaaggcgccctaaaaaacctacagtgtagaagagcacaccagacagtgtgctctgcaagaaggatggctcctaatctgaaaaaaggtacaagttcctgtccagggctcaccaatcaggaaactcat

SEQ ID NO: 401042 - DNA, 291 bp, Homo sapiens
cccaccccaacccacccccagctcctagtaactaccattctactctgtgctttatgaattcaacttttttagattccacatataagtgagagcatgcagtatttgtctttttgtgcctggcttatttcacttaatataacgtcctccaggaaaatgattcctgatgctcttaagaaaagcgtccttttcatgtgtcttttggctgcataaatgtcttcttttgagaagtgtctgctaaaacttaaagtataataataataaaattttaaaaaaaggaaacatacaccttga

SEQ ID NO: 401043 - DNA, 468 bp, Homo sapiens
  misc_feature (7)..(7): n is a, c, g, or t
  misc_feature (95)..(95): n is a, c, g, or t
  misc_feature (109)..(109): n is a, c, g, or t
  misc_feature (120)..(120): n is a, c, g, or t
  misc_feature (147)..(147): n is a, c, g, or t
tttgggnatgtgtcaatgccatggtcagatatgtttatgacgccttctataagggtttcacttttttccccttttctttaatccggtaaatgtanacggttttttgttntgggttttttngggttttttgtctttgttttgtttcgnttttttaaatagggtctcactctgtactccggcctgggtgacagagcgagactccatctcaaaaaaaaaaaaaacagaagacaaccatgtgaaggcagggagacacagagacagcaccatgtgacgacagaaaattggattaatatatctataagccaaagaatgccagatcgccagcaaaccaccagaagtaaggaagaggcaaagaaggattcccctacaggtttcagagagggagcatggccctgctgacaccttgatttggacttcttcccactagaactgtgatacaataaatttctgctgtcttaagccactcag

SEQ ID NO: 401044 - DNA, 718 bp, Homo sapiens
agagccgtcatctctccggtgcccgggagaggggccgggcgggacggtacagcaaccggaggaaccttgattccctgccccgcaagcccagcaccggttttgccgccttgtctcgaagggtcaaccaggccatctcctgcctcgggacggagagcgccctggaaaaggcggaggggccgaccttagtcacacaagagcgatggcaagattttcacccaagccatctgacttggaacccatggattaaccaactgccactggaggcaaatccagagaccaagggagcagtttatacagaaacagaaaaattagccgggcatggtggtgggcgcctgtagtcccagctactcggaaggctgaggcaggagaatggtgtgaacccaggaggcggaggttgcagtcagccgagatcgcgccactgtactccggcctgggtgacagagcgagactccatctcaaaaaaaaaaaaaacagaagacaaccatgtgaaggcagggagacacagagacagcaccatgtgacgacagaaaattggattaatatatctataagccaaagaatgccagatcgccagcaaaccaccagaagtaaggaagaggcaaagaaggattcccctacaggtttcagagagggagcatggccctgctgacaccttgatttggacttcttcccactagaactgtgatacaataaatttctgctgtcttaagccactcag

SEQ ID NO: 401045 - DNA, 235 bp, Homo sapiens
aagaaagatgaaaagcagattccaggaactaaggaaggatgaatcttggggaaagtgtttagttttagtgtgaaactgtcaagccgcttgctccggtggaaactcagggagaaaaacaacagtgagaaagactagcgaaatagcaaggaaccagacggcttgcctgagagagtctgtgcctccgggcaatttattaatagaagactgagatgcacctactcagcaaaaaaaaaaa

SEQ ID NO: 401046 - DNA, 750 bp, Homo sapiens
  misc_feature (235)..(235): n is a, c, g, or t
gtttattaatccttggaaagaattacatagcggttattcacagcttgtaaattacaatagaaaggttcctttcaaatggtagagttgcactaaagaggaaattgggtttataagaaaatggaggcaaagaacttaagttttaagaaaaagcacttcaaaacagaagggcaaatggaaaagggggatataaaacaaaccaataaaaataccatctgagggtgttactgtccaaaantaaagaataagatgcatcactaagccctttgcactcgtgttgacctcgtaagtaaaaattattacttagaataataataagtggtgcacactacattccctgtccctcttctagactttttttttgtagaagaatcagaaaacaatttactaacctccctgtttgatattaaaaactcaataggaaggtttttaatattttctgtcagtacaagttgaacttgattgtgtcaactgaaaccctagaggtttgtgtatcagtagaatgcaagaacattgttaaagttgcttacaatcttttttgttttcctttccattccattgtatcaattttttgagtaactttcaaatggctagaaaatggtctttttgctttgcccttttatagctgaaataaccagctccattcttttcatgagtagtaagttgatatatttatttatcaggtatctttcagttgtcactaaatactgtagttttcttgtgttgtatggaaattatagttcaattattcta

SEQ ID NO: 401047 - DNA, 433 bp, Homo sapiens
caccatgaagtactttgaacttcactaaatggggaaaatacaagacactacatttagaaattgtttaggagcagcaaatggagagaagcaacatttttgctttaaaaaaaaacaacatcacaaccccttgattatgtgcagcacacaatttaacaggtgtgtgatttattcatttattcacagactcatggaccaaccattccatcacagcactattgtctgtgaagcaaaacacatttacagcaaactgtatcagctcctcagagagactgaattaacccatctaaaaatcctttgcttccgattgaaaaagagggttaatatcatccaaatgatgaacataaataaactttacctcagtaaagttctttccatctttggatttctgggtcatctctaaccagtgcttgatatgaaagggggaaaaataaaa

SEQ ID NO: 401048 - DNA, 394 bp, Homo sapiens
aactatgcttctcatccctgtctgtgtactgcttagggaactttctgaaaacctagattttttaaatatatagattcttgggcccatcccagatctcttggattacagtctcttatggtagatctcaaatatctggctcctcaagtgattctgatgcacagccaaggtttgaaaacagctgctttggacgggtgcagtggctcacgcctgtaatcccagcactttgggaggccaaggagggcagatcacctgaggtcagcagttcgagaccagcctgaccaacatggtgaaacactttctctactaaaagtacaaaaattagacgggtatggtggctcatgcctgtaatcccagctacgtgggaggctgaggcagaagaatcacttgaactcag

SEQ ID NO: 401049 - DNA, 769 bp, Homo sapiens
gcttgtctagactgtagaatgttattttttgggggagaactaatggcagatgaacttagtggtcattatggttggatggaaaaaaaatagagtgaacagatacagctttctcacagaactttcatagaccagataactgcttcaagagctgacctgaagtaaggaggagtattatttcctatcttgagggatggcagagattttcaatttgacctttgaatatattttctgtttggtcatagtcttgtgttttagagtaagactcattagatttctgtgattttgaccacctcaggcacatagaagaaagaaaaaatagagggagattttttataataaagtgaatgagttaaatgatattttgaaggtgtacaagaaaaggaatggatcaaaatggctttcattagttacattttcttcttgacttttgtcacaagagaaaaggtcttatgaagaatggttctgcctctgttgtctgtcaggtagcttaggatcttttatgtaagaatctctgttcctagcactttgggaggctgaggcgggcggatcacgaggtcaggagatcgagaccatcctggctaacacagtgaaaccccgtctctactaaaaatacaaaaaattagctgggagtggtggtgggcacctgtagtcccagctaacttgggaggctgaggcaagagaatggcgtgaacctgggaggtggagcttgcagtgagccaagatcacgccactgcactccagcttgggtgacacagcgagactccatctc

SEQ ID NO: 401050 - DNA, 329 bp, Homo sapiens
gagaaaatattttcaaattatgtatcttagaagggacttaatttccagctgggcatggtggctcacgtctgtaatcccagcactctgggaagccaggtgggcggatcacctgaggtcaggagttcaagaccagcctggccaacatggtgaaaccctgtttctactaaaaatacaaaaattagatgggcgtggtggcacatgcctgtaatcccagctactggggaggctgaggctggagaatcacttgaacttgggaggtgggggttgcattaagccgagactgtgccaccgcactccagcccaggcgacagagtgagactccatctcaa

SEQ ID NO: 401051 - DNA, 319 bp, Homo sapiens
ctcatcagaactagatcttgtgagaactgcctgagcagaccaagcagcacagaggccacagtgagacacatgagggagaaggtgaacccagatgaggctcatcaggaacagatcttgtgggaaccagagaggacaaccccggatgaggtccatcagaaccagatcttgtgggaactgcacttcaaagtgctacagacccacaaacactacatgcagcatcacatgaatgccctctgcaagggtgaggggcctggcaggatggaggaaataccagagaggggggatgcgccctgaaaaaaaggagagccctggggactgc

SEQ ID NO: 401052 - DNA, 1082 bp, Homo sapiens
gggtatttatccgtccccaatttccgtgtcgagggtgtccccccaacccccgtgtaggatgccgaatggttataccacccgggaattttttccccctagaggatccctttactatgtgcatctctggggaaccttcagaccctatggtattccccaagggcctcttataatggacccgctgatattggggtcacctagactgggtgagactttcctcaggccctactctgcagcccaggaattacagtgttgtccccagggcgacacaaaagggaatgcgaaactaaatgtcacaagggcaccaaagaataattggtgggatccatgaagaacatttcccagcaggagccataatgcgggcctcgggactacacctaccgaatgtgatttagaccccgctagacactggtacatgccgaaagggggtaacaaagggcaaacttaaacgagacaccacgtcttgcccccgacgtggaagatttctagacacccccccgaatagaagaaatagacatagataaacaaccatagtgcccatagcttttttttttttttttaaaaagggcagggggtggggtatttagtcacaagacatagaggaactttaagtgtatattgctaagtgaaagaagttagtctgaaaggctacatactacatgatttcaaatatatgacattctggagaaagcaaagttagtaaagactggttgccagaggttcagtgggagagagggaggggtaaatacatggagtagagatttttagggtggtgaaactactgtatacaatactataatagtggatacatgacattatatattggtcaaaatccataaagacatacaacaaaaagaggacccttcatgtaaattacaggcttcagctagcctggatgacagagtgagactttgtctcaaaaagtaaagtaaaaatgtgtcaatattggttaaacaaatataccacactagtgcaagatgttaataataaaggcctggggtggggggaagcataggggaactctatactatctgctcagtttttctgaaaatctaaaacttctaataaagtctattaaaattatg

SEQ ID NO: 401053 - DNA, 730 bp, Homo sapiens
aagagcatgcaaattaaatgactccacatcagtcagtacagccacagccttcacttcggggcttgttgactgttgtctgttcttcagactcggatgctgcgtggggtagctctttctgagtccccgcttaggaggactggtcctggtagaacagcgagaggggaagtcgtccttctcaggcagtggctgggattgccatttgcactgcttgagggttttatattaccatcgtgtgggtttgcttttcttcagtcctagtctcagaatctaccttctacttcacacttaaaattctgagagcagttggcaaagctttgccttctctgtctttgtcggggcaccaataacagtcatgtttgattttctggaggaattgatagaaagattgggcgtcagctaaagccaaataaaacattatagcagtatctgtggttattagaatatctgaaatctcatctgatgcccttacctataaacagtttcacaaatcccacacatggcctagcccacctcttcatgtcgcccatgaagtagctccatccacagggcccagatccctcccacacatggcctagccctcctctccatgtcacccatgaagtagctccatccacagggcccagatccctcccacacatggcctagccctcctctccatgtcacccatgaagtagctccatccacagggcccagatccctcccacacatggcctagcccacctctccatgt

SEQ ID NO: 401054 - DNA, 573 bp, Homo sapiens
agagttagccattcccccaggtatgctggaaagagaccttatatgcacttctgtctagtgaatcgcttacttatcaggtttttcgcaaaagtaaaagttgtgaacagttagccatgtaacatgttcttgagactactggaaaagcagtcttacatgtaaggtacgcaaggaaagtagaatgtgcttttgttaaaagattgtaagaaggtatgggaatgtaagttttgcctagtttggagggttaaaggattgttttatgttagataggataaagctgaaggtttgagcaagttgtggaaggtttgtgaaaaattaatcctataaaagaaattctatgtgtgaaaattacccaaaattaaaggacttttattcagtttattcataaacactggaattaaagcacaacatagttttattaaagtattaatctgcttttgattaaagtgttatcagtacatgttccaaaattatgtgaaactcctataattctaatgtaacatagtatacattattaggaataattataattatgtttaattgttttgtgcctcaggggtaataaatttctttgtc

SEQ ID NO: 401055 - DNA, 380 bp, Homo sapiens
ggagccaacctgaagatctaataaagacctaataaagctggaacaatttgactaacaaaataatgatagtattggattttaattcatgtactaaaatactcatgagtccatgctgatgtaagtattttaataaataaatggtggagaaggcactggttttggttttgtattttttttacaggagcatcccaattaatgtagaaagaaagacgggaaaagaaatttttcattaggcaaataccacggtaataaatgtggcagacaggacctgctgatggatgccaaaattaggtcagagtttgaggagaaaagagtatttgcacagtctcaaagtattccctaccccctctcctcccaggatatttttttaactgcaaagg

SEQ ID NO: 401056 - DNA, 318 bp, Homo sapiens
tcaacagccacagcattttgcaagtgtttctttgaaaacttgcttcactgtgtttttcaattttttttttaaacaacacttaatactgccagacaacaattcagacagtgtgctttttgtttataaagaacaaggaagggctactggaatctcacttgtcctttgaaacttttgctgaccaagtgtagaagtgagggcatgccttctgctcacccacaaaacacaccctgtgctccactggaccttcaaaccagtggaaagacccaacgctttttgttttatctagccaaaatttgcttatgcttacccaaaacctga

SEQ ID NO: 401057 - DNA, 459 bp, Homo sapiens
gggtaggcaactaatcacctccagggtccggagaaggcctggggcatagacgggaagggctttagatccccaacagaccccacacagacgcaagggtcctgcacgtagggccatggccttgacgatagagtcagtgttagctgtgtaagcctcaggctggaccactggggaatgagtccccgctccactgcacaccagcgaggggacatgtgacttgttctctgcacctcatgttttttctgtaaagtagaaatgataatattgggtcgggtgtggtggctcacacctgtaatcccagcactttgggaggccaaggtgggtggatcatgaggtcaggagttcgagaccagcctgcccaacatggtgaaactccgtctctactaaaaacacaaaaattagctgagtgtggtggtgggtgcttgtaatctcagctgctcaagagattgaggcaggagaatt

SEQ ID NO: 401058 - DNA, 383 bp, Homo sapiens
ggcatcacttttcttttcccactcactgggattcagcactcacccagagccatttcctgtgaattcttgtgggaccggatctttttccttcctcttgtaaaaaaaattctgaccctacgccatggcttaactttgatttccaaatttaaatgtataaaaccaatgttatttgggatgagtgaataccaggatggttgaagaggtggaagcaagatgaaggcagccgagcaacccctggaagctgagaaatcccggagtgaatcctccttgggtctgtgccccaccttgggaacaaatcaaccgcactgaactctttcgggccataagggggccattcactccatgatttctgcaggatgtatttatacccttgaagaagctta

SEQ ID NO: 401059 - DNA, 347 bp, Homo sapiens
agaggttgtactgggttgagagagaggcctcagaatcaagaccttgtctcctgccacagtttccctggtgaagctcccaggctgagcacaaacttccaggtcgagcacagaagtttcgacctggaaacttcagccctcagagaggaggtggcactaacgctctaggtgggcggctgctctatggtcttctgctgcctggagagctttgcctccatcactggtgcccacctggggaatgctcaggaactactcttcaaaagtacactcggatgcccactctgcaaagccattttgtttccttattgtacctctgaaatcatttgttaaccaagcatttgcaaatccgt

SEQ ID NO: 401060 - DNA, 515 bp, Homo sapiens
aaattcctagacacatacaaattaacccaggaagaaatacaaaacctgaacagaccaacaacaagaaatgagatagaagccataataaaaattctcccagtaaagaaaagcctgggaccccgtggcttcactgatgaattttaccaaacatttaagaagtaacaccagtcctactcaaactattctgaaaactaaaggaggagggaatacttctaatctaattctacaaggccagttactctgatatgaaacccagcataagacacatccaaaaaagaaaactacaggtcaatatctctgataaatattgatataaaaatcctcaacaaaatgctagcaaaccgagttgaacaatgcattggaaagatcattcataatgaccaattggggtttatcctcaggatgcaaggatggctcaatatatgtaagatattgatggttcaataatcaatcaatgtgatacttcatatgaacagaatgaaggatgaaaaacatatgatcatttcaactgatgt

SEQ ID NO: 401061 - DNA, 706 bp, Homo sapiens
ctggatcatagggtagattctatttttaggtttttgaggaaactccatactgttttccacaccagctgtactaatttacatacctattcacaatgtctgtgttccgtttcctctgcattatctctaacatatcattcacctttttgataaatgccactccaacaggtgtgagatgatattcattatggttgtaatttgcatttccctaatgattagtgatgctgagcatttgagaaaagctaatttttaatgccttaatgttgagaactgacttaacattgggacagatacgaagcaatagggtaaaagcaaaacaatgtcattcaaacaagatatcagatttgcacagaggcctttgtggggcagatgggaacccagcacacaaaaagttgaattatatgaagcaatatcacaagtgagttaggaaatgtggaaaaaaaaaccaataagacagatataattaaaaatagacctaatggattcacactatcactacaaatactggaagccctggggtttcatttgggggaaataaatacttgctttcatacatgatcaaaactaatgaaaaggctagatcctgagttacttttcaggcatttacatttaaaacttaaagttacatatgtatacatgtgccatgctgtgctgcacattatgcacatgtaccctaaaacttaaagtataataataataaaataaaaaa

SEQ ID NO: 401062 - DNA, 328 bp, Homo sapiens
caattaggtcctgattacaacactttgagccccatgagcttccttaaatcaaaagacttgctctggacactcatcacctcactgctggcttattctgcttcttctgtagactccctgctaccctgtccatctggcagaacactgggcaaaagaggttctgattctggcctgttacttgctgtacaaacttgcacaaggccagagaggactctcttttcccatctgcaaagtgggaggttgaactagagtgaactcttgatattctctgatactccaccgctagattaattttttcctaaaatgccccaatgattataccactccctta

SEQ ID NO: 401063 - DNA, 741 bp, Homo sapiens
taaaaataatcaaatatctgcacatttctcataattttttaaacagttgaattgttaaaatcaatatccatatatagtctacatagtgcctttgtttgctaaatctccgaatcttctttcaatctataggctcctctctttgcattttatttgttgaataaactggattgtttgtactgtagattttccacaatctggattttgctgattgcgttcccacacagttgtctaacatgttcctctgttgcttgtatttcctataaatgagtagtaagatctggaggcttgattcaattctggttagatttttttttttttttggaggtgggaagaatactttataggtgatactgtatagttcctaatgaatcatgtgtgaaggcagaaaatgtctagttgtttatttttatgatataaagataggtcttaaaagtacctttaaaattttttgttttttttaattgacaaataatagttgtacatattcttggggtacatagtgatgtttcaatatgtataatgtgtaatgatctgatcagggtaattagcatatccataatctcaaacatttatcatttctttgtgtttggaatcttttttttttaatttaaaagtaaactttagcacaccaacatggcacatgtatacatatgtaacaaacctgcacattgtgcacatgtaccctaaaacttaaagtataataataagaaaaataaatgtgaacataaactaaaaagaaaa

SEQ ID NO: 401064 - DNA, 332 bp, Homo sapiens
tggggaagctgaaggaagaacagagaggttgcttgccttgtgtttaggggttcctggacacatgtctgggcaaaagcaaatgaggctggtacagttcccagccaacactgagcccaggcccacatcagtttccgcattccctgacctctcgtcttccacaattttagtagccaagtgtcctttccctaaaaccaaggatgtctgccctgcttggacacaaggcctctctccaggcctggcaggccactagacagcttgtggtgggccagtgtggctcttagcactgggttgctggggttggtgcaagaatgtcagagatacgctgcagaggc

SEQ ID NO: 401065 - DNA, 235 bp, Homo sapiens
cccacactcaggctggagcagcattctggctttgtttttgttttgctttattgctctgtgtctaccagacacacagctcctcagaaactggacagaaagcctcctgacatcaccacaacaaaatcacagccattaagtccaacgggattgctttatggtggctcaagcccatttctctgagctccaaagccatcctgacatcattatgctgcatcattatgaagccaacacacat

SEQ ID NO: 401066 - DNA, 767 bp, Homo sapiens
ttccagttccgcgactcgcgggcccctcctaatgtcagggacttaagattggggctcgctgggacctggtggtccggttatgggaaaagaagcctcgtgggagagcagagcctgaaaaaggactgcgcggactgacttcttggctactgaaagcaaagctccactgttccaggcacgattctgccttctctcaaatggcataactcaggactctgcaaattcccagaaacaggaggaaaaatgaccacattcaaggagggactgaccttcaaggatgtggctgtggtcttcactgaggaggagctggggctgctggaccctgtccagaggaatctgtaccaagatgtgatgctggagaacttcaggaacctgctgtcagtgggaccaatcaggttgaagtaaagatatatagagaccggacttacagtttgaaaaaaagaaagtagagtgcccactggaacccactggagcccactgtacctatgcccacaaaaggagaagaaaccttttcctgggagcccgctgactatacagaggacaaaggcattcttatgccaggccttgctcctttatctgagcgagctggagggcatcaccccttcaaacatgatgtattccttttagaaaaggaaaaaaagcttgatataatgaagacagcaactcaaagaaaagggaaatcaggagacttggtatggtctaatgcctggtagatagcagccaattggaccacctcttgatttatctaggcatggaaatcagagatcatg

SEQ ID NO: 401067 - DNA, 2897 bp, Homo sapiens
ttccagttccgcgactcgcgggcccctcctaatgtcagggacttaagattggggctcgctgggacctggtggtccggttatgggaaaagaagcctcgtgggagagcagagcctgaaaaaggactgcgcggactgacttcttggctactgaaagcaaagctccactgttccaggcacgattctgccttctctcaaatggcataactcaggactctgcaaattcccagaaacaggaggaaaaatgaccacattcaaggagggactgaccttcaaggatgtggctgtggtcttcactgaggaggagctggggctgctggaccctgtccagaggaatctgtaccaagatgtgatgctggagaacttcaggaacctgctgtcagtggggcatcaccccttcaaacatgatgtattccttttagaaaaggaaaaaaagcttgatataatgaagacagcaactcaaagaaaagggaaatcagcagacaagatccaaagtgaggtggagactgttccagaagcaggacgacatgaagagctttactgggggcaaatctggaaacagattgcaagtgatttaatcaagtatgaagactctatgataagtatttctcggttccccagacaaggtgatttgtcctgccaggttagggcaggactatatacaactcacacaggacagaaattttaccaatgtgatgagtacaaaaaatccttcactgatgtcttcaactttgatcttcatcaacagttacactcaggagagaagtctcatacatgtgatgagtgtggaaaaagcttctgttacatctcagcccttcatattcatcaaagagtccacatgggagagaaatgctataagtgtgacgtgtgtggtaaggaatttagtcagagctcacatcttcaaactcatcagagagtccacactgtagagaaaccattcaaatgtgtggaatgtgggaaaggcttcagtcgtagatcaacacttactgtacattgcaaattacactcaggagagaaaccttacaattgtgaggaatgtggaagggccttcatacatgcttcccatcttcaggaacatcagagaattcatactggggagaaaccattcaaatgtgatacatgtggtaagaacttccgtcgtagatcagcacttaataatcattgcatggtccacacaggagagaaaccatacaaatgtgaggactgtggtaagtgtttcacttgtagctcaaaccttcgtatccatcaaagggtccacacaggagagaaaccttacaagtgtgaagaatgtggtaagtgctttattcagccttcacaatttcaggcccatcggagaatccacactggagagaaaccatacgtatgtaaagtgtgtggtaagggtttcatttacagttcaagttttcaggcccatcagggagtccacactggagagaagccatacaaatgcaatgagtgtgggaagagcttcagaatgaaaattcattatcaagtgcatctggtagtccacacaggggaaaaaccctataaatgtgaagtatgtggtaaagccttccgtcagagttcatatcttaaaatccatctgaaagcacatagtgtacagaaaccttttaagtgtgaagagtgtgggcagggcttcaatcagagctcacgacttcagattcaccagctgatccataccggtgagaaaccatacaaatgtgaagagtgcggaaagggatttagtcgtagagcagatcttaaaattcattgtaggatccacacaggggagaaaccatataattgtgaggagtgtgggaaggtcttcagtcaggcctcgcatcttctaacccatcagagagttcacagtggggaaaaaccatttaaatgtgaagagtgtgggaagagcttcagtcggagtgcacaccttcaagcccatcaaaaagtccacactggagaaaagccatacaaatgtggggagtgtggaaagggcttcaagtggagcttgaaccttgacatgcatcagagggtgcacacaggagaaaaaccctatacatgtggggagtgtgggaagcacttcagtcaggcctcaagtctccaacttcatcagagtgtccacacaggagagaaaccatacaaatgtgatgtatgtggtaaagtcttcagtcggtcttcacaattacagtatcataggcgagttcacactggggaaaaaccttacaaatgtgagatatgtggtaagaggttcagctggcgatcaaatcttgtaagtcatcacaaaattcatgctgctggtacattttatgaaaatgatgagaatagtaagaacatcagagagttgtcagagggaggaagttctacaaggtgattaaaaaaaaaaaaacagaactcatgtacaacctgaatgcttgtaattagatttcataggagggaaaaattttctttatcaacctctttgaatttatttgatttgtaacgctccacatttccacctagacttttttttgttttttattttttgttttgaaaccccatctctactaaatacaaaaattagctgggcatggtggcaggcgcctgtaatcccagctactcaggaggctgaggcaggaggattgcttgaacccgggaggcggaggttgcagtgagccgagactgcgccattgcactccagcttgggtgacagagcgagactccgtctcaaaaaaaaaaagacattggttagaaatgtaattttagtaatgcaccaagatgtaacagtttttctgttgtttgagttaacacctggagtttttttgttttatttttaagaagattaatgagtgcagacagaaatgtgaggttagagtgaaggtttaataagcaaaagaagaaagctttttgccagcagagagggggacccaaatggaattccccctatga

SEQ ID NO: 401068 - DNA, 2827 bp, Homo sapiens
  misc_feature (28)..(28): n is a, c, g, or t
ctccagggaagagggggcgattgtcacngcacattccacgcctgaaaaaggactgcgcggactgacttcttggctactgaaagcaaagctccactgttccaggcacgattctgccttctctcaaatggcataactcaggactctgcaaattcccagaaacaggaggaaaaatgaccacattcaaggagggactgaccttcaaggatgtggctgtggtcttcactgaggaggagctggggctgctggaccctgtccagaggaatctgtaccaagatgtgatgctggagaacttcaggaacctgctgtcagtggggcatcaccccttcaaacatgatgtattccttttagaaaaggaaaaaaagcttgatataatgaagacagcaactcaaagaaaagggaaatcagcagacaagatccaaagtgaggtggagactgttccagaagcaggacgacatgaagagctttactgggggcaaatctggaaacagattgcaagtgatttaatcaagtatgaagactctatgataagtatttctcggttccccagacaaggtgatttgtcctgccaggttagggcaggactatatacaactcacacaggacagaaattttaccaatgtgatgagtacaaaaaatccttcactgatgtcttcaactttgatcttcatcaacagttacactcaggagagaagtctcatacatgtgatgagtgtggaaaaagcttctgttacatctcagcccttcatattcatcaaagagtccacatgggagagaaatgctataagtgtgacgtgtgtggtaaggaatttagtcagagctcacatcttcaaactcatcagagagtccacactgtagagaaaccattcaaatgtgtggaatgtgggaaaggcttcagtcgtagatcaacacttactgtacattgcaaattacactcaggagagaaaccttacaattgtgaggaatgtggaagggccttcatacatgcttcccatcttcaggaacatcagagaattcatactggggagaaaccattcaaatgtgatacatgtggtaagaacttccgtcgtagatcagcacttaataatcattgcatggtccacacaggagagaaaccatacaaatgtgaggactgtggtaagtgtttcacttgtagctcaaaccttcgtatccatcaaagggtccacacaggagagaaaccttacaagtgtgaagaatgtggtaagtgctttattcagccttcacaatttcaggcccatcggagaatccacactggagagaaaccatacgtatgtaaagtgtgtggtaagggtttcatttacagttcaagttttcaggcccatcagggagtccacactggagagaagccatacaaatgcaatgagtgtgggaagagcttcagaatgaaaattcattatcaagtgcatctggtagtccacacaggggaaaaaccctataaatgtgaagtatgtggtaaagccttccgtcagagttcatatcttaaaatccatctgaaagcacatagtgtacagaaaccttttaagtgtgaagagtgtgggcagggcttcaatcagagctcacgacttcagattcaccagctgatccataccggtgagaaaccatacaaatgtgaagagtgcggaaagggatttagtcgtagagcagatcttaaaattcattgtaggatccacacaggggagaaaccatataattgtgaggagtgtgggaaggtcttcagtcaggcctcgcatcttctaacccatcagagagttcacagtggggaaaaaccatttaaatgtgaagagtgtgggaagagcttcagtcggagtgcacaccttcaagcccatcaaaaagtccacactggagaaaagccatacaaatgtggggagtgtggaaagggcttcaagtggagcttgaaccttgacatgcatcagagggtgcacacaggagaaaaaccctatacatgtggggagtgtgggaagcacttcagtcaggcctcaagtctccaacttcatcagagtgtccacacaggagagaaaccatacaaatgtgatgtatgtggtaaagtcttcagtcggtcttcacaattacagtatcataggcgagttcacactggggaaaaaccttacaaatgtgagatatgtggtaagaggttcagctggcgatcaaatcttgtaagtcatcacaaaattcatgctgctggtacattttatgaaaatgatgagaatagtaagaacatcagagagttgtcagagggaggaagttctacaaggtgattaaaaaaaaaaaaacagaactcatgtacaacctgaatgcttgtaattagatttcataggagggaaaaattttctttatcaacctctttgaatttatttgatttgtaacgctccacatttccacctagacttttttttgttttttattttttgttttgaaaccccatctctactaaatacaaaaattagctgggcatggtggcaggcgcctgtaatcccagctactcaggaggctgaggcaggaggattgcttgaacccgggaggcggaggttgcagtgagccgagactgcgccattgcactccagcttgggtgacagagcgagactccgtctcaaaaaaaaaaagacattggttagaaatgtaattttagtaatgcaccaagatgtaacagtttttctgttgtttgagttaacacctggagtttttttgttttatttttaagaagattaatgagtgcagacagaaatgtgaggttagagtgaaggtttaataagcaaaagaagaaagctttttgccagcagagagggggacccaaatggaattccccctatga

SEQ ID NO: 401069 - DNA, 1014 bp, Homo sapiens
  misc_feature (28)..(28): n is a, c, g, or t
  misc_feature (987)..(987): n is a, c, g, or t
ctccagggaagagggggcgattgtcacngcacattccacgcctgaaaaaggactgcgcggactgacttcttggctactgaaagcaaagctccactgttccaggcacgattctgccttctctcaaatggcataactcaggactctgcaaattcccagaaacaggaggaaaaatgaccacattcaaggagggactgaccttcaaggatgtggctgtggtcttcactgaggaggagctggggctgctggaccctgtccagaggaatctgtaccaagatgtgatgctggagaacttcaggaacctgctgtcagtggggcatcaccccttcaaacatgatgtattccttttagaaaaggaaaaaaagcttgatataatgaagacagcaactcaaagaaaagggaaatcagcagacaagatccaaagtgaggtggagactgttccagaagcaggacgacatgaagagctttactgggggcaaatctggaaacagattgcaagtgatttaatcaagtatgaagactctatgataagtatttctcggttccccagacaaggtgatttgtcctgccaggttagggcaggactatatacaactcacacaggacagaaattttaccaatgtgatgagtacaaaaaatccttcactgatgtcttcaactttgatcttcatcaacagttacactcaggagagaagtctcatacatgtgatgagtgtggaaaaagcttctgttacatctcagcccttcatattcatcaaagagtccacatgggagagaaatgctataagtgtgacgtgtgtggtaaggaatttagtcagagctcacatcttcaaactcatcagagagtccacactgtagagaaaccattcaaatgtgtggaatgtgggaaaggcttcagtcgtagatcaacacttactgtacattgcaaattacactcaggagagaaaccttacagaacactacagggagccccctgaaacactgcaaatntttgaaagctgagtgtacaaaagtcaa

SEQ ID NO: 401070 - DNA, 385 bp, Homo sapiens
gagactgtctcaaaaaaaaaagacattggttagaaatgtaattttagtaatgcaccaagatgtaacagtttttctgttgtttgagataacacctggagttttttgttttatttttaagaagattaatgagtgcagacagaaatgtgaggttagagtgaaggtttaataagcaaaagaagaaagctttttgccagcagagagggggacccaaatggaattccccctatgaggcaggggtttggggtttttatggactgggaaggggaaggaatgtgcttagtttgtgggctattttggagaaagtgtgacttagcttggcccggaaccttggcccaggaccaatcaggttgaagtaaagatatatagagaccggacttacagtttg

SEQ ID NO: 401071 - DNA, 401 bp, Homo sapiens
tgccctgaatgtgggaaaggctttatttgtaggcgagatctttatacgcatcatatggtccacactggagaaaagccatacaaatgtggggagtgtggaaagggcttcaagtggagcttgaaccttgacatgcatcagagggtgcacacaggagaaaaaccctatacatgtggggagtgtgggaagcacttcaaacacaggtcatatctcatgtggcaccagcagactcataccggagagaagccctatgagtgcagtgaatgtgggaaggtcttcttggagagtgcagccctgattcaccactatgtcattcacacgggagagaaaccctataaatgtaaggagtgtggtaagggcttcagtcaggcttcaaatcttcaagtccatcagaatgtccacac

SEQ ID NO: 401072 - DNA, 2405 bp, Homo sapiens
  misc_feature (28)..(28): n is a, c, g, or t
ctccagggaagagggggcgattgtcacngcacattccacgcctgaaaaaggactgcgcggactgacttcttggctactgaaagcaaagctccactgttccaggcacgattctgccttctctcaaatggcataactcaggactctgcaaattcccagaaacaggaggaaaaatgaccacattcaaggagggactgaccttcaaggatgtggctgtggtcttcactgaggaggagctggggctgctggaccctgtccagaggaatctgtaccaagatgtgatgctggagaacttcaggaacctgctgtcagtggggcatcaccccttcaaacatgatgtattccttttagaaaaggaaaaaaagcttgatataatgaagacagcaactcaaagaaaagggaaatcagcagacaagatccaaagtgaggtggagactgttccagaagcaggacgacatgaagagctttactgggggcaaatctggaaacagattgcaagtgatttaatcaagtatgaagactctatgataagtatttctcggttccccagacaaggtgatttgtcctgccaggttagggcaggactatatacaactcacacaggacagaaattttaccaatgtgatgagtacaaaaaatccttcactgatgtcttcaactttgatcttcatcaacagttacactcaggagagaagtctcatacatgtgatgagtgtggaaaaagcttctgttacatctcagcccttcatattcatcaaagagtccacatgggagagaaatgctataagtgtgacgtgtgtggtaaggaatttagtcagagctcacatcttcaaactcatcagagagtccacactgtagagaaaccattcaaatgtgtggaatgtgggaaaggcttcagtcgtagatcaacacttactgtacattgcaaattacactcaggagagaaaccttacaattgtgaggaatgtggaagggccttcatacatgcttcccatcttcaggaacatcagagaattcatactggggagaaaccattcaaatgtgatacatgtggtaagaacttccgtcgtagatcagcacttaataatcattgcatggtccacacaggagagaaaccatacaaatgtgaggactgtggtaagtgtttcacttgtagctcaaaccttcgtatccatcaaagggtccacacaggagagaaaccttacaagtgtgaagaatgtggtaagtgctttattcagccttcacaatttcaggcccatcggagaatccacactggagagaaaccatacgtatgtaaagtgtgtggtaagggtttcatttacagttcaagttttcaggcccatcagggagtccacactggagagaagccatacaaatgcaatgagtgtgggaagagcttcagaatgaaaattcattatcaagtgcatctggtagtccacacaggggaaaaaccctataaatgtgaagtatgtggtaaagccttccgtcagagttcatatcttaaaatccatctgaaagcacatagtgtacagaaaccttttaagtgtgaagagtgtgggcagggcttcaatcagagctcacgacttcagattcaccagctgatccataccggtgagaaaccatacaaatgtgaagagtgcggaaagggatttagtcgtagagcagatcttaaaattcattgtaggatccacacaggggagaaaccatataattgtgaggagtgtgggaaggtcttcagtcaggcctcgcatcttctaacccatcagagagttcacagtggggaaaaaccatttaaatgtgaagagtgtgggaagagcttcagtcggagtgcacaccttcaagcccatcaaaaagtccacactggagaaaagccatacaaatgtggggagtgtggaaagggcttcaagtggagcttgaaccttgacatgcatcagagggtgcacacaggagaaaaaccctatacatgtggggagtgtgggaagcacttcagtcaggcctcaagtctccaacttcatcagagtgtccacacaggagagaaaccatacaaatgtgatgtatgtggtaaagtcttcagtcggtcttcacaattacagtatcataggcgagttcacactggggaaaaaccttacaaatgtgagatatgtggtaagaggttcagctggcgatcaaatcaggtaaccatccttctactatctccatgagttcaattgctttaatttttagctcccacaagtaggtaagaacatgaaaagtttgtccttctgtgcctgattttgcttaacataatgacctccagttccatccatcttgttgcaaatgaaaggatctcattcttttttatggctgaatagcactccattgtgtatgtgtaccacatttacttttatccatttgtctgctgatgggag

SEQ ID NO: 401073 - DNA, 914 bp, Homo sapiens
gcatcttctaacccatcagagagttcacagtggggaaaaaccatttaaatgtgaagagtgtgggaagagcttcagtcggagtgcacaccttcaagcccatcaaaaagtccacactggagaaaagccatacaaatgtggggagtgtggaaagggcttcaagtggagcttgaaccttgacatgcatcagagggtgcacacaggagaaaaaccctatacatgtggggagtgtgggaagcacttcagtcaggcctcaagtctccaacttcatcagagtgtccacacaggagagaaaccatacaaatgtgatgtatgtggtaaagtcttcagtcggtcttcacaattacagtatcataggcgagttcacactggggaaaaaccttacaaatgtgagatatgtggtaagaggttcagctggcgatcaaatcttgtaagtcatcacaaaattcatgctgctggtacattttatgaaaatgatgagaatagtaagaacatcagagagttgtcagagggaggaagttctacaaggtgattaaaaaaaaaaaaacagaactcatgtacaacctgaatgcttgtaattagatttcataggagggaaaaattttctttatcaacctctttgaatttatttgatttgtaacgctccacatttccacctagacttttttttgttttttattttttgttttgaaacagaatctcgctctgttgcccatgctggatgcagtggtgctatctcagctcactgtaacctccacttcccgggttcaagtgattctcctgcctcagtggattacaggtgcacaccaccacgcctggctaatttttgtatttttagtagagatggagtttcaccatactggccaggctggtctcaaactcctgacctcatgtgatccacccacctcggcctccca

SEQ ID NO: 401074 - DNA, 386 bp, Homo sapiens
aagtaaatttttcataaataataaaatgataatgactcaggcagttttctggcaagaaaggctactatgatccactccactggatatctgtatattgagcaggttaaaataggcaagaggagtctttgtgattctatttcttggaagtccaagatttagacagaaaaaaatatgagatcattatgtgtaaagaatcttcatttaggaaaggttatatgttggataaaataaaaagaaatatgtttacccaattaaaactggtcttggtttagaaaggctgagatttgaatgcaatgtgttggaatatattaggggtttgggtgtggtgagatggtgatggtggggagatatatttacaaaataaacttcttaagttaatatggatt

SEQ ID NO: 401075 - DNA, 444 bp, Homo sapiens
aaagtcagggtcaggaggcagattagggctacagtgtcatgacaaccaatcaagttgtttgtttcagtccaaaaagtagtcaattcactggaaaatgctcaatcaactaagtgtaaattaaaatagttatgaattgtttgtaaaaagcaaccacagtttgttttaaaaaggtatgaataattttgcatatgcataattttccctaaagatattattctttaaatatgaagcaaaggtcagaatttgagtgtttatatgcaggtgtatttgtgttttaatttcctaagtgggggttaggaggcagattaggactgcaaggggccaaggcaaccaatcaagttgtcattttggtctttgtccttgtctacaaagtagacagttcactggaaaaagttcaagcaattaagtttaaaataaaatatttaccaattcattatgaaaagt

SEQ ID NO: 401076 - DNA, 439 bp, Homo sapiens
agcccagatgattgttagcattttttagcaataaagtatttttaatgaaggtacataccctttttttatacataatgctattatacacttagtagactacaatatagtgtaaacataacttttaaatgcactgggaaatgaaaagattcatgtgatttgctttattgcgataacttgctttactgtggtagtccggaaccaaacccacgatatcttgaagatgtctgtaaatactgtgttctatatcattattattcctttaaacttccacctgcttttatcaccatcttttcatgtgctcttccttagatgacaatggaatttaaattctttgtactttaacctggaaaattttagtagtgtattcatattgtggtcttcgcaccatgtaaaactgactccatattctttttttgtttgtttgtctcattctgtcgcc

SEQ ID NO: 401077 - DNA, 471 bp, Homo sapiens
ccgcccagcctcggtgcgtcgggtaacagccaatggcggcggcctgccagcctcgccccgcccacctcccgccggccccgcccctccacctcgcccccttccgcggccccgccccgcctccccgccctgttcttggcggcctgggctccgcggccctgctggcgtccttcgtctgtagttcctggcttttccaccgtcagccactcgttttaattacgcgaacgggttccaactcatccagcctttaagtttgggtggtggttttgagagggggaaagagatgcaccaaaggaagtaggggaaaaataaaaccttaagcgctgggcgcgccacgcgggacgcagaggttaggggcgcgcggcgaggtagcggggcggcggcgcgagacggcgcaggggaaacactcggtgcctgcgtgagtctggccgcgccggctcatgtgtacgcgaagctgtgtcagcagaaacttta

SEQ ID NO: 401078 - DNA, 415 bp, Homo sapiens
cctgaacgatgagatctgacaccttttgatggcccttgcttgcagtgaatgactccagcttcctttggaagtaaagcggccttgagaagagtttttattaaagaggaattaatgatggaggacccttgcacagtgaggaaacctctttcagcccatataacagcacggtggtgcaggatatggaaggcatatttcgagtcagtatagatattgatgcgtagtccttttgcaagagtgagggctcaggttaaggcatgagttcgccttgctgagaggtagtggagaggggcagagcggtagcctcaatgatagatgtggaagatactatagcatagcctgcctttgttggtgagtggcgattaggcctggtggaactgccatcaataaactgagtgtgatcaggatggggaagagg

SEQ ID NO: 401079 - DNA, 860 bp, Homo sapiens
aggcggggcttgcacacgctggtcacgcggtcagctattgacacttcctggtgggatccgagtgaggcgacggggtaggggttggcgctcaggcggcgaccatggcgtatcacggcctcactgtgcctctcattgtgatgagcgtgttctggggcttcgtcggcttcttggtgccttggttcatccctaagggtcctaaccggggagttatcattaccatgttggtgacctgttcagtttgctgctatctcttttggctgattgcaattctggcccaactcaaccctctctttggaccgcaattgaaaaatgaaaccatctggtatctgaagtatcattggccttgaggaagaagacatgctctacagtgctcagtctttgaggtcacgagaagagaatgccttctagatgcaaaatcacctccaaaccagaccacttttcttgacttgcctgttttggccattagctgccttaaacgttaacagcacatttgaatgccttattctacaatgcagcgtgttttcctttgccttttttgcactttggtgaattacgtgcctccataacctgaactgtgccgactccacaaaacgattatgtactcttctgagatagaagatgctgttcttctgagagatacgttactctctccttggaatctgtggatttgaagatggctcctgccttctcacgtgggaatcagtgaagtgtttagaaactgctgcaggggtggtcagtaggagagcacgttcagagggaagagccatctcaacagaatcgcaccaaactatactttcaggatgaatttcttctttctgccatcttttggaataaatattttcctcctttctatggaaatc

SEQ ID NO: 401080 - DNA, 730 bp, Homo sapiens
aggcggggcttgcacacgctggtcacgcggtcagctattgacacttcctggtgggatccgagtgaggcgacggggtaggggttggcgctcaggcggcgaccatggcgtatcacggcctcactgtgcctctcattgtgatgagcgtgttctggggcttcgtcggcttcttggtgccttggttcatccctaagggtcctaaccggggagttatcattaccatgttggtgacctgttcagtttgctgctatctcttgtcacgagaagagaatgccttctagatgcaaaatcacctccaaaccagaccacttttcttgacttgcctgttttggccattagctgccttaaacgttaacagcacatttgaatgccttattctacaatgcagcgtgttttcctttgccttttttgcactttggtgaattacgtgcctccataacctgaactgtgccgactccacaaaacgattatgtactcttctgagatagaagatgctgttcttctgagagatacgttactctctccttggaatctgtggatttgaagatggctcctgccttctcacgtgggaatcagtgaagtgtttagaaactgctgcaggggtggtcagtaggagagcacgttcagagggaagagccatctcaacagaatcgcaccaaactatactttcaggatgaatttcttctttctgccatcttttggaataaatattttcctcctttctatggaaatc

SEQ ID NO: 401081 - DNA, 449 bp, Homo sapiens
caaaaaaggcaaaggaaaacacgctgcattgtagaataaggcattcaaatgtgctgttaacgtttaaggcagctaatgcccaaaacaggcaagtcaagaaaagtggtctggtttggaggtgattttgcactttggtgaattacgtgcctccataacctgaactgtgccgactccacaaaacgattatgtactcttctgagatagaagatgctgttcttctgagagatacgttactctctccttggaatctgtggatttgaagatggctcctgccttctcacgtgggaatcagtgaagtgtttagaaactgctgcaggggtggtcagtaggagagcacgttcagagggaagagccatctcaacagaatcgcaccaaactatactttcaggatgaatttcttctttctgccatcttttggaataaatattttcctcctttctatggaaatc

SEQ ID NO: 401082 - DNA, 498 bp, Homo sapiens
aggcggggcttgcacacgctggtcacgcggtcagctattgacacttcctggtgggatccgagtgaggcgacggggtaggggttggcgctcaggcggcgaccatggcgtatcacggcctcactgtgcctctcattgtgatgagcgtgttctggggcttcgtcggcttcttggtgccttggttcatccctaagggtcctaaccggggagttatcattaccatgttggtgacctgttcagtttgctgctatctcttttggctgattgcaattctggcccaactcaaccctctctttggaccgcaattgaaaaatgaaaccatctggtatctgaagtatcattggccttgaggaagaagacatgctctacagtgctcagtctttgaggtcacgagaagagaatgccttctagatgcaaatcgcaccaaactatactttcaggatgaatttcttctttctgccatcttttggaataaatattttcctcctttctatggaaatc

SEQ ID NO: 401083 - DNA, 683 bp, Homo sapiens
ggacgcgtgggtcgacccacgcgtccggagttatcattaccatgttggtgacctgttcagtttgctgctatctcttttggctgattgcaattctggcccaactcaaccctctctttggaccgcaattgaaaaatgaaaccatctggtatctgaagtatcattggccttgaggaagaagacatgctctacagtgctcagtctttgaggtcacgagaagagaatgccttctagatgcaaaatcacctccaaaccagaccacttttcttgacttgcctgttttggccattagctgccttaaacgttaacagcacatttgaatgccttattctacaatgcagcgtgttttcctttgccttttttgcactttggtgaattacgtgcctccataacctgaactgtgccgactccacaaaacgattatgtactcttctgagatagaagatgctgttcttctgagagatacgttactctctccttggaatctgtggatttgaagatggctcctgccttctcacgtgggaatcagtgaagtgtttagaaactgctgcaggggtggtcagtaggagagcacgttcagagggaagagccatctcaacagaatcgcaccaaactatactttcaggatgaatttcttctttctgccatcttttggaataaatattttcctcctttctatggaaatc

SEQ ID NO: 401084 - DNA, 657 bp, Homo sapiens
tatccgggagctcgagatatgtggtgactgttcagttgctgctatctcttttggctgattgcaattctggcccaactcaaccctctctttggaccgcaattgaaaaatgaaaccatctggtatctgaagtatcattggccttgaggaagaagacatgctctacagtgctcagtctttgaggtcacgagaagagaatgccttctagatgcaaaatcacctccaaaccagaccacttttcttgacttgcctgttttggccattagctgccttaaacgttaacagcacatttgaatgccttattctacaatgcagcgtgttttcctttgccttttttgcactttggtgaattacgtgcctccataacctgaactgtgccgactccacaaaacgattatgtactcttctgagatagaagatgctgttcttctgagagatacgttactctctccttggaatctgtggatttgaagatggctcctgccttctcacgtgggaatcagtgaagtgtttagaaactgctgcaggggtggtcagtaggagagcacgttcagagggaagagccatctcaacagaatcgcaccaaactatactttcaggatgaatttcttctttctgccatcttttggaataaatattttcctcctttctatggaaatc

SEQ ID NO: 401085 - DNA, 672 bp, Homo sapiens
  misc_feature (1)..(2): n is a, c, g, or t
  misc_feature (10)..(11): n is a, c, g, or t
  misc_feature (24)..(24): n is a, c, g, or t
nngggaaaannaaaaaaaaagaanaaaaagttaggaaagaagaagaaaaaaaaaaaatgctttagttggctgattgcaattctggcccaactcaaccctctctttggaccgcaattgaaaaatgaaaccatctggtatctgaagtatcattggccttgaggaagaagacatgctctacagtgctcagtctttgaggtcacgagaagagaatgccttctagatgcaaaatcacctccaaaccagaccacttttcttgacttgcctgttttggccattagctgccttaaacgttaacagcacatttgaatgccttattctacaatgcagcgtgttttcctttgccttttttgcactttggtgaattacgtgcctccataacctgaactgtgccgactccacaaaacgattatgtactcttctgagatagaagatgctgttcttctgagagatacgttactctctccttggaatctgtggatttgaagatggctcctgccttctcacgtgggaatcagtgaagtgtttagaaactgctgcaggggtggtcagtaggagagcacgttcagagggaagagccatctcaacagaatcgcaccaaactatactttcaggatgaatttcttctttctgccatcttttggaataaatattttcctcctttctatggaaatc

SEQ ID NO: 401086 - DNA, 664 bp, Homo sapiens
  misc_feature (37)..(37): n is a, c, g, or t
  misc_feature (43)..(43): n is a, c, g, or t
acagacgaatatacgaacgcatacacaatcttaaganacaaanaaaaaaaccttttattggctgattgcaattctggcccaactcaaccctctctttggaccgcaattgaaaaatgaaaccatctggtatctgaagtatcattggccttgaggaagaagacatgctctacagtgctcagtctttgaggtcacgagaagagaatgccttctagatgcaaaatcacctccaaaccagaccacttttcttgacttgcctgttttggccattagctgccttaaacgttaacagcacatttgaatgccttattctacaatgcagcgtgttttcctttgccttttttgcactttggtgaattacgtgcctccataacctgaactgtgccgactccacaaaacgattatgtactcttctgagatagaagatgctgttcttctgagagatacgttactctctccttggaatctgtggatttgaagatggctcctgccttctcacgtgggaatcagtgaagtgtttagaaactgctgcaggggtggtcagtaggagagcacgttcagagggaagagccatctcaacagaatcgcaccaaactatactttcaggatgaatttcttctttctgccatcttttggaataaatattttcctcctttctatggaaatc

SEQ ID NO: 401087 - DNA, 801 bp, Homo sapiens
aggcggggcttgcacacgctggtcacgcggtcagctattgacacttcctggtgggatccgagtgaggcgacggggtaggggttggcgctcaggcggcgaccatggcgtatcacggcctcactgtgcctctcattgtgatgagcgtgttctggggcttcgtcggcttcttggtgccttggttcatccctaagggtcctaaccggggagttatcattaccatgttggtgacctgttcagtttgctgctatctcttttggctgattgcaattctggcccaactcaaccctctctttggaccgcaattgaaaaatgaaaccatctggtatctgaagtatcattggccttgaggaagaagacatgctctacagtgctcagtctttgaggtcacgagaagagaatgccttctagatgcaaaatcacctccaaaccagaccacttttcttgacttgcctgttttggccattagctgccttaaacgttaacagcacatttgaatgccttattctacaatgcagcgtgttttcctttgccttttttgcactttggtgaattacgtgcctccataacctgaactgtgccgactccacaaaacgattatgtactcttctgagatagaagatgctgttcttctgagagatacgttactctctccttggaatctgtggatttgaagatggctcctgccttctcacgtgggaatcagtgaagtgtttagaaactgctgcccccgtgacaccacagaacccagcgggtgccggggcgtctcaagaaacgcctccgccccccactttcgcggctctt

SEQ ID NO: 401088 - DNA, 780 bp, Homo sapiens
aggcggggcttgcacacgctggtcacgcggtcagctattgacacttcctggtgggatccgagtgaggcgacggggtaggggttggcgctcaggcggcgaccatggcgtatcacggcctcactgtgcctctcattgtgatgagcgtgttctggggcttcgtcggcttcttggtgccttggttcatccctaagggtcctaaccggggagttatcattaccatgttggtgacctgttcagtttgctgctatctcttttggctgattgcaattctggcccaactcaaccctctctttggaccgcaattgaaaaatgaaaccatctggtatctgaagtatcattggccttgaggaagaagacatgctctacagtgctcagtctttgaggtcacgagaagagaatgccttctagatgcaaaatcacctccaaaccagaccacttttcttgacttgcctgttttggccattagctgccttaaacgttaacagcacatttgaatgccttattctacaatgcagcgtgttttcctttgccttttttgcactttggtgaattacgtgcctccataacctgaactgtgccgactccacaaaacgattatgtactcttctgagatagaagatgctgttcttctgagagatacgttactctctccttggaatctgtggatttgaagatggctcctgccttctcacgtgggaatcagtgaagtgtttagaaactgctgcgaggtacctcctaccccacgaatccagggggctacccctggctctctgttgccag

SEQ ID NO: 401089 - DNA, 763 bp, Homo sapiens
aggcggggcttgcacacgctggtcacgcggtcagctattgacacttcctggtgggatccgagtgaggcgacggggtaggggttggcgctcaggcggcgaccatggcgtatcacggcctcactgtgcctctcattgtgatgagcgtgttctggggcttcgtcggcttcttggtgccttggttcatccctaagggtcctaaccggggagttatcattaccatgttggtgacctgttcagtttgctgctatctcttttggctgattgcaattctggcccaactcaaccctctctttggaccgcaattgaaaaatgaaaccatctggtatctgaagtatcattggccttgaggaagaagacatgctctacagtgctcagtctttgaggtcacgagaagagaatgccttctagatgcaaaatcacctccaaaccagaccacttttcttgacttgcctgttttggccattagctgccttaaacgttaacagcacatttgaatgccttattctacaatgcagcgtgttttcctttgccttttttgcactttggtgaattacgtgcctccataacctgaactgtgccgactccacaaaacgattatgtactcttctgagatagaagatgctgttcttctgagagatacgttactctctccttggaatctgtggatttgaagatggctcctgccttctcacgtgggaatcagtgaagtgtttagaaactgctgccacagggagagccttttaacagatcgcgccaaccttca

SEQ ID NO: 401090 - DNA, 179 bp, Homo sapiens
gcgtcctcttactcgtactattcctactgctataagacgacagaaggggtggtcagtaggagagcacgttcagagggaagagccatctcaacagaatcgcaccaaactatactttcaggatgaatttcttctttctgccatcttttggaataaatattttcctcctttctatggaaatc

SEQ ID NO: 401091 - DNA, 166 bp, Homo sapiens
tactactatacgggtgcgatttgacgacagaaggggtggtcagtaggagagcacgttcagagggaagagccatctcaacagaatcgcaccaaactatactttcaggatgaatttcttctttctgccatcttttggaataaatattttcctcctttctatggaaatc

SEQ ID NO: 401092 - DNA, 1492 bp, Homo sapiens
aggcggggcttgcacacgctggtcacgcggtcagctattgacacttcctggtgggatccgagtgaggcgacggggtaggggttggcgctcaggcggcgaccatggcgtatcacggcctcactgtgcctctcattgtgatgagcgtgttctggggcttcgtcggcttcttggtgccttggttcatccctaagggtcctaaccggggttggctgattgcaattctggcccaactcaaccctctctttggaccgcaattgaaaaatgaaaccatctggtatctgaagtatcattggccttgaggaagaagacatgctctacagtgctcagtctttgaggtcacgagaagagaatgccttctagatgcaaaatcacctccaaaccagaccacttttcttgacttgcctgttttggccattagctgccttaaacgttaacagcacatttgaatgccttattctacaatgcagcgtgttttcctttgccttttttgcactttggtgaattacgtgcctccataacctgaactgtgccgactccacaaaacgattatgtactcttctgagatagaagatgctgttcttctgagagatacgttactctctccttggaatctgtggatttgaagatggctcctgccttctcacgtgggaatcagtgaagtgtttagaaactgctgcaggggtggtcagtaggagagcacgttcagagggaagagccatctcaacagaatcgcaccaaactatactttcaggatgaatttcttctttctgccatcttttggaataaatattttcctcctttctatggaaatccaaaaaaaaaaaaaaaaaaaaaaaaaaaaaaaaaaaaaaaaaaaaaaaagggggggggcgcgcaaaaaaaacccccgcggggggccccatgcggcccccggtttttgtgtgcaaagggggcccccaaaggggggcgttattaatacgcgaagccgcgccggcggcccgcgcgagttttaacaacaacgctggcctgatctgggggagcaaccacagccggcactaggctgcggagaccctttggtggagaagaagccccacctcttccggggggggagacacaaattggtgggcgcacccactcactctagaggaagttttacacgccccttagaggaggaaaaattaagcatgtgaacaggggtccatagcggtgggaacccaccaacgcgcgtataatacgtctctggggcttgtagaagaattctggccatccaccgggagactagatgatccttgggaacaaattttttttccccgccgcgcaccttgatgattacaataaaacgtgatagcagtaccacgacgactgacccacgatctgatgagtacactagccagtcatgtaggcctgaccgacactcacgatggctcacaataagtaatcgattctcacaatcgactgaacacgcacgaggcacagcaccactacaggcatacgcagtacgaagtatcaagct

SEQ ID NO: 401093 - DNA, 703 bp, Homo sapiens
  misc_feature (1)..(2): n is a, c, g, or t
  misc_feature (10)..(11): n is a, c, g, or t
  misc_feature (24)..(24): n is a, c, g, or t
nngggaaaannaaaaaaaaagaanaaaaagttaggaaagaagaagaaaaaaaaaaaatgctttagttggctgattgcaattctggcccaactcaaccctctctttggaccgcaattgaaaaatgaaaccatctggtatctgaagtatcattggccttgaggaagaagacatgctctacagtgctcagtctttgaggtcacgagaagagaatgccttctagatgcaaaatcacctccaaaccagaccacttttcttgacttgcctgttttggccattagctgccttaaacgttaacagcacatttgaatgccttattctacaatgcagcgtgttttcctttgccttttttgcactttggtgaattacgtgcctccataacctgaactgtgccgactccacaaaacgattatgtactcttctgagatagaagatgctgttcttctgagagatacgttactctctccttggaatctgtggatttgaagatggctcctgccttctcacgtgggaatcagtgaagtgtttagaaactgctgcaggggtggtcagtaggagagcacgttcagagggaagagccatctcaacagaatcgcaccaaactatactttcaggatgaatttcttctttctgccatcttttggaataaatattttcctcctttctatggaaatcaaaaaaaatcgttctcactggcctttatgga

SEQ ID NO: 401094 - DNA, 431 bp, Homo sapiens
aggcggggcttgcacacgctggtcacgcggtcagctattgacacttcctggtgggatccgagtgaggcgacggggtaggggttggcgctcaggcggcgaccatggcgtatcacggcctcactgtgcctctcattgtgatgagcgtgttctggggcttcgtcggcttcttggtgccttggttcatccctaagggtcctaaccggggagttatcattaccatgttggtgacctgttcagtttgctgctatctcttttggctgattgcaattctggcccaactcaaccctctctttggaccgcaattgaaaaatgaaaccatctggtatctgaagtatcattggccttgaggaagaagacatgctctacagtgctcagtctttgagcaccaaaagtgccttctaaatgcattgcctcggttacagccatttgtg

SEQ ID NO: 401095 - DNA, 525 bp, Homo sapiens
cttttctatcgctacataatgcctttttaaaaaatgattttgtagtctaaacttaggttgagtatataaaccctgccatgtagcttgagatgcctgaaaagactggtaagtgcgtttcttaatcgttcagtaactatttgagtgcctactgcagccaaggcactggagggatcaaagatgtgtaaatttggagtccctgcaagttcacaagctatttggagagataaggttagtatacatagaactgtaatataaggttgtgttggagcattgtccttaaagatggtaccatggtgagcagttcaaggttacctgccagctgcagaacaaggcagcaaatgctcctgagatggaaccatcacagcctcagacataggactaaagaagtcaagagtgattaaaaagccaggggcaggagacagtaattttgtatttcagtagcaggcatctcgatacactaatttgagagctttattacttttaagaaattaaaaattaaaatgaacctaaattttcaccagctca

SEQ ID NO: 401096 - DNA, 650 bp, Homo sapiens
aggcggggcttgcacacgctggtcacgcggtcagctattgacacttcctggtgggatccgagtgaggcgacggggtaggggttggcgctcaggcggcgaccatggcgtatcacggcctcactgtgcctctcattgtgatgagcgtgttctggggcttcgtcggcttcttggtgccttggttcatccctaagggtcctaaccggggagttatcattaccatgttggtgacctgttcagtttgctgctatctcttttggctgattgcaatactggcccaactaaaccctttttttgggccgttttttatgcttttctttttttttttttttgttgttcccttttaagatatgccttttgggtgcgggacttccggtcttctcttcctaattttcttctctcgtccctctctgccctcccttcccctgcctttcttatcctcttttttctcctttttcactataattgcctcgccctcttttttctccttagttccacccaccgcttatccccctccttctttatctcctatctccacattctttcccatcacctttccttcctcacctctgatacctcctcctctctcgattcctcccccccctactctgcctttctacattcttctacatgctttgtttttttctctgcct

SEQ ID NO: 401097 - DNA, 1540 bp, Homo sapiens
aggcggggcttgcacacgctggtcacgcggtcagctattgacacttcctggtgggatccgagtgaggcgacggggtaggggttggcgctcaggcggcgaccatggcgtatcacggcctcactgtgcctctcattgtgatgagcgtgttctggggcttcgtcggcttcttggtgccttggttcatccctaagggtcctaaccggggagttatcattaccatgttggtgacctgttcagtttgctgctatctcttttggctgattgcaattctggcccaactcaaccctctctttggaccgcaattgaaaaatgaaaccatctggtatctgaagtatcattggccttgaggaagaagacatgctctacagtgctcagtctttgaggtcacgagaagagaatgccttctagatgcaaaatcacctccaaaccagaccacttttcttgacttgcctgttttggccattagctgccttaaacgttaacagcacatttgaatgccttattctacaatgcagcgtgttttcctttgccttttttgcactttggtgaattacgtgcctccataacctgaactgtgccgactccacaaaacgattatgtactcttctgagatagaagatgctgttcttctgagagatacgttactctctccttggaatctgtggatttgaagatggctcctgccttctcacgtgggaatcagtgaagtgtttagaaactgctgcaggggtggtcagtaggagagcacgttcagagggaagagccatctcaacagaatcgcaccaaactatactttcaggatgaatttcttctttctgccatcttttggaataaatattttcctcctttctatggaaatccaaaaaaaaaaaaaaaaaaaaaaaaaaaaaaaaaaaaaaaaaaaaaaaagggggggggcgcgcaaaaaaaacccccgcggggggccccatgcggcccccggtttttgtgtgcaaagggggcccccaaaggggggcgttattaatacgcgaagccgcgccggcggcccgcgcgagttttaacaacaacgctggcctgatctgggggagcaaccacagccggcactaggctgcggagaccctttggtggagaagaagccccacctcttccggggggggagacacaaattggtgggcgcacccactcactctagaggaagttttacacgccccttagaggaggaaaaattaagcatgtgaacaggggtccatagcggtgggaacccaccaacgcgcgtataatacgtctctggggcttgtagaagaattctggccatccaccgggagactagatgatccttgggaacaaattttttttccccgccgcgcaccttgatgattacaataaaacgtgatagcagtaccacgacgactgacccacgatctgatgagtacactagccagtcatgtaggcctgaccgacactcacgatggctcacaataagtaatcgattctcacaatcgactgaacacgcacgaggcacagcaccactacaggcatacgcagtacgaagtatcaagct

SEQ ID NO: 401098 - DNA, 1317 bp, Homo sapiens
aggcggggcttgcacacgctggtcacgcggtcagctattgacacttcctggtgggatccgagtgaggcgacggggtaggggttggcgctcaggcggcgaccatggcgtatcacggcctcactgtgcctctcattgtgatgagcgtgttctggggcttcgtcggcttcttggtgccttggttcatccctaagggtcctaaccggggagttatcattaccatgttggtgacctgttcagtttgctgctatctcttttggctgattgcaattctggcccaactcaaccctctctttggaccgcaattgaaaaatgaaaccatctggtatctgaagtatcattggccttgaggaagaagacatgctctacagtgctcagtctttgaggtcacgagaagagaatgccttctagatgcaaaatcacctccaaaccagaccacttttcttgacttgcctgttttggccattagctgccttaaacgttaacagcacatttgaatgccttattctacaatgcagcgtgttttcctttgccttttttgcactttggtgaattacgtgcctccataacctgaactgtgccgactccacaaaacgattatgtactcttctgagatagaagatgctgttcttctgagagatacgttactctctccttggaatctgtggatttgaagatggctcctgccttctcacgtgggaatcagtgaagtgtttagaaactgctgcaggggtggtcagtaggagagcacgttcagagggaagagccatctcaacagaatcgcaccaaactatactttcaggatgaatttcttctttctgccatcttttggaataaatattttcctcctttctatggaaatcaaaaaacaaaacccaacacacacacccacacacccactgacaacacacagccccccccaacccacacacagcaacaggaaggctaaagaaaaggcataaacacaaagacctcatcggcaccagcgcggcgagcacgccagacggaagagcccgcaatctaccaggtcgacaacacggcagcatcggcacaagcacgcggacccaagtgagcgcacgtgacgtcaagagctatgggacgagctaacagcaacacagaaaaagacataacaagcaacaaacaatcacagtagacacgtagaagagtataaaaccttacagaggaagaataaagataataagagaaacaaaaaaagagatagagcgccgccgggagcaagagacgacaagataaagaaagagacaaacaaagcactagacaccacacaagcgagcaacgcaacaagttagaagataagaa

SEQ ID NO: 401099 - DNA, 1155 bp, Homo sapiens
aggcggggcttgcacacgctggtcacgcggtcagctattgacacttcctggtgggatccgagtgaggcgacggggtaggggttggcgctcaggcggcgaccatggcgtatcacggcctcactgtgcctctcattgtgatgagcgtgttctggggcttcgtcggcttcttggtgccttggttcatccctaagggtcctaaccggggagttatcattaccatgttggtgacctgttcagtttgctgctatctcttttggctgattgcaattctggcccaactcaaccctctctttggaccgcaattgaaaaatgaaaccatctggtatctgaagtatcattggccttgaggaagaagacatgctctacagtgctcagtctttgaggtcacgagaagagaatgccttctagatgcaaaatcacctccaaaccagaccacttttcttgacttgcctgttttggccattagctgccttaaacgttaacagcacatttgaatgccttattctacaatgcagcgtgttttcctttgccttttttgcactttggtgaattacgtgcctccataacctgaactgtgccgactccacaaaacgattatgtactcttctgagatagaagatgctgttcttctgagagatacgttactctctccttggaatctgtggatttgaagatggctcctgccttctcacgtgggaatcagtgaagtgtttagaaactgctgcaggggtggtcagtaggagagcacgttcagagggaagagccatctcaacagaatcgcaccaaactatactttcaggatgaatttcttctttctgccatcttttggaataaatattttcctcctttctatggaaatcgaagataaacacaccaaacaaacctcgagggggggcccggttcccaatttgcctatagggagtcgtttacaatccatgccgtcgtttcacggctgatggcctgcgtacccaataatgcttcagaaatcccttcgcattgggattgaaggcgccaatgcttcaaggtcccttaggatggctgtcctaatgtaacccaatgtacgccttcccggcctgacctatataacaggtgttctgacataggccgcatgggcacctggtacattcgttggtttcgttggttcgtgatctgcgg

SEQ ID NO: 401100 - DNA, 812 bp, Homo sapiens
aggcggggcttgcacacgctggtcacgcggtcagctattgacacttcctggtgggatccgagtgaggcgacggggtaggggttggcgctcaggcggcgaccatggcgtatcacggcctcactgtgcctctcattgtgatgagcgtgttctggggcttcgtcggcttcttggtgccttggttcatccctaagggtcctaaccggggttggctgattgcaattctggcccaactcaaccctctctttggaccgcaattgaaaaatgaaaccatctggtatctgaagtatcattggccttgaggaagaagacatgctctacagtgctcagtctttgaggtcacgagaagagaatgccttctagatgcaaaatcacctccaaaccagaccacttttcttgacttgcctgttttggccattagctgccttaaacgttaacagcacatttgaatgccttattctacaatgcagcgtgttttcctttgccttttttgcactttggtgaattacgtgcctccataacctgaactgtgccgactccacaaaacgattatgtactcttctgagatagaagatgctgttcttctgagagatacgttactctctccttggaatctgtggatttgaagatggctcctgccttctcacgtgggaatcagtgaagtgtttagaaactgctgcaggggtggtcagtaggagagcacgttcagagggaagagccatctcaacagaatcgcaccaaactatactttcaggatgaatttcttctttctgccatcttttggaataaatattttcctcctttctatggaaatc

SEQ ID NO: 401101 - DNA, 655 bp, Homo sapiens
cccgagaacaagtacagaacataacagaagactaatgcaaacagctagttggctgattgcaattctggcccaactcaaccctctctttggaccgcaattgaaaaatgaaaccatctggtatctgaagtatcattggccttgaggaagaagacatgctctacagtgctcagtctttgaggtcacgagaagagaatgccttctagatgcaaaatcacctccaaaccagaccacttttcttgacttgcctgttttggccattagctgccttaaacgttaacagcacatttgaatgccttattctacaatgcagcgtgttttcctttgccttttttgcactttggtgaattacgtgcctccataacctgaactgtgccgactccacaaaacgattatgtactcttctgagatagaagatgctgttcttctgagagatacgttactctctccttggaatctgtggatttgaagatggctcctgccttctcacgtgggaatcagtgaagtgtttagaaactgctgcaggggtggtcagtaggagagcacgttcagagggaagagccatctcaacagaatcgcaccaaactatactttcaggatgaatttcttctttctgccatcttttggaataaatattttcctcctttctatggaaatc

SEQ ID NO: 401102 - DNA, 905 bp, Homo sapiens
aggcggggcttgcacacgctggtcacgcggtcagctattgacacttcctggtgggatccgagtgaggcgacggggtaggggttggcgctcaggcggcgaccatggcgtatcacggcctcactgtgcctctcattgtgatgagcgtgttctggggcttcgtcggcttcttggtgccttggttcatccctaagggtcctaaccggggagttatcattaccatgttggtgacctgttcagtttgctgctatctcttttggctgattgcaattctggcccaactcaaccctctctttggaccgcaattgaaaaatgaaaccatctggtatctgaagtatcattggccttgaggaagaagacatgctctacagtgctcagtctttgaggtcacgagaagagaatgccttctagatgcaaaatcacctccaaaccagaccacttttcttgacttgcctgttttggccattagctgccttaaacgttaacagcacatttgaatgccttattctacaatgcagcgtgttttcctttgccttttttgcactttggtgaattacgtgcctccataacctgaactgtgccgactccacaaaacgattatgtactcttctgagatagaagatgctgttcttctgagagatacgttactctctccttggaatctgtggatttgaagatggctcctgccttctcacgtgggaatcagtgaagtgtttagaaactgctgcaggggtggtcagtaggagagcacgttcagagggaagagccatctcaacagaatcgcaccaaactatactttcaggatgaatttcttctttctgccatcttttggaataaatattttcctcctttctatggaaatcgaaacttcgccatcggaaacttcgccatcggaaacttcccatcgg

SEQ ID NO: 401103 - DNA, 660 bp, Homo sapiens
acccttcactcactttcttttatcttcctcttctcacacacaaataatttctattggctgattgcaattctggcccaactcaaccctctctttggaccgcaattgaaaaatgaaaccatctggtatctgaagtatcattggccttgaggaagaagacatgctctacagtgctcagtctttgaggtcacgagaagagaatgccttctagatgcaaaatcacctccaaaccagaccacttttcttgacttgcctgttttggccattagctgccttaaacgttaacagcacatttgaatgccttattctacaatgcagcgtgttttcctttgccttttttgcactttggtgaattacgtgcctccataacctgaactgtgccgactccacaaaacgattatgtactcttctgagatagaagatgctgttcttctgagagatacgttactctctccttggaatctgtggatttgaagatggctcctgccttctcacgtgggaatcagtgaagtgtttagaaactgctgcaggggtggtcagtaggagagcacgttcagagggaagagccatctcaacagaatcgcaccaaactatactttcaggatgaatttcttctttctgccatcttttggaataaatattttcctcctttctatggaaatc

SEQ ID NO: 401104 - DNA, 530 bp, Homo sapiens
actactactaaattcgcggccgcgtcgacgctctacagtgctcagtctttgaggtcacgagaagagaatgccttctagatgcaaaatcacctccaaaccagaccacttttcttgacttgcctgttttggccattagctgccttaaacgttaacagcacatttgaatgccttattctacaatgcagcgtgttttcctttgccttttttgcactttggtgaattacgtgcctccataacctgaactgtgccgactccacaaaacgattatgtactcttctgagatagaagatgctgttcttctgagagatacgttactctctccttggaatctgtggatttgaagatggctcctgccttctcacgtgggaatcagtgaagtgtttagaaactgctgcaggggtggtcagtaggagagcacgttcagagggaagagccatctcaacagaatcgcaccaaactatactttcaggatgaatttcttctttctgccatcttttggaataaatattttcctcctttctatggaaatc

SEQ ID NO: 401105 - DNA, 801 bp, Homo sapiens
gggaaaaatacagactcttgaaactgcggtgaattcattagattccagcacaatcaatctcagtcagcttcattcttcctgctttctgtaacatagagtgttacttgtgctcctcatttcagcagtgtccttggttactggaccttttgccacagccctgcaaaacctggccaaacttgcaccaagttgattatcctgtgtttcatattttgttgagcatctgtgcattttaaagtgttggcttggttaactttctcgatgttaactttttgccttcctgaggaatgtatgaggaccagttaccagaatggttttgttttgcaggtcacgagaagagaatgccttctagatgcaaaatcacctccaaaccagaccacttttcttgacttgcctgttttggccattagctgccttaaacgttaacagcacatttgaatgccttattctacaatgcagcgtgttttcctttgccttttttgcactttggtgaattacgtgcctccataacctgaactgtgccgactccacaaaacgattatgtactcttctgagatagaagatgctgttcttctgagagatacgttactctctccttggaatctgtggatttgaagatggctcctgccttctcacgtgggaatcagtgaagtgtttagaaactgctgcaggggtggtcagtaggagagcacgttcagagggaagagccatctcaacagaatcgcaccaaactatactttcaggatgaatttcttctttctgccatcttttggaataaatattttcctcctttctatggaaatc

SEQ ID NO: 401106 - DNA, 514 bp, Homo sapiens
tgatctagaggatgcgtttctctgatcgctctttgaggtcacgagaagagaatgccttctagatgcaaaatcacctccaaaccagaccacttttcttgacttgcctgttttggccattagctgccttaaacgttaacagcacatttgaatgccttattctacaatgcagcgtgttttcctttgccttttttgcactttggtgaattacgtgcctccataacctgaactgtgccgactccacaaaacgattatgtactcttctgagatagaagatgctgttcttctgagagatacgttactctctccttggaatctgtggatttgaagatggctcctgccttctcacgtgggaatcagtgaagtgtttagaaactgctgcaggggtggtcagtaggagagcacgttcagagggaagagccatctcaacagaatcgcaccaaactatactttcaggatgaatttcttctttctgccatcttttggaataaatattttcctcctttctatggaaatc

SEQ ID NO: 401107 - DNA, 807 bp, Homo sapiens
aggcggggcttgcacacgctggtcacgcggtcagctattgacacttcctggtgggatccgagtgaggcgacggggtaggggttggcgctcaggcggcgaccatggcgtatcacggcctcactgtgcctctcattgtgatgagcgtgttctggggcttcgtcggcttcttggtgccttggttcatccctaagggtcctaaccggggagttatcattaccatgttggtgacctgttcagtttgctgctatctcttttggctgattgcaattctggcccaactcaaccctctctttggaccgcaattgaaaaatgaaaccatctggtatctgaagtatcattggccttgaggaagaagacatgctctacagtgctcagtctttgaggtcacgagaagagaatgccttctagatgcactgccttaaacgttaacagcacatttgaatgccttattctacaatgcagcgtgttttcctttgccttttttgcactttggtgaattacgtgcctccataacctgaactgtgccgactccacaaaacgattatgtactcttctgagatagaagatgctgttcttctgagagatacgttactctctccttggaatctgtggatttgaagatggctcctgccttctcacgtgggaatcagtgaagtgtttagaaactgctgcaggggtggtcagtaggagagcacgttcagagggaagagccatctcaacagaatcgcaccaaactatactttcaggatgaatttcttctttctgccatcttttggaataaatattttcctcctttctatggaaatc

SEQ ID NO: 401108 - DNA, 812 bp, Homo sapiens
aggcggggcttgcacacgctggtcacgcggtcagctattgacacttcctggtgggatccgagtgaggcgacggggtaggggttggcgctcaggcggcgaccatggcgtatcacggcctcactgtgcctctcattgtgatgagcgtgttctggggcttcgtcggcttcttggtgccttggttcatccctaagggtcctaaccggggagttatcattaccatgttggtgacctgttcagtttgctgctatctcttttggctgattgcaattctggcccaactcaaccctctctttggaccgcaattgaaaaatgaaaccatctggtatctgaagtatcattggccttgaggaagaagacatgctctacagtgctcagtctttgaggtcacgagaagagaatgccttctagatgcaaaatcacctccaaaccagaccacttttcttgacttgcctgttttggccattagctgccttaaacgttaacagcacatttgaatgccttattctacaatgcagcgtgttttcctttgccttttttgcactttggtgaattacgtgcctccataacctgaactgtgccgactccacaaaacgttactctctccttggaatctgtggatttgaagatggctcctgccttctcacgtgggaatcagtgaagtgtttagaaactgctgcaggggtggtcagtaggagagcacgttcagagggaagagccatctcaacagaatcgcaccaaactatactttcaggatgaatttcttctttctgccatcttttggaataaatattttcctcctttctatggaaatc

SEQ ID NO: 401109 - DNA, 312 bp, Homo sapiens
tgcacacgccgagtccccagactgcacacgccgagtctccacacgattatgtactcttctgagatagaagatgctgttcttctgagagatacgttactctctccttggaatctgtggatttgaagatggctcctgccttctcacgtgggaatcagtgaagtgtttagaaactgctgcaggggtggtcagtaggagagcacgttcagagggaagagccatctcaacagaatcgcaccaaactatactttcaggatgaatttcttctttctgccatcttttggaataaatattttcctcctttctatggaaatc

SEQ ID NO: 401110 - DNA, 672 bp, Homo sapiens
aggcggggcttgcacacgctggtcacgcggtcagctattgacacttcctggtgggatccgagtgaggcgacggggtaggggttggcgctcaggcggcgaccatggcgtatcacggcctcactgtgcctctcattgtgatgagcgtgttctggggcttcgtcggcttcttggtgccttggttcatccctaagggtcctaaccggggagttatcattaccatgttggtgacctgttcagtttgctgctatctcttttggctgattgcaattctggcccaactcaaccctctctttggaccgcaattgaaaaatgaaaccatctggtatctgaagtatcattggccttgaggaagaagacatgctctacagtgctcagtctttgaggtcacgagaagagaatgccttctagatgcaaaatcacctccaaaccagaccacttttcttgacttgcctgttttggccattagctgccttaaacgttaacagcacatttgaatgccttattctacaatgcagcgtgttttcctttgccttttttgcactttggtgaatcacattcatgaagtacttgaacgacgcccagtccacaagcatcgaatacgtactgttctaatatagaaggatcccctcttctagagacagacgcaactctgtcatgcagatttatccagta

SEQ ID NO: 401111 - DNA, 1017 bp, Homo sapiens
ggtcgtgttacacgagacccacgtctgcctggcgtggatccctggcccacgagttcttacccctaccctgagaggaggaccgggctccactacctctatgtggacaggattgaggctcagagccagggttatgcattgggccccaatggaccagcttaggcgggccaggcagacttggagctcaaggtccactggtaacacagacagcggccaccctactcccccaccacacctggccccactagaggcctcctccccaaagtccagccccagcaaggcctgccggccgactgtcatctcagcactgagatgacagtcggcttcttggtgccttggttcatccctaagggtcctaaccggggagttatcattaccatgttggtgacctgttcagtttgctgctatctcttttggctgattgcaattctggcccaactcaaccctctctttggaccgcaattgaaaaatgaaaccatctggtatctgaagtatcattggccttgaggaagaagacatgctctacagtgctcagtctttgaggtcacgagaagagaatgccttctagatgcaaaatcacctccaaaccagaccacttttcttgacttgcctgttttggccattagctgccttaaacgttaacagcacatttgaatgccttattctacaatgcagcgtgttttcctttgccttttttgcactttggtgaattacgtgcctccataacctgaactgtgccgactccacaaaacgattatgtactcttctgagatagaagatgctgttcttctgagagatacgttactctctccttggaatctgtggatttgaagatggctcctgccttctcacgtgggaatcagtgaagtgtttagaaactgctgcaggggtggtcagtaggagagcacgttcagagggaagagccatctcaacagaatcgcaccaaactatactttcaggatgaatttcttctttctgccatcttttggaataaatattttcctcctttctatggaaatc

SEQ ID NO: 401112 - DNA, 909 bp, Homo sapiens
  misc_feature (862)..(862): n is a, c, g, or t
aggcggggcttgcacacgctggtcacgcggtcagctattgacacttcctggtgggatccgagtgaggcgacggggtaggggttggcgctcaggcggcgaccatggcgtatcacggcctcactgtgcctctcattgtgatgagcgtgttctggggcttcgtcggcttcttggtgccttggttcatccctaagggtcctaaccggggagttatcattaccatgttggtgacctgttcagtttgctgctatctcttttggctgattgcaattctggcccaactcaaccctctctttggaccgcaattgaaaaatgaaaccatctggtatctgaagtatcattggccttgaggaagaagacatgctctacagtgctcagtctttgaggtcacgagaagagaatgccttctagatgcaaaatcacctccaaaccagaccacttttcttgacttgcctgttttggccattagctgccttaaacgttaacagcacatttgaatgccttattctacaatgcagcgtgttttcctttgccttttttgcactttggtgaattacgtgcctccataacctgaactgtgccgactccacaaaacgattatgtactcttctgagatagaagatgctgttcttctgagagatacgttactctctccttggaatctgtggatttgaagatggctcctgccttctcacgtgggaatcagtgaagtgtttagaaactgctgcaggggtggtcagtaggagagcacgttcagagggaagagccatctcaacagaatcgcaccaaactatactttcaggatgaatttcttctttctgccatcttttggaataaatattttcctcctttctatggaaatcanaaataaaaagaaaagataaaattataaaatatatttaaccactacgg

SEQ ID NO: 401113 - DNA, 891 bp, Homo sapiens
aggcggggcttgcacacgctggtcacgcggtcagctattgacacttcctggtgggatccgagtgaggcgacggggtaggggttggcgctcaggcggcgaccatggcgtatcacggcctcactgtgcctctcattgtgatgagcgtgttctggggcttcgtcggcttcttggtgccttggttcatccctaagggtcctaaccggggagttatcattaccatgttggtgacctgttcagtttgctgctatctcttttggctgattgcaattctggcccaactcaaccctctctttggaccgcaattgaaaaatgaaaccatctggtatctgaagtatcattggccttgaggaagaagacatgctctacagtgctcagtctttgaggtcacgagaagagaatgccttctagatgcaaaatcacctccaaaccagaccacttttcttgacttgcctgttttggccattagctgccttaaacgttaacagcacatttgaatgccttattctacaatgcagcgtgttttcctttgccttttttgcactttggtgaattacgtgcctccataacctgaactgtgccgactccacaaaacgattatgtactcttctgagatagaagatgctgttcttctgagagatacgttactctctccttggaatctgtggatttgaagatggctcctgccttctcacgtgggaatcagtgaagtgtttagaaactgctgcaggggtggtcagtaggagagcacgttcagagggaagagccatctcaacagaatcgcaccaaactatactttcaggatgaatttcttctttctgccatcttttggaataaatattttcctcctttctatggaaatcaaaaaaaatcgttctcactggcctttatgga

SEQ ID NO: 401114 - DNA, 1316 bp, Homo sapiens
  misc_feature (1167)..(1167): n is a, c, g, or t
aggcggggcttgcacacgctggtcacgcggtcagctattgacacttcctggtgggatccgagtgaggcgacggggtaggggttggcgctcaggcggcgaccatggcgtatcacggcctcactgtgcctctcattgtgatgagcgtgttctggggcttcgtcggcttcttggtgccttggttcatccctaagggtcctaaccggggagttatcattaccatgttggtgacctgttcagtttgctgctatctcttttggctgattgcaattctggcccaactcaaccctctctttggaccgcaattgaaaaatgaaaccatctggtatctgaagtatcattggccttgaggaagaagacatgctctacagtgctcagtctttgaggtcacgagaagagaatgccttctagatgcaaaatcacctccaaaccagaccacttttcttgacttgcctgttttggccattagctgccttaaacgttaacagcacatttgaatgccttattctacaatgcagcgtgttttcctttgccttttttgcactttggtgaattacgtgcctccataacctgaactgtgccgactccacaaaacgattatgtactcttctgagatagaagatgctgttcttctgagagatacgttactctctccttggaatctgtggatttgaagatggctcctgccttctcacgtgggaatcagtgaagtgtttagaaactgctgcaggggtggtcagtaggagagcacgttcagagggaagagccatctcaacagaatcgcaccaaactatactttcaggatgaatttcttctttctgccatcttttggaataaatattttcctcctttctatggaaatctctaaaaaaaaaaacaaaaacaaatatggcttatttggccatatgccctatatggggggatacaaatactggccgccgtttcacacagcggtctggagaaacctggggtacccactttaagcctttggggaaacacctctttacacatgggcggaaaacaaagaggcccccggatgggctttcaaacattgggctcttcttagtctatgcaaattagcgcgcatatttgtaatatcgctaaatatgtaaaacgccttttttcccatgcgcgatgggagaacctctaatataaagaaaatcgcccatnacgtgggggtctcctttcaacacactctttagacaggttctcctccgtgggcccttttttgggggccctcgcgcacacccccacaactttttggggggccactttcctgaagggccccattattttcactcgggaagagccctgcgggc

SEQ ID NO: 401115 - DNA, 1624 bp, Homo sapiens
atgaactatatcttaagaattcataaagccctaaaaagtaaatatttacaaccagaaatctttctgacaaagaaacaagattactcaaagtaagtagtagtttgggctccctggaaagaacccagaacttaagtgtcaggaaatgtggatagttctgaatgtgcccctggctggttgatgactctgggcaacttatgcagtacctctaactcatggtttatttacctgaaaaataagtgggttggctatgtctgtggtttgaaaggtgctctatgatgtcccagatgtcttagcagtgtatcattggctgttttggaggctgtcaggggtccagatggctgctcccactgagcctgcttttaacagagcttttcagtttgtatttcttgtatacacaaagtaatattaaataaaaaaaatataatccagctaagaaagtttgagaatactggcttgagattcaaaataaaataaaccaaaaattttagaaattatattagtctagaaagatagtattgtgtctctttgtctttttagtacctagcacatatcaggtacttgatacatatttatcatatgaatgcaatggttgtaatgaacaactgggaaggaaatgcaaaagcagaaggcaccatatttgtgttgctattcctgggtgtcatttctatgtaacttgtgataaccagtagtaaagaacaacatggactatgtttaatagacaacaactaattttattggatttgtgtacataatctgaaatttagtctaaggacaagccatattactataaattccaggaaatctagagagaaaaaatgggcaatttagaacagactagaagagtaactctttcagtttgtctggaaaaccgaatctaaggaataaggtcagtttgcagtttctttcaagtagaattggtgactcttggatgcagtttataaacacgtaacacattttccttgcatggaaatatatctattctatgacctcttctacatgaagaaaagatttgaaattttcttctccattaaataatgttttgtgtgcatgttgcaaaaataagagagaagcaagaataactctagcagatgcttaaaggtttaagattaaagacacatgtaaatgtgattcatagtgggtgttctgtgcacttgagtgaatattcccaaatcacagctagaaaaatttaggagtaaattgacttaacttatggtaaatcaataggggtccctgaattggagggaaacagatgagcaagaaaaaaattatttgacaggactccactaaggaaaacaacattcaagtaacagatgaggtattctactgcccagaggaattacccagcctttagcaaggcgaagtcagcctcaactggcaggaggtttgttttaaaactgaaatgagaaaaaggatctgggcttacaaatgatgggaagatatattatcaacagggaaaaaaacccccagaaaatagcaactaacttgtttccccagcacaactgaaaggatgaagaaggaaaacaatttaatgtaccctggtcatgcagttactttcctttatccttactaacagtgcttgtcaagatggttctggaaactgaataaatgtaagtaatgaatcatg

SEQ ID NO: 401116 - DNA, 444 bp, Homo sapiens
tcctcggaaaagcaaactctaaacaatcacctttccttccttcctaactaggaaacatcttattccctctgcagctatatgttatttcttctctaaggaaagcagttattgtttcttgttctcagacctaaagtggagaaaactagagacagaactttggatcctatcatttctcagaagccatgagtcagagaaggaagaaccaacaaagggctctgaactatagactgaattctatatgcacatttatacatagcccagttctagttgtctctagagatttcttatgtagaaatatctatacaagacaacagctaactgtagagctcatcaaaatcagggattgtacctttcatttcttatataaccatggttgtacctggtaagatattaatgttacaacaggtaatgaataaaattttggtttattaattgaatcacttt

SEQ ID NO: 401117 - DNA, 354 bp, Homo sapiens
gctcaggtagggacctgttccccaccaagtctatgtaagagagtccctcaggtgccttcaggccagccctaaaggtggctcaaccagcttctccattcaggactggttgacatctattatgggctaaaaattgtgcccctctcccccaaaattcataatgttgaattcctaacccccagaaactcaggatgcgactacagtcatttctcaacatagctgggggattggttccagaaccccctcatatagccaaatccacacatactcaaatcccacgtcatattccaaaagcctgccctccatatatgagggtttcacatcccacaaatactgtattttcaatagcgtttgata

SEQ ID NO: 401118 - DNA, 489 bp, Homo sapiens
acagagtaggacagctttgtgacatttctcaggctatttcccctgacctctcatcaatgctgacgtttttgataagaaggggtatagagactgcagcccttggggtggttacagttcatttatttacaggccttatattgacaggcctcagatttcatgctcagtaccataaaggttgatttttaaccaccaagaggcaaaagaaacatgacaggtcggagcatattttctcacctattctggcttaaatgatggtacttacctgatttgtggttgtaggtgaaatgttgggtgaaagattagctgctataaaaaggatgtcaggacgtgtagagaatttagaggacttgggtgggagatggatgtctattttctaaccccttagtcatgttcattccgatgccagcataaactctattttgagatgattatagaaataacttatatcttcatttgtttgtgggaaataaaaaataaaaatgatataaa

SEQ ID NO: 401119 - DNA, 405 bp, Homo sapiens
ctaacatgtaatcactaatctttaggagcttccaatctattggggagagtgataatagacgtataatgcacccacaaagagctataacataaggtagaatgtgatctgagcactaaggaaatttaaaaggggtgttgtgatcactagttctggccaaaataatgtaagggacagtttttttctctctctctctctcattttttttttaaagggacgggagtaggaattacacttgagcctctattccactatctgcagtattttctccaacttgagtccctgatggtcagttcttcattactaccacctggttcagtgtttagaaccatgtgacacacataatgattattcagtagaagaaaaactgagaaagtgaagcctgggatatatgggggaaagcctgac

SEQ ID NO: 401120 - DNA, 508 bp, Homo sapiens
acctcagttttcccatctgtgaaatggaggcagggccggcaggcatgttgcagctacttcccaccattgcaatagaaatagcacggacctgacaaacatcgtgcgctgggcactgtgttaagtgttttgcacgcatgagcgctggttctctgccctggctgtccctggaaccgcctgaggtgctttagaaagcatcagtgtctcagccgggcgtggtggcttatgcctataatgccagcacttttggaggctgaggcagacagatcacctgaagtcaggagttcaagaccagcctggccaatatgtgaaaccctgtctctactaaaaatacaaaaattagcccggcatggtggtgcgtgcctgtaatcccagctacccaggaggctgaggcaggagaatcgttggaacccaggaggcagaggttgcagtgaatggagatcgcgccactgcactctagcctgggtgaccagcctgggtgacagagtgagactccgtctcaaaaaaaaaa

SEQ ID NO: 401121 - DNA, 757 bp, Homo sapiens
gttcacggcgtgtaagtaacggagcagagaccgggacgctggtctttggatgttaagtgcaagtggttccattgcccttcagcactggggagagagttgggggccgttttcttcttctaagtgatattttggaaccaacacagtactgccccattgccttccccacagccatttctttattacattatttttttcctgctgcttccaacccattctcttctgcacaaaacccccagtttcgctctcccaggctttcacacacattactcaatccacccgaaaagtactctgtactgcttcactcaaactccgacacccagcaagcctttgtcagggcaggaagatgcaaagtgcccctattgcacggttaggctggggctctaatattggccactggtctgcactgggatctcaggcaagtcacgtactgcctctcagcctctaagtgcccttccaattatagtctgccatcccatcaatcagtggatgcaatcctttttaatgagttatccagctaactctcaatgcgtctagataatagaatgctgcaatcttaataaaatgcttctctcctggagaaggctgtttaatggctagaacagtggtggcgaattcaggatcggcggaaggtttgagtgccagtctcctccaatgttagaaatcagtcttggggactccagggactgtgctgctctggcctgatgcctttgcagccctgggtggacctgccctcctctatgggcctcactgtctcccc

SEQ ID NO: 401122 - DNA, 741 bp, Homo sapiens
tgcgaacggactgatcttctggggccatgcgccgaactcgcagacccgcggtctcgagatgaagaaggcgatggacaagctggacctgctggtcgtcatcgatcagtccgttcgcatgttaacatgcgaacggactgatcattgattttttaaaagtgttgtatggaataagtttaaaaacagtgaagaaatggtgacaatttttgtggaattcattggtgccccttaaagaagatcaacacatctttgacgattgtaaaaccagaactgtgaattactttcctaaacaatcctaaacttttagccatcatatgtgtgtgtttaaatgcaatccttgatactatacagacatggaattttagatcagtccgttcgcatgaacatgcgaacggactgatctgggggacgacagggctcagcagtttgttcatcagctccagtaccttgtcagcattctgctcaagtttttaaaattaaggaagcaatcaataaagtaatcaataaaaggaacaactatataatgccccctacccaccaaagagaactttctggggtgacattttttaccgcctcccaagttcaagcaattctcgtgcctcagcctctggaatagctgggactacaggtatgcgtcaccacgcccggctaatttttgtatttttcagtagagatgggatttcaccatgttggccaggctggtctcgaactcctgaactcaggtgatcagtccgttcgcatgtt

SEQ ID NO: 401123 - DNA, 619 bp, Homo sapiens
gactgtcacgacggaccatcgcatctttaaacagtgtcgtatctaataaaatcctgaacggtgaagaaatggtgacaatttttgtggaattcattggtgccccttaaagaagatcaacacatctttgacgattgtaaaaccagaactgtgaattactttcctaaacaatcctaaacttttagccatcatatgtgtgtgtttaaatgcaatccttgatactatacagacatggaattttagatcagtccgttcgcatgaacatgcgaacggactgatctgggggacgacagggctcagcagtttgttcatcagctccagtaccttgtcagcattctgctcaagtttttaaaattaaggaagcaatcaataaagtaatcaataaaaggaacaactatataatgccccctacccaccaaagagaactttctggggtgacattttttaccgcctcccaagttcaagcaattctcgtgcctcagcctctggaatagctgggactacaggtatgcgtcaccacgcccggctaatttttgtatttttcagtagagatgggatttcaccatgttggccaggctggtctcgaactcctgaactcaggtgatcagtccgttcgcatgtt

SEQ ID NO: 401124 - DNA, 258 bp, Homo sapiens
ctgaactcaagccatctgcccaccttggcctctcaaactgctgggattataggtgcgagccattgcgcccggcctgatcattgattttttaaaagtgttgtatggaataagtttaaaaacagtgaagaaatggtgacaatttttgtggaattcattggtgccccttaaagaagatcaacacatctttgacgattgtaaaaccagaactgtgaattactttcctaaacaatcctaaacttttagccatcatatgtgtgt

SEQ ID NO: 401125 - DNA, 689 bp, Homo sapiens
gtgtattttaaaaaaaaatagatggtaatggttatctgataccacttttgaaagaatggcatcacagttttattttgtaaatgtcagtatttataacaatttcaaaattatatattttgcaagtatttaaatttattattaaaaattacatctcaatttaaacattttcaagtgactgcgtaattttccaaaattattttatggagtacatgtgtaaaaagcttagatgcccaacagtatgctgaaagtggagttgttatgtaggagggtgtgtatatccttacctagattttttgccaaattttaagtggttgccttactttgcactcccacaacagtatatgggaattctcttatttccgtattttctcaaacattttgtattgtcaacttttaggtttttgcgtgtccaaagagtgtaaaatgctatcgctttgtgtttttaagtttgcactcccctgattgctagtgagttcctcttctgtgaactgcctgctcatatcttcacccatttttcaattgattaatgtacatatttgtaatgtaaggaactagtttttataggatgttggcctttgcagcttattttggggaaaacacctttaaatttcttttactcttctaattctcaatctagtccttagccaaaaatattccccttaacacaacattcttatttttgatctgct

SEQ ID NO: 401126 - DNA, 461 bp, Homo sapiens
gcggtggccaagaggcctcctgtgccccccaagaggcaagagaacccagggcaccccggcggagcaggaggcggggagcaagatttcatgtcagacctcatgaaagctttgcaaaagaagagaggcaacgtgtcctagggacgggcatgatgagtgttccagagggagaagcatcgctgaccccgagcgcaggttttgctagcagattgccctgacatcttgttcatttcagataaaatgtgatgggaaacttctcactgatgtgctcaagtacaggcataaccattaacccagtagagttcagaatatctgcccaaatgtacatatcgttcccatgtattttaacctaaatggaatgtatcttcccttccaagctgcctaaagcgctgttttaggttcatttattttattatgttcagaagcatcaaataaaagttaaacgtttttccggaaaacggtat

SEQ ID NO: 401127 - DNA, 315 bp, Homo sapiens
cggtatagaaagtcatagaatgggtgaagagttaggagaattgaatgtaaatggatggaatataaaacccagggaggtagatgtattctcaccagtggaaataccaggacaacatttggggatctctcagtagtggacatggtattaatttcctattgtgctacaacaaatttccacaagcttagtgccttaaaacaatgcaaatgtattatctaacacaagggtgtccaaacttttggcttccctgggccacatgggaagaattgtcataaaatacactaaaactagtgaaagctgatgagctttaaaaaaaaa

SEQ ID NO: 401128 - DNA, 423 bp, Homo sapiens
aatcacaggagctcttaaaagcagagaattttctctgcttgcattagaccccaagatggaggaaaaggagaagtcagagaggctctaagtgtgacagactcaaccaccttggctggagtgaagccacctggaaagcaagagaaggcataaaggcaatctttagggagaaaagaccagcctctgaatgacaggagagagaaaaaaaataggaaactcattctgataaccactaggaattgaactgccaacaagttgaatgaatttggaagtgaattcttttctatagccttgaataaggaacgcagccctatcaacaccttctttccagtcttatcagaccctaagcaaaacacccagctgaacccgctcagacttctgacctacataaattgtaagatattaagtttgtgttgtttcaaactg

SEQ ID NO: 401129 - DNA, 418 bp, Homo sapiens
tagggcctaggggatcagctggcataggaagggtgtccagatgggcaatgggccatccacagagaggggcgggggctacacagctatccacgcccagccgtcagggaatgagctgggggggtggcaccaggcagcagccttgtgcagcagccttgtgcaaaagccctggggccttggttgacctcagcgtcgtggcacagctgcctgacaagtagatggggacatgggctgctttaatagaggcagagtgccccatctggggagggagccgcgggtccctgcagactgtgtaggctgcttgctgagctttagacatcagtccttgctccagtgaatgaaagctgaggcctccacctgagcagccctgcctgccccgtgcactttgggcatcgggagtctcagtgaggttgctttagga

SEQ ID NO: 401130 - DNA, 356 bp, Homo sapiens
cacgaggacacctgctttgaaaggatgccatgttcatcaccctcatccttgcccttcacccgttcagcgtaaaggaagatatagaatctctttccagattgattgattgaaaccaaatagatcaacactctcccagcaccttttagattttccttgtcaacagaagaccccagggccatcccatgtccatcacagtgaaggtgatggaagcctcaccgtttatcccggtcctggggtcatcacagaagcaccctagtcagccacacataatgtataatggatcatttcccaagctccctcaaatgctaggaagacattttgagaagtagtggggtagagtagcagtttcatccacc

SEQ ID NO: 401131 - DNA, 493 bp, Homo sapiens
tgagctcagaccttggcgattccagagtgtctgaggcccagagccagccccgccagcacggccagacgaaaggaaaggggggaggtggcagggtgggcaccaggaagccattccgagggggctggcagggaagctgggttctagctttgttctttctgctcctcttctggaccccacagacttcctcctgggacctccgtgagccctggccaaaggctgtccccaccctttagccctttcctcagaggggattggaccagcactaacgagaagttactttggggccctgagacccccacgtttgcaagggaggctgggaaagagctggaaggcctgggctccggctccacccggcctccatcgtcagtgtgacccggcagggccacctctctccctcagcctcggtatctcgctctacgcaggcctccccgccccgccccgcccggaggaatccgcggccggccagacggtcccaggtgagggccctctggaa

SEQ ID NO: 401132 - DNA, 455 bp, Homo sapiens
aggtgggtggatcacctgaggttgggagttggagaccagcctgaccaacatggagaaaccccatctctactaaaaatacaaaattactgaggcgtggtggtgcatgcctataatctcagctgaggcaggagaattgcttgtacccaggaggtggaggttgcggtgagccgaaatgacgccactggactccggcctgggcaacaagagtggaacaacgtctcaaaaaaataaaaataaaaaacaaaaaaaactgttttgtctcccagcaagagaaaagagactgcccatggctgtgaggcacattcccttgtgggaaagctcttaacataactggcaaatgagttggatgctggcagccctggggttctacatctaggtcttgacaggaatagacactgtctctggactgggctttgtttgcatggtagaagatgcaaacactcagagtgccacta

SEQ ID NO: 401133 - DNA, 517 bp, Homo sapiens
ataaaatgtctgagcatctatgttcatagaaatcatgaccttcacatctttgaggagtgtcagtgaaactatgaatatgatggtataatatttatactgcagcagctctcatatcagccaccttttacattgtcttcacaagcaggtttttgtttggtactttaaatcacaggcgatggaatggggcagtgtaatatgccttaagtctattgtttatgaaattatgtcctcagagttaaaatatgtagaaagtagttgacagcattctgtcatctctcccatgcactgcttttgctgtggatgaaaatgaataagcaactctggaaaccaaggtcctctgggaacataaaaactcctgtggctattaatggatttaattgtatttcctctctgccaccaagatatgcaataaattgtttatgcccttgccgttagtggggagaattgttcattaaacgcatgtaatgtcattattgctttgtttttattacttgtaggtagtcctatctctcctttt

SEQ ID NO: 401134 - DNA, 425 bp, Homo sapiens
tttgtggcaaggcaagtaggcacacataatttgtctttcttcctcattcttgagagcatcacacttgtctaccttatcgcttctactctttcttttttaacttttgacccacttgtacatgaacttgtaccctaatgtccattctcctatctaatcttcatatctctgggccccagatctcatccatttacatacgtcaccatctacagtgttctctccagtgttggcatagagatttgtgttagcgaatatatatactttgttaaactctcctcgagtagctgctgtgttgtgcttgtgttttccttggccttgccatatgcaattgcatatggcaaggccaaggagttgtgtaaggcagcagacatggtgcagtagaaaaagctacctatggaggtgcccctacttggccttgccatatgcaa

SEQ ID NO: 401135 - DNA, 463 bp, Homo sapiens
tttgtggcaaggcaagtaggcacacataatttgtctttcttcctcattcttgagagcatcacacttgtctaccttatcgcttctactctttcttttttaacttttgacccacttgtacatgaacttgtaccctaatgtccattctcctatctaatcttcatatctctgggccccagatctcatccatttacatacgtcaccatctacagtgttctctccagtgttggcatagagatttgtgttagcgaatatatatactttgttaaactctcctcgagtagctgctgtgttgtgcttgtgttttccttggcctggacaaatccctctctacagcactcacatgtcatgaggacataaattctgcagatgagtggtttgcagatgcagggattgtagaccctgcctgtactccctgttttacatacatggttgtgtcctttaacttatgaggcctcctacattc

SEQ ID NO: 401136 - DNA, 473 bp, Homo sapiens
aaaagtagctagaaactggaaaggttttcatccttggatgaagggcaccgcataggataaactccacatttaaatggcttttccctcaagacattccctggtctgcagggagcaggacagatagaactctagcaggaaatcacagtcttattggcctgagagtgagtttgaggctgccggaggacctggacattgagtgggataagcctttgtgtgaacaaggtgaaccaccaataatttatttaccttttattaaaaaactacatactcttaagaggaggagaacaaatccaaactctctacagcttatcatccaaaatgtctaatacaccataaaaattactaagcaacctgggtgtggtggcatgttcccattgttccagctactcaggaggctgaggtgcgaagatggcttgagcctaggagttcaagacctgcctggacaatataaaaataccttgtcttattaaaaa

SEQ ID NO: 401137 - DNA, 190 bp, Homo sapiens
gtgtgacttttcagcaagaaatctgcttctaaaattctcactatttgtgagggttggagggtaagtaaccagatctgtttgaaattagcttatgtgcttgcattaaggcttttgtaaatattttatgccatttaagttcacagtagaaatggcctaagtatctttttagtagattttagtagaagagtaa

SEQ ID NO: 401138 - DNA, 351 bp, Homo sapiens
gaacacaataccccaaattacagcactttggcaaactgagcatttgaagctgaaggaatttgaggaaaccatagaagcaggaaggtcactctctgaccttctcctgccttcctcttctgcagtgggccactcaaggtttctctgacctgcctctcctgaaagtaggccccaagcccctcattccagagggggtccggtcctgtccgtggagaccatgaagactaaactcacaggccttgctaagttcccactgtgtacatcattggatcaaacccttttgtcctcctgtgacactgctgcttgactgtccataaaaacacaggtgccctgggtcacggttcttcactttgg

SEQ ID NO: 401139 - DNA, 708 bp, Homo sapiens
aaggaatagatgaagagagaacatgaagggaaaaaatgacaagatttggagtccggctctataaattattagtcataactgtagcaacaaaagaaagtgatggattccatcgatttatgcagtcagccaaatatttcaattatactgtgaaggtccttggtcaaggagaagaatggagaggtggtgatggaattaatagtattggagggggccagaaagtgagattaatgaaagaagtcatggaacactatgctgatcaagatgatctggttgtcatgtttactgaatgctttgatgtcatatttgctggtggtccagaagaagttctaaaaaaattccaaaaggcaaaccacaaagtggtctttgcagcagatggaattttgtggccagataaaagactagcagacaagtatcctgttgtgcacattgggaaacgctatctgaattcaggaggatttattggctatgctccatatgtcaaccgtatagttcaacaatggaatctccaggataatgatgatgatcagctcttttacactaaagtttacattgatccactgaaaagggaagctattaacatcacattggatcacaaatgcaaaattttccagaccttaatggagctgtagatgaagtcgtccaccatctgaaatggcaagcagagtaagatacttatgaacattacagtggcattatggaatggcccca

SEQ ID NO: 401140 - DNA, 467 bp, Homo sapiens
  misc_feature (380)..(380): n is a, c, g, or t
  misc_feature (433)..(433): n is a, c, g, or t
  misc_feature (455)..(455): n is a, c, g, or t
taaccccatcgtgagtcaaggagcatctgtaaaatgtgtaaatctattcactgtaagattacttaagttttaaaatcctgaggtacaatatttcataaataaaaattttgtatttcatagaatgacataagcatattcagaaccaggcaaagattaggctatatactgtgatttctgaaaattactattttgtccactatacataatcatttataagttgaataatttctaaaatgcatatgctttatacttttcagtgaagtatttataaagatatttgttttaatatgtacttctttttataggactggaaggaaaagtatataaaccgtgattattcaaagattttcactgaaaatatagttgaacagccctgccanaaggcttttgggcataccgcaaaatgggctggggggaaaaccatcatggaagnccgatctggggggtatttgtcnctggatgatttc

SEQ ID NO: 401141 - DNA, 3753 bp, Homo sapiens
agcgggctgctccgtgcctccaccgacgacctcactcagctgcgttacgcgccgctccggctgccggccgcgcgccttgcccgccggctcccgcccgcaatcggcggctcagggcggacccgggtctctgcgttctcgcgagaagcgcggcgctgcggggccgtgggcgcctgagcccgcgcggccctcgagggccgaatatggggggatgcacggtgaagcctcagctgctgctcctggcgctcgtcctccacccctggaatccctgtctgggtgcggactcggagaagccctcgagcatccccacagataaattattagtcataactgtagcaacaaaagaaagtgatggattccatcgatttatgcagtcagccaaatatttcaattatactgtgaaggtccttggtcaaggagaagaatggagaggtggtgatggaattaatagtattggagggggccagaaagtgagattaatgaaagaagtcatggaacactatgctgatcaagatgatctggttgtcatgtttactgaatgctttgatgtcatatttgctggtggtccagaagaagttctaaaaaaattccaaaaggcaaaccacaaagtggtctttgcagcagatggaattttgtggccagataaaagactagcagacaagtatcctgttgtgcacattgggaaacgctatctgaattcaggaggatttattggctatgctccatatgtcaaccgtatagttcaacaatggaatctccaggataatgatgatgatcagctcttttacactaaagtttacattgatccactgaaaagggaagctattaacatcacattggatcacaaatgcaaaattttccagaccttaaatggagctgtagatgaagttgttttaaaatttgaaaatggcaaagccagagctaagaatacattttatgaaacattaccagtggcaattaatggaaatggacccaccaagattctcctgaattattttggaaactatgtacccaattcatggacacaggataatggctgcactctttgtgaattcgatacagtcgacttgtctgcagtagatgtccatccaaacgtatcaataggtgtttttattgagcaaccaaccccttttctacctcggtttctggacatattgttgacactggattacccaaaagaagcacttaaactttttattcataacaaagaagtttatcatgaaaaggacatcaaggtattttttgataaagctaagcatgaaatcaaaactataaaaatagtaggaccagaagaaaatctaagtcaagcggaagccagaaacatgggaatggacttttgccgtcaggatgaaaagtgtgattattactttagtgtggatgcagatgttgttttgacaaatccaaggactttaaaaattttgattgaacaaaacagaaagatcattgctcctcttgtaactcgtcatggaaagctgtggtccaatttctggggagcattgagtcctgatggatactatgcacgatctgaagattatgtggatattgttcaagggaatagagtaggagtatggaatgtcccatatatggctaatgtgtacttaattaaaggaaagacactccgatcagagatgaatgaaaggaactattttgttcgtgataaactggatcctgatatggctctttgccgaaatgctagagaaatgactttacaaagggaaaaagactcccctactccggaaacattccaaatgctcagccccccaaagggtgtatttatgtacatttctaatagacatgaatttggaaggctattatccactgctaattacaatacttcccattataacaatgacctctggcagatttttgaaaatcctgtggactggaaggaaaagtatataaaccgtgattattcaaagattttcactgaaaatatagttgaacagccctgtccagatgtcttttggttccccatattttctgaaaaagcctgtgatgaattggtagaagaaatggaacattacggcaaatggtctgggggaaaacatcatgatagccgtatatctggtggttatgaaaatgtcccaactgatgatatccacatgaagcaagttgatctggagaatgtatggcttcattttatccgggagttcattgcaccagttacactgaaggtctttgcaggctattatacgaagggatttgcactactgaattttgtagtaaaatactcccctgaacgacagcgttctcttcgtcctcatcatgatgcttctacatttaccataaacattgcacttaataacgtgggagaagactttcagggaggtggttgcaaatttctaaggtacaattgctctattgagtcaccacgaaaaggctggagcttcatgcatcctgggagactcacacatttgcatgaaggacttcctgttaaaaatggaacaagatacattgcagtgtcatttatagatccctaagttatttacttttcattgaattgaaatttattttgggtgaatgactggcatgaacacgtctttgaagttgtggctgagaagatgagaggaatatttaaataacatcaacagaacaacttcactttgggccaaacatttgaaaaactttttataaaaaattgtttgatatttcttaatgtctgctctgagccttaaaacacagattgaagaagaaaagaaagaaaaaacttaaatatttatttctatgctttgttgcctctgagaataatgacaatttatgaatttgtgtttcaaattgataaaatatttaggtacaaataacaagactaataatattttcttatttaaaaaaagcatgggaagatttttatttatcaaaatatagaggaaatgtagacaaaatggatataaatgaaaattaccatgttgtaaaaccttgaaaatcagattctaactggatttgtatgcaactaagtatttttctgaacacctatgcaggtcttatttacagtagttactaagggaacacacaaagaattacacaacgttttcctcaagaaaatggtacaaaacacaaccgaggagcgtatacagttgaaaacattttgttttgattggaaggcagattattttatattagtattaaaaatcaaaccctatgtttctttcagatgaatcttccaaagtggattatattaagcaggtattagatttaggaaaacctttccatttcttaaagtattatcaagtgtcaagatcagcaagtgtccttaagtcaaacaggttttttttgttgttgtttttgctttgtttccttttttagaaagttctagaaaataggaaaacgaaaaatttcattgagatgagtagtgcatttaattattttttaaaaaactttttaagtacttgaattttatatcaggaaaacaaagttgttgagccttgcttcttccgttttgccctttgtctcgctccttattctttttttggggggagggttatttgcttttttatcttcctggcataatttccattttattcttctgagtgtctatgttaacttccctctatcccgcttataaaaaaattctccaacaaaaatacttgttgacttgatgttttatcacttctctaagtaaggttgaaatatccttattgtagctactgtttttaatgtaaaggttaaacttgaaaagaaattcttaatcacggtgccaaaattcattttctaacaccatgtgttagaaaattataaaaaataaaataattttagaaa

SEQ ID NO: 401142 - DNA, 2666 bp, Homo sapiens
atagcagcggcggtgccccgtgtttccgtgatggtcgatctctagagctatccccgttgaacagcacagcccactggattacccaaaagaagcacttaaactttttattcataacaaagaagtttatcatgaaaaggacatcaaggtattttttgataaagctaagcatgaaatcaaaactataaaaatagtaggaccagaagaaaatctaagtcaagcggaagccagaaacatgggaatggacttttgccgtcaggatgaaaagtgtgattattactttagtgtggatgcagatgttgttttgacaaatccaaggactttaaaaattttgattgaacaaaacagaaagatcattgctcctcttgtaactcgtcatggaaagctgtggtccaatttctggggagcattgagtcctgatggatactatgcacgatctgaagattatgtggatattgttcaagggaatagagtaggagtatggaatgtcccatatatggctaatgtgtacttaattaaaggaaagacactccgatcagagatgaatgaaaggaactattttgttcgtgataaactggatcctgatatggctctttgccgaaatgctagagaaatgactttacaaagggaaaaagactcccctactccggaaacattccaaatgctcagccccccaaagggtgtatttatgtacatttctaatagacatgaatttggaaggctattatccactgctaattacaatacttcccattataacaatgacctctggcagatttttgaaaatcctgtggactggaaggaaaagtatataaaccgtgattattcaaagattttcactgaaaatatagttgaacagccctgtccagatgtcttttggttccccatattttctgaaaaagcctgtgatgaattggtagaagaaatggaacattacggcaaatggtctgggggaaaacatcatgatagccgtatatctggtggttatgaaaatgtcccaactgatgatatccacatgaagcaagttgatctggagaatgtatggcttcattttatccgggagttcattgcaccagttacactgaaggtctttgcaggctattatacgaagggatttgcactactgaattttgtagtaaaatactcccctgaacgacagcgttctcttcgtcctcatcatgatgcttctacatttaccataaacattgcacttaataacgtgggagaagactttcagggaggtggttgcaaatttctaaggtacaattgctctattgagtcaccacgaaaaggctggagcttcatgcatcctgggagactcacacatttgcatgaaggacttcctgttaaaaatggaacaagatacattgcagtgtcatttatagatccctaagttatttacttttcattgaattgaaatttattttgggtgaatgactggcatgaacacgtctttgaagttgtggctgagaagatgagaggaatatttaaataacatcaacagaacaacttcactttgggccaaacatttgaaaaactttttataaaaaattgtttgatatttcttaatgtctgctctgagccttaaaacacagattgaagaagaaaagaaagaaaaaacttaaatatttatttctatgctttgttgcctctgagaataatgacaatttatgaatttgtgtttcaaattgataaaatatttaggtacaaataacaagactaataatattttcttatttaaaaaaagcatgggaagatttttatttatcaaaatatagaggaaatgtagacaaaatggatataaatgaaaattaccatgttgtaaaaccttgaaaatcagattctaactggatttgtatgcaactaagtatttttctgaacacctatgcaggtcttatttacagtagttactaagggaacacacaaagaattacacaacgttttcctcaagaaaatggtacaaaacacaaccgaggagcgtatacagttgaaaacattttgttttgattggaaggcagattattttatattagtattaaaaatcaaaccctatgtttctttcagatgaatcttccaaagtggattatattaagcaggtattagatttaggaaaacctttccatttcttaaagtattatcaagtgtcaagatcagcaagtgtccttaagtcaaacaggttttttttgttgttgtttttgctttgtttccttttttagaaagttctagaaaataggaaaacgaaaaatttcattgagatgagtagtgcatttaattattttttaaaaaactttttaagtacttgaattttatatcaggaaaacaaagttgttgagccttgcttcttccgttttgccctttgtctcgctccttattctttttttggggggagggttatttgcttttttatcttcctggcataatttccattttattcttctgagtgtctatgttaacttccctctatcccgcttataaaaaaattctccaacaaaaatacttgttgacttgatgttttatcacttctctaagtaaggttgaaatatccttattgtagctactgtttttaatgtaaaggttaaacttgaaaagaaattcttaatcacggtgccaaaattcattttctaacaccatgtgttagaaaattataaaaaataaaataattttagaaa

SEQ ID NO: 401143 - DNA, 4335 bp, Homo sapiens
agcgggctgctccgtgcctccaccgacgacctcactcagctgcgttacgcgccgctccggctgccggccgcgcgccttgcccgccggctcccgcccgcaatcggcggctcagggcggacccgggtctctgcgttctcgcgagaagcgcggcgctgcggggccgtgggcgcctgagcccgcgcggccctcgagggccgaatatggggggatgcacggtgaagcctcagctgctgctcctggcgctcgtcctccacccctggaatccctgtctgggtgcggactcggagaagccctcgagcatccccacagataaattattagtcataactgtagcaacaaaagaaagtgatggattccatcgatttatgcagtcagccaaatatttcaattatactgtgaaggtccttggtcaaggagaagaatggagaggtggtgatggaattaatagtattggagggggccagaaagtgagattaatgaaagaagtcatggaacactatgctgatcaagatgatctggttgtcatgtttactgaatgctttgatgtcatatttgctggtggtccagaagaagttctaaaaaaattccaaaaggcaaaccacaaagtggtctttgcagcagatggaattttgtggccagataaaagactagcagacaagtatcctgttgtgcacattgggaaacgctatctgaattcaggaggatttattggctatgctccatatgtcaaccgtatagttcaacaatggaatctccaggataatgatgatgatcagctcttttacactaaagtttacattgatccactgaaaagggaagctattaacatcacattggatcacaaatgcaaaattttccagaccttaaatggagctgtagatgaagttgttttaaaatttgaaaatggcaaagccagagctaagaatacattttatgaaacattaccagtggcaattaatggaaatggacccaccaagattctcctgaattattttggaaactatgtacccaattcatggacacaggataatggctgcactctttgtgaattcgatacagtcgacttgtctgcagtagatgtccatccaaacgtatcaataggtgtttttattgagcaaccaaccccttttctacctcggtttctggacatattgttgacactggattacccaaaagaagcacttaaactttttattcataacaaagaagtttatcatgaaaaggacatcaaggtattttttgataaagctaagcatgaaatcaaaactataaaaatagtaggaccagaagaaaatctaagtcaagcggaagccagaaacatgggaatggacttttgccgtcaggatgaaaagtgtgattattactttagtgtggatgcagatgttgttttgacaaatccaaggactttaaaaattttgattgaacaaaacagaaagatcattgctcctcttgtaactcgtcatggaaagctgtggtccaatttctggggagcattgagtcctgatggatactatgcacgatctgaagattatgtggatattgttcaagggaatagagtaggagtatggaatgtcccatatatggctaatgtgtacttaattaaaggaaagacactccgatcagagatgaatgaaaggaactattttgttcgtgataaactggatcctgatatggctctttgccgaaatgctagagaaatgactttacaaagggaaaaagactcccctactccggaaacattccaaatgctcagccccccaaagggtgtatttatgtacatttctaatagacatgaatttggaaggctattatccactgctaattacaatacttcccattataacaatgacctctggcagatttttgaaaatcctgtggactggaaggaaaagtatataaaccgtgattattcaaagattttcactgaaaatatagttgaacagccctgtccagatgtcttttggttccccatattttctgaaaaagcctgtgatgaattggtagaagaaatggaacattacggcaaatggtctgggggaaaacatcatgatagccgtatatctggtggttatgaaaatgtcccaactgatgatatccacatgaagcaagttgatctggagaatgtatggcttcattttatccgggagttcattgcaccagttacactgaaggtctttgcaggctattatacgaagggatttgcactactgaattttgtagtaaaatactcccctgaacgacagcgttctcttcgtcctcatcatgatgcttctacatttaccataaacattgcacttaataacgtgggagaagactttcagggaggtggttgcaaatttctaaggtacaattgctctattgagtcaccacgaaaaggctggagcttcatgcatcctgggagactcacacatttgcatgaaggacttcctgttaaaaatggaacaagatacattgcagtgtcatttatagatccctaagttatttacttttcattgaattgaaatttattttgggtgaatgactggcatgaacacgtctttgaagttgtggctgagaagatgagaggaatatttaaataacatcaacagaacaacttcactttgggccaaacatttgaaaaactttttataaaaaattgtttgatatttcttaatgtctgctctgagccttaaaacacagattgaagaagaaaagaaagaaaaaacttaaatatttatttctatgctttgttgcctctgagaataatgacaatttatgaatttgtgtttcaaattgataaaatatttaggtacaaataacaagactaataatattttcttatttaaaaaaagcatgggaagatttttatttatcaaaatatagaggaaatgtagacaaaatggatataaatgaaaattaccatgttgtaaaaccttgaaaatcagattctaactggatttgtatgcaactaagtatttttctgaacacctatgcaggtcttatttacagtagttactaagggaacacacaaagaattacacaacgttttcctcaagaaaatggtacaaaacacaaccgaggagcgtatacagttgaaaacattttgttttgattggaaggcagattattttatattagtattaaaaatcaaaccctatgtttctttcagatgaatcttccaaagtggattatattaagcaggtattagatttaggaaaacctttccatttcttaaagtattatcaagtgtcaagatcagcaagtgtccttaagtcaaacaggttttttttgttgttgtttttgctttgtttccttttttagaaagttctagaaaataggaaaacgaaaaatttcattgagatgagtagtgcatttaattattttttaaaaaactttttaagtacttgaattttatatcaggaaaacaaagttgttgagccttgcttcttccgttttgccctttgtctcgctccttattctttttttggggggagggttatttgcttttttatcttcctggcataatttccattttattcttctgagtgtctatgttaacttccctctatcccgcttataaaaaaattctccaacaaaaatacttgttgacttgatgttttatcacttctctaagtaaggttgaaatatccttattgtagctactgtttttaatgtaaaggttaaacttgaaaagaaattcttaatcacggtgccaaaattcattttctaacaccatgtgttagaaaattataaaaaataaaataattttagaaagttttgtgttctattattggtgtttatcttccaacgtgaatacatgatggaattgtctgaaaaacacaaaaacaaaaacacacaaaaaaaaaaaaaaaaaaccacaacacaaaaacacaaaagaacaacacaaaaaaaaaaaaaaaacaaggggggggggcacaaaaaagacccaccgagaagacacaaacataagacaccaacatagtaaaacaacacgaccaaaagagagaaaataaaaacagcaaaaaaggagcaaataaaaaacggagaaggacaacacctcccaatacaacgaagagacaccccaacaagggggcgcacatgcagccgcacacctccaccacgaaaacacgcacgcagatcaaccaaaagggagtgacggggccaaccacacacccttactcgcggacgaaacacgccgcgcggatttaaaatacgaacaagacacacaacaatatcgataacaaccgtagcgaccgacagtgcactgacaccggccgaatcgacgcggacgccaaactccacacacaccacaagcacgcagcaaccaccgaacgacaccacacacatgcaccagca

SEQ ID NO: 401144 - DNA, 1948 bp, Homo sapiens
  misc_feature (27)..(27): n is a, c, g, or t
ggacgcgtgggtcgacccacgcgtcgnccacgcgtccgcaatgacctctggcagattttggaaaatcctgtggactggaaggaaaagtatataaaccgtgattattcaaagattttcactgaaaatatagttgaacagccctgtccagatgtcttttggttccccatattttctgaaaaagcctgtgatgaattggtagaagaaatggaacattacggcaaatggtctgggggaaaacatcatgatagccgtatatctggtggttatgaaaatgtcccaactgatgatatccacatgaagcaagttgatctggagaatgtatggcttcattttatccgggagttcattgcaccagttacactgaaggtctttgcaggctattatacgaagggatttgcactactgaattttgtagtaaaatactcccctgaacgacagcgttctcttcgtcctcatcatgatgcttctacatttaccataaacattgcacttaataacgtgggagaagactttcagggaggtggttgcaaatttctaaggtacaattgctctattgagtcaccacgaaaaggctggagcttcatgcatcctgggagactcacacatttgcatgaaggacttcctgttaaaaatggaacaagatacattgcagtgtcatttatagatccctaagttatttacttttcattgaattgaaatttattttgggtgaatgactggcatgaacacgtctttgaagttgtggctgagaagatgagaggaatatttaaataacatcaacagaacaacttcactttgggccaaacatttgaaaaactttttataaaaaattgtttgatatttcttaatgtctgctctgagccttaaaacacagattgaagaagaaaagaaagaaaaaacttaaatatttatttctatgctttgttgcctctgagaataatgacaatttatgaatttgtgtttcaaattgataaaatatttaggtacaaataacaagactaataatattttcttatttaaaaaaagcatgggaagatttttatttatcaaaatatagaggaaatgtagacaaaatggatataaatgaaaattaccatgttgtaaaaccttgaaaatcagattctaactggatttgtatgcaactaagtatttttctgaacacctatgcaggtcttatttacagtagttactaagggaacacacaaagaattacacaacgttttcctcaagaaaatggtacaaaacacaaccgaggagcgtatacagttgaaaacattttgttttgattggaaggcagattattttatattagtattaaaaatcaaaccctatgtttctttcagatgaatcttccaaagtggattatattaagcaggtattagatttaggaaaacctttccatttcttaaagtattatcaagtgtcaagatcagcaagtgtccttaagtcaaacaggttttttttgttgttgtttttgctttgtttccttttttagaaagttctagaaaataggaaaacgaaaaatttcattgagatgagtagtgcatttaattattttttaaaaaactttttaagtacttgaattttatatcaggaaaacaaagttgttgagccttgcttcttccgttttgccctttgtctcgctccttattctttttttggggggagggttatttgcttttttatcttcctggcataatttccattttattcttctgagtgtctatgttaacttccctctatcccgcttataaaaaaattctccaacaaaaatacttgttgacttgatgttttatcacttctctaagtaaggttgaaatatccttattgtagctactgtttttaatgtaaaggttaaacttgaaaagaaattcttaatcacggtgccaaaattcattttctaacaccatgtgttagaaaattataaaaaataaaataattttagaaa

SEQ ID NO: 401145 - DNA, 1841 bp, Homo sapiens
  misc_feature (87)..(87): n is a, c, g, or t
ggggtgactagcaggacctacgtgacacttcagttacactgaaggtcttgcaggctattatacgaagggatttgcactactgaattntgtagtaaaatactcccctgaacgacagcgttctcttcgtcctcatcatgatagccgtatatctggtggttatgaaaatgtcccaactgatgatatccacatgaagcaagttgatctggagaatgtatggcttcattttatccgggagttcattgcaccagttacactgaaggtctttgcaggctattatacgaagggatttgcactactgaattttgtagtaaaatactcccctgaacgacagcgttctcttcgtcctcatcatgatgcttctacatttaccataaacattgcacttaataacgtgggagaagactttcagggaggtggttgcaaatttctaaggtacaattgctctattgagtcaccacgaaaaggctggagcttcatgcatcctgggagactcacacatttgcatgaaggacttcctgttaaaaatggaacaagatacattgcagtgtcatttatagatccctaagttatttacttttcattgaattgaaatttattttgggtgaatgactggcatgaacacgtctttgaagttgtggctgagaagatgagaggaatatttaaataacatcaacagaacaacttcactttgggccaaacatttgaaaaactttttataaaaaattgtttgatatttcttaatgtctgctctgagccttaaaacacagattgaagaagaaaagaaagaaaaaacttaaatatttatttctatgctttgttgcctctgagaataatgacaatttatgaatttgtgtttcaaattgataaaatatttaggtacaaataacaagactaataatattttcttatttaaaaaaagcatgggaagatttttatttatcaaaatatagaggaaatgtagacaaaatggatataaatgaaaattaccatgttgtaaaaccttgaaaatcagattctaactggatttgtatgcaactaagtatttttctgaacacctatgcaggtcttatttacagtagttactaagggaacacacaaagaattacacaacgttttcctcaagaaaatggtacaaaacacaaccgaggagcgtatacagttgaaaacattttgttttgattggaaggcagattattttatattagtattaaaaatcaaaccctatgtttctttcagatgaatcttccaaagtggattatattaagcaggtattagatttaggaaaacctttccatttcttaaagtattatcaagtgtcaagatcagcaagtgtccttaagtcaaacaggttttttttgttgttgtttttgctttgtttccttttttagaaagttctagaaaataggaaaacgaaaaatttcattgagatgagtagtgcatttaattattttttaaaaaactttttaagtacttgaattttatatcaggaaaacaaagttgttgagccttgcttcttccgttttgccctttgtctcgctccttattctttttttggggggagggttatttgcttttttatcttcctggcataatttccattttattcttctgagtgtctatgttaacttccctctatcccgcttataaaaaaattctccaacaaaaatacttgttgacttgatgttttatcacttctctaagtaaggttgaaatatccttattgtagctactgtttttaatgtaaaggttaaacttgaaaagaaattcttaatcacggtgccaaaattcattttctaacaccatgtgttagaaaattataaaaaataaaataattttagaaa

SEQ ID NO: 401146 - DNA, 3664 bp, Homo sapiens
agcgggctgctccgtgcctccaccgacgacctcactcagctgcgttacgcgccgctccggctgccggccgcgcgccttgcccgccggctcccgcccgcaatcggcggctcagggcggacccgggtctctgcgttctcgcgagaagcgcggcgctgcggggccgtgggcgcctgagcccgcgcggccctcgagggccgaatatggggggatgcacggtgaagcctcagctgctgctcctggcgctcgtcctccacccctggaatccctgtctgggtgcggactcggagaagccctcgagcatccccacagataaattattagtcataactgtagcaacaaaagaaagtgatggattccatcgatttatgcagtcagccaaatatttcaattatactgtgaaggtccttggtcaaggagaagaatggagaggtggtgatggaattaatagtattggagggggccagaaagtgagattaatgaaagaagtcatggaacactatgctgatcaagatgatctggttgtcatgtttactgaatgctttgatgtcatatttgctggtggtccagaagaagttctaaaaaaattccaaaaggcaaaccacaaagtggtctttgcagcagatggaattttgtggccagataaaagactagcagacaagtatcctgttgtgcacattgggaaacgctatctgaattcaggaggatttattggctatgctccatatgtcaaccgtatagttcaacaatggaatctccaggataatgatgatgatcagctcttttacactaaagtttacattgatccactgaaaagggaagctattaacatcacattggatcacaaatgcaaaattttccagaccttaaatggagctgtagatgaagttgttttaaaatttgaaaatggcaaagccagagctaagaatacattttatgaaacattaccagtggcaattaatggaaatggacccaccaagattctcctgaattattttggaaactatgtacccaattcatggacacaggataatggctgcactctttgtgaattcgatacagtcgacttgtctgcagtagatgtccatccaaacgtatcaataggtgtttttattgagcaaccaaccccttttctacctcggtttctggacatattgttgacactggattacccaaaagaagcacttaaactttttattcataacaaagaagtttatcatgaaaaggacatcaaggtattttttgataaagctaagcatgaaatcaaaactataaaaatagtaggaccagaagaaaatctaagtcaagcggaagccagaaacatgggaatggacttttgccgtcaggatgaaaagtgtgattattactttagtgtggatgcagatgttgttttgacaaatccaaggactttaaaaattttgattgaacaaaacagaaagatcattgctcctcttgtaactcgtcatggaaagctgtggtccaatttctggggagcattgagtcctgatggatactatgcacgatctgaagattatgtggatattgttcaagggaatagagtaggagtatggaatgtcccatatatggctaatgtgtacttaattaaaggaaagacactccgatcagagatgaatgaaaggaactattttgttcgtgataaactggatcctgatatggctctttgccgaaatgctagagaaatgactttacaaagggaaaaagactcccctactccggaaacattccaaatgctcagccccccaaagggtgtatttatgtacatttctaatagacatgaatttggaaggctattatccactgctaattacaatacttcccattataacaatgacctctggcagatttttgaaaatcctgtggactggaaggaaaagtatataaaccgtgattattcaaagattttcactgaaaatatagttgaacagccctgtccagatgtcttttggttccccatattttctgaaaaagcctgtgatgaattggtagaagaaatggaacattacggcaaatggtctgggggaaaacatcatgatagccgtatatctggtggttatgaaaatgtcccaactgatgatatccacatgaagcaagttgatctggagaatgtatggcttcattttatccgggagttcattgcaccagttacactgaaggtctttgcaggctattatacgaagggatttgcactactgaattttgtagtaaaatactcccctgaacgacagcgttctcttcgtcctcatcatgatgcttctacatttaccataaacattgcacttaataacgtgggagaagactttcagggaggtggttgcaaatttctaaggtacaattgctctattgagtcaccacgaaaaggctggagcttcatgcatcctgggagactcacacatttgcatgaaggacttcctgttaaaaatggaacaagatacattgcagtgtcatttatagatccctaagttatttacttttcattgaattgaaatttattttgggtgaatgactggcatgaacacgtctttgaagttgtggctgagaagatgagaggaatatttaaataacatcaacagaacaacttcactttgggccaaacatttgaaaaactttttataaaaaattgtttgatatttcttaatgtctgctctgagccttaaaacacagattgaagaagaaaagaaagaaaaaacttaaatatttatttctatgctttgttgcctctgagaataatgacaatttatgaatttgtgtttcaaattgataaaatatttaggtacaaataacaagactaataatattttcttatttaaaaaaagcatgggaagatttttatttatcaaaatatagaggaaatgtagacaaaatggatataaatgaaaattaccatgttgtaaaaccttgaaaatcagattctaactggatttgtatgcaactaagtatttttctgaacacctatgcaggtcttatttacagtagttactaagggaacacacaaagaattacacaacgttttcctcaagaaaatggtacaaaacacaaccgaggagcgtatacagttgaaaacattttgttttgattggaaggcagattattttatattagtattaaaaatcaaaccctatgtttctttcagatgaatcttccaaagtggattatattaagcaggtattagatttaggaaaacctttccatttcttaaagtattatcaagtgtcaagatcagcaagtgtccttaagtcaaacaggttttttttgttgttgtttttgctttgtttccttttttagaaagttctagaaaataggaaaacgaaaaatttcattgcaggtaatccgtgagggccctcacggattacctcaattaaaacatttttttaaagaaaacaatgatttccaagatatactattaaggggataaagtaagacacagaggaatactaatatctgtgttagaaagagagggaaagagagagaggtatttatacatcagatacctggaaaggtcccaggaatctgaacatagtaattacctctagaaagagaaactgggtgccctttgaattttgtagcttatgaataaatcaatattcattaatctaaagattccaataacacacagtggttcgtactcaggtcagcacaagattatcaa

SEQ ID NO: 401147 - DNA, 1178 bp, Homo sapiens
gcacgagaaaacacagattgaaggctcagagcaaacatttgaaaaactttttataaaaaattgtttgatatttcttaatgtctgctctgagccttaaaacacagattgaagaagaaaagaaagaaaaaacttaaatatttatttctatgctttgttgcctctgagaataatgacaatttatgaatttgtgtttcaaattgataaaatatttaggtacaaataacaagactaataatattttcttatttaaaaaaagcatgggaagatttttatttatcaaaatatagaggaaatgtagacaaaatggatataaatgaaaattaccatgttgtaaaaccttgaaaatcagattctaactggatttgtatgcaactaagtatttttctgaacacctatgcaggtcttatttacagtagttactaagggaacacacaaagaattacacaacgttttcctcaagaaaatggtacaaaacacaaccgaggagcgtatacagttgaaaacattttgttttgattggaaggcagattattttatattagtattaaaaatcaaaccctatgtttctttcagatgaatcttccaaagtggattatattaagcaggtattagatttaggaaaacctttccatttcttaaagtattatcaagtgtcaagatcagcaagtgtccttaagtcaaacaggttttttttgttgttgtttttgctttgtttccttttttagaaagttctagaaaataggaaaacgaaaaatttcattgagatgagtagtgcatttaattattttttaaaaaactttttaagtacttgaattttatatcaggaaaacaaagttgttgagccttgcttcttccgttttgccctttgtctcgctccttattctttttttggggggagggttatttgcttttttatcttcctggcataatttccattttattcttctgagtgtctatgttaacttccctctatcccgcttataaaaaaattctccaacaaaaatacttgttgacttgatgttttatcacttctctaagtaaggttgaaatatccttattgtagctactgtttttaatgtaaaggttaaacttgaaaagaaattcttaatcacggtgccaaaattcattttctaacaccatgtgttagaaaattataaaaaataaaataattttagaaa

SEQ ID NO: 401148 - DNA, 916 bp, Homo sapiens
  misc_feature (27)..(27): n is a, c, g, or t
ggacgcgtgggtcgacccacgcgtcgngaaatgtagacaaaatggatataaatgaaaattaccatgttgtaaaaccttgaaaatcagattctaactggatttgtatgcaactaagtatttttctgaacacctatgcaggtcttatttacagtagttactaagggaacacacaaagaattacacaacgttttcctcaagaaaatggtacaaaacacaaccgaggagcgtatacagttgaaaacattttgttttgattggaaggcagattattttatattagtattaaaaatcaaaccctatgtttctttcagatgaatcttccaaagtggattatattaagcaggtattagatttaggaaaacctttccatttcttaaagtattatcaagtgtcaagatcagcaagtgtccttaagtcaaacaggttttttttgttgttgtttttgctttgtttccttttttagaaagttctagaaaataggaaaacgaaaaatttcattgagatgagtagtgcatttaattattttttaaaaaactttttaagtacttgaattttatatcaggaaaacaaagttgttgagccttgcttcttccgttttgccctttgtctcgctccttattctttttttggggggagggttatttgcttttttatcttcctggcataatttccattttattcttctgagtgtctatgttaacttccctctatcccgcttataaaaaaattctccaacaaaaatacttgttgacttgatgttttatcacttctctaagtaaggttgaaatatccttattgtagctactgtttttaatgtaaaggttaaacttgaaaagaaattcttaatcacggtgccaaaattcattttctaacaccatgtgttagaaaattataaaaaataaaataattttagaaa

SEQ ID NO: 401149 - DNA, 1471 bp, Homo sapiens
agcgggctgctccgtgcctccaccgacgacctcactcagctgcgttacgcgccgctccggctgccggccgcgcgccttgcccgccggctcccgcccgcaatcggcggctcagggcggacccgggtctctgcgttctcgcgagaagcgcggcgctgcggggccgtgggcgcctgagcccgcgcggccctcgagggccgaatatggggggatgcacggtgaagcctcagctgctgctcctggcgctcgtcctccacccctggaatccctgtctgggtgcggactcggagaagccctcgagcatccccacagataaattattagtcataactgtagcaacaaaagaaagtgatggattccatcgatttatgcagtcagccaaatatttcaattatactgtgaaggtccttggtcaaggagaagaatggagaggtggtgatggaattaatagtattggagggggccagaaagtgagattaatgaaagaagtcatggaacactatgctgatcaagatgatctggttgtcatgtttactgaatgctttgatgtcatatttgctggtggtccagaagaagttctaaaaaaattccaaaaggcaaaccacaaagtggtctttgcagcagatggaattttgtggccagataaaagactagcagacaagtatcctgttgtgcacattgggaaacgctatctgaattcaggaggatttattggctatgctccatatgtcaaccgtatagttcaacaatggaatctccaggataatgatgatgatcagctcttttacactaaagtttacattgatccactgaaaagggaagctattaacatcacattggatcacaaatgcaaaattttccagaccttaaatggagctgtagatgaagttgttttaaaatttgaaaatggcaaagccagagctaagaatacattttatgaaacattaccagtggcaattaatggaaatggacccaccaagattctcctgaattattttggaaactatgtacccaattcatggacacaggataatggctgcactctttgtgaattcgatacagtcgacttgtctgcagtagatgtccatccaaacgtatcaataggtgtttttattgagcaaccaaccccttttctacctcggtttctggacatattgttgacactggattacccaaaagaagcacttaaactttttattcataacaaagaagtttatcatgaaaaggacatcaaggtattttttgataaagctaagcatgaaatcaaaactataaaaatagtaggaccagaagaaaatctaagtcaagcggaagccagaaacatgggaatggacttttgccgtcaggatgaaaagtgtgattattactttagtgtggatgcagatgttgttttgaccgtgccaacggacttgccgccggtggtgtgtactcccccgccagagctttgctccctgcgtgtactgcgtcccggaag

SEQ ID NO: 401150 - DNA, 3690 bp, Homo sapiens
agcgggctgctccgtgcctccaccgacgacctcactcagctgcgttacgcgccgctccggctgccggccgcgcgccttgcccgccggctcccgcccgcaatcggcggctcagggcggacccgggtctctgcgttctcgcgagaagcgcggcgctgcggggccgtgggcgcctgagcccgcgcggccctcgagggccgaatatggggggatgcacggtgaagcctcagctgctgctcctggcgctcgtcctccacccctggaatccctgtctgggtgcggactcggagaagccctcgagcatccccacagataaattattagtcataactgtagcaacaaaagaaagtgatggattccatcgatttatgcagtcagccaaatatttcaattatactgtgaaggtccttggtcaaggagaagaatggagaggtggtgatggaattaatagtattggagggggccagaaagtgagattaatgaaagaagtcatggaacactatgctgatcaagatgatctggttgtcatgtttactgaatgctttgatgtcatatttgctggtggtccagaagaagttctaaaaaaattccaaaaggcaaaccacaaagtggtctttgcagcagatggaattttgtggccagataaaagactagcagacaagtatcctgttgtgcacattgggaaacgctatctgaattcaggaggatttattggctatgctccatatgtcaaccgtatagttcaacaatggaatctccaggataatgatgatgatcagctcttttacactaaagtttacattgatccactgaaaagggaagctattaacatcacattggatcacaaatgcaaaattttccagaccttaaatggagctgtagatgaagttgttttaaaatttgaaaatggcaaagccagagctaagaatacattttatgaaacattaccagtggcaattaatggaaatggacccaccaagattctcctgaattattttggaaactatgtacccaattcatggacacaggataatggctgcactctttgtgaattcgatacagtcgacttgtctgcagtagatgtccatccaaacgtatcaataggtgtttttattgagcaaccaaccccttttctacctcggtttctggacatattgttgacactggattacccaaaagaagcacttaaactttttattcataacaaagaagtttatcatgaaaaggacatcaaggtattttttgataaagctaagcatgaaatcaaaactataaaaatagtaggaccagaagaaaatctaagtcaagcggaagccagaaacatgggaatggacttttgccgtcaggatgaaaagtgtgattattactttagtgtggatgcagatgttgttttgacaaatccaaggactttaaaaattttgattgaacaaaacagaaagatcattgctcctcttgtaactcgtcatggaaagctgtggtccaatttctggggagcattgagtcctgatggatactatgcacgatctgaagattatgtggatattgttcaagggaatagagtaggagtatggaatgtcccatatatggctaatgtgtacttaattaaaggaaagacactccgatcagagatgaatgaaaggaactattttgttcgtgataaactggatcctgatatggctctttgccgaaatgctagagaaatgggtgtatttatgtacatttctaatagacatgaatttggaaggctattatccactgctaattacaatacttcccattataacaatgacctctggcagatttttgaaaatcctgtggactggaaggaaaagtatataaaccgtgattattcaaagattttcactgaaaatatagttgaacagccctgtccagatgtcttttggttccccatattttctgaaaaagcctgtgatgaattggtagaagaaatggaacattacggcaaatggtctgggggaaaacatcatgatagccgtatatctggtggttatgaaaatgtcccaactgatgatatccacatgaagcaagttgatctggagaatgtatggcttcattttatccgggagttcattgcaccagttacactgaaggtctttgcaggctattatacgaagggatttgcactactgaattttgtagtaaaatactcccctgaacgacagcgttctcttcgtcctcatcatgatgcttctacatttaccataaacattgcacttaataacgtgggagaagactttcagggaggtggttgcaaatttctaaggtacaattgctctattgagtcaccacgaaaaggctggagcttcatgcatcctgggagactcacacatttgcatgaaggacttcctgttaaaaatggaacaagatacattgcagtgtcatttatagatccctaagttatttacttttcattgaattgaaatttattttgggtgaatgactggcatgaacacgtctttgaagttgtggctgagaagatgagaggaatatttaaataacatcaacagaacaacttcactttgggccaaacatttgaaaaactttttataaaaaattgtttgatatttcttaatgtctgctctgagccttaaaacacagattgaagaagaaaagaaagaaaaaacttaaatatttatttctatgctttgttgcctctgagaataatgacaatttatgaatttgtgtttcaaattgataaaatatttaggtacaaataacaagactaataatattttcttatttaaaaaaagcatgggaagatttttatttatcaaaatatagaggaaatgtagacaaaatggatataaatgaaaattaccatgttgtaaaaccttgaaaatcagattctaactggatttgtatgcaactaagtatttttctgaacacctatgcaggtcttatttacagtagttactaagggaacacacaaagaattacacaacgttttcctcaagaaaatggtacaaaacacaaccgaggagcgtatacagttgaaaacattttgttttgattggaaggcagattattttatattagtattaaaaatcaaaccctatgtttctttcagatgaatcttccaaagtggattatattaagcaggtattagatttaggaaaacctttccatttcttaaagtattatcaagtgtcaagatcagcaagtgtccttaagtcaaacaggttttttttgttgttgtttttgctttgtttccttttttagaaagttctagaaaataggaaaacgaaaaatttcattgagatgagtagtgcatttaattattttttaaaaaactttttaagtacttgaattttatatcaggaaaacaaagttgttgagccttgcttcttccgttttgccctttgtctcgctccttattctttttttggggggagggttatttgcttttttatcttcctggcataatttccattttattcttctgagtgtctatgttaacttccctctatcccgcttataaaaaaattctccaacaaaaatacttgttgacttgatgttttatcacttctctaagtaaggttgaaatatccttattgtagctactgtttttaatgtaaaggttaaacttgaaaagaaattcttaatcacggtgccaaaattcattttctaacaccatgtgttagaaaattataaaaaataaaataattttagaaa

SEQ ID NO: 401151 - DNA, 2614 bp, Homo sapiens
tcccctgtgaagcacaccccactggattacccaaaagaagcacttaaactttttattcataacaaagaagtttatcatgaaaaggacatcaaggtattttttgataaagctaagcatgaaatcaaaactataaaaatagtaggaccagaagaaaatctaagtcaagcggaagccagaaacatgggaatggacttttgccgtcaggatgaaaagtgtgattattactttagtgtggatgcagatgttgttttgacaaatccaaggactttaaaaattttgattgaacaaaacagaaagatcattgctcctcttgtaactcgtcatggaaagctgtggtccaatttctggggagcattgagtcctgatggatactatgcacgatctgaagattatgtggatattgttcaagggaatagagtaggagtatggaatgtcccatatatggctaatgtgtacttaattaaaggaaagacactccgatcagagatgaatgaaaggaactattttgttcgtgataaactggatcctgatatggctctttgccgaaatgctagagaaatgactttacaaagggaaaaagactcccctactccggaaacattccaaatgctcagccccccaaagggtgtatttatgtacatttctaatagacatgaatttggaaggctattatccactgctaattacaatacttcccattataacaatgacctctggcagatttttgaaaatcctgtggactggaaggaaaagtatataaaccgtgattattcaaagattttcactgaaaatatagttgaacagccctgtccagatgtcttttggttccccatattttctgaaaaagcctgtgatgaattggtagaagaaatggaacattacggcaaatggtctgggggaaaacatcatgatagccgtatatctggtggttatgaaaatgtcccaactgatgatatccacatgaagcaagttgatctggagaatgtatggcttcattttatccgggagttcattgcaccagttacactgaaggtctttgcaggctattatacgaagggatttgcactactgaattttgtagtaaaatactcccctgaacgacagcgttctcttcgtcctcatcatgatgcttctacatttaccataaacattgcacttaataacgtgggagaagactttcagggaggtggttgcaaatttctaaggtacaattgctctattgagtcaccacgaaaaggctggagcttcatgcatcctgggagactcacacatttgcatgaaggacttcctgttaaaaatggaacaagatacattgcagtgtcatttatagatccctaagttatttacttttcattgaattgaaatttattttgggtgaatgactggcatgaacacgtctttgaagttgtggctgagaagatgagaggaatatttaaataacatcaacagaacaacttcactttgggccaaacatttgaaaaactttttataaaaaattgtttgatatttcttaatgtctgctctgagccttaaaacacagattgaagaagaaaagaaagaaaaaacttaaatatttatttctatgctttgttgcctctgagaataatgacaatttatgaatttgtgtttcaaattgataaaatatttaggtacaaataacaagactaataatattttcttatttaaaaaaagcatgggaagatttttatttatcaaaatatagaggaaatgtagacaaaatggatataaatgaaaattaccatgttgtaaaaccttgaaaatcagattctaactggatttgtatgcaactaagtatttttctgaacacctatgcaggtcttatttacagtagttactaagggaacacacaaagaattacacaacgttttcctcaagaaaatggtacaaaacacaaccgaggagcgtatacagttgaaaacattttgttttgattggaaggcagattattttatattagtattaaaaatcaaaccctatgtttctttcagatgaatcttccaaagtggattatattaagcaggtattagatttaggaaaacctttccatttcttaaagtattatcaagtgtcaagatcagcaagtgtccttaagtcaaacaggttttttttgttgttgtttttgctttgtttccttttttagaaagttctagaaaataggaaaacgaaaaatttcattgagatgagtagtgcatttaattattttttaaaaaactttttaagtacttgaattttatatcaggaaaacaaagttgttgagccttgcttcttccgttttgccctttgtctcgctccttattctttttttggggggagggttatttgcttttttatcttcctggcataatttccattttattcttctgagtgtctatgttaacttccctctatcccgcttataaaaaaattctccaacaaaaatacttgttgacttgatgttttatcacttctctaagtaaggttgaaatatccttattgtagctactgtttttaatgtaaaggttaaacttgaaaagaaattcttaatcacggtgccaaaattcattttctaacaccatgtgttagaaaattataaaaaataaaataattttagaaa

SEQ ID NO: 401152 - DNA, 3984 bp, Homo sapiens
agcgggctgctccgtgcctccaccgacgacctcactcagctgcgttacgcgccgctccggctgccggccgcgcgccttgcccgccggctcccgcccgcaatcggcggctcagggcggacccgggtctctgcgttctcgcgagaagcgcggcgctgcggggccgtgggcgcctgagcccgcgcggccctcgagggccgaatatggggggatgcacggtgaagcctcagctgctgctcctggcgctcgtcctccacccctggaatccctgtctgggtgcggactcggagaagccctcgagcatccccacagataaattattagtcataactgtagcaacaaaagaaagtgatggattccatcgatttatgcagtcagccaaatatttcaattatactgtgaaggtccttggtcaaggagaagaatggagaggtggtgatggaattaatagtattggagggggccagaaagtgagattaatgaaagaagtcatggaacactatgctgatcaagatgatctggttgtcatgtttactgaatgctttgatgtcatatttgctggtggtccagaagaagttctaaaaaaattccaaaaggcaaaccacaaagtggtctttgcagcagatggaattttgtggccagataaaagactagcagacaagtatcctgttgtgcacattgggaaacgctatctgaattcaggaggatttattggctatgctccatatgtcaaccgtatagttcaacaatggaatctccaggataatgatgatgatcagctcttttacactaaagtttacattgatccactgaaaagggaagctattaacatcacattggatcacaaatgcaaaattttccagaccttaaatggagctgtagatgaagttgttttaaaatttgaaaatggcaaagccagagctaagaatacattttatgaaacattaccagtggcaattaatggaaatggacccaccaagattctcctgaattattttggaaactatgtacccaattcatggacacaggataatggctgcactctttgtgaattcgatacagtcgacttgtctgcagtagatgtccatccaaacgtatcaataggtgtttttattgagcaaccaaccccttttctacctcggtttctggacatattgttgacactggattacccaaaagaagcacttaaactttttattcataacaaagaagtttatcatgaaaaggacatcaaggtattttttgataaagctaagcatgaaatcaaaactataaaaatagtaggaccagaagaaaatctaagtcaagcggaagccagaaacatgggaatggacttttgccgtcaggatgaaaagtgtgattattactttagtgtggatgcagatgttgttttgacaaatccaaggactttaaaaattttgattgaacaaaacagaaagatcattgctcctcttgtaactcgtcatggaaagctgtggtccaatttctggggagcattgagtcctgatggatactatgcacgatctgaagattatgtggatattgttcaagggaatagagtaggagtatggaatgtcccatatatggctaatgtgtacttaattaaaggaaagacactccgatcagagatgaatgaaaggaactattttgttcgtgataaactggatcctgatatggctctttgccgaaatgctagagaaatgactttacaaagggaaaaagactcccctactccggaaacattccaaatgctcagccccccaaagggtgtatttatgtacatttctaatagacatgaatttggaaggctattatccactgctaattacaatacttcccattataacaatgacctctggcagatttttgaaaatcctgtggactggaaggaaaagtatataaaccgtgattattcaaagattttcactgaaaatatagttgaacagccctgtccagatgtcttttggttccccatattttctgaaaaagcctgtgatgaattggtagaagaaatggaacattacggcaaatggtctgggggaaaacatcatgatagccgtatatctggtggttatgaaaatgtcccaactgatgatatccacatgaagcaagttgatctggagaatgtatggcttcattttatccgggagttcattgcaccagttacactgaaggtctttgcaggctattatacgaagggatttgcactactgaattttgtagtaaaatactcccctgaacgacagcgttctcttcgtcctcatcatgatgcttctacatttaccataaacattgcacttaataacgtgggagaagactttcagggaggtggttgcaaatttctaaggtacaattgctctattgagtcaccacgaaaaggctggagcttcatgcatcctgggagactcacacatttgcatgaaggacttcctgttaaaaatggaacaagatacattgcagtgtcatttatagatccctaagttatttacttttcattgaattgaaatttattttgggtgaatgactggcatgaacacgtctttgaagttgtggctgagaagatgagaggaatatttaaataacatcaacagaacaacttcactttgggccaaacatttgaaaaactttttataaaaaattgtttgatatttcttaatgtctgctctgagccttaaaacacagattgaagaagaaaagaaagaaaaaacttaaatatttatttctatgctttgttgcctctgagaataatgacaatttatgaatttgtgtttcaaattgataaaatatttaggtacaaataacaagactaataatattttcttatttaaaaaaagcatgggaagatttttatttatcaaaatatagaggaaatgtagacaaaatggatataaatgaaaattaccatgttgtaaaaccttgaaaatcagattctaactggatttgtatgcaactaagtatttttctgaacacctatgcaggtcttatttacagtagttactaagggaacacacaaagaattacacaacgttttcctcaagaaaatggtacaaaacacaaccgaggagcgtatacagttgaaaacattttgttttgattggaaggcagattattttatattagtattaaaaatcaaaccctatgtttctttcagatgaatcttccaaagtggattatattaagcaggtattagatttaggaaaacctttccatttcttaaagtattatcaagtgtcaagatcagcaagtgtccttaagtcaaacaggttttttttgttgttgtttttgctttgtttccttttttagaaagttctagaaaataggaaaacgaaaaatttcattgagatgagtagtgcatttaattattttttaaaaaactttttaagtacttgaattttatatcaggaaaacaaagttgttgagccttgcttcttccgttttgccctttgtctcgctccttattctttttttggggggagggttatttgcttttttatcttcctggcataatttccattttattcttctgagtgtctatgttaacttccctctatcccgcttataaaaaaattctccaacaaaaatacttgttgacttgatgttttatcacttctctaagtaaggttgaaatatccttattgtagctactgtttttaatgtaaaggttaaacttgaaaagaaattcttaatcacggtgccaaaattcattttctaacaccatgtgttagaaaattataaaaaataaaataattttagaaaaacaaaacaacaaaaaaaacaaaaaaaaatttgtggggggctcgactggaaaagtttttaaaacattcgttggggcgggcgccatggttattgacttggtcatagtgtccaggaaatcggccagaactcggtgcggtttctcaccattaaaaagccggcgaccgggtttgacaatccatggggtcgagcctaagggtttaaaggggtcaaggatcttccccgtggagggtt

SEQ ID NO: 401153 - DNA, 3793 bp, Homo sapiens
agcgggctgctccgtgcctccaccgacgacctcactcagctgcgttacgcgccgctccggctgccggccgcgcgccttgcccgccggctcccgcccgcaatcggcggctcagggcggacccgggtctctgcgttctcgcgagaagcgcggcgctgcggggccgtgggcgcctgagcccgcgcggccctcgagggccgaatatggggggatgcacggtgaagcctcagctgctgctcctggcgctcgtcctccacccctggaatccctgtctgggtgcggactcggagaagccctcgagcatccccacagataaattattagtcataactgtagcaacaaaagaaagtgatggattccatcgatttatgcagtcagccaaatatttcaattatactgtgaaggtccttggtcaaggagaagaatggagaggtggtgatggaattaatagtattggagggggccagaaagtgagattaatgaaagaagtcatggaacactatgctgatcaagatgatctggttgtcatgtttactgaatgctttgatgtcatatttgctggtggtccagaagaagttctaaaaaaattccaaaaggcaaaccacaaagtggtctttgcagcagatggaattttgtggccagataaaagactagcagacaagtatcctgttgtgcacattgggaaacgctatctgaattcaggaggatttattggctatgctccatatgtcaaccgtatagttcaacaatggaatctccaggataatgatgatgatcagctcttttacactaaagtttacattgatccactgaaaagggaagctattaacatcacattggatcacaaatgcaaaattttccagaccttaaatggagctgtagatgaagttgttttaaaatttgaaaatggcaaagccagagctaagaatacattttatgaaacattaccagtggcaattaatggaaatggacccaccaagattctcctgaattattttggaaactatgtacccaattcatggacacaggataatggctgcactctttgtgaattcgatacagtcgacttgtctgcagtagatgtccatccaaacgtatcaataggtgtttttattgagcaaccaaccccttttctacctcggtttctggacatattgttgacactggattacccaaaagaagcacttaaactttttattcataacaaagaagtttatcatgaaaaggacatcaaggtattttttgataaagctaagcatgaaatcaaaactataaaaatagtaggaccagaagaaaatctaagtcaagcggaagccagaaacatgggaatggacttttgccgtcaggatgaaaagtgtgattattactttagtgtggatgcagatgttgttttgacaaatccaaggactttaaaaattttgattgaacaaaacagaaagatcattgctcctcttgtaactcgtcatggaaagctgtggtccaatttctggggagcattgagtcctgatggatactatgcacgatctgaagattatgtggatattgttcaagggaatagagtaggagtatggaatgtcccatatatggctaatgtgtacttaattaaaggaaagacactccgatcagagatgaatgaaaggaactattttgttcgtgataaactggatcctgatatggctctttgccgaaatgctagagaaatgactttacaaagggaaaaagactcccctactccggaaacattccaaatgctcagccccccaaagggtgtatttatgtacatttctaatagacatgaatttggaaggctattatccactgctaattacaatacttcccattataacaatgacctctggcagatttttgaaaatcctgtggactggaaggaaaagtatataaaccgtgattattcaaagattttcactgaaaatatagttgaacagccctgtccagatgtcttttggttccccatattttctgaaaaagcctgtgatgaattggtagaagaaatggaacattacggcaaatggtctgggggaaaacatcatgatagccgtatatctggtggttatgaaaatgtcccaactgatgatatccacatgaagcaagttgatctggagaatgtatggcttcattttatccgggagttcattgcaccagttacactgaaggtctttgcaggctattatacgaagggatttgcactactgaattttgtagtaaaatactcccctgaacgacagcgttctcttcgtcctcatcatgatgcttctacatttaccataaacattgcacttaataacgtgggagaagactttcagggaggtggttgcaaatttctaaggtacaattgctctattgagtcaccacgaaaaggctggagcttcatgcatcctgggagactcacacatttgcatgaaggacttcctgttaaaaatggaacaagatacattgcagtgtcatttatagatccctaagttatttacttttcattgaattgaaatttattttgggtgaatgactggcatgaacacgtctttgaagttgtggctgagaagatgagaggaatatttaaataacatcaacagaacaacttcactttgggccaaacatttgaaaaactttttataaaaaattgtttgatatttcttaatgtctgctctgagccttaaaacacagattgaagaagaaaagaaagaaaaaacttaaatatttatttctatgctttgttgcctctgagaataatgacaatttatgaatttgtgtttcaaattgataaaatatttaggtacaaataacaagactaataatattttcttatttaaaaaaagcatgggaagatttttatttatcaaaatatagaggaaatgtagacaaaatggatataaatgaaaattaccatgttgtaaaaccttgaaaatcagattctaactggatttgtatgcaactaagtatttttctgaacacctatgcaggtcttatttacagtagttactaagggaacacacaaagaattacacaacgttttcctcaagaaaatggtacaaaacacaaccgaggagcgtatacagttgaaaacattttgttttgattggaaggcagattattttatattagtattaaaaatcaaaccctatgtttctttcagatgaatcttccaaagtggattatattaagcaggtattagatttaggaaaacctttccatttcttaaagtattatcaagtgtcaagatcagcaagtgtccttaagtcaaacaggttttttttgttgttgtttttgctttgtttccttttttagaaagttctagaaaataggaaaacgaaaaatttcattgagatgagtagtgcatttaattattttttaaaaaactttttaagtacttgaattttatatcaggaaaacaaagttgttgagccttgcttcttccgttttgccctttgtctcgctccttattctttttttggggggagggttatttgcttttttatcttcctggcataatttccattttattcttctgagtgtctatgttaacttccctctatcccgcttataaaaaaattctccaacaaaaatacttgttgacttgatgttttatcacttctctaagtaaggttgaaatatccttattgtagctactgtttttaatgtaaaggttaaacttgaaaagaaattcttaatcacggtgtcgggtgtcattttctttctaacatgtgtcaccagttgtgattcgctgggggcgatttattgggtggagaaaagtgggtgctaagagctgtcgcggccgccc

SEQ ID NO: 401154 - DNA, 3611 bp, Homo sapiens
agcgggctgctccgtgcctccaccgacgacctcactcagctgcgttacgcgccgctccggctgccggccgcgcgccttgcccgccggctcccgcccgcaatcggcggctcagggcggacccgggtctctgcgttctcgcgagaagcgcggcgctgcggggccgtgggcgcctgagcccgcgcggccctcgagggccgaatatggggggatgcacggtgaagcctcagctgctgctcctggcgctcgtcctccacccctggaatccctgtctgggtgcggactcggagaagccctcgagcatccccacagataaattattagtcataactgtagcaacaaaagaaagtgatggattccatcgatttatgcagtcagccaaatatttcaattatactgtgaaggtccttggtcaaggagaagaatggagaggtggtgatggaattaatagtattggagggggccagaaagtgagattaatgaaagaagtcatggaacactatgctgatcaagatgatctggttgtcatgtttactgaatgctttgatgtcatatttgctggtggtccagaagaagttctaaaaaaattccaaaaggcaaaccacaaagtggtctttgcagcagatggaattttgtggccagataaaagactagcagacaagtatcctgttgtgcacattgggaaacgctatctgaattcaggaggatttattggctatgctccatatgtcaaccgtatagttcaacaatggaatctccaggataatgatgatgatcagctcttttacactaaagtttacattgatccactgaaaagggaagctattaacatcacattggatcacaaatgcaaaattttccagaccttaaatggagctgtagatgaagttgttttaaaatttgaaaatggcaaagccagagctaagaatacattttatgaaacattaccagtggcaattaatggaaatggacccaccaagattctcctgaattattttggaaactatgtacccaattcatggacacaggataatggctgcactctttgtgaattcgatacagtcgacttgtctgcagtagatgtccatccaaacgtatcaataggtgtttttattgagcaaccaaccccttttctacctcggtttctggacatattgttgacactggattacccaaaagaagcacttaaactttttattcataacaaagaagtttatcatgaaaaggacatcaaggtattttttgataaagctaagcatgaaatcaaaactataaaaatagtaggaccagaagaaaatctaagtcaagcggaagccagaaacatgggaatggacttttgccgtcaggatgaaaagtgtgattattactttagtgtggatgcagatgttgttttgacaaatccaaggactttaaaaattttgattgaacaaaacagaaagatcattgctcctcttgtaactcgtcatggaaagctgtggtccaatttctggggagcattgagtcctgatggatactatgcacgatctgaagattatgtggatattgttcaagggaatagagtaggagtatggaatgtcccatatatggctaatgtgtacttaattaaaggaaagacactccgatcagagatgaatgaaaggaactattttgttcgtgataaactggatcctgatatggctctttgccgaaatgctagagaaatgactttacaaagggaaaaagactcccctactccggaaacattccaaatgctcagccccccaaagggtgtatttatgtacatttctaatagacatgaatttggaaggctattatccactgctaattacaatacttcccattataacaatgacctctggcagatttttgaaaatcctgtggactggaaggaaaagtatataaaccgtgattattcaaagattttcactgaaaatatagttgaacagccctgtccagatgtcttttggttccccatattttctgaaaaagcctgtgatgaattggtagaagaaatggaacattacggcaaatggtctgggggaaaacatcatgatagccgtatatctggtggttatgaaaatgtcccaactgatgatatccacatgaagcaagttgatctggagaatgtatggcttcattttatccgggagttcattgcaccagttacactgaaggtctttgcaggctattatacgaagggatttgcactactgaattttgtagtaaaatactcccctgaacgacagcgttctcttcgtcctcatcatgatgcttctacatttaccataaacattgcacttaataacgtgggagaagactttcagggaggtggttgcaaatttctaaggtacaattgctctattgagtcaccacgaaaaggctggagcttcatgcatcctgggagactcacacatttgcatgaaggacttcctgttaaaaatggaacaagatacattgcagtgtcatttatagatccctaagttatttacttttcattgaattgaaatttattttgggtgaatgactggcatgaacacgtctttgaagttgtggctgagaagatgagaggaatatttaaataacatcaacagaacaacttcactttgggccaaacatttgaaaaactttttataaaaaattgtttgatatttcttaatgtctgctctgagccttaaaacacagattgaagaagaaaagaaagaaaaaacttaaatatttatttctatgctttgttgcctctgagaataatgacaatttatgaatttgtgtttcaaattgataaaatatttaggtacaaataacaagactaataatattttcttatttaaaaaaagcatgggaagatttttatttatcaaaatatagaggaaatgtagacaaaatggatataaatgaaaattaccatgttgtaaaaccttgaaaatcagattctaactggatttgtatgcaactaagtatttttctgaacacctatgcaggtcttatttacagtagttactaagggaacacacaaagaattacacaacgttttcctcaagaaaatggtacaaaacacaaccgaggagcgtatacagttgaaaacattttgttttgattggaaggcagattattttatattagtattaaaaatcaaaccctatgtttctttcagatgaatcttccaaagtggattatattaagcaggtattagatttaggaaaacctttccatttcttaaagtattatcaagtgtcaagatcagcaagtgtccttaagtcaaacaggttttttttgttgttgtttttgctttgtttccttttttagaaagttctagaaaataggaaaacgaaaaatttcattgagatgagtagtgcatttaattattttttaaaaaactttttaagtacttgaattttatatcaggaaaacaaagttgttgagccttgcttcttccgttttgccctttgtctcgctccttattctttttttggggggagggttatttgcttttttatcttcctggcataatttccattttattcttctgagtgtctatgttaacttccctctatcccgcttaatataatccactttggaagattcatctgaaagaaacatagggtttgattgtcgac

SEQ ID NO: 401155 - DNA, 1785 bp, Homo sapiens
agcgggctgctccgtgcctccaccgacgacctcactcagctgcgttacgcgccgctccggctgccggccgcgcgccttgcccgccggctcccgcccgcaatcggcggctcagggcggacccgggtctctgcgttctcgcgagaagcgcggcgctgcggggccgtgggcgcctgagcccgcgcggccctcgagggccgaatatggggggatgcacggtgaagcctcagctgctgctcctggcgctcgtcctccacccctggaatccctgtctgggtgcggactcggagaagccctcgagcatccccacagataaattattagtcataactgtagcaacaaaagaaagtgatggattccatcgatttatgcagtcagccaaatatttcaattatactgtgaaggtccttggtcaaggagaagaatggagaggtggtgatggaattaatagtattggagggggccagaaagtgagattaatgaaagaagtcatggaacactatgctgatcaagatgatctggttgtcatgtttactgaatgctttgatgtcatatttgctggtggtccagaagaagttctaaaaaaattccaaaaggcaaaccacaaagtggtctttgcagcagatggaattttgtggccagataaaagactagcagacaagtatcctgttgtgcacattgggaaacgctatctgaattcaggaggatttattggctatgctccatatgtcaaccgtatagttcaacaatggaatctccaggataatgatgatgatcagctcttttacactaaagtttacattgatccactgaaaagggaagctattaacatcacattggatcacaaatgcaaaattttccagaccttaaatggagctgtagatgaagttgttttaaaatttgaaaatggcaaagccagagctaagaatacattttatgaaacattaccagtggcaattaatggaaatggacccaccaagattctcctgaattattttggaaactatgtacccaattcatggacacaggataatggctgcactctttgtgaattcgatacagtcgacttgtctgcagtagatgtccatccaaacgtatcaataggtgtttttattgagcaaccaaccccttttctacctcggtttctggacatattgttgacactggattacccaaaagaagcacttaaactttttattcataacaaagaagtttatcatgaaaaggacatcaaggtattttttgataaagctaagcatgaaatcaaaactataaaaatagtaggaccagaagaaaatctaagtcaagcggaagccagaaacatgggaatggacttttgccgtcaggatgaaaagtgtgattattactttagtgtggatgcagatgttgttttgacaaatccaaggactttaaaaattttgattgaacaaaacagaaagatcattgctcctcttgtaactcgtcatggaaagctgtggtccaatttctggggagcattgagtcctgatggatactatgcacgatctgaagattatgtggatattgttcaagggaatagagtaggagtatggaatgtcccatatatggctaatgtgtacttaattaaaggaaagacactccgatcagagatgaatgaaaggaactattttgttcgtgataaactggatcctgatatggctctccgccgggatgttacaagtaagaatgtatcataagagggaaaagacctctccctacgtccgaaagcattccaattgactcagcccggacaacgggtgtgcttaaacc

SEQ ID NO: 401156 - DNA, 234 bp, Homo sapiens
ccataggttttgatataaaaagtcttacttttattaatttttaagataatacatttttagtttttgtatcttttttcatataggggttgtttctttaaagtttatctgattttcaagtgattaagttttgcaagggataatcttttagttgctgagtctctgttttattataattggagaatataattcataactctctgcatttggggagattaataaagtagttttatttct

SEQ ID NO: 401157 - DNA, 645 bp, Homo sapiens
tctctccattgatggaaagctataggatcttatttctttaaaaaattctgtaatttggccaggcgcagtggctcacgcctgtaatcccagcactttgggaggccgaggcgggtggatcacctgaggttgggagttcgagactagcctgaccaacatggagaaaccccctctctactaaaaatacaaaattagcctggcgtggtagcacatgcctgtaatcccagctactcgggaggctgaggcaggagagtcgcttgaacccgggaggcagaggttgcggtgaacggagattgtgccattgcactccagcctgggcaacaagagtgaaattctgtctcgataatcaatggagcacttaaaaggcaggttgggctgggcacggtggctcacgcccgtaatcccagcactttggaaggcggaggtgggaggattgcttgaacccagcagttcgaaaccagcctgggccacatagccaggccccatctctacagaaaattacctgggcggtggtgtagccccagctactcgggaggctgacttggggggatggcttgagccccggaagtcgaggctacagtaggacgtgttcccgccactgcactccaggcccgccttccggcgctcagatgagcacagggttcgcag

SEQ ID NO: 401158 - DNA, 415 bp, Homo sapiens
taggagaaaaggtcctctttctgggcgaggaagtcaataaagtaaaggacgcttcataaagtccttcgggaagcaaaacttgcttaacttcacacttccttgaacccccacgcagggaatgcttcctccgggacccggagcaggcaggctgctgtgcctggcaggccggctcctgggtgcaaggctcccgcgcagcccaggacagcagcgcgcgggctacgggcgagtggagttgcaggggcccgggcggagagccgctgtcacccagggaagctctcgggactccgggcctcccgcgaagctccggacgggcgtcaccgaagccgagagtcccggccgagcccctccgcacggtgggcgccgcgcccaggcgagcgcgcgaggtcgggcggggccgggggccgcccggggaggg

SEQ ID NO: 401159 - DNA, 420 bp, Homo sapiens
cctttataagtgttgaagttgggtagtataatttctacaattttgttctttttgaaaatcgtttccaaaccccgtttaattataacacttaaaattttatttccatttgctattataagtccctataatttggctcttgttttcttatttatttatatcttgagtatatttacatggaggtatgtgattatgtgtatgtaggcatttagatatatgaatgtgattatgtctgttctctgagtttctttgtacaaaaagtagaataaatatctatgccctaaaatatcgactagcaaaacaggctgggtaggattaaaatatgtgagtgtcatcccttctcatcaatattcttaaagtatttgttccacatgtatttctctttatattcaaaatgaggaatttgtgatatgtactaaaagc

SEQ ID NO: 401160 - DNA, 624 bp, Homo sapiens
tgcatagtcacaaaaatgtggtgttcagattgagctaacaaaaaggaagtcaggccccagcaaagacagacaagctagaagttagtctttctctctgtatgaaacattaagtctttaccatatcttttctgtccattctttttagacagtgtgcctcggcccatttttgttaaattccctaaaatccaatgtgtctctattaatactgcatagatataatatgaaattatcctccagctccaaaatacaaattcaaaaactatataagaaaattcagataaaactttcaaggtagagtttactttttcaacagaagagcaaaattaatttaagtgtaaatgtacaacaaagtcgagctaatagaaggatggtgaagtaaattttggtattttcgttcttcagatactacagaatttccaaggacttgaggaataattgcactcttgaaagagcctatgaaaaaagaagagacttgggaaatttaacagaagttcactttccaccactgcgcaaactaaggaaaaacttaaagcagtaaatagctgcggttggcaaagctgttttggctcaggagcagctatcaggccttgataaggtccacaagtctgctgttctaaaatcaaa

SEQ ID NO: 401161 - DNA, 284 bp, Homo sapiens
gaattagttatatattttttaataatatattgttttttaatggatgagagagggagatcttaatactacagaatttccaaggacttgaggaataattgcactcttgaaagagcctatgaaaaaagaagagacttgggaaatttaacagaagttcactttccaccactgcgcaaactaaggaaaaacttaaagcagtaaatagctgcggttggcaaagctgttttggctcaggagcagctatcaggccttgataaggtccacaagtctgctgttctaaaatcaaa

SEQ ID NO: 401162 - DNA, 817 bp, Homo sapiens
tcttgtgtatacttgggatgtttctaaccacatttgcctcagttacctaatattttttgcttttcaattgatttctagtttggggatgaagaagaaaaagaatgtaactggcaaaatagccattattttttgcctttattcttatttcacactttctatttttagtttatcttgctttgtaaccaatcctttagaatgtaattacttcttaattggaaggggctaactgccccacagaagaaacttctgtaattagaaaaagagtcccataacatctgatctggttctttcgccctgagcatatttgttggcaatttatggcaaggttgactcactggtgggaagctgcctcactcctaacctgtgctagaaaagctgcctcgttctagaggcagccctgcccctgttaagcccagttctgctgcctcactcctaacctgtgctagaaaagctggctctttctagaggcagtcctgccccctgttaagcccagttctgctgcctcactcctaacctgtgctagaaaagctggctctttctagaggcagccctgccccgttaagcccagttccctctgccctggcatctccacctctactggggcagtttccccagttctcttcccagccagcagcacccctggagccttccttttagtctccggtcacatgagtgaagaggaaattttcctccttctccgagcttaatacagcagttttatatatttaacattgtaggtgatttgcatggcaatgagcttattaggctgttttttgagtgctgccaaacacctaattgattttttcagttttcttcc

SEQ ID NO: 401163 - DNA, 473 bp, Homo sapiens
actccaggtgcctcctgccagaacagatgccagcgtggaggaggtgctttgttaaatggcacttcaatcagccctggggagaacgggttacagagcctcacatccagcctcgacgattcaacagcccgggagggcaaaggtattcaccggggagggcgaaggcttcctctcccaggacagacccgcgcttgggctgcggcctccgtctttattttgaagccctacagggctcgtctctgcagcaggctcagaatgagctattttcgcccacagccaaaatcagcaacagcaaattacactgcaaacaatggcgagggcgcctgctcggctcggctcgaaactccggagaggcagcgcaaagattctgacttttcacttgggcagagcccgtccgccgcctccccgcgctccggctgcgcaccgcgctcgggttccggccacacgccccgaggacagggagacagggcggccgc

SEQ ID NO: 401164 - DNA, 370 bp, Homo sapiens
tctatcagtttttccttcacattttttgaccctctgttgttaggtgcaaacagcttaaggatttctatgtcctgttggaaaactgatccctttatgatcatgtaactcccttctttatccctgataattttttttctttctatgaagtcagtttcgtctgaaattattatgaggattttttttttagacagagccttgctctgtcacccaggctggagtgcagtggcaatcatagtaaaattgacccaactgtccatagaactgatgtttacttttttttggataaacaaagaaattgaccctcccaggtcgggtgcagtggctcacatctgcatcccagcacttttggaggctgaggtgggtggatcac

SEQ ID NO: 401165 - DNA, 164 bp, Homo sapiens
ggtgaaacatggctaaaagcttacggagtaagtggaaaagaaagatgcgtgctgaaaagagaaaaaagaatgccccaaaggaggccagcaggcttaaaagtattctcaaactagacggtgatgttttaatgaaagatgttcaagagatagcaactgtggtggta

SEQ ID NO: 401166 - DNA, 498 bp, Homo sapiens
ctaggtgggaagctccttgcaggcaggaaccccatctccttgactttactttggaatccccgcagcctcatacggggctgaggcaggtccttccgtaaaatggaactgaatgagcggcgcttaatccatccgccaaaggccagtctcccttgggttttcaacagctggagaaatatcaaaagaatctgaatatcaccatctggaagttgtgccatggactccagtgggcaggattcgagctgggattctcttcttcctctagcagtgtatttcttctgcttaaaatgagcacaaacacatctaattccctaatggaccaactcagacctaaaagtctcttattctttgcccgccttcctctacccacatggattcctgggattctctaaatgcagatggcaatggggagggctggggattcccatcaaggatatttgatcatcggtgacttcacttaaccaataaatcaaacgtgttgaaatacacacatgtcagaaa

SEQ ID NO: 401167 - DNA, 447 bp, Homo sapiens
aagaagctcagcaggaggggactgaggagtgggcgagtcagccgctgaatgtgtgcagcactgagcatgggcgaggctgcttgggagaccctgcaagggtttgggggacccttgtgaggactgaccaggaccgcctgtgctctgctcagggcatgtgttgtaaacacgggagactcaggccttgacccagggaacatgggactcagatgcaaattcagtagtcctcgaatttcagtgaaatcggcgttacttagagaactgctcaaaatacagcagaccaagaatttcacttctgaaaggtgaaaagaagtaggtgcactggcttgggacctcggaacccaagaaacaagatggtggtgaattgcctgggttttcttttgccttataaattccagacttggagctaaacaagccagcaacccagaaacaccaatgaacacagatgga

SEQ ID NO: 401168 - DNA, 399 bp, Homo sapiens
tgatattctatgcagagaatgtatcaaatataattaagaacaaagagatttgtatttgcattttccatctacaaaaccactacatacctcctctcacctggtggttcaagcccatatatatgccatcctcctcatttggggcatccagaagcctccagacttgctgaggatagtgttacagcttgcattttgatcagaacaggaatgaaaagtgacttgaagaagaattgcatttacaacatgcaccatttttgtcattttggaaacatgctgcattttctgattgcagacattttcacatcctaatataggacctgtcagtccccagcacaaattaaacaagggtgaaaggagtctgcaatggctctcttgtcaagacagagggtttggggcactacc

SEQ ID NO: 401169 - DNA, 577 bp, Homo sapiens
ttttttttttttggtagagacagggtcttgcttgttgcccaggctggattccgactcctagcctcaagcaatcctttgccttggcctcccaaagttctgggtttacaggcatgatccaccctgcctggcctaaagtttatcttgatgtgtggtgtaaagtttagcgggattatctttcctattttgactaattagagatgtttgatagaaaaaaaacagaatttttctatgtttattttttctttgttttatttttatttcccattatggcctaggctgttgaatatttactaaatactacgcagacatttcaaattataggtaaagcattaaaagatggtaaggtgtcaaaggaaaaatgattaaagatgcgcactattcttgcaagagatcagttgaaaatattttactgaatgttgtacttatattttccatgcattagtagtatgagccacattctatcaacttcacatttactcatttggagtaatgacactggtttctgctgtcaggaagtttatagtgtagaatattcacttaaatcggtgaatcacatgttataatgtctatgcctgca

SEQ ID NO: 401170 - DNA, 1239 bp, Homo sapiens
gtattttggaaaaatggtagagaagtgcagagtcaagtcatagcgactaataatgggttattttcttaaattgtatgcttatgttaattctcacagtctttttgtttgggtctgtgacagatcttacaaaagatcttttagacctatgattcttaacaaaattaaagaattaagtcggaaccaattttccacaatgtctcatctaagaaaggactcacagcccagcagcccaggagatgacgcaatggacaggagtgggctccctgaccttcaaggaagatttgagctatctgggaaaaacagacagtatccactggatgcattggaaccccaacccagcattggggatattaaggacattaagaccccaagtttagtattcttgtgtttcatatttgatgggttacaccaggcattactgagtgttggtgtgagcaagaggtctaatactgtggttgggaatgagaacgaggaaaggggtactccttatgctagcagattcaaagatatgcctaactttattgcccttgagaagtcatcagttcttccgccactgctgtgaccttttgataggcattgcggctggatcaagtgataagatttgcaccagcagtctccaagttcagagacgattcaaggcaatgatggcatctattggaagactttcacatggtgagagtgctgatctgctaatcagctgcaatgcagaatcagccataggttggatcagctcaagaccgtgggttggagaattaatgttcacacttctatttggagactttgaatcccctctacacaagctacgcaagtcaagttagttgccaagaaagcacagatgacaacctattaatgctgtgagaatgtttctagatcagtgcatggatggctccattgctctacgggccattgtgtctgagatcccagtctttgaggagaaaaaaaacaatggttaaaaaggcattggggaaatattttgagtttgggggtgtactttgccaccccattattggggagctgtcaccacgaatgttcccaaacttagcaacagcggcaaactactgggccaagatgagcaaccccacatttttgggatttaaagctcctgatgttataccaggatcaaccatcacactccctttgcttcaaatggcatctaccccgtaagatcttgaggggggagtgttgggtggaatcatagatccatgcactcctaacatgaactaattctcattatttaaa

SEQ ID NO: 401171 - DNA, 1293 bp, Homo sapiens
gtattttggaaaaatggtagagaagtgcagagtcaagtcatagcgactaataatgggttattttcttaaattgtatgcttatgttaattctcacagtctttttgtttgggtctgtgacagatcttacaaaagatcttttagacctatgattcttaacaaaattaaagaattaagtcggaaccaattttccacaatgtctcatctaagaaaggactcacagcccagcagcccaggagatgacgcaatggacaggagtgggctccctgaccttcaaggaagatttgagctatctgggaaaaacagacagtatccactggatgcattggaaccccaacccagcattggggatattaaggacattaaaaaagcagccaagtctatgctagacccagcacataaatctcatttccaccctgtgaccccaagtttagtattcttgtgtttcatatttgatgggttacaccaggcattactgagtgttggtgtgagcaagaggtctaatactgtggttgggaatgagaacgaggaaaggggtactccttatgctagcagattcaaagatatgcctaactttattgcccttgagaagtcatcagttcttccgccactgctgtgaccttttgataggcattgcggctggatcaagtgataagatttgcaccagcagtctccaagttcagagacgattcaaggcaatgatggcatctattggaagactttcacatggtgagagtgctgatctgctaatcagctgcaatgcagaatcagccataggttggatcagctcaagaccgtgggttggagaattaatgttcacacttctatttggagactttgaatcccctctacacaagctacgcaagtcaagttagttgccaagaaagcacagatgacaacctattaatgctgtgagaatgtttctagatcagtgcatggatggctccattgctctacgggccattgtgtctgagatcccagtctttgaggagaaaaaaaacaatggttaaaaaggcattggggaaatattttgagtttgggggtgtactttgccaccccattattggggagctgtcaccacgaatgttcccaaacttagcaacagcggcaaactactgggccaagatgagcaaccccacatttttgggatttaaagctcctgatgttataccaggatcaaccatcacactccctttgcttcaaatggcatctaccccgtaagatcttgaggggggagtgttgggtggaatcatagatccatgcactcctaacatgaactaattctcattatttaaa

SEQ ID NO: 401172 - DNA, 368 bp, Homo sapiens
atatatctggtttatacaatgttggctgttcagaaaaataaagcagagtaaggggatggggtgtaacccatgaagctgcattgtttgctcccagagaggctgtgtttatttcctctgttgcttatatagatcctatagatgcttgttgaatctgctgttattttagtttgagagcaagttgatatagtttcccaacctaatttatagagcccaagaaggttttatttgtccaagtttcttagtttaaatgggaccttcattatcctcacttcttggctttggggtatgagggaatttggaagttcccagattgaacatctgtatcagtgtctttctacctctccctccaccgtatgctgctgtgttgt

SEQ ID NO: 401173 - DNA, 184 bp, Homo sapiens
ttttgttatcttgtcatctaatcttattcacctattttaacaatcataaatggaatcaatttgccaattgatgcagtctgttagaaattgtaaaaacttttgtgttttttagtcctcttgtatttattgcttaaactgttttaaagttcctctgtagtaaccgtaaatgtttctagagttttac

SEQ ID NO: 401174 - DNA, 642 bp, Homo sapiens
agaattcgtgatatttgttacgctgtggcaaagttgttagtaaaactattgcttctcacattttaaaggatagcaatgggcttatttaactcttattccctatatggaaggaaatcttcagaaagctgttgtcttgctgtttcttattgtttgaaacaagttcttcagaagtgagatgaactcaggctagagctagccaacctgcaagcggagatgaaagggaatattgctttgataaaaggaggtgctatctgcctgcagcctgtaattgaaactgattgagagtatgataagtcaggaccattcagggcacaaaaatctgactgttatgctacgtggaatggaagcagttacatgccatggctacaaaacagtagtctttgtaggaaatatcactgtggcctaaaaactttttcaagcattttcctttaaaagttaagacaagacaatgggagctaattcagcagcaaagatcagattaaggatagtactttaccattgtgacaacacctctgcaggtgcttcacctcctcctaacttgacttctgattccagcctttctgtgtaagatttaactcactttgcctgttagtacctgtattagtcagggtttccaaggaaacaaaactaataggatataca

SEQ ID NO: 401175 - DNA, 849 bp, Homo sapiens
aaaagaggtaaagaaggtgggtttgaattcataaaattagctgctaggcctgggagggaggcagtcatttgttgagtgtactctgagtccctgctgtgtgaaggggcctgggtggggttgagcccacatacgtagaagggaagatggggcatatagagggaagtttgaaagttaaaattcctgtccctgctcagaggttttgttgctgactggagcctccacaatgaatcagacccacaaactctcagtccagtgaggaacagtgagatgccaccccaaactcatgatatttgccatgatagaggtggcacaggataccataggaaccctgaggatgtagagatgtcagagaaggcttcacaaaaggtgctgggtaggagtttgtcagacaaaaagaggagagaagtttcttggcaaagggaatagcaacatcaaagacttagggtctaaaaacaatctttctggagaactacacagggttacagctgacctttacaagtaccagggactttgtgtcagtactacttttagccccattttacaggtaagaagacaacctcagaggaagtaagtggtagagctcagattcaagccaagggcagtctggttccagggcctgtgtttttaaacacttgggtgtatctgtgtgtgtatatgtaagaggcagaggaaaagcattgcacaaagagaaagctgcacgcaggcaaaggctatggtattctcagaaaaggtgtgcctggccctctcggtaaagaggccaggctggctgggccgggtgtggtggctcacacctgtaatcccagcactttgggaggccgaggcaggcggatcacgagggcaagagatcga

SEQ ID NO: 401176 - DNA, 274 bp, Homo sapiens
attgcatgctactccctcaaacctttttctggtatcaacaacacatcttggctggtggaaactgcttaataacatttgcatgaaaatgtgtttagtcaaggtacccttttctcctctggccaaatatcagcattcaatctaatacaaaacacttgaattctctctggcagaaaatgcaatcctgagggatacgacaaaaaaaaataaaagctattttctgcctgattaatctgttcattagctacagggatctagaattagaagctaatgtaca

SEQ ID NO: 401177 - DNA, 366 bp, Homo sapiens
attgcatgctactccctcaaacctttttctggtatcaacaacacatcttggctggtggaaactgcttaataacatttgcatgaaaatgtgtttagtcaaggtacccttttctcctctggccaaatatcagcattcaatctaatacaaaacacttgaattctctctggcagaaaatgcaatcctgagggatacgacaaaaaaaaataaaagctattttctgcctgattaatctgttcattagcttctaatttctagatccctgtagctacaaaatgcctgtccttcagagacttaggccaattttgcctataagcctatgagttagcatatgtcttcacagtatcttggagtggctggaggtagagt

SEQ ID NO: 401178 - DNA, 498 bp, Homo sapiens
ccttgtgttttgcccgcctcggcctcccaaactgctgggattacaggcgtgagccatggcgcctggccccaaatcactttcaagtgcacttaaattagagggacagcatctaagtgtttagcaaaatgtggatattaaagaggaatatacatcgtcctgtgaggtagtgaaaaaagcaagacatggaaaactgttaaatattttcaagttttaaaaggcaaccgtaaccaaagtgttgtcatgactgagcaaaattgtgatgaccaaaaaataaagaaagaaataaattgtgacgacttatgaaaaattagttgaaattacaatttaaaaatatatgatgtttgtgcctctaggtcaaaactttaactgatttggttaaaaaattagagtactaagttcattttaagttacatgtttagtttggtgatttccctcccaattacaatgaaatcctaattgttgcaaaatgctaaataaatagattaaaaagtaatcaaa

SEQ ID NO: 401179 - DNA, 418 bp, Homo sapiens
gttgtttttacttattcccatccttcctacccttcttttcccatttataagtccctcccttctccctgtctcttttcctgtccttctcctcacctacttgcctttgtttgcccttcttttccattctccctttaatttctacctctttcctctccacaacttctaccttttccttcccaccatagaaaggagaatgggatattttttattatcacagctggaaaaaaatttttttgggggggatagagtctcactctgtcacccacgctggaatgcagtggtgccatcttggctcactgcaacctccacctcccaggttcaagcgattcttctgcctcagctactgggatgttcacttgagcctaggagccgtaatagcaccactgcactcctgcctaggtgacaatgagactgcttc

SEQ ID NO: 401180 - DNA, 1117 bp, Homo sapiens
agccgagattgtgccactgcactccagcctgagcgacagagcgagactccatctcaaaaaaaaaaaaatgttatcagtacttactcattgtgatgtctacatatagaactaaaattctgtttacttatgtgagtctttggctagagacatagaatttcagtcttgactgtgtgagcttaatttctggcatgtgggtttttattggctgcagaggaaacatctctagcagagatgacctatccctcaaatgtaggaaatacctgtgtaaacctaacacctgtgactcagaatagaaatggtaccaagtgagtggcttcttagcccatcagtaaagttatcacaccttggcctcccaaagtgctgggattacaggcctgagccactgtgccaggcctttgccatcagtttttaaaggaaatagtcactgagcactggatgctaggtggcaggttttttctttcagcttttttttttttttaaagccatcatactttaatatctttcagcactgtcaggttatcttctggcttctattatttctgttgagaatttagcccaggcatgggggcttatacccgtaatcccagcactttggaaggccacagtgggcagatcacgtgagcccaggagttggagaccagcctggccaacagggtgagaccttgtagctacatgtggtagccctttttcagtacattggccagtccagctcagctggatgtcatttacatatgtgtcttatattttagatacaaaagacttcttaaaagcttagagcataacacaaatatttatttgattgcgccatctaacaaatctgaataaatacatttcacgtctaggcattgcgttttgtatttctctaaaccagtgtgggcgtgtgtgtatgtgtgtatcactttacccagccacagcaagtgattatggatgaaatggctacagcaaagctaaaactatgatatgcctttgagaaaaaagttctgagctgagtgcattgtctcatggctgtaatcccagcactttgggtggcaaaccatgggaggattgcttgaggccaggagttcgagaccagcctgggaaatatagctagatcctgtctctgttggccaggcacggt

SEQ ID NO: 401181 - DNA, 832 bp, Homo sapiens
  misc_feature (106)..(106): n is a, c, g, or t
  misc_feature (285)..(285): n is a, c, g, or t
  misc_feature (288)..(288): n is a, c, g, or t
aaggcgcacgatgggcgtccgcttcctattcctgggttcaatgtcatgccctcagaggtcattcctctctccaggcaactcatctgggacttacaggaaacatccnatcaattctagtaaaacgataaggtatcctttgacctcagttaagaaataaaacttacgggtgatttttttcccttaaatttttttccagttagaaaataatggaatactcattatttacaaaacctgatatatacagacaagcaaaaaaaaatgttttggtcggccgggcgcagtggntcncgccgtaatcccagcactttggaaggccacagtgggcagatcacgtgagcccaggagttggagaccagcctggccaacagggtgagaccttgtagctacatgtggtagccctttttcagtacattggccagtccagctcagctggatgtcatttacatatgtgtcttatattttagatacaaaagacttcttaaaagcttagagcataacacaaatatttatttgattgcgccatctaacaaatctgaataaatacatttcacgtctaggcattgcgttttgtatttctctaaaccagtgtgggcgtgtgtgtatgtgtgtatcactttacccagccacagcaagtgattatggatgaaatggctacagcaaagctaaaactatgatatgcctttgagaaaaaagttctgagctgagtgcattgtctcatggctgtaatcccagcactttgggtggcaaaccatgggaggattgcttgaggccaggagttcgagaccagcctgggaaatatagctagatcctgtctctgttggccaggcacggt

SEQ ID NO: 401182 - DNA, 282 bp, Homo sapiens
aacaatgaaactgaggccatgagtgccaggttttatctgtggtcacccagccacagccaagcagtgacagatcctgtggcctggggtgctggtaggggagcttgggcaggaaggggcgtgaagggctgtgacttgcaggaggggtgagccttgctctatgagggcccacgacgccaagcccaggctatggtgggagctgagactgcagctcatttattctaaggaagcccttgtgaccatcagagctgcccaatggcagccgcaagcagctgtgggaggtca

SEQ ID NO: 401183 - DNA, 162 bp, Homo sapiens
ccacgctcacccgctgtatggggaaggctgcttccagagcactccggggcgtgtgttgagaatgctggtgctggaatcctagtgcagtaagccaggaatggaaagacttcagtaaatacaactggttagtgtgacgaggccacgggccctttggcctaatga

SEQ ID NO: 401184 - DNA, 393 bp, Homo sapiens
gcatacacggctaatgcccagataagcagcgcctaattgccttcgattcagaggcacaaaggaggccgttcacacctccccggctcctcgatgtctgggggaggggcggggctgcgggccctggttaatggagaggcgatggttcgggatcggtcacctcctttcatctctcccaaccccccaccccgcgggccgaggctgcaggaaggtaggagggtcccactcccacttgggcctgtcctgggaggtgccgggcgacctctcctctccagggggacgctggcgcctgtgcccagcccggacacccgagggcgagcaggcttcaggctgggagagtcagggcggacttaggttgggagcaggcttcggggtgggagagtcaggccggtgccc

SEQ ID NO: 401185 - DNA, 476 bp, Homo sapiens
cagtggaggtggacgggaggagatcgaggagctgggatgggggtcctctagggcaggggtcctagggaaacttctactgtggggtaggtgggctttggtttgggtcatgattttgtcatctatgagccttgtgatttggactattttctttctcaacttcagtttcttcatatgaaaatggagaggataggccgggcgcggtggctcacgcctataatcccagcactttgggaggctgagggggggcggatcgtgagttcaggagatcgagaccatcctggctaacacagtgaaaccccgtctctactaaaaatacaaaaaattagcagggtgtggtggtgggtgcctgtagtcccagctactcgggaggctgaggcaggaaaattgcttgaacccaggaggcggaggttgcagggagccgagattgagccactgcactccagcctgggcaacagatcgagactccatctcaaaaa

SEQ ID NO: 401186 - DNA, 264 bp, Homo sapiens
ggtagcatgagaagagaaacccagagtggctaaatcacttgcctgggagctaatccctggtaactggtagagctgagctgtaagcccaggctcatcccgcttccaagctagagctttcaccattgcactgtgcacacacccgtctccttctcccttctgtccctcatgagtacacacagacccataattttagcaaatacgtcagtggccagagatgccacaacctagcttttacttaatttttgtagccttgtttaccttaaa

SEQ ID NO: 401187 - DNA, 374 bp, Homo sapiens
tgggcagggcccaggcatgagatcagagtcacaacatgtaggtgctgggccaagtgatatgtcacaatgcccactgtagacaggttccaggaagaaaaggagcatcacatcatctaggtgataaaccctgagatatctcacaatgacccctttgtgcagagatcacaaagaagaatcatataacctgtgtgctggatccagtgacagtgtctcctcagtggagtaaaagcctcacggtgtgttgaatcttggtctgagagtcgccaacccactggtggaccggatccacttacaagagtcaatgttcaaactttcaactgtctccagctgtgagattcagaacctcaacagtgagttgtgttcatgtgtgtgga

SEQ ID NO: 401188 - DNA, 1009 bp, Homo sapiens
tgggcagggcccaggcatgagatcagagtcacaacatgtaggtgctgggccaagtgatatgtcacaatgcccactgtagacaggttccaggaagaaaaggagcatcacatcatctaggtgataaaccctgagatatctcacaatgacccctttgtgcagagatcacaaagaagaatcatataacctgtgtgctggatccagtggtatgaaagtcaacacctgtattttgggtctaagtacatgagacacaatggtggacaatctatactgagagcctcaattcttcctgtagacagtgtctcctcagtggagtaaaagcctcacggtgtgttgaatcttggtctgagagtcgccaacccactggtggaccggatccacttacaagagtcaatgttcaaactttcaactgtctccagctgtgagattcagaacctcaacagggatgcaggttatgaagatgagagcgtgagacagcgagctgtaagggaagcaggttacccagggatggacagaggatgggccctggccctcatgttatgaagcttctccacgtggtgccttcctctgtcaaatgggcagaagaatatccttttgatagaattaaaatatacgaaaaccatttaaaaaaaaaaaaaaaaaaaaaaaaaaaaaaaaaaggaaaggacaacaacacaaaaaaagataatcccatcaacgagggagcccacaaaggttaacagcagataccccaagactttcgtggtcaccacaagtggggctcccaaatgaaggagaacccgatattttataaggactacggacgtggacggtaaggttaacaacacgctcgagaacaggggaaacaaccgggctcagccaggggaactcctggcgggaaagggaaaccctatacactgcggggggagggagcccccatcatgtgggacccaacacaaccctaccagaagaaattaaaagaccctaaggggaaaaaaatataacaagtttacaagtgctaaacggcggggta

SEQ ID NO: 401189 - DNA, 608 bp, Homo sapiens
acccaagtgttgagcagaggcagatgttaaaatcactcctgcaggaaggcccagggatgagattaacaatactgaacatgtccttgttttaggtatgaaagtcaacacctgtattttgggtctaagtacatgagacacaatggtggacaatctatactgagagcctcaattcttcctgtagacagtgtctcctcagtggagtaaaagcctcacggtgtgttgaatcttggtctgagagtcgccaacccactggtggaccggatccacttacaagagtcaatgttcaaactttcaactgtctccagctgtgagattcagaacctcaacagtgagttgtgttcatgtgtgtggatgacaatctttattgtgggatgggggtgcatatgagtgttacagtctcatctgtgtactaggccctgttaggacgcttactggcctgaggctttaactggtatgcatgagagtcacaattctctctgagtccctatgttggtattaacccatgatcatacctatggccctgaacccaggtatgagaaccaacatctcttcaactgtctgggtccagataggagagtcttctactggctataagctgggttaagaaa

SEQ ID NO: 401190 - DNA, 847 bp, Homo sapiens
ctcaaatgccctccccccaaactcctatcacctggaagcctctactaggcctgtgccccattccagggaaccctctgctcccatccagggccctcatttcaccccttccctgaagcctgtctgcggctgtccccacctccctccagccaggggagggtgctccctgaccagatggctccacctgtcactccctgtcactatggtggtccttcctcctctgaactctgggaccttgcagaggctgctcaacacctctgagctcgaatctctgctccaggggatgcaggttatgaagatgagagcgtgagacagcgagctgtaagggaagcaggttacccagggatggacagaggatgggccctggccctcatgttatgaagcttctccacgtggtgccttcctctgtcaaatgggcagaagaatatccttttgatagaattaaaatatacgaaaaccatttaaaaaaaaaaaaaaaaaaaaaaaaaaaaaaaaaaggaaaggacaacaacacaaaaaaagataatcccatcaacgagggagcccacaaaggttaacagcagataccccaagactttcgtggtcaccacaagtggggctcccaaatgaaggagaacccgatattttataaggactacggacgtggacggtaaggttaacaacacgctcgagaacaggggaaacaaccgggctcagccaggggaactcctggcgggaaagggaaaccctatacactgcggggggagggagcccccatcatgtgggacccaacacaaccctaccagaagaaattaaaagaccctaaggggaaaaaaatataacaagtttacaagtgctaaacggcggggta

SEQ ID NO: 401191 - DNA, 948 bp, Homo sapiens
gacgccggtgaataacttcccaccgccgcggaaccgggctcagcaaaccccctactgcctcgccccggtgcattgtgcttaatggacgttcgaaggagtcagccacccttgctgtgttctgagaggagcctggagaatgaaggagcccgggcactcaccctcagtggaccctcgcagtgggaggggggtgtcattcttctctcagaattaaggttaatagccgagttcgagttctcaccaaattaatttggggttggagctcagtaagactggttttcaggtaaccgacgagggaccgaaacggccattctgggttgcgtgttacggtgaacagcaaactgcatggatgtttgagcaccctcagtatctgtaactaaaaccctgaaatgcggtctcgctgattgagttgctaccctctggggagactaaaggtgctggactgggtctggtccctttaggagggtctgtgcttggtagaaagtaatcgtgtttcttccaggcagattgtgttgatgacatttaataagagacgtgtgtcctgaccaagtatgattcggaatgttcctctattcccaccacatgtcacattagtcacttcttaaggaaggagtggtcctacaccagttatcagccacccataccctctggcccttttccagccgcagatttctccccatcttcaggtgccacgtctccccatgggtcaccccagccggcatacacaatggtaggccgtctagagtctgcactattctagtattaggctactacagccatgaacaaaacaggcctgccttgggtgaggggatgccctacgtggtcaagggtcctctgcattgatgcacccccctaagagttttccaagaatgtgggtcccaaagaattttgactgtgctctgtggcattctgtatagaaaactgagctccttggctggtttctcaaaaagc

SEQ ID NO: 401192 - DNA, 436 bp, Homo sapiens
aaaaaaaaaggtaaagcatagtggccgtgggcatggagtctgaagacagctatcgggttggaaactggctcctcctccacggctagttatgtaacttggctcagtttcctccgttgtaaaatggggatactggtgccagccacccaagagtcatgaagatgcaatgaatgcatgtatataaagttctttgaacagccctggcagagtaagcccatgctctgctgctgctcctaaccgaggtacctccaccagcatgcataagtgtcactggtagcacagtgaaatgcaggtgctcaggccctgccccagactcttaagatgttagtattaaactctgcttaactgtgatgagaatgtagcatatataaacatatatgaattacatttgaaattgaggaatgatttttaaaataaacttatcaattgttgactagta

SEQ ID NO: 401193 - DNA, 463 bp, Homo sapiens
cactggtattaaaaaccctgacatatagactgtggaagggcatgaagggagggttcttatgcagacatgcttgatagcaagaacaatcacaaaagactgcaaaaatcacagccgtgcacaaagaccatcacaacttacacacacaaacacttctgggaagacatctgcccagtagctgcctgtccagcctcagactggcaccatccttcctggagatccttgtagccaaggatcattgattcaaaacaatgatgtaatcctcctgtttcctttgaaaatctttgtcttcctttaccttccttgacccacacccaatttacgatggcacacatattctattgcaatgaatgttcccgagtaaatctcattttcttttagagagcctctctctgttatttagggtgacagtgggaaaatcccagactgcaaatccttcctcaacaaagggcaaacgtttcctcca

SEQ ID NO: 401194 - DNA, 185 bp, Homo sapiens
ctgaagtccggattcctacacatacactcacacatacacaaggaaactcactcattcccatacacttacccatattcacaaatacagttgccaacacaatcacacaggtgtcgacattcatgaacacatatataaaaatgcataccagaaacatgcacatataattatactcaaagaaccaggta

SEQ ID NO: 401195 - DNA, 919 bp, Homo sapiens
ggaggcagagttcgctgttcaacctttttcagatgaaaactaccacgcttcaaggaggctagcacctcatccatgggtgagctcactttggaaaatgaaacagaacagtattacagttaggactgcacttaattagaatgaaactgtataacctctaccgttcgcaactgtgaaagcacaggacgctgaaacaccatcttcaaaatggatcatgaaatgtgtgcagaaggtgatcagaacacaagggatcctaattatccttctttttagaaaatcccaagacccaatccatggtgggtactgttggtattcctatcatttcctacatgagagaagtgaccagattgggaactgggaggtggtcttagtagtattatgggtgtgattcccaaaggatttccatattgcagttgctccacccaaattcagagtgatggggttacacattttgtttttaaaaattaatttttgtttattatggagactgtgcttttttcatttagttgttttacatgtgaaatcctactcagattacatcaagaaatgttttatagaatggtccttcaggttaaaatgtaatatacaagtaatatgtaacatttatataatgttctccccatgcaaaatgcaaattccttaaaggcaaaaggcaagggttattctctgctctttttagaaataattttatttgtgcttgaatctctcttaacaaaaaaaattagaaaaaaaaatagtaaccttattgaggcacatctgtcacattgtaagttgaacagattactccctgttcttctttgcttctttatacaaatacacaaaagtcctcaacaaatgtatgaacaaatgttacatgatcctgccaatgtcttccctgtggtgacagtccttaccagatatcttaccctttctgatatgagta

SEQ ID NO: 401196 - DNA, 133 bp, Homo sapiens
atcatgcagcgtcttgtttattctgtgatctgtgacccggttctgtggaaaattatatgttcttattttctctgatcttcctttacttccaatctgaatttttctagcattctgtcttttatttatttcttct

SEQ ID NO: 401197 - DNA, 278 bp, Homo sapiens
tctcacaggaaggtgttagataatgggcacaaggaagcaataaagaagacgatattggataacaggcaaaaaggacccaacacaagagagggagtaagagaatcctcaggatggcagttgtgcagcaggctaggtagcaagagttcatattggagcaaatcagaaggctctgcagaaatgtttacaagaagattgatttgatagtatacttgatatatttgaagtattgagagagttagaaaattgtggaagagtttaggaagaaattagaaaagaaa

SEQ ID NO: 401198 - DNA, 643 bp, Homo sapiens
gcaggcaagggactaaggggaggggggctcagtgccagctgcttaaaaatgcccctgtggcagcgaggggcaccagaggctgggtctaattagttgagaagcagtgacacccccaaccactccccaaacaggctggctcccgtctccaggccccaaggagccacacctggaccagaccccaggaaagccaaagatggagactatggtacactcttcacagccaagggcaggggacagaggagaggcggtgcccaggcaggatgcaactatctccaggagatagttagaggatggcagcctatcttgagttctggctgctctgcccaggaggtccctttgaatggccagagatggtctccaatgctgttggcctcctgcagaagaaagagcccaaggctgggaatggaaacccttggttctattcctggctgtgccctaactcttcatatgaccttcaacgcgaccttgaacatgcagcttcctctggcctcagtgtgtccagcgagaggctagacccggccaggcctggtggctcactcctataatcccagcactttgggaggccaaggcaggcggatcatgaggtcaggagtttgagacgagcctgaccaacttggtgaaaccccctccactaaaaatacaa

SEQ ID NO: 401199 - DNA, 506 bp, Homo sapiens
ggcattttcaggtagtggccagaaactagaaactgctcttttctggttaaaaacgtttgtgacccataaaaccttctcactgcttactaaatagcacagttctgagatacaaaccagcaaatttacaaatcacaatgcttttcctgctgaatcaatagctgtagcaaatatatatatgtaaaatgcaatggaaaaatgaagacctctttagaagcctgcagaaaatttatactagatatgaaagtttgagcaatcacgtaaaagccctagtcccttaacattgcttttaaggtcatcagtgtcctggacgttggtgacttccctgcacccatttcttcactccccaccttgaacttcatgtttaactcttatttcttccagtacttagtgaacactgtcttctctctaagccttttcctggaggaacattctcttgtctgacttcctaagtctgagttaagtggtctcctatgtctcctctaataaacttattttaccctgtcaaa

SEQ ID NO: 401200 - DNA, 465 bp, Homo sapiens
ttttcctcctacctcctgccagctccttcttaggctccattgctgggttcttttccccttttgcagtttgagcgtgccagggctctgtcctgggccatctttatttctctaaatacattaactcctgggtaatttcatctagtcccatggagtgacagttaattttatgtgtcaacttggctagcatacggtgcccagttgtttggcagataaaagcatagatgttgctgtgaaggtattttttagatgtgacttacaatgaaatcagtaggctttgagtaaagctagtgaccctccataatgtggatgggcttcatccaattagttgaagaccttagagaaaagatggaggtttcccaaagaggaagcaattctgcacccagaccaccgttagtctcaagattgccacatcaatgcctgcttgaatttccagcctatcagccagccttggagttttcagactta

SEQ ID NO: 401201 - DNA, 571 bp, Homo sapiens
aaatcaaggcataagaaattaagtaattttccaaggttactgtgacataacaaaaaatatatattcagtctttgcctctggttcctggcatagagctcctaaaactcttggaatttcctgaatgatagacgtaagaggagcatatattttgttatttataataagcacctttcaaccacccctgaatttatgctagtgaggtgactcttggaggatgggggctagttgccaggataaccaaccatgtgattagaggattagaacttttaacaccaattccagggaggaaagaagggcaggagattgaattaatcaccaatgatcaatgatttgatccatcatacctatttaatggggcctttataaaaatcctatgctatggggtttggagagcttctgggttggtgaatacattcacatgttgggagcacggtgcacctcaaattccatggggacagaagctctgatgctcaggactcttccagacctcaccctatgtaccccttcatctggttgttcatatgtatcctttataatagcctttgcaataaactggtaattgcaagtaaag

SEQ ID NO: 401202 - DNA, 238 bp, Homo sapiens
cgggtaccctgcgtcactccagtatttaaaggtcatggaggaaggaaagaacctgcaaaggagacagagggtagtagccagtgaggaagaacaatcaagagaggagtcccagagctgggcacggtgactcatgcctgtcatcccagctactcgggagtctgaggtcggaggattgcttgaggccaggacttgaagactagcctgggcaacctagtgagaccctgtctctaaaacagtg

SEQ ID NO: 401203 - DNA, 254 bp, Homo sapiens
actcttcttccagcacctacagcccacactgcttgagtttctgacacaagcctagattccatgtatcctggggtcctcaggacttaggcaccactgcctcacctctggtcgggtggggaaatgcaatgaccaatatttcgactactgctttctctggtgctggtttcactaagccttctgtattgaatatagttaggttagacaaaacaaaacaaaaccaatgcctttaagtaaataaaagcattttatataag

SEQ ID NO: 401204 - DNA, 460 bp, Homo sapiens
tcttcattgaatcctgtatggtcatttctattagaagcagctaactttccacactttgaattctggtagatataatggtgtggagtgaaacgtgagttttattttattattattatattttagaaaaaaagccaatttagtatgcttattaaaagttttccttttttagggcaggcatgatggctcacgcctgtaatcccagcactttgggaggccgaggtgggtggatgacttgaggtcaggtgtttgagacaagcctagcccacatggtggtaccctgcctccacaaaaaagtataaaaattagctgggcatggtggtccacacctgtaatcctagctactctggaggctgaggtaggagaattgcttgaacccggaagacagaggttgtagggagccaagatcgtgccactacacttcagcctgggtgacacaatgggtgagactccatctcacaaa

SEQ ID NO: 401205 - DNA, 604 bp, Homo sapiens
aaaggaatgaggtatattcctccagcttataaattattacagaaataacctgcaatgtggaaaagcatatcacaacaaaagtataagaaacaagttaaatatccaatattagagaaatgcacataaaacagaatattttccaggaaatacaaatgaagtttagaaaaataacacaggaaagggtttataacacaatgttaagcaaagaaggaggcactacaaaaaagatacaagttataaattataatttcaacaatgcaaaaaattacagaagataaatgcttgaataaaatttttaaaaaatggtaacaaaaatggcctctggataatgcaatggtgtttttttggtcactcttctttatattttatgtactttaaaatatttatcaggagtgtacattacgtttcaacagaaaagatctttaattataaaatgaaaccattatgaacatacagaattatataaatgggaaatcatagataaatgttatttggatgattaaaacatttaaatctttgtttaggaaacatcaatacagtaataaaggtcacaagcattcatgattaatttattgagaggatactatgaaaccataaaaatctg

SEQ ID NO: 401206 - DNA, 209 bp, Homo sapiens
taaatcttcatagagaataaatcaattatgtatgtttagtaaagtgtggatttgtaataaaaaagccacagcatgtccctttaatataattgtgcccaaatttaaaaaaaatgaagctaacaaatacaaatgagtaggaaaaaatatttaaactgtaaagtaatatctctggtgtcagaaataaagtccatttccttcagttgtgttat

SEQ ID NO: 401207 - DNA, 265 bp, Homo sapiens
atccagctacagtccttgccttcatgggctttcagcaaagtaatctactcctcacacttaattctcctgagaaggcttcctggatacacttgagaatgaactccactttggttatacagacacatggaactccatcactgctgttgctgagaaaatatcaatggctacattattttcaactgctgcctatgagttatatcagagattaattgatcagctaaatgagaaaatgcagagaatacacaaggaataaatcgatgaagga

SEQ ID NO: 401208 - DNA, 469 bp, Homo sapiens
gattcccagtcctagctctcttctgggcctcttctgtcctagtcattctccgccagtggctacctcttcctttgttctttgccaggttacccctctgtgctccttcctggcccatgatcaatcagttccaggccacagcaggctgattggcttatcacagggctctcatttacatcatagagttctcagtctttctgtccagcacctgctcaaaactccttccttgaaccaaggttcttaatctaagagctctattggtggttcggttgctcagttatttctgtttctgttggtaccacacatatgtctgcaaatgtgcgagatgtgggggagactctctttagtgagaaggggctctgcctgtcaggaaggcctgccctgtacactgctgaggcttgcctacaaaaccccattgtgcctgcggtgaaagaggtcttctcagtttccctctcatgtagaggggaggaaa

SEQ ID NO: 401209 - DNA, 447 bp, Homo sapiens
attatggcatttgggattgtgtcttttgggattatgtcctaaacccaaattctgtcaccaccgactgtctagtgataacatttaaaatggaaagataaaatgacttgattttttttttccctttatttttaactgcatttaaaaaaatagaggctgggcatggtggctcacacctataatcctagcactttgggaagttgaggctggtggattgcttgaactgaggagtttgagaccatcctggtcaatatggtaaaacatcatttctacagaaaaatacaaaaaaattatctgggtgtggtggggcctgcctgtagtcccagctacttgggaggctgagatgggaggatcacctgatcacctgagcctggggaggttaacgctgcagtgagctctgattgtgacacggcactccaccctgggtgatagagtgacaccctgtctcaa

SEQ ID NO: 401210 - DNA, 526 bp, Homo sapiens
tcagaactttggtgcatttgaagtgcctgacaatgtagtccagcttccctcctgttttacctagagggctggagatatgagggcccaaaggggccacaactattatcttaagtggactgaaaggaagacgaaattaaaactagcttctactccacttgtaggaaatgtgcttttaatctttggtgtagcccagccttctaggaacaaaagtatcctatgttggcaactgcagtaacaaaacagttatggagagtatggaggagagccagtaactcctaaaggtcttgttcctttgacttttcttctcaaacaaacatgagatattcatgaattgcaatggcaaacgttttttaggttcgccaatatgaaaatgtaaagcagttttaagatgattaatattaaaataggccaagtgcggtggctcacaactgtaattccagcactttgagagcccaaagtgggaggatcacttggcctccgaagttcaagaccaacctgggcaacacagatgtcatctctagaaaaa

SEQ ID NO: 401211 - DNA, 307 bp, Homo sapiens
gaatttgaaggaaatagagataatgcaggaaacagaaaaaaaaatttaaataacataaaattctcagaggtaagaaacaattataactatgaaacaagaacagaatgctatgcaaacaggaaattactgtatttggaaattgtaaacatgataaccaaaattaaaattttaattgaaagactggaaaataaaacaaaggtaatctctagaagttagaacaaaaaaaaatgaaaatataagaaagtataatcgttaaaaattcaaactattagaagttccagaaagagaaaataatagagaacaaatc

SEQ ID NO: 401212 - DNA, 420 bp, Homo sapiens
atgcttttgaaaaaaacctgctttttggttctccttgtagggaaagtacgaagtacacagtaagtttgaatccctagcatgatcagaatgtctgaaaccagaccctttggtaatgtagaaagaaaatgcacatttaaaaagttgtcaaatataaaataagttattttaaggaagttccttttttctctctcacctttgctttagtggccatcaatgataaattaagttattgttaagcttccatttttcctcctccgttcattgtttccgagatttcggccactgaggaaccatggtaatgactttgccacactggagaataccgttacagtattagttatttactattttttcttgacattgacatttaattgacattttgattgacacttaaaagtttcattctaaataatacctacg

SEQ ID NO: 401213 - DNA, 641 bp, Homo sapiens
atagagttcagcctttggtgatgagtggcggatccattaacataaattttggacataacacaatccaactaatactctggttaaccataatagggaagaggttatttccccctttctttttagcctaaacttcctgctatatctgtgcttcccacatcaagatttgtactactatttattggctttctatcaggttctgactttgaagaactcttctcctaccaagtaaatagttagtggttagcaaaaactggtaaggggcattatctttcaagtaagacagagtaactatgccttacattcttcgacacaaagatggaacaatctcaaatttggatttctagcacagctgaataatgctctgtaaggaataaactaccagccatgcctaaaatattggtcttttgcttgaagttcttcatgttttaactggaaagttaaaaacaatttcccaactgcctatttgccccttgtgtttatttattatttttcatgtttaattaaaaaacacttctactttaagcaaacatttcccttttttccctttaattacctgacaaacggtagcagagctgcataaattttgcctgaggttaaagctggagtaaagcctaatcactagcttgagacattgttctggc

SEQ ID NO: 401214 - DNA, 582 bp, Homo sapiens
ctgttcatacacaccagctatcaaggaaatgcaaactgtaaccacaacaagataattatttacttaataaaataggctaagcttttaaacagttatcatgccagtgctgtgattgggtaaggcaatgggcaaatatggctggctgagtacacatgggcagcatcttcctgcagagtggtttggccacagttgtcagaaactttgtacacctagggatttatcctgaggaaatagctgtgaaatacatgaatttgtatggctcgtacatcccattgtacacctaggcacttatcctgaggaaggagccgtgaatatttagaaatattgacctggaacatcacggtctagagaagagaaaaattggtgataatgaaaatttctaaaaatgagacattacataagtaagttatgaaatactctaaatcaagtacttagggaaaaataaaacaacaacttaaggcttatctctggtatttagaagtatgaatgactttcttctttggacttttctgaaattttccaattgtcctcagtgaatttgtattatgtttataatccagtacaatgttacataaagtttta

SEQ ID NO: 401215 - DNA, 1426 bp, Homo sapiens
ggatccgcgtgctaaagaaaaatcgccgttaaagcagttttctttttcactgtctttttcttttcgcggggaacccagctgttcctgcgagggccacctcctcaggaagaccccgcagctctcccgcggcgcttctgcaggaggcagcgacagtttcgagaacccgggccttcccctcccagtgcctccgggggttcgcgtttcaggcgctcgtgttttccgggaagggcaggcgcgctgggccttggggagctgcgctcggcgggcggaccgggggatcatggaagctgataaagatgacacacaacaaattcttaaggagcattcgccagatgaatttataaaagatgaacaaaataagggactaattgatgaaattacaaagaaaaatattcagctaaagaaggagatccaaaagcttgaaacggagttacaagaggctaccaaagaattccagattaaagaggatattcctgaaacaaagatgaaattcttatcagttgaaactcctgagaatgacagccagttgtcaaatatctcctgttcgtttcaagtgagctcgaaagttccttatgagatacaaaaaggacaagcacttatcacctttgaaaaagaagaagttgctcaaaatgtggtaagcatgagtaaacatcatgtacagataaaagatgtaaatctggaggttacggccaagccagttccattaaattcaggagtcagattccaggtttatgtagaagtttctaaaatgaaaatcaatgttactgaaattcctgacacactgcgtgaagatcaaatgagagacaaactagagctgagcttttcaaagttccgaaatggaggcggagaggtggaccgcgtggactatgacagacagtccgggagtgcagtcatcacgtttgtggagattggagtggctgacaagattttgaaaaagaaagaataccctctttatataaatcaaacctgccatagagttactgtttctccatacacagaaatacacttgaaaaagtatcagatattttcaggaacatctaagaggacagtgcttctgacaggaatggaaggcattcaaatggatgaagaaattgtggaggatttaattaacattcactttcaacgggcaaagaatggaggtggagaagtagatgtggtcaagtgttctctaggtcaacctcacatagcatactttgaagaatagacttaacagaatcatgaaaactatagctttttaacccggattactgtaaatgtttgacaagaatgaatatgcttttccttaaaaaatgaaaactttaatttttaccatccatttatgtttagatacaaaacttatttccatgtttctgaatcttctttgtttcaaatggtgctgcatgttttcaactacaataagtgcactgtaataaaaagttttgtttat

SEQ ID NO: 401216 - DNA, 462 bp, Homo sapiens
gctaaagcagagaagaacctaaaacggactcctcatagtgagctaatattttataaaaaggtgtcaatcaaggtgtggcttacaaaaatactttcaaggatgtttactttccagccatctcactggacaagaactgggtggttttcattaactttggactgtgctttaatttcctaaaaatgatgtcacttactgccctgagtgacatgggatgggatgctgtggtagagcacactctggctgatgtcttgtacctgctggagacagaaaaggatgggagacacagtcctccacaggaaatctcaaatgggtccctctttcttttcagatatggactttctggggagtaatactgtagggcttttcttgttgttgcctttaactgtctcaaatgttctcccaaagatgctactgaacacagcctctcctttgagcaagttaaaagtctgggtacgactgcga

SEQ ID NO: 401217 - DNA, 439 bp, Homo sapiens
cagtggctcatgcctgtaatctcagtgctttggcaggtggagatgacaggattgtttgagggcatgagatcaagaggagcctggccaacatagcaaggccctgtctctacaaaaaaaaaaaagagccaggtgtggtggcatgcacctataattcgagctactcaggaggctgaggcaggaagatggcttgagcccaggaatttgaggctgcagtgaactctgatcatgccaccgcagaccagcctgggaggcagagtgagatgccgtttctatgctaaaaacaaacaaacaaacaaaaagatctaaaggaaaatcacactgccaagacactctgacattagggcctagggtgttctgcttattgcaatagcctgaataaagccatctccttaattgtcaagatcacgccactgcactccagcctggagaccctgtcatt

SEQ ID NO: 401218 - DNA, 1301 bp, Homo sapiens
cattatttctaggtatatctgtgagtgtgtttccagaagagatcggcatttaaattagtggactgagtaaggaagatctgccctcagtgtgggtggacgcagtccaatcagctgagggctgcattcaacaaaaaggcagggaggaaaggtgaatgtgatctttattctagagcagggacacctttctttgactgcccttggacatcagaactccgggttctccagctttcggacttggacttaacaccagcacaccccccgccccaggttcccaggccttcggcctcaaactgaaaattacaccatgggcctccctggttctccagtttgcaaatggcctattgtgagacttctcagcctccgtaattgggtgagccaattcccctaataaatttcctctcatttattaagagatttataggtatataggcatacctttgagatctctgagatatttttatagttcagttccagaccactgcaaccaaatgaatatcacaataaaatgagtcgtgaagtttttgatttcccagtgtatataaaaattatgttgacattatactgtagcctatcaagtgtacaatagcattatgtctagaaataccttgtacatagcttaatttaaaaatactttattgctaaaaaattctgacaatcatctcagccttcagtgagttgcaatcttttggctggtggaggatcttgcctcatgatggctgctgactgatcaggtggtggttgctgaaggtggggtggctgtggcaattttttaaaataagataacaatggagtttaccacatcgattgactcttgctttgagggaagatttctctgtagcttgtggtggtgtttgatagcattttactcacggtagaactttgtttgaaactggagtcgatcctttccatccctgctgctgctttatcaactaagtttatgtaatataccaaatcctttgttgtcatttcacaatattgacagcatcttcaccaggagtagattccatctcaaggaaccacttttttaaaatttttaatttttagtggtacctagtagatatatatttatggggtacatgagacattttgatacaggcataccacatgtaataatcacattagggtaaatggggcatccgtcacctcaagcatgtatttctttgtgtcacgaacattccaattatactcttttagttatttttaaaagtactataaattattgttaattgtagtaactctgttgtgctatcgaatactagattttattcattccttctatgttttgtgcccattaaccatcc

SEQ ID NO: 401219 - DNA, 638 bp, Homo sapiens
attggaaaaaaacaatatcggcaggacgaggccgcgctgtgcggaggaggaggatggaggcggtggtgttcgtcttctctctcctcgattgttgcgcgctcatcttcctctcggtctacttcataattacattgtctgatttagaatgtgattacattaatgctagatcatgttgctcaaaattaaacaagtgggtaattccagaattgattggccataccattgtcactgtattactgctcatgtcattgcactggttcatcttccttctcaacttacctgttgccacttggaatatatatcgatacattatggtgccgagtggtaacatgggagtgtttgatccaacagaaatacacaatcgagggcagctgaagtcacacatgaaagaagccatgatcaagcttggtttccacttgctctgcttcttcatgtatctttatagtatgatcttagctttgataaatgactgaagctggagaagccgtggttgaagtcagcctacactacagtgcacagttgaggagccagagacttcttaaatcatccttagaaccgtgaccatagcagtatatattttcctcttggaacaaaaaactatttttgctgtatttttaccatataaagtatttaaaaaa

SEQ ID NO: 401220 - DNA, 600 bp, Homo sapiens
tggctagtagaggctgggggttgaatcggacgaggcttctctctcctcgattgttgcgcgctcatcttcctctcggtctacttcataattacattgtctgatttagaatgtgattacattaatgctagatcatgttgctcaaaattaaacaagtgggtaattccagaattgattggccataccattgtcactgtattactgctcatgtcattgcactggttcatcttccttctcaacttacctgttgccacttggaatatatatcgatacattatggtgccgagtggtaacatgggagtgtttgatccaacagaaatacacaatcgagggcagctgaagtcacacatgaaagaagccatgatcaagcttggtttccacttgctctgcttcttcatgtatctttatagtatgatcttagctttgataaatgactgaagctggagaagccgtggttgaagtcagcctacactacagtgcacagttgaggagccagagacttcttaaatcatccttagaaccgtgaccatagcagtatatattttcctcttggaacaaaaaactatttttgctgtatttttaccatataaagtatttaaaaaa

SEQ ID NO: 401221 - DNA, 710 bp, Homo sapiens
gcaagggcctatcaggggtgggtcggggcatccgagcgggtttgacggaaggagcggcggcgacggaggaggaggatggaggcggtggtgttcgtcttctctctcctcgattgttgcgcgctcatcttcctctcggtctacttcataattacattgtctgatttagaatgtgattacattaatgctagatcatgttgctcaaaattaaacaagtgggtaattccagaattgattggccataccattgtcactgtattactgctcatgtcattgcactggttcatcttccttctcaacttacctgttgccacttggaatatatatcgtggtagcaactgcccttgctaatcaccgtaacctcggctgagaaagaagaggaagcgaaatccaagatgcagctcagttcatcaaagcctagcaggtcccctcagctgccttttcatgcctgccacagactacagtaggacaaaacctgacctggtctttgaagttaagagctaagaaagcttcctatagtagtatctcccatggcacttaccacattctatctggtattacaattatttgtatgcaattaatcactcttagattgtatgttcctggagggcagaatatgcccattcatatttgtatcttcttccttctgctcttggcacctaacacagtgccttgcacacaaacaataaatgattgttgagtgaataagtaaa

SEQ ID NO: 401222 - DNA, 314 bp, Homo sapiens
ttttttgtcaagctgttctttatttcagggagagcaatcgagggcagctgaagtcacacatgaaagaagccatgatcaagcttggtttccacttgctctgcttcttcatgtatctttatagtatgatcttagctttgataaatgactgaagctggagaagccgtggttgaagtcagcctacactacagtgcacagttgaggagccagagacttcttaaatcatccttagaaccgtgaccatagcagtatatattttcctcttggaacaaaaaactatttttgctgtatttttaccatataaagtatttaaaaaa

SEQ ID NO: 401223 - DNA, 238 bp, Homo sapiens
cgttaagttattatgtgatcgtgggcgcaggctgaaggggggccgtatgatcttagctttgataaatgactgaagctggagaagccgtggttgaagtcagcctacactacagtgcacagttgaggagccagagacttcttaaatcatccttagaaccgtgaccatagcagtatatattttcctcttggaacaaaaaactatttttgctgtatttttaccatataaagtatttaaaaaa

SEQ ID NO: 401224 - DNA, 2234 bp, Homo sapiens
gcaagggcctatcaggggtgggtcggggcatccgagcgggtttgacggaaggagcggcggcgacggaggaggaggatggaggcggtggtgttcgtcttctctctcctcgattgttgcgcgctcatcttcctctcggtctacttcataattacattgtctgatttagaatgtgattacattaatgctagatcatgttgctcaaaattaaacaagtgggtaattccagaattgattggccataccattgtcactgtattactgctcatgtcattgcactggttcatcttccttctcaacttacctgttgccacttggaatatatatcgatacattatggtgccgagtggtaacatgggagtgtttgatccaacagaaatacacaatcgagggcagctgaagtcacacatgaaagaagccatgatcaagcttggtttccacttgctctgcttcttcatgtatctttatagtatgatcttagctttgataaatgactgaagctggagaagccgtggttgaagtcagcctacactacagtgcacagttgaggagccagagacttcttaaatcatccttagaaccgtgaccatagcagtatatattttcctcttggaacaaaaaactatttttgctgtatttttaccatataaagtatttaaaaaacatgaattgagtttctgtagatttctagttctcaactttagcctgaacgccaacacttgaaggtgtttttcatcctctgtatgttgaaggtggttatttgtatgtaggaacaggactgccatcccagctttgcatgccaaagaaataaagaacacactttaaagggcaaactgaagagatgagcgagcaaaggtgcccttcaggtctactgaaaagttagagtacaaaacaacactgttgatctggacaaaagaagaaaaattaccctttttgcttgtgttgtgacaacttcatttaatatggtttaaagatttatgagactgtcagctaaaagtcttttcacaagaatgtcaacagagaatggcatctcaaaatatatatatttctttgcacaatttgtgaaaccttataagccattttccccaggtacaatgtagttcctgctgatagaaaggaaatattttgtcaagagctttcatttaaaagctactacctccacaatcacccccaaacccagaaaatccccactggctcttgccagtctggttttcgtattgcagttattccaattgtatttgatctccctgataacgtattttcatgggtttgggtagaagatgctaatcagattagaagcaggaatagttatttgctgtctgtgaaattgagccttttggtgcgccacgtggtgccagatcaacacttctatccctctgcactgaccacgttgtgaactgggagaccaaatgcaagccatttcatggacatagcaatatacaaccaaactctgttccttggagttatattgtaaactcttgcaggtgggagagcagttcacctccttagctctgtttgccagctcttacagggtaaaataaacctggcaatttatcctcagtcctagtttgtggtttaatgttgctatcttaagcactggcatttgggcaaaacatgactgtgttctgtgggagaatccaaaggcattattcactctagttgagatagaattgggtggctaaacagggtgtgtggtacccaaaagattaaatgttacatgtccttttagtccttgaccaggtctagccttggcagaagcaagggagccactaagccaaactccctgtgcagacagaccatgtttcaaggctggaagtagtgccctggcaacacacaaaaggaacggtgaaatgtggtagcaactgcccttgctaatcaccgtaacctcggctgagaaagaagaggaagcgaaatccaagatgcagctcagttcatcaaagcctagcaggtcccctcagctgccttttcatgcctgccacagactacagtaggacaaaacctgacctggtctttgaagttaagagctaagaaagcttcctatagtagtatctcccatggcacttaccacattctatctggtattacaattatttgtatgcaattaatcactcttagattgtatgttcctggagggcagaatatgcccattcatatttgtatcttcttccttctgctcttggcacctaacacagtgccttgcacacaaacaataaatgattgttgagtgaataagtaaa

SEQ ID NO: 401225 - DNA, 1541 bp, Homo sapiens
acttaggctaggtacgaggccttggtgttaggaaggagcggcggcgacggaggaggaggatggaggcggtggtgttcgtcttctctctcctcgattgttgcgcgctcatcttcctctcggtctacttcataattacattgtctgatttagaatgtgattacattaatgctagatcatgttgctcaaaattaaacaagtgggtaattccagaattgattggccataccattgtcactgtattactgctcatgtcattgcactggttcatcttccttctcaacttacctgttgccacttggaatatatatcgatacattatggtgccgagtggtaacatgggagtgtttgatccaacagaaatacacaatcgagggcagctgaagtcacacatgaaagaagccatgatcaagcttggtttccacttgctctgcttcttcatgtatctttatagtatgatcttagctttgataaatgactgaagctggagaagccgtggttgaagtcagcctacactacagtgcacagttgaggagccagagacttcttaaatcatccttagaaccgtgaccatagcagtatatattttcctcttggaacaaaaaactatttttgctgtatttttaccatataaagtatttaaaaaacatgaattgagtttctgtagatttctagttctcaactttagcctgaacgccaacacttgaaggtgtttttcatcctctgtatgttgaaggtggttatttgtatgtaggaacaggactgccatcccagctttgcatgccaaagaaataaagaacacactttaaagggcaaactgaagagatgagcgagcaaaggtgcccttcaggtctactgaaaagttagagtacaaaacaacactgttgatctggacaaaagaagaaaaattaccctttttgcttgtgttgtgacaacttcatttaatatggtttaaagatttatgagactgtcagctaaaagtcttttcacaagaatgtcaacagagaatggcatctcaaaatatatatatttctttgcacaatttgtgaaaccttataagccattttccccaggtacaatgtagttcctgctgatagaaaggaaatattttgtcaagagctttcatttaaaagctactacctccacaatcacccccaaacccagaaaatccccactggctcttgccagtctggttttcgtattgcagttattccaattgtatttgatctccctgataacgtattttcatgggtttgggtagaagatgctaatcagattagaagcaggaatagttatttgctgtctgtgaaattgagccttttggtgcgccacgtggtgccagatcaacacttctatccctctgcactgaccacgttgtgaactgggagaccaaatgcaagccatttcatggacatagcaatatacaaccaaactctgttccttggagttatattgtaaactcttgcaggtgggagagcagttcacctccttagctctgtttgccagctcttacagggtaaaataaacctggcaatttatcctca

SEQ ID NO: 401226 - DNA, 2160 bp, Homo sapiens
acttaggctaggtacgaggccttggtgttaggaaggagcggcggcgacggaggaggaggatggaggcggtggtgttcgtcttctctctcctcgattgttgcgcgctcatcttcctctcggtctacttcataattacattgtctgatttagaatgtgattacattaatgctagatcatgttgctcaaaattaaacaagtgggtaattccagaattgattggccataccattgtcactgtattactgctcatgtcattgcactggttcatcttccttctcaacttacctgttgccacttggaatatatatcgatacattatggtgccgagtggtaacatgggagtgtttgatccaacagaaatacacaatcgagggcagctgaagtcacacatgaaagaagccatgatcaagcttggtttccacttgctctgcttcttcatgtatctttatagtatgatcttagctttgataaatgactgaagctggagaagccgtggttgaagtcagcctacactacagtgcacagttgaggagccagagacttcttaaatcatccttagaaccgtgaccatagcagtatatattttcctcttggaacaaaaaactatttttgctgtatttttaccatataaagtatttaaaaaacatgaattgagtttctgtagatttctagttctcaactttagcctgaacgccaacacttgaaggtgtttttcatcctctgtatgttgaaggtggttatttgtatgtaggaacaggactgccatcccagctttgcatgccaaagaaataaagaacacactttaaagggcaaactgaagagatgagcgagcaaaggtgcccttcaggtctactgaaaagttagagtacaaaacaacactgttgatctggacaaaagaagaaaaattaccctttttgcttgtgttgtgacaacttcatttaatatggtttaaagatttatgagactgtcagctaaaagtcttttcacaagaatgtcaacagagaatggcatctcaaaatatatatatttctttgcacaatttgtgaaaccttataagccattttccccaggtacaatgtagttcctgctgatagaaaggaaatattttgtcaagagctttcatttaaaagctactacctccacaatcacccccaaacccagaaaatccccactggctcttgccagtctggttttcgtattgcagttattccaattgtatttgatctccctgataacgtattttcatgggtttgggtagaagatgctaatcagattagaagcaggaatagttatttgctgtctgtgaaattgagccttttggtgcgccacgtggtgccagatcaacacttctatccctctgcactgaccacgttgtgaactgggagaccaaatgcaagccatttcatggacatagcaatatacaaccaaactctgttccttggagttatattgtaaactcttgcaggtgggagagcagttcacctccttagctctgtttgccagctcttacagggtaaaataaacctggcaatttatcctcagtcctagtttgtggtttaatgttgctatcttaagcactggcatttgggcaaaacatgactgtgttctgtgggagaatccaaaggcattattcactctagttgagatagaattgggtggctaaacagggtgtgtggtacccaaaagattaaatgttacatgtccttttagtccttgaccaggtctagccttggcagaagcaagggagccactaagccaaactccctgtgcagacagaccatgtttcaaggctggaagtagtgccctggcaacacacaaaaggaacggtgaaatggtaggcaaagtgaacttggctctgctggcctctttggggtcacagaaattgctccttgtggtaatcttatatttctgtcaggcacagggccaagaagctgtgtaacagacattactttgcttgcatctctttttcataccttttccctctgaggcagcttttgcttagaaaacagtcccttcactctgcctttcctcctaacttcctgtgcctcttcatgttctgctcaagctttttaaagcaacgaagctgttggagaacttaaatccttgcaactgagagataagctacttaaaggcggtagagatcttttttttttttttttt

SEQ ID NO: 401227 - DNA, 2202 bp, Homo sapiens
aaattaggctaaggtacgaggctgggtgtcgcggaggaggaggatggaggcggtggtgttcgtcttctctctcctcgattgttgcgcgctcatcttcctctcggtctacttcataattacattgtctgatttagaatgtgattacattaatgctagatcatgttgctcaaaattaaacaagtgggtaattccagaattgattggccataccattgtcactgtattactgctcatgtcattgcactggttcatcttccttctcaacttacctgttgccacttggaatatatatcgatacattatggtgccgagtggtaacatgggagtgtttgatccaacagaaatacacaatcgagggcagctgaagtcacacatgaaagaagccatgatcaagcttggtttccacttgctctgcttcttcatgtatctttatagtatgatcttagctttgataaatgactgaagctggagaagccgtggttgaagtcagcctacactacagtgcacagttgaggagccagagacttcttaaatcatccttagaaccgtgaccatagcagtatatattttcctcttggaacaaaaaactatttttgctgtatttttaccatataaagtatttaaaaaacatgaattgagtttctgtagatttctagttctcaactttagcctgaacgccaacacttgaaggtgtttttcatcctctgtatgttgaaggtggttatttgtatgtaggaacaggactgccatcccagctttgcatgccaaagaaataaagaacacactttaaagggcaaactgaagagatgagcgagcaaaggtgcccttcaggtctactgaaaagttagagtacaaaacaacactgttgatctggacaaaagaagaaaaattaccctttttgcttgtgttgtgacaacttcatttaatatggtttaaagatttatgagactgtcagctaaaagtcttttcacaagaatgtcaacagagaatggcatctcaaaatatatatatttctttgcacaatttgtgaaaccttataagccattttccccaggtacaatgtagttcctgctgatagaaaggaaatattttgtcaagagctttcatttaaaagctactacctccacaatcacccccaaacccagaaaatccccactggctcttgccagtctggttttcgtattgcagttattccaattgtatttgatctccctgataacgtattttcatgggtttgggtagaagatgctaatcagattagaagcaggaatagttatttgctgtctgtgaaattgagccttttggtgcgccacgtggtgccagatcaacacttctatccctctgcactgaccacgttgtgaactgggagaccaaatgcaagccatttcatggacatagcaatatacaaccaaactctgttccttggagttatattgtaaactcttgcaggtgggagagcagttcacctccttagctctgtttgccagctcttacagggtaaaataaacctggcaatttatcctcagtcctagtttgtggtttaatgttgctatcttaagcactggcatttgggcaaaacatgactgtgttctgtgggagaatccaaaggcattattcactctagttgagatagaattgggtggctaaacagggtgtgtggtacccaaaagattaaatgttacatgtccttttagtccttgaccaggtctagccttggcagaagcaagggagccactaagccaaactccctgtgcagacagaccatgtttcaaggctggaagtagtgccctggcaacacacaaaaggaacggtgaaatgtggtagcaactgcccttgctaatcaccgtaacctcggctgagaaagaagaggaagcgaaatccaagatgcagctcagttcatcaaagcctagcaggtcccctcagctgccttttcatgcctgccacagactacagtaggacaaaacctgacctggtctttgaagttaagagctaagaaagcttcctatagtagtatctcccatggcacttaccacattctatctggtattacaattatttgtatgcaattaatcactcttagattgtatgttcctggagggcagaatatgcccattcatatttgtatcttcttccttctgctcttggcacctaacacagtgccttgcacacaaacaataaatgattgttgagtgaataagtaaa

SEQ ID NO: 401228 - DNA, 2768 bp, Homo sapiens
acttaggctaggtacgaggccttggtgttaggaaggagcggcggcgacggaggaggaggatggaggcggtggtgttcgtcttctctctcctcgattgttgcgcgctcatcttcctctcggtctacttcgtatccttgcctgaggcaggcgaacgccttgccgggggacacggctgagggtgggccagttgggcacccgggcaggtgtgtgggactagggaggcgcccggcggcgggcgtgggctccctgggagctggcctggccggggcggtggcgcgggccccggagcgggtaggagaggctggctgccctacccgacgggccctgctgccctgcacgcacttgccctgcctgggttgccggccgcccctcactcgggtccgagtgggcctctccgggcgcgccccgtctcggcctgcccgcctgctctccgctcgtccccgcggcgcccggaccagccctgcctgagccacggccgccctcgggagagaagcgtcgctgtttttctgggagaggccctgcgccgtgctcttcgtcggatattgggggtcccaagggcggtcgcttgcgacagtcgggtgccgggataagtgcgggccatttgcctcctcctgttccccacgcaacacccccggcacccgcccctttgttctggcgggtgttagtacttgcagggacctttcacatccaggagttgactcattcgccaaaggagcgaagttgcttccttcactgtgccgttttgtatgggtaattccagaattgattggccataccattgtcactgtattactgctcatgtcattgcactggttcatcttccttctcaacttacctgttgccacttggaatatatatcgatacattatggtgccgagtggtaacatgggagtgtttgatccaacagaaatacacaatcgagggcagctgaagtcacacatgaaagaagccatgatcaagcttggtttccacttgctctgcttcttcatgtatctttatagtatgatcttagctttgataaatgactgaagctggagaagccgtggttgaagtcagcctacactacagtgcacagttgaggagccagagacttcttaaatcatccttagaaccgtgaccatagcagtatatattttcctcttggaacaaaaaactatttttgctgtatttttaccatataaagtatttaaaaaacatgaattgagtttctgtagatttctagttctcaactttagcctgaacgccaacacttgaaggtgtttttcatcctctgtatgttgaaggtggttatttgtatgtaggaacaggactgccatcccagctttgcatgccaaagaaataaagaacacactttaaagggcaaactgaagagatgagcgagcaaaggtgcccttcaggtctactgaaaagttagagtacaaaacaacactgttgatctggacaaaagaagaaaaattaccctttttgcttgtgttgtgacaacttcatttaatatggtttaaagatttatgagactgtcagctaaaagtcttttcacaagaatgtcaacagagaatggcatctcaaaatatatatatttctttgcacaatttgtgaaaccttataagccattttccccaggtacaatgtagttcctgctgatagaaaggaaatattttgtcaagagctttcatttaaaagctactacctccacaatcacccccaaacccagaaaatccccactggctcttgccagtctggttttcgtattgcagttattccaattgtatttgatctccctgataacgtattttcatgggtttgggtagaagatgctaatcagattagaagcaggaatagttatttgctgtctgtgaaattgagccttttggtgcgccacgtggtgccagatcaacacttctatccctctgcactgaccacgttgtgaactgggagaccaaatgcaagccatttcatggacatagcaatatacaaccaaactctgttccttggagttatattgtaaactcttgcaggtgggagagcagttcacctccttagctctgtttgccagctcttacagggtaaaataaacctggcaatttatcctcagtcctagtttgtggtttaatgttgctatcttaagcactggcatttgggcaaaacatgactgtgttctgtgggagaatccaaaggcattattcactctagttgagatagaattgggtggctaaacagggtgtgtggtacccaaaagattaaatgttacatgtccttttagtccttgaccaggtctagccttggcagaagcaagggagccactaagccaaactccctgtgcagacagaccatgtttcaaggctggaagtagtgccctggcaacacacaaaaggaacggtgaaatgtggtagcaactgcccttgctaatcaccgtaacctcggctgagaaagaagaggaagcgaaatccaagatgcagctcagttcatcaaagcctagcaggtcccctcagctgccttttcatgcctgccacagactacagtaggacaaaacctgacctggtctttgaagttaagagctaagaaagcttcctatagtagtatctcccatggcacttaccacattctatctggtattacaattatttgtatgcaattaatcactcttagattgtatgttcctggagggcagaatatgcccattcatatttgtatcttcttccttctgctcttggcacctaacacagtgccttgcacacaaacaataaatgattgttgagtgaataagtaaa

SEQ ID NO: 401229 - DNA, 2509 bp, Homo sapiens
attgtaagcttttacattcttattattttttgtttttctctgaatatgaaatggtttcctcgggattctggagattggaaaatgtttaacgttgctattctgacttgaaaggcaacatgtgtgtggatatcagacatcccaaattagagctaggggctttggcatagatactagaataggaactaaacaatactctttttttctctagttctcattcaaatctgcttaatgaatgaacctaagcctttgcttaggataaaaagtaattgaaatttaagtgctttatttttaagttgtgccctgatatatttgcatgggatacaaagttatagcagtatgcaaatctgggacatgggagtctaaaaataatcttgaaacagtagcttgtaaattctctgtacgttcattgatttagtttcaaataacatgtacagtcaggaaggacatagcagtgagatgtaatactgtgttcttccattgcagtgggttgggtaattccagaattgattggccataccattgtcactgtattactgctcatgtcattgcactggttcatcttccttctcaacttacctgttgccacttggaatatatatcgatacattatggtgccgagtggtaacatgggagtgtttgatccaacagaaatacacaatcgagggcagctgaagtcacacatgaaagaagccatgatcaagcttggtttccacttgctctgcttcttcatgtatctttatagtatgatcttagctttgataaatgactgaagctggagaagccgtggttgaagtcagcctacactacagtgcacagttgaggagccagagacttcttaaatcatccttagaaccgtgaccatagcagtatatattttcctcttggaacaaaaaactatttttgctgtatttttaccatataaagtatttaaaaaacatgaattgagtttctgtagatttctagttctcaactttagcctgaacgccaacacttgaaggtgtttttcatcctctgtatgttgaaggtggttatttgtatgtaggaacaggactgccatcccagctttgcatgccaaagaaataaagaacacactttaaagggcaaactgaagagatgagcgagcaaaggtgcccttcaggtctactgaaaagttagagtacaaaacaacactgttgatctggacaaaagaagaaaaattaccctttttgcttgtgttgtgacaacttcatttaatatggtttaaagatttatgagactgtcagctaaaagtcttttcacaagaatgtcaacagagaatggcatctcaaaatatatatatttctttgcacaatttgtgaaaccttataagccattttccccaggtacaatgtagttcctgctgatagaaaggaaatattttgtcaagagctttcatttaaaagctactacctccacaatcacccccaaacccagaaaatccccactggctcttgccagtctggttttcgtattgcagttattccaattgtatttgatctccctgataacgtattttcatgggtttgggtagaagatgctaatcagattagaagcaggaatagttatttgctgtctgtgaaattgagccttttggtgcgccacgtggtgccagatcaacacttctatccctctgcactgaccacgttgtgaactgggagaccaaatgcaagccatttcatggacatagcaatatacaaccaaactctgttccttggagttatattgtaaactcttgcaggtgggagagcagttcacctccttagctctgtttgccagctcttacagggtaaaataaacctggcaatttatcctcagtcctagtttgtggtttaatgttgctatcttaagcactggcatttgggcaaaacatgactgtgttctgtgggagaatccaaaggcattattcactctagttgagatagaattgggtggctaaacagggtgtgtggtacccaaaagattaaatgttacatgtccttttagtccttgaccaggtctagccttggcagaagcaagggagccactaagccaaactccctgtgcagacagaccatgtttcaaggctggaagtagtgccctggcaacacacaaaaggaacggtgaaatgtggtagcaactgcccttgctaatcaccgtaacctcggctgagaaagaagaggaagcgaaatccaagatgcagctcagttcatcaaagcctagcaggtcccctcagctgccttttcatgcctgccacagactacagtaggacaaaacctgacctggtctttgaagttaagagctaagaaagcttcctatagtagtatctcccatggcacttaccacattctatctggtattacaattatttgtatgcaattaatcactcttagattgtatgttcctggagggcagaatatgcccattcatatttgtatcttcttccttctgctcttggcacctaacacagtgccttgcacacaaacaataaatgattgttgagtgaataagtaaa

SEQ ID NO: 401230 - DNA, 2184 bp, Homo sapiens
aagcagaccaagcgcttcgtggcagcgaaagcagcgtgcggggaagtcactgttaaagtgctgcctaaggaagtttggaaatagtccccgttccagattgccttgaattttaaaacattttgcttagggaaagtaggtcagcagcacctaagatcaaggatactgggtaattccagaattgattggccataccattgtcactgtattactgctcatgtcattgcactggttcatcttccttctcaacttacctgttgccacttggaatatatatcgatacattatggtgccgagtggtaacatgggagtgtttgatccaacagaaatacacaatcgagggcagctgaagtcacacatgaaagaagccatgatcaagcttggtttccacttgctctgcttcttcatgtatctttatagtatgatcttagctttgataaatgactgaagctggagaagccgtggttgaagtcagcctacactacagtgcacagttgaggagccagagacttcttaaatcatccttagaaccgtgaccatagcagtatatattttcctcttggaacaaaaaactatttttgctgtatttttaccatataaagtatttaaaaaacatgaattgagtttctgtagatttctagttctcaactttagcctgaacgccaacacttgaaggtgtttttcatcctctgtatgttgaaggtggttatttgtatgtaggaacaggactgccatcccagctttgcatgccaaagaaataaagaacacactttaaagggcaaactgaagagatgagcgagcaaaggtgcccttcaggtctactgaaaagttagagtacaaaacaacactgttgatctggacaaaagaagaaaaattaccctttttgcttgtgttgtgacaacttcatttaatatggtttaaagatttatgagactgtcagctaaaagtcttttcacaagaatgtcaacagagaatggcatctcaaaatatatatatttctttgcacaatttgtgaaaccttataagccattttccccaggtacaatgtagttcctgctgatagaaaggaaatattttgtcaagagctttcatttaaaagctactacctccacaatcacccccaaacccagaaaatccccactggctcttgccagtctggttttcgtattgcagttattccaattgtatttgatctccctgataacgtattttcatgggtttgggtagaagatgctaatcagattagaagcaggaatagttatttgctgtctgtgaaattgagccttttggtgcgccacgtggtgccagatcaacacttctatccctctgcactgaccacgttgtgaactgggagaccaaatgcaagccatttcatggacatagcaatatacaaccaaactctgttccttggagttatattgtaaactcttgcaggtgggagagcagttcacctccttagctctgtttgccagctcttacagggtaaaataaacctggcaatttatcctcagtcctagtttgtggtttaatgttgctatcttaagcactggcatttgggcaaaacatgactgtgttctgtgggagaatccaaaggcattattcactctagttgagatagaattgggtggctaaacagggtgtgtggtacccaaaagattaaatgttacatgtccttttagtccttgaccaggtctagccttggcagaagcaagggagccactaagccaaactccctgtgcagacagaccatgtttcaaggctggaagtagtgccctggcaacacacaaaaggaacggtgaaatgtggtagcaactgcccttgctaatcaccgtaacctcggctgagaaagaagaggaagcgaaatccaagatgcagctcagttcatcaaagcctagcaggtcccctcagctgccttttcatgcctgccacagactacagtaggacaaaacctgacctggtctttgaagttaagagctaagaaagcttcctatagtagtatctcccatggcacttaccacattctatctggtattacaattatttgtatgcaattaatcactcttagattgtatgttcctggagggcagaatatgcccattcatatttgtatcttcttccttctgctcttggcacctaacacagtgccttgcacacaaacaataaatgattgttgagtgaataagtaaa

SEQ ID NO: 401231 - DNA, 916 bp, Homo sapiens
gcaagggcctatcaggggtgggtcggggcatccgagcgggtttgacggaaggagcggcggcgacggaggaggaggatggaggcggtggtgttcgtcttctctctcctcgattgttgcgcgctcatcttcctctcggtctacttcataattacattgtctgatttagaatgtgattacattaatgctagatcatgttgctcaaaattaaacaagtgggtaattccagaattgattggccataccattgtcactgtattactgctcatgtcattgcactggttcatcttccttctcaacttacctgttgccacttggaatatatatcgatacattatggtgccgagtggtaacatgggagtgtttgatccaacagaaatacacaatcgagggcagctgaagtcacacatgaaagaagccatgatcaagcttggtttccacttgctctgcttcttcatgtatctttatagtatgatcttagctttgataaatgactgaagctggagaagccgtggttgaagtcagcctacactacagtgcacagttgaggagccagagacttcttaaatcatccttagaaccgtgaccatagcagtatatattttcctcttggaacaaaaaactatttttgctgtatttttaccatataaagtatttaaaaaagcaagagagaagaaggaagcgagaaagaaaagagtgtgggggagagtggggacatgggaaagagattgaggaacgaaggtggggggagggggccaacgaaggtacacggacacagtggcacaacggccacaaagagaacacggcaaccagaaaagggggggagacctcacaagtgaaaaagccccgggaccgggcggcatgtaaaaccacagaggggtaggaggacgaggagacacaacgaagcacagggcgcgaa

SEQ ID NO: 401232 - DNA, 2714 bp, Homo sapiens
acttaggctaggtacgaggccttggtgttaggaaggagcggcggcgacggaggaggaggatggaggcggtggtgttcgtcttctctctcctcgattgttgcgcgctcatcttcctctcggtctacttcgtatccttgcctgaggcaggcgaacgccttgccgggggacacggctgagggtgggccagttgggcacccgggcaggtgtgtgggactagggaggcgcccggcggcgggcgtgggctccctgggagctggcctggccggggcggtggcgcgggccccggagcgggtaggagaggctggctgccctacccgacgggccctgctgccctgcacgcacttgccctgcctgggttgccggccgcccctcactcgggtccgagtgggcctctccgggcgcgccccgtctcggcctgcccgcctgctctccgctcgtccccgcggcgcccggaccagccctgcctgagccacggccgccctcgggagagaagcgtcgctgtttttctgggagaggccctgcgccgtgctcttcgtcggatattgggggtcccaagggcggtcgcttgcgacagtcgggtgccgggataagtgcgggccatttgcctcctcctgttccccacgcaacacccccggcacccgcccctttgttctggcgggtgttagtacttgcagggacctttcacatccaggagttgactcattcgccaaaggagcgaagttgcttccttcactgtgccgttttgtatgggtaattccagaattgattggccataccattgtcactgtattactgctcatgtcattgcactggttcatcttccttctcaacttacctgttgccacttggaatatatatcgcaatcgagggcagctgaagtcacacatgaaagaagccatgatcaagcttggtttccacttgctctgcttcttcatgtatctttatagtatgatcttagctttgataaatgactgaagctggagaagccgtggttgaagtcagcctacactacagtgcacagttgaggagccagagacttcttaaatcatccttagaaccgtgaccatagcagtatatattttcctcttggaacaaaaaactatttttgctgtatttttaccatataaagtatttaaaaaacatgaattgagtttctgtagatttctagttctcaactttagcctgaacgccaacacttgaaggtgtttttcatcctctgtatgttgaaggtggttatttgtatgtaggaacaggactgccatcccagctttgcatgccaaagaaataaagaacacactttaaagggcaaactgaagagatgagcgagcaaaggtgcccttcaggtctactgaaaagttagagtacaaaacaacactgttgatctggacaaaagaagaaaaattaccctttttgcttgtgttgtgacaacttcatttaatatggtttaaagatttatgagactgtcagctaaaagtcttttcacaagaatgtcaacagagaatggcatctcaaaatatatatatttctttgcacaatttgtgaaaccttataagccattttccccaggtacaatgtagttcctgctgatagaaaggaaatattttgtcaagagctttcatttaaaagctactacctccacaatcacccccaaacccagaaaatccccactggctcttgccagtctggttttcgtattgcagttattccaattgtatttgatctccctgataacgtattttcatgggtttgggtagaagatgctaatcagattagaagcaggaatagttatttgctgtctgtgaaattgagccttttggtgcgccacgtggtgccagatcaacacttctatccctctgcactgaccacgttgtgaactgggagaccaaatgcaagccatttcatggacatagcaatatacaaccaaactctgttccttggagttatattgtaaactcttgcaggtgggagagcagttcacctccttagctctgtttgccagctcttacagggtaaaataaacctggcaatttatcctcagtcctagtttgtggtttaatgttgctatcttaagcactggcatttgggcaaaacatgactgtgttctgtgggagaatccaaaggcattattcactctagttgagatagaattgggtggctaaacagggtgtgtggtacccaaaagattaaatgttacatgtccttttagtccttgaccaggtctagccttggcagaagcaagggagccactaagccaaactccctgtgcagacagaccatgtttcaaggctggaagtagtgccctggcaacacacaaaaggaacggtgaaatgtggtagcaactgcccttgctaatcaccgtaacctcggctgagaaagaagaggaagcgaaatccaagatgcagctcagttcatcaaagcctagcaggtcccctcagctgccttttcatgcctgccacagactacagtaggacaaaacctgacctggtctttgaagttaagagctaagaaagcttcctatagtagtatctcccatggcacttaccacattctatctggtattacaattatttgtatgcaattaatcactcttagattgtatgttcctggagggcagaatatgcccattcatatttgtatcttcttccttctgctcttggcacctaacacagtgccttgcacacaaacaataaatgattgttgagtgaataagtaaa

SEQ ID NO: 401233 - DNA, 851 bp, Homo sapiens
gcaagggcctatcaggggtgggtcggggcatccgagcgggtttgacggaaggagcggcggcgacggaggaggaggatggaggcggtggtgttcgtcttctctctcctcgattgttgcgcgctcatcttcctctcggtctacttcataattacattgtctgatttagaatgtgattacattaatgctagatcatgttgctcaaaattaaacaagtgggtaattccagaattgattggccataccattgtcactgtattactgctcatgtcattgcactggttcatcttccttctcaacttacctgttgccacttggaatatatatcgatacattatggtgccgagtggtaacatgggagtgtttgatccaacagaaatacacaatcgagggcagctgaagtcacacatgaaagaagccatgatcaagcttggtttccacttgctctgcttcttcatgtatctttatagtggtagcaactgcccttgctaatcaccgtaacctcggctgagaaagaagaggaagcgaaatccaagatgcagctcagttcatcaaagcctagcaggtcccctcagctgccttttcatgcctgccacagactacagtaggacaaaacctgacctggtctttgaagttaagagctaagaaagcttcctatagtagtatctcccatggcacttaccacattctatctggtattacaattatttgtatgcaattaatcactcttagattgtatgttcctggagggcagaatatgcccattcatatttgtatcttcttccttctgctcttggcacctaacacagtgccttgcacacaaacaataaatgattgttgagtgaataagtaaa

SEQ ID NO: 401234 - DNA, 1583 bp, Homo sapiens
cagatattcttagtaaccaaaacagtgactcatgcagttgagagagcctttgggctgtcagtttacagtacatcaggcttgctgaggctaagcaaatcagaaaggtgccatgtttataacagaggtcaaagctccttacttctgaaacattagctgtggttaaaaacaaaaactcttccttcttgtattgcttgtctatcaaagccaggaaagtgggggatcactgtagttaaatttttttttttttaattagagacagagtcttgccctgtcgcccaagctggagtgcactggcgcaatcgtggtacactgcagccttgaactcctggactcaagcagtcctcctgcctcagcttcccaagtagttgggagtaggtgcacaccaccatgcccagcgaattttttgtagagacagaggtcttgctatgttgcctaggctggtatcaaaattactggcctcaagcgattctcctgcctcggcctcccagatgttgggattactggtgtgagccaccacgcccagctcaaaaacaatttttttaggggcacttctacaaatcatgaaagggggataaaagcactgactttaaaaagccatgtttaagatgctataaatgttctccccttttcattgattggagagttgtagaggaccttagagatcattttgtctaactccctcatcccaaagataaactgaggcctagagatcgttcagggtgttgtaactgggaacatctgaatgctgaggcctagagatcgttcagggtgttgtaactgggaacatctgaatgctgaggcctagagatcgttcagggtgttgtaactgggaacatctgaatgctgaggcctagagatcgttcagggtgttgtaactgggaacatctgaatgctgaggcctagagatcgttcagggtgttgtaactgggaacatctgaatgctgaggcctagagatcgttcagggtgttgtaactgggaacatctgaatgctgaggcctagagatcgttcagggtgttgtaactgggaacatctgaatgctgaggcttagtccagtgttctctctcccttaccactcctcttccccttccctctataatggcagtacccagggcccggtccatagactactatcgagtgctcctatgtgcatcttagtacgtatcattttcccttgcctttttccttctatcctttcagtggtagcaactgcccttgctaatcaccgtaacctcggctgagaaagaagaggaagcgaaatccaagatgcagctcagttcatcaaagcctagcaggtcccctcagctgccttttcatgcctgccacagactacagtaggacaaaacctgacctggtctttgaagttaagagctaagaaagcttcctatagtagtatctcccatggcacttaccacattctatctggtattacaattatttgtatgcaattaatcactcttagattgtatgttcctggagggcagaatatgcccattcatatttgtatcttcttccttctgctcttggcacctaacacagtgccttgcacacaaacaataaatgattgttgagtgaataagtaaa

SEQ ID NO: 401235 - DNA, 1436 bp, Homo sapiens
cagatattcttagtaaccaaaacagtgactcatgcagttgagagagcctttgggctgtcagtttacagtacatcaggcttgctgaggctaagcaaatcagaaaggtgccatgtttataacagaggtcaaagctccttacttctgaaacattagctgtggttaaaaacaaaaactcttccttcttgtattgcttgtctatcaaagccaggaaagtgggggatcactgtagttaaatttttttttttttaattagagacagagtcttgccctgtcgcccaagctggagtgcactggcgcaatcgtggtacactgcagccttgaactcctggactcaagcagtcctcctgcctcagcttcccaagtagttgggagtaggtgcacaccaccatgcccagcgaattttttgtagagacagaggtcttgctatgttgcctaggctggtatcaaaattactggcctcaagcgattctcctgcctcggcctcccagatgttgggattactggtgtgagccaccacgcccagctcaaaaacaatttttttaggggcacttctacaaatcatgaaagggggataaaagcactgactttaaaaagccatgtttaagatgctataaatgttctccccttttcattgattggagagttgtagaggaccttagagatcattttgtctaactccctcatcccaaagataaactgaggcctagagatcgttcagggtgttgtaactgggaacatctgaatgctgaggcctagagatcgttcagggtgttgtaactgggaacatctgaatgctgaggcctagagatcgttcagggtgttgtaactgggaacatctgaatgctgaggcctagagatcgttcagggtgttgtaactgggaacatctgaatgctgaggcttagtccagtgttctctctcccttaccactcctcttccccttccctctataatggcagtacccagggcccggtccatagactactatcgagtgctcctatgtgcatcttagtacgtatcattttcccttgcctttttccttctatcctttcagtggtagcaactgcccttgctaatcaccgtaacctcggctgagaaagaagaggaagcgaaatccaagatgcagctcagttcatcaaagcctagcaggtcccctcagctgccttttcatgcctgccacagactacagtaggacaaaacctgacctggtctttgaagttaagagctaagaaagcttcctatagtagtatctcccatggcacttaccacattctatctggtattacaattatttgtatgcaattaatcactcttagattgtatgttcctggagggcagaatatgcccattcatatttgtatcttcttccttctgctcttggcacctaacacagtgccttgcacacaaacaataaatgattgttgagtgaataagtaaa

SEQ ID NO: 401236 - DNA, 980 bp, Homo sapiens
gcaagggcctatcaggggtgggtcggggcatccgagcgggtttgacggaaggagcggcggcgacggaggaggaggatggaggcggtggtgttcgtcttctctctcctcgattgttgcgcgctcatcttcctctcggtctacttcataattacattgtctgatttagaatgtgattacattaatgctagatcatgttgctcaaaattaaacaagtgggtaattccagaattgattggccataccattgtcactgtattactgctcatgtcattgcactggttcatcttccttctcaacttacctgttgccacttggaatatatatcgatacattatggtgccgagtggtaacatgggagtgtttgatccaacagaaatacacaatcgagggcagctgaagtcacacatgaaagaagccatgatcaagcttggtttccacttgctctgcttcttcatgtatctttatagtggtagcaactgcccttgctaatcaccgtaacctcggctgagaaagaagaggaagcgaaatccaagatgcagctcagttcatcaaagcctagcaggtcccctcagctgccttttcatgcctgccacagactacagtaggacaaaacctgacctggtctttgaagttaagagctaagaaagcttcctatagtagtatctcccatggcacttaccacattctatctggtattacaattatttgtatgcaattaatcactcttagattgtatgttcctggagggcagaatatgcccattcatatttgtatcttcttccttctgctcttggcacctaacacagtgccttgcacacaaacaataaatgattgttgagtgaataagtaaattacaaacaaaaaaaaaaaatccggggcttatttcggggcggaaaaagggtgcaggcctggctacggttccgcccacttctgtcaaggggactcgccgccccaagaacgtaagaaccgacatcaaaaca

SEQ ID NO: 401237 - DNA, 1136 bp, Homo sapiens
gccacattgtaccaacagctgtatggcaagaattaagactcaggctgggtgcggtggctcacgcctgtaagcccagctcaaaaacaatttttttaggggcacttctacaaatcatgaaagggggataaaagcactgactttaaaaagccatgtttaagatgctataaatgttctccccttttcattgattggagagttgtagaggaccttagagatcattttgtctaactccctcatcccaaagataaactgaggcctagagatcgttcagggtgttgtaactgggaacatctgaatgctgaggcctagagatcgttcagggtgttgtaactgggaacatctgaatgctgaggcctagagatcgttcagggtgttgtaactgggaacatctgaatgctgaggcctagagatcgttcagggtgttgtaactgggaacatctgaatgctgaggcctagagatcgttcagggtgttgtaactgggaacatctgaatgctgaggcctagagatcgttcagggtgttgtaactgggaacatctgaatgctgaggcctagagatcgttcagggtgttgtaactgggaacatctgaatgctgaggcttagtccagtgttctctctcccttaccactcctcttccccttccctctataatggcagtacccagggcccggtccatagactactatcgagtgctcctatgtgcatcttagtacgtatcattttcccttgcctttttccttctatcctttcagtggtagcaactgcccttgctaatcaccgtaacctcggctgagaaagaagaggaagcgaaatccaagatgcagctcagttcatcaaagcctagcaggtcccctcagctgccttttcatgcctgccacagactacagtaggacaaaacctgacctggtctttgaagttaagagctaagaaagcttcctatagtagtatctcccatggcacttaccacattctatctggtattacaattatttgtatgcaattaatcactcttagattgtatgttcctggagggcagaatatgcccattcatatttgtatcttcttccttctgctcttggcacctaacacagtgccttgcacacaaacaataaatgattgttgagtgaataagtaaa

SEQ ID NO: 401238 - DNA, 987 bp, Homo sapiens
cagatattcttagtaaccaaaacagtgactcatgcagttgagagagcctttgggctgtcagtttacagtacatcaggcttgctgaggctaagcaaatcagaaaggtgccatgtttataacagaggtcaaagctccttacttctgaaacattagctgtggttaaaaacaaaaactcttccttcttgtattgcttgtctatcaaagccaggaaagtgggggatcactgtagttaaatttttttttttttaattagagacagagtcttgccctgtcgcccaagctggagtgcactggcgcaatcgtggtacactgcagccttgaactcctggactcaagcagtcctcctgcctcagcttcccaagtagttgggagtaggtgcacaccaccatgcccagcgaattttttgtagagacagaggtcttgctatgttgcctaggctggtatcaaaattactggcctcaagcgattctcctgcctcggcctcccagatgttgggattactggtgtgagccaccacgcccagctcaaaaacaatttttttaggggcacttctacaaatcatgaaagggggataaaagcactgactttaaaaagccatgtttaagatgctataaatgttctccccttttcattgattggagagttgtagaggaccttagagatcattttgtctaactccctcatcccaaagataaactgaggcctagagatcgttcagggtgttgtaactgggaacatctgaatgctgaggcctagagatcgttcagggtgttgtaactgggaacatctgaatgctgaggcctagagatcgttcagggtgttgtaactgggaacatctgaatgctgaggcctagagatcgttcagggtgttgtaactgggaacatctgaatgctgaggcttagtccagtgttctctctcccttaccactcctcttccccttccctctatggaccgggccctgggtactgccattatagaggtcgacc

SEQ ID NO: 401239 - DNA, 302 bp, Homo sapiens
agtcactcttttttagtgaaaaagtttggacatgaaagatcctaatatattctttcctttgggtatgaatgattgtcttttactcaaatgattgttcctttgtgaaccttagggacgcaagtctggacaaaccaggctctgtaggaacattcctgagaaaacattagtgacattcatttcttctttccacagtatgatcttagctttgataaatgactgaagctggagaagccgtggttgaagtcagcctacactacagtgcacagttgaggagccagagacttcttaaatcatccttagaa

SEQ ID NO: 401240 - DNA, 529 bp, Homo sapiens
atagccattgttttacatttgaagaactcaaactaaatgttctggttgggtcagattagatttgagcaaaataggattattttgtaaaataatttgttgaaggaacatgaatgggaaaattgagttgtctaatgagcaaactttaggaaacaactcatttttttcaagtcaaatctaattctgccttgtaactgggattgctttctgaaacttaaatacttagttattataaaagaaatataataattccttatcttgatcatcagataattacattgtctgatttagaatgtgattacattaatgctagatcatgttgctcaaaattaaacaagaggtaagacatttctttgctcattctctggcattgaagccaggtcattttccatacttaagattattatagataacagatgtatttttgattttagagtacatgttgtctcttattcattggaaatttgatggaactgctgtgttttacaatattttagatcatgaaattatgctagaagatctgacttgaaat

SEQ ID NO: 401241 - DNA, 660 bp, Homo sapiens
gcaagggcctatcaggggtgggtcggggcatccgagcgggtttgacggaaggagcggcggcgacggaggaggaggatggaggcggtggtgttcgtcttctctctcctcgattgttgcgcgctcatcttcctctcggtctacttcataattacattgtctgatttagaatgtgattacattaatgctagatcatgttgctcaaaattaaacaagtgggtaattccagaattgattggccataccattgtcactgtattactgctcatgtcattgcactggttcatcttccttctcaacttacctgttgccacttggaatatatatcgatacattatggtgccgagtggtaacatgggagtgtttgatccaacagaaatacacaatcgagggcagctgaagtcacacatgaaagaagccatgatcaagcttggtttccacttgctctgcttcttcatgtatctttatagtatgatcttagctttgataaatgactgaagctggagaagccgtggttgaagtcagcctacactacagtgcacagttgaggagccagagacttcttaaatcatccttagaaccgtgaccatagcagtatatattttcctcttggaacaaaaaactatttttgctgtatttttaccatataaagtatttaaaaaa

SEQ ID NO: 401242 - DNA, 2218 bp, Homo sapiens
acttaggctaggtacgaggccttggtgttaggaaggagcggcggcgacggaggaggaggatggaggcggtggtgttcgtcttctctctcctcgattgttgcgcgctcatcttcctctcggtctacttcataattacattgtctgatttagaatgtgattacattaatgctagatcatgttgctcaaaattaaacaagtgggtaattccagaattgattggccataccattgtcactgtattactgctcatgtcattgcactggttcatcttccttctcaacttacctgttgccacttggaatatatatcgatacattatggtgccgagtggtaacatgggagtgtttgatccaacagaaatacacaatcgagggcagctgaagtcacacatgaaagaagccatgatcaagcttggtttccacttgctctgcttcttcatgtatctttatagtatgatcttagctttgataaatgactgaagctggagaagccgtggttgaagtcagcctacactacagtgcacagttgaggagccagagacttcttaaatcatccttagaaccgtgaccatagcagtatatattttcctcttggaacaaaaaactatttttgctgtatttttaccatataaagtatttaaaaaacatgaattgagtttctgtagatttctagttctcaactttagcctgaacgccaacacttgaaggtgtttttcatcctctgtatgttgaaggtggttatttgtatgtaggaacaggactgccatcccagctttgcatgccaaagaaataaagaacacactttaaagggcaaactgaagagatgagcgagcaaaggtgcccttcaggtctactgaaaagttagagtacaaaacaacactgttgatctggacaaaagaagaaaaattaccctttttgcttgtgttgtgacaacttcatttaatatggtttaaagatttatgagactgtcagctaaaagtcttttcacaagaatgtcaacagagaatggcatctcaaaatatatatatttctttgcacaatttgtgaaaccttataagccattttccccaggtacaatgtagttcctgctgatagaaaggaaatattttgtcaagagctttcatttaaaagctactacctccacaatcacccccaaacccagaaaatccccactggctcttgccagtctggttttcgtattgcagttattccaattgtatttgatctccctgataacgtattttcatgggtttgggtagaagatgctaatcagattagaagcaggaatagttatttgctgtctgtgaaattgagccttttggtgcgccacgtggtgccagatcaacacttctatccctctgcactgaccacgttgtgaactgggagaccaaatgcaagccatttcatggacatagcaatatacaaccaaactctgttccttggagttatattgtaaactcttgcaggtgggagagcagttcacctccttagctctgtttgccagctcttacagggtaaaataaacctggcaatttatcctcagtcctagtttgtggtttaatgttgctatcttaagcactggcatttgggcaaaacatgactgtgttctgtgggagaatccaaaggcattattcactctagttgagatagaattgggtggctaaacagggtgtgtggtacccaaaagattaaatgttacatgtccttttagtccttgaccaggtctagccttggcagaagcaagggagccactaagccaaactccctgtgcagacagaccatgtttcaaggctggaagtagtgccctggcaacacacaaaaggaacggtgaaatgtggtagcaactgcccttgctaatcaccgtaacctcggctgagaaagaagaggaagcgaaatccaagatgcagctcagttcatcaaagcctagcaggtcccctcagctgccttttcatgcctgccacagactacagtaggacaaaacctgacctggtctttgaagttaagagctaagaaagcttcctatagtagtatctcccatggcacttaccacattctatctggtattacaattatttgtatgcaattaatcactcttagattgtatgttcctggagggcagaatatgcccattcatatttgtatcttcttccttctgctcttggcacctaacacagtgccttgcacacaaacaataaatgattgttgagtgaataagtaaa

SEQ ID NO: 401243 - DNA, 2245 bp, Homo sapiens
acttaggctaggtacgaggccttggtgttaggaaggagcggcggcgacggaggaggaggatggaggcggtggtgttcgtcttctctctcctcgattgttgcgcgctcatcttcctctcggtctacttcataattacattgtctgatttagaatgtgattacattaatgctagatcatgttgctcaaaattaaacaagtgggtaattccagaattgattggccataccattgtcactgtattactgctcatgtcattgcactggttcatcttccttctcaacttacctgttgccacttggaatatatatcgatacattatggtgccgagtggtaacatgggagtgtttgatccaacagaaatacacaatcgagggcagctgaagtcacacatgaaagaagccatgatcaagcttggtttccacttgctctgcttcttcatgtatctttatagtatgatcttagctttgataaatgactgaagctggagaagccgtggttgaagtcagcctacactacagtgcacagttgaggagccagagacttcttaaatcatccttagaaccgtgaccatagcagtatatattttcctcttggaacaaaaaactatttttgctgtatttttaccatataaagtatttaaaaaacatgaattgagtttctgtagatttctagttctcaactttagcctgaacgccaacacttgaaggtgtttttcatcctctgtatgttgaaggtggttatttgtatgtaggaacaggactgccatcccagctttgcatgccaaagaaataaagaacacactttaaagggcaaactgaagagatgagcgagcaaaggtgcccttcaggtctactgaaaagttagagtacaaaacaacactgttgatctggacaaaagaagaaaaattaccctttttgcttgtgttgtgacaacttcatttaatatggtttaaagatttatgagactgtcagctaaaagtcttttcacaagaatgtcaacagagaatggcatctcaaaatatatatatttctttgcacaatttgtgaaaccttataagccattttccccaggtacaatgtagttcctgctgatagaaaggaaatattttgtcaagagctttcatttaaaagctactacctccacaatcacccccaaacccagaaaatccccactggctcttgccagtctggttttcgtattgcagttattccaattgtatttgatctccctgataacgtattttcatgggtttgggtagaagatgctaatcagattagaagcaggaatagttatttgctgtctgtgaaattgagccttttggtgcgccacgtggtgccagatcaacacttctatccctctgcactgaccacgttgtgaactgggagaccaaatgcaagccatttcatggacatagcaatatacaaccaaactctgttccttggagttatattgtaaactcttgcaggtgggagagcagttcacctccttagctctgtttgccagctcttacagggtaaaataaacctggcaatttatcctcacaaaaaaaaaaaaaaaaaaaaaaaaacaaaacacaaaaaaccaaaaaaaaaaaagaggggggggccacaaaaaaaacaccccagacgagagggggagcacaaaaaacaaagacaacccccgaaattttagggcaaacagggcgggcccccacatataggagggcgcgactaatacaaaaaccaagagaagagggccagcagaaaaacacaaaccgacgtgtacaggaggggaaaaaaactagcgggcacgagacgaaccctcaatatgagaaaagaagcaacaacacaaaggtggcgagcgaacaataacatcagaccgaaacgaccacaacaacgaaacaacagggatgataacaagcactgacggagagaaagcatacaacaacgcacgagcaacgacacctaaaaatgagtagaaacccacacaacgcagttgcacgacgcgaccgagaaagccagagacacaggcgaaaagtaagaaagagacaaaatataccacaagaggacagataaaaaagaaacaaaaataacaaagagaagacaaaagcagccaaaaacaccgacagaaaacgaagcgacagaagcacaccaccgaaataacagacaacaagagctaccaacaaacgcaggcacgagaacagaaaaaaggagcccaacaacagaccggcccaacacagacacgagaatacaacaacagaaaccaa

SEQ ID NO: 401244 - DNA, 2301 bp, Homo sapiens
acttaggctaggtacgaggccttggtgttaggaaggagcggcggcgacggaggaggaggatggaggcggtggtgttcgtcttctctctcctcgattgttgcgcgctcatcttcctctcggtctacttcataattacattgtctgatttagaatgtgattacattaatgctagatcatgttgctcaaaattaaacaagtgggtaattccagaattgattggccataccattgtcactgtattactgctcatgtcattgcactggttcatcttccttctcaacttacctgttgccacttggaatatatatcgatacattatggtgccgagtggtaacatgggagtgtttgatccaacagaaatacacaatcgagggcagctgaagtcacacatgaaagaagccatgatcaagcttggtttccacttgctctgcttcttcatgtatctttatagtatgatcttagctttgataaatgactgaagctggagaagccgtggttgaagtcagcctacactacagtgcacagttgaggagccagagacttcttaaatcatccttagaaccgtgaccatagcagtatatattttcctcttggaacaaaaaactatttttgctgtatttttaccatataaagtatttaaaaaacatgaattgagtttctgtagatttctagttctcaactttagcctgaacgccaacacttgaaggtgtttttcatcctctgtatgttgaaggtggttatttgtatgtaggaacaggactgccatcccagctttgcatgccaaagaaataaagaacacactttaaagggcaaactgaagagatgagcgagcaaaggtgcccttcaggtctactgaaaagttagagtacaaaacaacactgttgatctggacaaaagaagaaaaattaccctttttgcttgtgttgtgacaacttcatttaatatggtttaaagatttatgagactgtcagctaaaagtcttttcacaagaatgtcaacagagaatggcatctcaaaatatatatatttctttgcacaatttgtgaaaccttataagccattttccccaggtacaatgtagttcctgctgatagaaaggaaatattttgtcaagagctttcatttaaaagctactacctccacaatcacccccaaacccagaaaatccccactggctcttgccagtctggttttcgtattgcagttattccaattgtatttgatctccctgataacgtattttcatgggtttgggtagaagatgctaatcagattagaagcaggaatagttatttgctgtctgtgaaattgagccttttggtgcgccacgtggtgccagatcaacacttctatccctctgcactgaccacgttgtgaactgggagaccaaatgcaagccatttcatggacatagcaatatacaaccaaactctgttccttggagttatattgtaaactcttgcaggtgggagagcagttcacctccttagctctgtttgccagctcttacagggtaaaataaacctggcaatttatcctcagtcctagtttgtggtttaatgttgctatcttaagcactggcatttgggcaaaacatgactgtgttctgtgggagaatccaaaggcattattcactctagttgagatagaattgggtggctaaacagggtgtgtggtacccaaaagattaaatgttacatgtccttttagtccttgaccaggtctagccttggcagaagcaagggagccactaagccaaactccctgtgcagacagaccatgtttcaaggctggaagtagtgccctggcaacacacaaaaggaacggtgaaatgtggtagcaactgcccttgctaatcaccgtaacctcggctgagaaagaagaggaagcgaaatccaagatgcagctcagttcatcaaagcctagcaggtcccctcagctgccttttcatgcctgccacagactacagtaggacaaaacctgacctggtctttgaagttaagagctaagaaagcttcctatagtagtatctcccatggcacttaccacattctatctggtattacaattatttgtatgcaattaatcactcttagattgtatgttcctggagggcagaatatgcccattcatatttgtatcttcttccttctgctcttggcacctaacacagtgccttgcacacaaacaataaatgattgttgagtgaataagtaaacgaatgaaaaaactggaggcttatcttatgaaacaacatttgtggaacaaactactaattgtggcctcgttggcctacaagag

SEQ ID NO: 401245 - DNA, 2262 bp, Homo sapiens
gcaagggcctatcaggggtgggtcggggcatccgagcgggtttgacggaaggagcggcggcgacggaggaggaggatggaggcggtggtgttcgtcttctctctcctcgattgttgcgcgctcatcttcctctcggtctacttcataattacattgtctgatttagaatgtgattacattaatgctagatcatgttgctcaaaattaaacaagtgggtaattccagaattgattggccataccattgtcactgtattactgctcatgtcattgcactggttcatcttccttctcaacttacctgttgccacttggaatatatatcgatacattatggtgccgagtggtaacatgggagtgtttgatccaacagaaatacacaatcgagggcagctgaagtcacacatgaaagaagccatgatcaagcttggtttccacttgctctgcttcttcatgtatctttatagtatgatcttagctttgataaatgactgaagctggagaagccgtggttgaagtcagcctacactacagtgcacagttgaggagccagagacttcttaaatcatccttagaaccgtgaccatagcagtatatattttcctcttggaacaaaaaactatttttgctgtatttttaccatataaagtatttaaaaaacaaaaaaaaaaaaaaaatcattttaactcacattaccatgatctggagcattgttacatgttggatttgtgtgtgcactggtgtgtttatgcaagggagactggattcacaagtcagaggtgaatctgagcctcattaggcagaatattcaacccagcagaaaattgaatttgtcgcacaaagcacttaaacctacaacccattgcaagaattgaaatcagatcagggataagtgatatcagaatctgggaaagccggaggtgagggtggaggggaaaaagctgaaagtctcaaagcaagcatcgttttcaccttggtggggtgaaatttcaggacaggattttacctgaatgccacagctgaggaggaaggtcagttgcagctttaggcgatttaccagctttgagaaactagtcagtttaggaaatgattagggtattaaagctaaggtttaagataaagaaagaaaaggccacctagttgagatccaactggttggacttgggtttatgggaaagagagacagtggttatggttgctgtgggacaaggtctggaaacagattcctgagggacatagcagctggcagtgggcatagatggaaatcccaaatgcctctttcttctgacccctctgtcttaaacagggtagtgtggctgattttaggtcatgtgcctgatagcagtgcaagagaatatacaagaggtaattgggagataaaactctggtgcagttgttactgggggcactcatagtgtacacaggagaaaaatgtcatggaatgtttcattagctgcatccttggattagagaaaacacctttccagagcctccttcctcctgcccgttaggttacctgggcatcgactcccctgtctttgagatagtcagctccctgaggccaaggatgctggcttgagttggtttcttcacagcatttaacatagtgcctgacacataatagtctctctatttatgctaaataaatacaatcctcaagacttgacatcagctctggaatagtagagtgggaatgctgcagaaaagatccagagaggaaagaaggcaccgagatgttaaaatgcggcttgttgacagaatacttgggattgtccagtgctgctatttctatttttcacttttggcaggtatttattatttcactgataggagacatcaagttccagcattttaatcctgtacttgaaacctacatttacaagcacttcagcgccactttggcatatgtgtaagtatgatctgaaggaactacatgttgttggatctttggatttgtactcttaggactggattgttgagaaacgagacggacctattactattcagtaaatacgcctgttaaggcagaactcttattctaagcttccgggtggaaaaagggaaccatctaagtattctaactctggaaagggggctaagatcagggccttcattctggatcaggcgaaatttccttaaggatccagaataggccaggcgtggttgctcatacctgcaattccagcactttgtggggaggattgcttgaggccaggaattcaagaccagcctaggcaacataacaagaaccttattctttac

SEQ ID NO: 401246 - DNA, 2052 bp, Homo sapiens
cggcggtctgaggacccggtgtcgagataagtgggtaattccagaattgattggccataccattgtcactgtattactgctcatgtcattgcactggttcatcttccttctcaacttacctgttgccacttggaatatatatcgatacattatggtgccgagtggtaacatgggagtgtttgatccaacagaaatacacaatcgagggcagctgaagtcacacatgaaagaagccatgatcaagcttggtttccacttgctctgcttcttcatgtatctttatagtatgatcttagctttgataaatgactgaagctggagaagccgtggttgaagtcagcctacactacagtgcacagttgaggagccagagacttcttaaatcatccttagaaccgtgaccatagcagtatatattttcctcttggaacaaaaaactatttttgctgtatttttaccatataaagtatttaaaaaacatgaattgagtttctgtagatttctagttctcaactttagcctgaacgccaacacttgaaggtgtttttcatcctctgtatgttgaaggtggttatttgtatgtaggaacaggactgccatcccagctttgcatgccaaagaaataaagaacacactttaaagggcaaactgaagagatgagcgagcaaaggtgcccttcaggtctactgaaaagttagagtacaaaacaacactgttgatctggacaaaagaagaaaaattaccctttttgcttgtgttgtgacaacttcatttaatatggtttaaagatttatgagactgtcagctaaaagtcttttcacaagaatgtcaacagagaatggcatctcaaaatatatatatttctttgcacaatttgtgaaaccttataagccattttccccaggtacaatgtagttcctgctgatagaaaggaaatattttgtcaagagctttcatttaaaagctactacctccacaatcacccccaaacccagaaaatccccactggctcttgccagtctggttttcgtattgcagttattccaattgtatttgatctccctgataacgtattttcatgggtttgggtagaagatgctaatcagattagaagcaggaatagttatttgctgtctgtgaaattgagccttttggtgcgccacgtggtgccagatcaacacttctatccctctgcactgaccacgttgtgaactgggagaccaaatgcaagccatttcatggacatagcaatatacaaccaaactctgttccttggagttatattgtaaactcttgcaggtgggagagcagttcacctccttagctctgtttgccagctcttacagggtaaaataaacctggcaatttatcctcagtcctagtttgtggtttaatgttgctatcttaagcactggcatttgggcaaaacatgactgtgttctgtgggagaatccaaaggcattattcactctagttgagatagaattgggtggctaaacagggtgtgtggtacccaaaagattaaatgttacatgtccttttagtccttgaccaggtctagccttggcagaagcaagggagccactaagccaaactccctgtgcagacagaccatgtttcaaggctggaagtagtgccctggcaacacacaaaaggaacggtgaaatgtggtagcaactgcccttgctaatcaccgtaacctcggctgagaaagaagaggaagcgaaatccaagatgcagctcagttcatcaaagcctagcaggtcccctcagctgccttttcatgcctgccacagactacagtaggacaaaacctgacctggtctttgaagttaagagctaagaaagcttcctatagtagtatctcccatggcacttaccacattctatctggtattacaattatttgtatgcaattaatcactcttagattgtatgttcctggagggcagaatatgcccattcatatttgtatcttcttccttctgctcttggcacctaacacagtgccttgcacacaaacaataaatgattgttgagtgaataagtaaa

SEQ ID NO: 401247 - DNA, 806 bp, Homo sapiens
  misc_feature (665)..(665): n is a, c, g, or t
  misc_feature (669)..(670): n is a, c, g, or t
gcaagggcctatcaggggtgggtcggggcatccgagcgggtttgacggaaggagcggcggcgacggaggaggaggatggaggcggtggtgttcgtcttctctctcctcgattgttgcgcgctcatcttcctctcggtctacttcataattacattgtctgatttagaatgtgattacattaatgctagatcatgttgctcaaaattaaacaagtgggtaattccagaattgattggccataccattgtcactgtattactgctcatgtcattgcactggttcatcttccttctcaacttacctgttgccacttggaatatatatcgatacattatggtgccgagtggtaacatgggagtgtttgatccaacagaaatacacaatcgagggcagctgaagtcacacatgaaagaagccatgatcaagcttggtttccacttgctctgcttcttcatgtatctttatagtatgatcttagctttgataaatgactgaagctggagaagccgtggttgaagtcagcctacactacagtgcacagttgaggagccagagacttcttaaatcatccttagaaccgtgaccatagcagtatatattttcctcttggaacaaaaaactatttttgctgtatttttaccatataaagtatttaaaaaaaaaanaatnnaaaaatttccttgtcggccgccttgggccagtcgattctagactcggcaagcttatgatgccggccgaattgagcctactggccattcgcctttgggggtcgattacattatgggcgcggttaaacggcgggctgg

SEQ ID NO: 401248 - DNA, 2164 bp, Homo sapiens
acttaggctaggtacgaggccttggtgttaggaaggagcggcggcgacggaggaggaggatggaggcggtggtgttcgtcttctctctcctcgattgttgcgcgctcatcttcctctcggtctacttcataattacattgtctgatttagaatgtgattacattaatgctagatcatgttgctcaaaattaaacaagtgggtaattccagaattgattggccataccattgtcactgtattactgctcatgtcattgcactggttcatcttccttctcaacttacctgttgccacttggaatatatatcgcaatcgagggcagctgaagtcacacatgaaagaagccatgatcaagcttggtttccacttgctctgcttcttcatgtatctttatagtatgatcttagctttgataaatgactgaagctggagaagccgtggttgaagtcagcctacactacagtgcacagttgaggagccagagacttcttaaatcatccttagaaccgtgaccatagcagtatatattttcctcttggaacaaaaaactatttttgctgtatttttaccatataaagtatttaaaaaacatgaattgagtttctgtagatttctagttctcaactttagcctgaacgccaacacttgaaggtgtttttcatcctctgtatgttgaaggtggttatttgtatgtaggaacaggactgccatcccagctttgcatgccaaagaaataaagaacacactttaaagggcaaactgaagagatgagcgagcaaaggtgcccttcaggtctactgaaaagttagagtacaaaacaacactgttgatctggacaaaagaagaaaaattaccctttttgcttgtgttgtgacaacttcatttaatatggtttaaagatttatgagactgtcagctaaaagtcttttcacaagaatgtcaacagagaatggcatctcaaaatatatatatttctttgcacaatttgtgaaaccttataagccattttccccaggtacaatgtagttcctgctgatagaaaggaaatattttgtcaagagctttcatttaaaagctactacctccacaatcacccccaaacccagaaaatccccactggctcttgccagtctggttttcgtattgcagttattccaattgtatttgatctccctgataacgtattttcatgggtttgggtagaagatgctaatcagattagaagcaggaatagttatttgctgtctgtgaaattgagccttttggtgcgccacgtggtgccagatcaacacttctatccctctgcactgaccacgttgtgaactgggagaccaaatgcaagccatttcatggacatagcaatatacaaccaaactctgttccttggagttatattgtaaactcttgcaggtgggagagcagttcacctccttagctctgtttgccagctcttacagggtaaaataaacctggcaatttatcctcagtcctagtttgtggtttaatgttgctatcttaagcactggcatttgggcaaaacatgactgtgttctgtgggagaatccaaaggcattattcactctagttgagatagaattgggtggctaaacagggtgtgtggtacccaaaagattaaatgttacatgtccttttagtccttgaccaggtctagccttggcagaagcaagggagccactaagccaaactccctgtgcagacagaccatgtttcaaggctggaagtagtgccctggcaacacacaaaaggaacggtgaaatgtggtagcaactgcccttgctaatcaccgtaacctcggctgagaaagaagaggaagcgaaatccaagatgcagctcagttcatcaaagcctagcaggtcccctcagctgccttttcatgcctgccacagactacagtaggacaaaacctgacctggtctttgaagttaagagctaagaaagcttcctatagtagtatctcccatggcacttaccacattctatctggtattacaattatttgtatgcaattaatcactcttagattgtatgttcctggagggcagaatatgcccattcatatttgtatcttcttccttctgctcttggcacctaacacagtgccttgcacacaaacaataaatgattgttgagtgaataagtaaa

SEQ ID NO: 401249 - DNA, 522 bp, Homo sapiens
gcaagggcctatcaggggtgggtcggggcatccgagcgggtttgacggaaggagcggcggcgacggaggaggaggatggaggcggtggtgttcgtcttctctctcctcgattgttgcgcgctcatcttcctctcggtctacttcataattacattgtctgatttagaatgtgattacattaatgctagatcatgttgctcaaaattaaacaagtgggtaattccagaattgattggccataccattgtcactgtattactgctcatgtcattgcactggttcatcttccttctcaacttacctgttgccacttggaatatatatcgatacattatggtgccgagtggtaacatgggagtgtttgatccaacagaaatacacaatcgagggcagctgaagtcacacatgaaagaagccatgatcaagcttggtttccacttgctctgcttcttcatgtatctttatagtatgatctagcattaatgtaatcacattctaaatcagacaatgtaattagtcgac

SEQ ID NO: 401250 - DNA, 519 bp, Homo sapiens
gcaagggcctatcaggggtgggtcggggcatccgagcgggtttgacggaaggagcggcggcgacggaggaggaggatggaggcggtggtgttcgtcttctctctcctcgattgttgcgcgctcatcttcctctcggtctacttcataattacattgtctgatttagaatgtgattacattaatgctagatcatgttgctcaaaattaaacaagtgggtaattccagaattgattggccataccattgtcactgtattactgctcatgtcattgcactggttcatcttccttctcaacttacctgttgccacttggaatatatatcgtatgatcttagctttgataaatgactgaagctggagaagccgtggttgaagtcagcctacactacagtgcacagttgaggagccagagacttcttaaatcatccttagaaccgtgaccatagcagtatatattttcctcttggaacaaaaaactatttttgctgtatttttaccatataaagtatttaaaaaa

SEQ ID NO: 401251 - DNA, 988 bp, Homo sapiens
aaactatttgaaaaaattaacagacatagataaacctttgggcaaattagaattgtgtagaacttccttgagccaataaaacctacaacaacaatattttaagatgaagtatttgaagcagtccattagaatcaggaacaagtactatgttggagatcctagccagcattataaggcaagaaaaacaaaagattaaaggattctgaatatactattgatatggtttggatctgtgtccctacccaaatctcatgttgaattgtaatccccaatgttggaggtgaggcctggtgggagattggatcacgggaatgggtttctcattcgtggtttagtaccatcctcttggtactgtccttgaaatagttcttaggagatctggtaatttagaattgtgtggtacctctcccctctctcttgctcttgctccccctttgccttccaccatgattggaagcttcctgaagctgcctcagaagcagaagccactatgcttcctgtacagcttgcagaaccatgagccaattaaaccccttttctttataaattactcagtctccagtatttatagcaatgtgaaaacagataatatgactatcaatatacaaaagtgaattgcatttctttccagcagaaatgaactgttagaaaatgatttttgtaacataccatttactatattcctttaaaaatataaattaggtaacttaacaaaaggtatagaagacctctgtagaaaattacaaaactttattgacaggcatttaaaaatgtctaattttaaaattgccatgttcaatgattaaaagactcgagttaagatggcagttctccactacacaatgaaggtaattgcaatacaaatcccaaatgagtttttcaaggagcttgacaaactgattctaaagtctgtatgacaaaaagcagaattcaggatactccagaagcagatttaagatagaattgacttgtagatattcgtaacagc

SEQ ID NO: 401252 - DNA, 672 bp, Homo sapiens
tgcaggaaaagaaaactatttgaaaaaattaacagacatagataaacctttgggcaaattagaattgtgtagaacttccttgagccaataaaacctacaacaacaatattttaagatgaagtatttgaagcagtccattagaatcaggaacaagtactatgttggagatcctagccagcattataaggcaagaaaaacaaaagattaaaaattgtaaataaacataacttagtctacagataaattattgaagagctttgcaaggattctgaatatactattgatatggtttggatctgtgtccctacccaaatctcatgttgaattgtaatccccaatgttggaggtgaggcctggtgggagattggatcacgggaatgggtttctcattcgtggtttagtaccatcctcttggtactgtccttgaaatagttcttaggagatctggtaatttagaattgtgtggtacctctcccctctctcttgctcttgctccccctttgccttccaccatgattggaagcttcctgaagctgcctcagaagcagaagccactatgcttcctgtacagcttgcagaaccatgagccaattaaaccccttttctttataaattactcagtctccagtatttatagcaatgtgaaaacagataatatgactatcaatatac

SEQ ID NO: 401253 - DNA, 2609 bp, Homo sapiens
  misc_feature (659)..(659): n is a, c, g, or t
  misc_feature (1269)..(1269): n is a, c, g, or t
  misc_feature (1299)..(1299): n is a, c, g, or t
  misc_feature (1301)..(1301): n is a, c, g, or t
  misc_feature (1304)..(1304): n is a, c, g, or t
  misc_feature (1306)..(1306): n is a, c, g, or t
  misc_feature (1309)..(1309): n is a, c, g, or t
  misc_feature (1315)..(1315): n is a, c, g, or t
  misc_feature (1325)..(1325): n is a, c, g, or t
  misc_feature (1336)..(1336): n is a, c, g, or t
  misc_feature (1343)..(1344): n is a, c, g, or t
  misc_feature (1361)..(1361): n is a, c, g, or t
  misc_feature (1381)..(1381): n is a, c, g, or t
  misc_feature (1400)..(1400): n is a, c, g, or t
  misc_feature (1998)..(1998): n is a, c, g, or t
  misc_feature (2006)..(2006): n is a, c, g, or t
cccacgcgtccgctttttaaagcacttactgttttcagagcacccatatcccaccctggtgagaaggccactctcacatctgagtgttgggtacaaagctgctccgtagagtgatgtgcactcctggtgggtgaggggcaggggcagtggcagtgtgcaaagtgccgagattgcagcctctgcccggccgccaccccgtctgggaagtgaggagcgtctccgcctggccgcccatcgtctgggatgtgaggagcccctctgcctggctgcccagtctggaaagtgaggagcgtctctgcctggccgccatcccatctaggaagtgaggagcgcctcttcccggccgccatcacatctgggaagtgaggagcgtctctgcccggccgcccattgtctgagatgtggggagcacctctgccctgccgccccgtctgggatgtgaggagcatctctgcccggccgccccgtctgagaagtgaggagaccctctgcctggcaaccgccccgtctgagaagtgaggagcccctccgcccagcagccaccccgtctgggaagtgaggagcgtctccgcccggcagccacctcgtccgggagggaggtgggggggtcagccccccgcccggccagccgccccgtccgggagggaggtgggggggcngcccccataagcgctaacttaagggttgtggtattacgcctgatatgatttaacgtgccgatgaattactctcacgataactggtcagcaattctggcccatattggtaagcccgaagaactggatacttcggcacgtaatgccggggctctaacccgccgccgcgaaattcgtgatgctgcaactctgctacgtctggggctggcttacggccccggggggatgtcattacgtgaagtcactgcatgggctcagctccatgacgttgcaacattatctgacgtggctctcctgaagcggctgcggaatgccgccgactggtttggcatacttgccgcacaaacacttgctgtacgcgccgcagttacgggttgtacaagcggaaagagattgcgtcttgtcgatggaacagcaatcagtgcgcccgggggcggcagcgctgaatggcgactacatatgggatatgatcctcatacctgtcagttcactgattttgagctaaccgacagcagagacgctgaacggctggaccgatttgcgcaaacggcagacgagatacgcattgctgaccggggattcggttcgcgtcccgaatgtatccgctcacttncttttggagagctgatatatcgtcgggttnantgncnagnattgcnctgttaactncagaaggaatncgctttnncatgatggttttctccnggcggattgcggtaagaacngtgaaaccactgtaatganaggcaatcaggtaataaaaagccggagctccctttccggcacgtctcattgccgtatcacttcctcccgaaaaagcattaatcagtaaaacccgactgctcagcgagaatcgtcgaaaaggacgagtagttcaggcggaaacgctggaagcagcgggccatgtgctattgctaacatcattaccggaagatgaatattcagcagagcaagtggctgattgttaccgtctgcgatggcaaattgaactggcttttaagcggctcaaaagtttgctgcacctggatgctttgcgtgcaaaggaacctgaactcgcgaaagcgtggatatttgctaatctactcgccgcatttttaattgacgacataatccagccatcgctggatttcccccccagaagtgccggatccgaaaagaagaactaactcgttgtggagaataacaaaaatggtcatctggagcttacaggtggccattcgtgggacagtatccctgacagcctacaaaacgcaattgaagaacgcgaggcatcgtcttaacgaggcaccgaggcgtcgcattcttcagatggttcaacccttaagttagcgcttatggggcngccccccncctggccagccgccccgtccgggaggtgaggggcgcctctgcccggccgcccctactgggaagtgaggagcccctctgcccggccaccaccctgtctgggaggtgtaaccaacagctcattgagaacgggccatgatgacaatggcggttttgtggaatagaaagcggggaaaggtggggaaaagattgagaaatcggatggttgccgtgtctgtgtagaaagaggtagacatgggagacttttcattttgttctgtactaagaaaaattcttctgccttgggatcctgttgatctgtgaccttacccccaaccctgtgctctctgaaacatgtgctgtatccactcagggttgaatggattaagggcggtgcaagttgtgctttgttaaacagatgcttgaaggcagcatgctccttaagagtcatcaccactccctaatcgcaagtacccagggacacaaacactgcggaaggccgcagggtcctctgcctaggaaaaccagagacctttgttcacgtgtttatctgctgaccttccctccactattgtcctgtgaccctgccaaatccccctctgcgagaaacacccaagaatgatcaat

SEQ ID NO: 401254 - DNA, 986 bp, Homo sapiens
cagccgcccaagccgggctacagctactctatccgaaccagtttgttccttgacactttttacatgtttacgctctcaaaaattattgaggatcccaatatgtttatgtggctaatatctactgagttataccatactggcaactaacactgataattttaatatttatttaaaaatttcattttataatataactttttctttttccttttctttttattatttttttctttttttgagacggagtctcgctctgtcactcaggctggagtgcagtggcacaatctcggctcactgcaacccctgcctcctgggttcaaacaattcttgtgcctcagcctccatctcatgcctcctcagctggcactacaggcgccaccacacctggctaatttgtttgtatttttagtagagacggggtttcatcatgttggccagactggtcttgaactcctgacctcaggtgatccactcgcctcagcttcccaaagtgctgggattacagatgtgagccactgcgcccagccagtataacattttaataaaaataactagtttttttttaatgtacagaaagtggcattattttatacttttgcaaccctccctttaagacctggattagtagaagacaactgattttcacatttgcttctaaacgcaatctctcgccgtatcatatcatgtagcctctggaatactccgctgtacacctgagacagaatgaaagtggaaagggcaaataacgtgtttgtatggttacatatttttattttttccaatctgaatagcaatcagtttatattgttatgaaaacaagtttgatcttgggacgctctgtcttgaaagtcgtgggaatgcccaagcagccccagaccactttgagcactgctgaattaagaatatggtcatgtgacatcgggcacggtggctcacgcctgtcatcccagtactttgggaggccgaggtgggtggatcacctgagg

SEQ ID NO: 401255 - DNA, 318 bp, Homo sapiens
ctggcaaggccagccatatccctccaccatcctcagaatatgtcaaacctcagaaatatatcaattctccagctctatgtcacaatctagttcaagattaaaggatcttgagcatctttttcttccacagtatatcgcatgggtccgttgcacagagtgatgacattacatttactggacctagtgaatgtgaagtagcaactactctgaacttattggtaaaatatttgcagtgattggtcaggactaccttggggaaactggactactgctccacaatggagataagaaaaagaatgtcttaaatacaagaaatcc

SEQ ID NO: 401256 - DNA, 275 bp, Homo sapiens
atcaggaagggagcccagtgagcctgggttcttatccaccatgctgcattgctcccagataaatacaatttctacaaggctggcttgtcagctggagaaaaatctgacgtgagtttgtaatttaatgttccttagctctaaaatgacctagaaaaaatgtatacatttagtaattttgtgggcttgaatattttaactggacaacggcaatttatgtgatgcctatctattttatacccagataagtaaagaattcattactcctggtaaaagtt

SEQ ID NO: 401257 - DNA, 369 bp, Homo sapiens
gccaggaattcaaatagaatcaaatggtagaaagtaaaatcccctatttttcctcatgaactattcctgcatcctataggttaccactcttaacattttcatatgcattcatttcttcagaaatagtcacgtttggctgggtgtggtggctcacgcctgtaatcccaacactttgggaggccaaggcaggcagatcacctgagatcaggaatttgagaccagcctgaccaatatggtgaaaccctgtctctactaaaaatacaaaaattagctgggtgtggtggcgcatgcctgtaatccagctacttgggtggctgaggcaggacaatcgcttgcacctgggacatggaggttgcagtgagacgagct

SEQ ID NO: 401258 - DNA, 524 bp, Homo sapiens
gcagaaggagaactcctgaagcctccgaaggaaggaaatcattacagggccctacagaagtaggtcatgtgctacagctgctcatagtttaagaggaagaaacatgggatctcaaacctggaacacgactctttcaaaatgcttgtgagcaacccaagaaaaacatcctcctgaggcttatctaataaccatgatctctaatcgtctcaatgtgtgctcatgtttccttaggagtttgcacccacttctcagagctaacgagatgccgaaacagaacacagaaaaaagtaatgaaggagatttaatagtttgtgttaaagctaatatggtccattaggggctgtcatttttataaacagtgaggatacgttaccctcttctttggtgtaaagtcattccgtgcaggacctgtaaacattcagtaatgatctgtagaacatgcatgaacgacaattaaagcaccacttgaaaagtctgttttcctcacatatttgttttcttgctaaataaacttgtaaagttca

SEQ ID NO: 401259 - DNA, 743 bp, Homo sapiens
gcagaaggagaactcctgaagcctccgaaggaaggaaatcattacagggccctacagaagtaggtcatgtgctacagctgctcatagtttaagaggaagaaacatgggatctcaaacctggaacacgactctttcaaaatgcttgtgagcaacccaagaaaaacatcctcctgaggcttatctaataaccatgatctctaatcgtctcaatgtgtgctcatgtttccttaggagtttgcacccacttctcagagctaacgagatgccgaaacagaacacagaaaaaagtaatgaaggagatttaatagtttgtgttaaagctaatatggtccattaggggctgtcatttttataaacagtgaggatacgttaccctcttctttggtgtaaagtcattccgtgcaggacctgtaaacattcagtaatgatctgtagaacatgcatgaacgacaattaaagcaccacttgaaaagtctgttttcctcacatatttgttttcttgctaaataaacttgtaaagttcatacatgtgtacgcatatgcttacattataaaaaaagtgtgcatttcattaagaacatctacgaacagatataagtgtttttggttcccattagcttgagaaatatcagaagtgattagttaaatgaggagcataggttctgttttttagtgcatactataataataaaacaaccactcttttatggtagcttagcaagacaaaattatagttcacaatg

SEQ ID NO: 401260 - DNA, 533 bp, Homo sapiens
agttttatcatgcagatgaagcctctgggtggcaggcttctgagaggatagatgtaaatgcttcttatcagactaagtctgtgttgatgttaaggccagtgagggtttaatgagtatgtctgaaccccacttcccatcacggcctgaaccagcctcaggttaaattttaacagtgccctggatgagaaggaagtccattcagaaggttggggggccttagaattttatttttggtttacattcatagagaactgaccttgatctccttgggaactaaatgagacaggaacacttttctcaactgatcagcaagtatagtttggaagttggctgtgtgtacctagcacatgctgggagtggcagagacactagagaaagttttataaaatatacctgcaggaagctgggcatagtggtgcacacttgtagtcctagctattcgagaggctgaggcagcaggaggatctcttgagatcaggagtttgagtctagcctgggtaatgtagcaagaccatgtctctagaaaaaaaaaa

SEQ ID NO: 401261 - DNA, 693 bp, Homo sapiens
acctgtgctgttcttttgaatagatttcactttaaaggcaaactccagctattaagtagaagaaaatgtaaagaaagatgtttctacctgagtagaattgtgtggaccagaaacatttgagatcctctaaagtttggaaaattcctaagaagtggttctccagcctcttttttcctgcaaagcattatgatgtgatgggaaaagcatagggccagacagcatgaattcagatcctacttatcaggatactacttatcaggagctatcttctctgtattttgatttctttattgtaaggtgggactcacgccacatacttctgaggggtgtttttaacagctcatgtaaagttgcctagcacagtttctgatctatattatgtgctgggttaaagttaattctggtttacttactcttttctttcttactgttaatatcatatctggaagctaaatgtattatcagtgaaatttatcataacccagtagtttttaaaggctcaagtaaaagatagaaccagagaatgacttgagctctgagaagaatagatgttgaaattatgctgagaagatccctctaagtattttatgatcatcaaggctatgcaagttaagtcaatatttttatacagataaaggccaagaggacatttgagatagtagtcttttctgccttctaaatcaagaaaaaaaa

SEQ ID NO: 401262 - DNA, 1081 bp, Homo sapiens
gcgcggtggctcatgcctgtaattccagcactttgggaggccgaggcgggcggatcacgaggccaggagattgagaccatcctggctaacacagtgaaaccccgactctactaaaaatacaaaaataaaattagctgggcgtggtagcaggcgcctgtagtcccagctactcaggaggctgaggcgggagaatggcatgaacccgggaggcggagcttgcagtgagcggagattgcaccactgcactccagcctgggcgacagagtgaaactcctccatctcaaaaaagaaaaagaaaaaggaaaaaaaaaaagaagaatgttaacttcagcgctgtctataatagcaaaaaataggaaagaatctaaatccttaccaaaagaaaataatatattcatataatggattactacatagctgttaaaatgaataaattatataaattccaacatgaaagaagtttaaaaacctaatgttgaatggaaaacgttatacaacaaacatgataacatgaatgaatggttaaaaagcataaaacaatacaaacacatttatttaaaataaactggaaggatgtaccaggtccatgacggtgttacgtctggggaaggggagatggagggcgtggccaggtggtaatcaaagagtcctttagtttggaagcaaatatgactaccaatgctaacaattaacataagttaattctacatatagagaagatatgggtgtaggctgcctttgtacttttctatatttttccatttcttaaaaaaaaaaaaaacaaaactttaacaacttcaatgactgtgtaatattcgattgcacagttataccataatatactcaaccaatctctaattgttaagacaccgagatatctgccactatcataaactgtgctataatgaacatctgtgtagttatttttgcacatttttaaaaaaggataaattccagctgggttccgtggctcacgcctgtaatctcagtattttgggaagccaaggcgggcggatcacgaggtcaggagttcgagaccagcctggccaatatagtgaaactccgtctttactaataatac

SEQ ID NO: 401263 - DNA, 356 bp, Homo sapiens
gcctgcgggtctgactgcagcttcagctatgacctggagttcccgggcttctctgcggggcaccagtctgtatgctccattttagataataaaaattggcatattctggggtgggcaggatacggggttcacctgcagatgaacagggcaggaaaagcttgatggggtgtcgggggaatctggttggccttaaagggaatttggggtcctgttcctgaatttggtaggcagcatgcatgtaaggcttgaagtgggtttggccagagcatgggctggagtgcttccaccctgctacacggacaatgccacagtctcacttttcctaacttttttttttaataaaatgtgaacaccat

SEQ ID NO: 401264 - DNA, 462 bp, Homo sapiens
acaggcactcaacactagcccagtccatgagagcagccgtggggctaaaacttgcaaagccacaggtgcactgccctagtagaggttgtccatggggctgtgcctctgcagcaggcgactccccactcccagtgctttatcattcgtgaaggatcttcccgcaccattttatgactaaatttttttctacctaggccccacctctaatgttagggagtatagttccacatgagttttgatagggacatagagacaaaccctattattctatccctgaccccacaaacatcatgtccttctcacattgcaaaatacaatcatgccttgccagcaggagtcttaactcgtttcagcattaactaaaagttacaaagtccaaagtctcatctgagtcaaggctacagtctctttttcctatgagcctctgaaataaaaagcaagttcactgcttctaaggtacaa

SEQ ID NO: 401265 - DNA, 415 bp, Homo sapiens
gggcaacaagagcgaaactccatctcaaaaaaaaaaaaaaaaaaagaaacaacatgagcaaatatttgcagcaaatcaataaatggtccttttagactgaaacttggtatagcagtttaggattagtgagagctaggaccagaaagctaggttggctgccaccttggagtgagaacctcgaatgccaaggtgggcagcttatgctggtgtagtagagttccattttagtaacacagtcatctcttacagaactttcctctccagaggatgaggtatcaggttgttcagctttgagtgtgccatctaggtgctatcagctagcaccttcaggctctaatctgctcctggttggtttaataacagaaaaatctgccaacctcaggagttttttgtttgttttttttaaccaagaata

SEQ ID NO: 401266 - DNA, 453 bp, Homo sapiens
ctctgtcaggagggtgagccccggcagctgctgctcaggcccggcctgtggcttctgctgctgtagcttcccccatgggtccaagggcatccagggccctgcctgagagtggaggctcctcctccccttcatcctcagagtcatgaacaggctgtccaggaaacagaacatcctgcttcctgcaacttgggacacagggtctctgcactgaagtcctggactgaggtggcaggtacagctgtgtcgtcacagacccacctctgatgggaaacctgtgtctctgtcatcctccttttcccatttccaggagtttccagagtggtgtcttcctccccctgctcctcagtgtgaatccctgtgcttcctttctctccagccaattctttttttaataaaactcctttcatgtaggaataatgcatatttaataaaccacccagatttataatagga

SEQ ID NO: 401267 - DNA, 312 bp, Homo sapiens
  misc_feature (10)..(10): n is a, c, g, or t
  misc_feature (28)..(28): n is a, c, g, or t
ggaaagcacnccgacgatttttggaatncgcccccagccaccgcgacttccagcccggtgctccacccacctccaacatgtctaaatgcctccgagatgttctgtctgacctgttatgctttcaggaagctgtggccatatgtagactcttaatctggttctggtatctgagaacgcccctccaaggtgttcagatcagtttggcctccactgtgtccttccaaaccctttggcaaggcctgttttcagtacaagtttcccttggcttttgagaacagcttcatgactgcctccaagtaggaattctctaat

SEQ ID NO: 401268 - DNA, 391 bp, Homo sapiens
gcagtgtgctcccacctcaggaccttgcctctgcggcctccacttggaaagttctcagttccctccaggcttctagaagcatctgggccagggctcatggctggataatttccctaggcttaacaacccaagcaagcttcgcctcctcgttttattttttgttaaacttatgagaatgtattaagaaagagtgcagctcgagagacattcagagatggagcacaccagaccccagatcacaaagccaaccatgcccagcccctcccaacacccccagccccacgaccatcgttctgaattctgacgacaccgtgagcctgcctttgtactttaaactcatggaaggataaccaccttcacgttttgaaataaatgtttcctgttgaaatga

SEQ ID NO: 401269 - DNA, 317 bp, Homo sapiens
ttccctggtggttttagtactgaaactgcagtgctatttagctgagtttagatggcttggcacagatattttaggtcagcatttggattataaatttttcctctttgctcattggaatcactatcatctatgatataatttgctaattgttgaaacttgttagaccttaatcatataatattttacatttctttaagtgatgagcagtttccaaaaactggttagttaataatatatttgatccttaaaatattttgagaggccaggcatggtggctcacacctgtaattccaacattttgggaggccgaggtggga

SEQ ID NO: 401270 - DNA, 364 bp, Homo sapiens
gccttgtgctgccacacctaaaaaatggctcctgcacccatgtaagaagcaatctgctttctcagccatcttggctcacctgttctttgactaccccaccctgcctggggctccagtactgagtgtatctacagtgctatggggacacctaggagaactctaccagtctgagatgggcttgctgtgggtaagacagtgaaattcaaggaaggaatagaagacggtggagagaagaatagaaaaacactctggacagagaggaaagagcatgagtgagaaaaagcctgggagctttggggaaaataaaatagttttgaaggggctgaagctaaagtgtagacgagggcaagtagagggaagatta

SEQ ID NO: 401271 - DNA, 950 bp, Homo sapiens
gtgaaatcctcagtcccaaggccctcacgttgttggcttgaaagcgccctcagccaagtttctattctgtgtcttctccctcccctgctttttccatggcactcactggagtgcatgtcccgcaggcggccctgtggggcctcccatggccaggacatgcaagcttggaggagggctgggtctgcaccgcccagcagggtagtcctcactgtcccacgcagcagagtcccgcacgagggtctaactgggagtcctggggcagggcctgcgcttctcctctcatgtccacgatgctaggcacggggtctgcgcacaggaggatgagtggagacctggctcctggggctggcagcagaggaatagggccctcgacagccttcccatccccctccagtggctctgctggctgacccagaggccctgtaacccgttcctcctggcctgaggagcatgtgctgcagctgctctcattccctggctcgtcccctccagtgtcctgtgcacagtgaggcgtctgtgtcgaagagacccccttctctcacccactccggctccttgcctgggagcccactggagagctctggggctgcgtcccgactccctcaagcctggaactgggagagccctgtcttcatcagaggtccatccctgtcccaggggcaccagagctggggcctttgatggcagcccagcccatgtcacctcctgggccctggcctcacccctgaccccaggcctttgcccagaggagaggtggccgcccctccctggcccgtgtagcagtagcaggcactggctccagccttctggcatcttgcctagtccagccccatctagctcccaggctccactcctgagccccacccatagggccagtgtggcctgaggtcccaggacaatccctttagaccatgactgtggctcagtcccttaccctgtgacagtaatgg

SEQ ID NO: 401272 - DNA, 675 bp, Homo sapiens
ctttttaatctcatgtttgcagttgtacttaacacatgtaaaaatactaatatcttttaagccaaagtggctacagtggaaatcatttcagagatggatcccccaagtagaagctcaaccaaatgtattcatgtcccagtgagtcactcaagagacaacagagggaaaaaatacctttagcttatacacatgaaagatagttgagtcagtgtatttttatgaggactccaaagaaaatatatatacacatattatgatcaaaacatgtcttaaagaaaatattaattcagtgtgaagctgatctgtaatatctctacaagattagagcacctgagaccctcccagaatatcctccaacctagggaaaaataattccagttaaagctggaaatctcccctccatgttcatttgctcctctcatagcctatcttttatttttcaagcatcattttttttcattttgaatatctttagataagtcaaaacatgaaaaagctttaaaacctccagaacaataatttcatcataacacccatggtattctgtaatttgaagaatatctgaatattttgatattttttctcagtctggaatcttttggttgttctcctctctcctaaacttgaaaaacactcacctttttaaggtgcctgaggtgtgaatacaaaaaaatg

SEQ ID NO: 401273 - DNA, 457 bp, Homo sapiens
gtcccattcctcaagtgatttatacaagaacatttgcgtaatggaaggtaattttaatgtatgctaatttccatgaggcctgcactttcagattgttctttttgctggaggaatgactgaagtgtcccaagcatttgacttttcaccctcttgtgtgaacttctccgtgaatggttttgttaggaaaaaccacgctccaaatgttctgtggccattagaagagacctgttgtatgcatagcatcattctgctttccaagtaatttctatgcagatggtatacagcaaaatttttctgccttacattaaaatctgcatcaaccaataagaatgatttgctcctgagcagacacaaatgaaggattattgtgtgggaggagaagtacaagtacaaagtggatcaggacagcaggtgggaccaaaggaggatacaggtccttttaaaattcttaattaaa

SEQ ID NO: 401274 - DNA, 434 bp, Homo sapiens
agatggggggaaacagaacatggcaaagaatgactggactctaaaaagttttatattctggattagtcagaatttcaacagaaaacagttggtaaatacaactaagaataatttgaggaatgcttccatacaaaggaaggagcatgaaagaattgtaagcaataaatctggaactggcgctcagtgaggataaaaacaaaacatggaaaaagaaggagtagaagatcagaccacctggagaacaaaagtgaccttctgtaaagagacacatgtagggaagacagcctcatggggaagagaccaacagaataaacaccatgacccttttctcctcttcctttctgccttcttacagggttctccacaggctgaacctaacctgaagccagaggatgagggagcctcctaatgtattcgtgagaagtcaaaaaaaa

SEQ ID NO: 401275 - DNA, 444 bp, Homo sapiens
tgagtccttccttattatgcccttggaagatgctttgaggaccccagtgatgaatcccaagaactctgtctccattatccctggtatagggcacctcatcactccggtgttatccctgaagggccttcataataatgtgcttaaagagtcccctattatgtccttcaggatggagcttgacttgcccaaattgctatgtacatgttaaagagaggctggaactgaagttggtcatttctcactggatcagtcaacaagatttgagtactttctgtgtgctctgcatcattctgagtactctggaggacagaataaggcatggctcctgccttcaaggagtatggaatttaatagaagatgacaacatacatgattgtaaatctatctacatgagagtgcctaattgtgagattcctaataaatggcaagatatgttctgaaaat

SEQ ID NO: 401276 - DNA, 193 bp, Homo sapiens
cttaagggtctccaagagcatgtcctgcttgctgaactaatttcctgatcaattgggttatttgtctggtagattggagcaaacctggaagctcatgattctagggctctgctaagtctttccatttatttttgtgggtgcagcagtgagatgtgagctgaatgatggtgtggtcagaggcttcctgagtgga

SEQ ID NO: 401277 - DNA, 363 bp, Homo sapiens
cgttcttcaaatatgtggcctgcttcaagataatgtaactgcacatcagctaaatgattataaagcagctggtgcctcccaagacggagcccccgcaacggcagtgattttgacaggcagagataagggtgtttccataataatgtggtagattaagggattcagcctgctgtactgaggggagactaaaatgcatctgaatttttatttggagagatctgaatgtattttactaacaagtctggtccttttgggctgaactttccatttgtcatggaagtgcccggcaatatcttgactccgatgttgtaggaagaccagcttcccggtgacgggattagctcagtcacgggagtaccagcc

SEQ ID NO: 401278 - DNA, 474 bp, Homo sapiens
atcaatgtatcaaagagatagctgcactcccatctttattgaagcactattcacaatatccaaaatacagattcaagcagtgtccatcaatgaatgagtgaatcaagaaaatgtgctacatatacccaatggaatattattcaaccataaaaaagaatgaaatcctgtcatctgtagtaacatggatggaaatgggaggtcattatgttaagtgaaataagccaaacaaagaaaaacaaatatcgcatgatctcatttatatgtgggagctaaaaaagtagaactcatgaagatagagagtagactgatggttaccagaggctgggaagggaagggagtagacaaggataaaaggaaataaaagaatatgaatgtatttattaccactaaactgtacccgtagaaatggtaaagatagtaaattatatgtatgtatacatatatatccttaataaaaaataaaaaataaatatt

SEQ ID NO: 401279 - DNA, 408 bp, Homo sapiens
tggattttactgtgcgaagttgaagaagcaaaagaatattgcttggtattgatctttcctaagaaaacagaggtaaattatgatgtattaataagtttacagtaaaattctatgaaagatgaagtacttaaaatagggaaaaagaaaagatgataaaatagtaaaacagagctgaataagacacagaaaaaaatgtaaaaaattagaaatgccatggataaaagcagccttacagaagccaaaatacatcggaaggtttcatctaagatatgaaattaaccaatttactacaactaccagaatgcactgaaataagacagagatgaaaactgcaagagaaactatgataggctatttgacatcactgaaaaagagactgcaaaaaaaataaatatatttttaaatata

SEQ ID NO: 401280 - DNA, 447 bp, Homo sapiens
catgaaaaactcattaccatttgatgctcctgattctacacaagaaggccagaaagtccttaaagttgaagtcactccaacagtgccgaggatttctcggactgcaattacaacagcttcaatccgtcgtcatagatggagaagagaaggtgagtacaaaatccccatagtccacacatggagtcaagtaaatttatcactgtttttacagactgtcttagcacgtgatattaaaagaccctgtataattaaagtaattttttttgttaaaaatatcactagaaatgtgactaaatgtctaaagttattttaatatgtatttataaaatagatgtttagattgctgtataaagattaaaacaaaataagatgaggttaaattttgtctttttttgaactaaataagaacaataggaaagaagttgctttaaccttgttaccatactg

SEQ ID NO: 401281 - DNA, 495 bp, Homo sapiens
cttgatagtgtcatttatagcacaaaagttttaattttgatgaagtcaaagactctatctacctaacccaaccaagctcatgaaaatttactccaatatttttatctaagagttttataggtttagtgcttacatctaaatttatgattcattttagttaatttttgtatatgatgagatccaacttcattcttttccatgtggatatcaagttgccccaacactgtttgttgaaaagatgattctttatcctgttgaatagttttggcaccctagtcaaaaatcataaatataagggtttagttctagattctcaattctattccattgacctggatgtctatttttatgtcaataccacactgccttgattactgtagctttctaggaggtaaatcagtaagaatgggtcctctaactttgttttagctattctaggtctcttgcatttctatataaattttaggatcaacttgtcagtttctgaaaaaaaaa

SEQ ID NO: 401282 - DNA, 1699 bp, Homo sapiens
  misc_feature (786)..(786): n is a, c, g, or t
  misc_feature (864)..(864): n is a, c, g, or t
  misc_feature (1168)..(1168): n is a, c, g, or t
ccactgatgacttgtagatggaggggtacatatgaaaagggcttcagagtggcctccaggagttaggagcaaccaccagtcaacagccagccagaaacagaggtcttggtcatctaagcacaagaaattgtattctgccaacaagaagatttggctgaccatgagaatgatttttttcctagagcttccagatgaggactcagtcatcagacacccagattatagccctgtggtaccctagttaaagaactaagctattccatgtcagagttttgaccaacagtactgtaggctaataaataggtgtgactgtaggctgttaagtttgtgtccatttgctatgaagcaatagaaaacaggcaacatgctctgttttttctactcttgcatcaccttggtctttctgttctcctccattcattaataaattgcttctggttcctctaggtactaggctgtgggtaggggaaggtaggaaagttgagaagaaagttggggtgtttttaaaatgacttaagttcagctgtcttccgagttcatgggaaaataagccattctttttctgccaaacggtggtattaaggcttgcaggatgaaatattttgcttctgacttctccagctgagaagcaggcataattttctgtgattattaatattgcaaactctagaaaatgcaagctagccttcccagaagttttctcactgttctacactccaattgccctaagggaaatagagggtgaagactgtctttccttctcagaggcactcccaatttctatgngtgattctcttgggtcaccctcatgtcaccagggaatgaaatattccccatcttactccatgcagaaaggaggagaanagccaggacatgttctgtattcctatgtattcccattaaccactagctttctcttacatatgttcattaggggatgaacaagaatattggaaagattggtaaaatcttgtagggacatttctagatgatttctatgattgtttgggatatttgcaatctgtccttagttttgattcctctgtgaattgaggtaaaattcccatttaaaatcctgttgcaaattctactttgcgaaagtaaaaaccaccaccctgtgctctatgaaagttcctttcttgcctactgataatagtttggttctctngagttaaaatatagctttattttcagatatttaaaatatctgctttttattttctaaaaatcactctaactacttggtggagagtagaatgcaggaggatgaaattggaccctgcaatacagatactcttgaggtaatctagaccttccattaaatgggtgatccatggaatggcaggatcaatgtcatctggaagcctgtaagaaaagatgagtctctggtctttcttcagacctactaaagtagaatgtacactttaacaagatccccaggtaatttgtatgcttactagaaattgtgaaggacttctctaggtgagatttgatgcttgcttatctagggtgatgtgtgtggaaatggggataagggaatggatacaagatatatttttgagatacaaatgacagaattttaggatgacttgatgtcagaaataaggaaaaggaagaaatccagcatgataagttaggtttctagcttgagtaacatagtggtggtttatgaagtttgggagaggaatatgcttgatac

SEQ ID NO: 401283 - DNA, 536 bp, Homo sapiens
tgaacttgttgccctgttcagcccagaggctgtccctatactgacagcagatttcttgctttgaattatctgtgtaataaaagagtccttccgagcttcaactgacattctgaggctgagagaggaagatccatttttttccccatctaattctttctttcactttttttttctgatgatgaaaaattttttttttggtttgcattttggaggattttcttaatgtgctgcatacagctctcggcttgtggtccactgcgggctgtctctcctcagactggaatgattaggcagtgaaagagacttaccttttccaaggagtacctctgtttcagaattcagggtggagcatgctggcaaccttttgggggcactttagatatgaatgagtttgaaggcgtagctatgatcctttcagaggccatttagtgccaaactgtatcctgtgattcatgtgtatatccatctgattaaagacaagacgggtgataaagagaaaataaaagaaaatgaagaagaaataaaagaagtgtgaa

SEQ ID NO: 401284 - DNA, 443 bp, Homo sapiens
tataggctgggtgcagtgcttcatgcctgtaatccgaacaatttgggaggccaaggtgggaggatcacttgaggccaggagtttgaaccagcctggccaactgagtaagagactatctctacaaggaaaataaatctactttaaaaattcgtaattaatggtcaggcatggtggttcatgcttgtaatcccagcactttgggaggccgaggtgggcggatcacttgaagtccggagttcgaggccagcctggccaacatggtgaaatcctgtctctactgaaaatacaaaaatattagccgggcatggtgtaccgtgcctgtagtcccaactacttgggaggccgaggcaggaaagttgcttgaacctgggaggcagagtttgtagtgagccgagactgcaccactgtactccagtctgggaaaaagggcaagactccatctc

SEQ ID NO: 401285 - DNA, 527 bp, Homo sapiens
gaaacaaagttgcagtgggctaaggaaatggctacagacggtaaagtaactcttaaaaaaatgtattgttggattatgtcaatatatgtaatatatataacaataatatacaaaggggggatgggaactgaactatatagcagtaaagttcaataaattttagcatgtattactgaaactaagcaagtataaatctgaatttgattctagcaagatacatagggtaagctctagaacaatgactttgaaaaaatatatagtggaaaaaattactaatgaatttagaatccttctagtaactggccactgaataagaaaagaaaaaaatttgaatgctatattagaaaatatcctctcattgcaaaagaaagcacaaaggagaaatagagaaaaatgacatgagacatacaaaaaacaaaaagtaaaatgtaactctatcaataattacattaaaatgtgaatggatcaaacaatccaacaaaaaggtagcttgtcaaagtggattttaaaaacatgatctaactctg

SEQ ID NO: 401286 - DNA, 371 bp, Homo sapiens
atgcttactgaggagctactgtgtccctgaaattgcctccacctccaagaagacagtggtgagcaagtcagacaatacctctaatctcatggtatttataagtaaatgggccgttaaaattaccagatcagaagtgctgtgttcagcaaatagaggctcatgggaaactcctaagaagggcttctgagctggacttgggggtcaggaaaggcagaatgagggggctgactcatccagactggggcggggttggcgggggtgcctcccacttactatctgtctccttctagactgacttctctgtcatcatgaatacacccctttaagacatacatttaagagaaaataagaggatgccttatttatttaaa

SEQ ID NO: 401287 - DNA, 84 bp, Homo sapiens
tttcaggccaaaagtgaattatttttagattatcatattagaaaataggaagtgctttgttgggttttatggcctactctaatg

SEQ ID NO: 401288 - DNA, 362 bp, Homo sapiens
gcagaggacccagctcccccgaaccctgactcgtgacccacaggagctgtgagataaagagggtgtggtttcaagccacagcagttttgctaatactgtcatgtagcaacgggttatagatccaaatggaataaaaaaccacaaacatcctagaaggaaacacagaagaatatcttctcagtctctgggttagcaaaggtttcttaggccacagaaagcattaagcaaatctaattttaattaaaaactagatttcataaaaatgtaaaatttctgttcattaaaggatgccatgatgacaccaataagcaacccatagattaggggaaatactgcaatacctgtctagagctgagaataca

SEQ ID NO: 401289 - DNA, 164 bp, Homo sapiens
ctgtatttccagacaagatttacctaacatttagcctgctcaggagatgcaaaacaatataagtttctgttaaatctgggttacttcattggacagacaccagaaccaataaacttctaaaataggagagcaccttgttgcttagttttggtgtcaggtgttcc

SEQ ID NO: 401290 - DNA, 544 bp, Homo sapiens
aggcacaaaggtgcagctattaggaaattgcatataatataacttaattttgcacaaaaatagaagtgtccactgcactaagttatcaatgctcagatttactgttttgcaacacctcagcaaccaaatatttcaactgcattctacttgctatttaaaaagttaaatttttactccatgaacactcaagaaatatggatgaatagtcgtagagtagttctgttctaacagtcttggctgaatgaagctttatctgttattcttctgaaactctaaacccaaaacaaatgaaactctgcttttcaaatctttattatataatgcaataaaaataatctgtacaggaacatgaagagaattacactggacatgctcacctgagacattagattttgtaactgtatataaagttaattttttaattagttacataaaggatgtattttaggattggtcacaaactctgattaattgaatacttctgaaaactatggaaactgaatataaataaatctttttagttcctgagaatctaattctcaag

SEQ ID NO: 401291 - DNA, 366 bp, Homo sapiens
tccaagataagctagaaaatggcttttagaggaaaaacattcaaatatactatatttgagttgaaatgtaatttttatgtgaagtctttcagattatacatgtcagctatttcagtgcagtggtttacacctgtaatcccagcaatttgggaggctgaggtgggaggattgcttgagtccaggagctcaagaccagcctgggcaacatagcaagatctcaactctacaaaaattaaaaataaaattagggcccagtgtggtggctcacacttgtgatcccagcactttgggaggctgaggtgagaggatcacttgacgccaggaatgtgagaccagtctgggcgacatagtgagacctcctctcta

SEQ ID NO: 401292 - DNA, 539 bp, Homo sapiens
ccagatggatgggtggcggcagagatgctcctcacttcccagactatgggcggccgggcagaggtgcacctctgccccaccgccctgtctgggaagcgaggagcgcctctacccagccgccccatctgggaggtgtacccaacatctccgaagagacagcaaccatcaagaatggtgccatgatgacgatgttggttttgtgccaaagaaaagggggaaatgtggggaaaagaaagagagatcagactgttactgtgtctgtgtagaaagaagtagacataggagactccattttgttctgtacttagaaaattcttctgccttggtatgctgttaatctataactttacccccaaccacgtgctctctgaaacatgtgctgtgtcaactcagggttaaatgtattaagggtggtgcaagatgtgctttgttaaacagatgcttgaaggcagcatgctggttaggagtcatcaccactccctaatctcaagtacccagggacacaaacactgcctaggaaaaccagagacctttgttca

SEQ ID NO: 401293 - DNA, 445 bp, Homo sapiens
atatagttatttttaaccagaaatgaaagtaggctttttggcaggcctatgtgttcacatctgtgctgggtttatatgttcttgccaacagtgtacttagtggtataacagagaaaaatgattcataagctttttcaaattcagacctacgactcatttatacttatattcccattaatatcgttagtatgaatggctttatatagttttctaggactccctcattgtaagttgagagagagggtagtctcgtcataggaagcatttctttgatggtatccatatattgagttgcatacattgtatgaaatgtaaagccttagcagatgcctaaaaatggttatttaatgaggccatttatgtccctcgtttctcaggttggaagattctgctggactacttagaaccccaactttattcatagtctgttgagatctctgttaaa

SEQ ID NO: 401294 - DNA, 478 bp, Homo sapiens
gaaaaccactgagtcaagacacattgtacagctccaagattccttctgtgccgttttcccccagcatgatatatatatttggcaaagagaattgacatgacccaatactcttgagactggatcaggccattccaagtttattacaagaaatttatactagaattacttaatgagataaaatttctccactgtgccacttgaagctgcgagaataacactggctttgggtgatgtgcttctgcccaaactggatgggtggacgtgctctatttgccgtataagttagtgagctacattgtagagttaggatgtaaagaaattgataagctgttgttagttgtctctaagaaaaacctgctaaagaaatacgcaggctgccgctgtttgggctccagacgcagaaaaagaaaaacccaaagggttttcctttcctctcatcctttaaaattaaaaatacttccccttcctctctcttatt

SEQ ID NO: 401295 - DNA, 878 bp, Homo sapiens
aatgatgatttcatacaaaggacagagaacacacagttggctgtctagtgtaccggtggctgttctttggaagaattctcatatgtgtcgagggaagaatcactattaaatgaagcattttggctcctctctccggtccgtgcctccaagatgacaaagaaaagaaggaacaatggtcgtgccaaaaagggccgcggccacgtgcagcctattcgctgcactaactgtgcccgatgcgtgcccaaggacaaggccattaagaaattcgtcattcgaaacatagtggaggccgcagcagtcagggacatttctgaagcgagcgtcttcgatgcctatgtgcttcccaagctgtatgtgaagctacattactgtgtgagttgtgcaattcacagcaaagtagtcaggaatcgatctcgtgaagcccgcaaggaccgaacacccccaccccgatttagacctgcgggtgctgccccacgtcccccaccaaagcccatgtaaggagctgagttcttaaagactgaagacaggctattctctggagaaaaataaaatggaaattgtactcaaaaaaaaaaaaaaaaaaaaaaaaaaaaagaaaaaaaaaactggctcggcgcgcgcgcacctgaggcccctcgaaaaaggcttctcaaaacaatccggtggggcacccgggggcccacgagggcaacgcagaacctgggcacaacgcgggtcccaaggaagatccgggccagaacaagggcccgggattcccacccaataaaaaagcgccggggggaaccacgagcggtctggaacaaatcccaaggggagtacagaaaggcactaagggggagctcaccagagagatccccaagggagcccaatataattgc

SEQ ID NO: 401296 - DNA, 564 bp, Homo sapiens
aatgatgatttcatacaaaggacagagaacacacagttggctgtctagtgtaccggtggctgttctttggaagaattctcatatgtgtcgagggaagaatcactattaaatgaagcattttggctcctctctccggtccgtgcctccaagatgacaaagaaaagaaggaacaatggtcgtgccaaaaagggccgcggccacgtgcagcctattcgctgcactaactgtgcccgatgcgtgcccaaggacaaggccattaagaaattcgtcattcgaaacatagtggaggccgcagcagtcagggacatttctgaagcgagcgtcttcgatgcctatgtgcttcccaagctgtatgtgaagctacattactgtgtgagttgtgcaattcacagcaaagtagtcaggaatcgatctcgtgaagcccgcaaggaccgaacacccccaccccgatttagacctgcgggtgctgccccacgtcccccaccaaagcccatgtaaggagctgagttcttaaagactgaagacaggctattctctggagaaaaataaaatggaaattgtact

SEQ ID NO: 401297 - DNA, 591 bp, Homo sapiens
cacagtggctcatggctgtaataccagcccttttggaggccgaggcagatggatcacttgaggtcaggagtttgagaccagcctggccaacgtagtgaaaccccatctccactgaaaatataaaattgtagctggccgtggtggcgcacacctgtaatcccagctacttaggaggctgaggcacgagaatcgtttgaacctgggagacagaggttgtactgagccgagaacgcacccctgcagcctgggcaacaaagtaagactctgtctcaaaaaaaaaaaaaaaaaaaagaataattagaaatgggtgtttagaaagggtgtaaatccatcataattattggaggaatcactcactctacccccaaaatgctggtgggaaaatgtaagaacattgttccacatccatatagcatgctaaataccaagtaaataattacatgtgaaattaggattttaggattagtcctataattgttttcagactacaaaatatgacacagtattttacaatatttcttttcaatttgtttttggttcatagtacacaggatgtttttacatttactttactgttctcacatccccatc

SEQ ID NO: 401298 - DNA, 490 bp, Homo sapiens
actgtcatatcagcgctggggttgaatgtcggtgcgagtctgctctctccaggaatcaaataaaaggcactgaaagcaactattttccttctcaaatggaaatgtcatctcaatgttaattccttataatcctagaagtagacatacagtattattgtgcctatgttatagatgatgaaagtgggctcagagaactgacttgcccaagatcataggaagatgaaataaaatctgaagtgtccatcctagtgtcaagtggtaggtgctgaccaaatttaagttcaaaaatgaaaacaagtatctaactcatccataaagaagtggaaatggaggaccatgaaacttgccaggggctgagctaggaccagaacctggggccctaagcctcgtggccctggcgtctctgagccagacctgtaggtatgagctgccaggatccaggtgtgactcgggtatttctagggtgaaacctaggatttcgaaactgaga

SEQ ID NO: 401299 - DNA, 513 bp, Homo sapiens
ggataatatgggaacattatgaacaattttatgctagcaaatttaataatttagatgaaatggataaatatcctgaaagactcatattactagagacttcttaagaaaaaatagataaactcattagcttgtgtccattacaattgaatttgtagttaaaaatattctcacaaagaaaactccaggcccagatggctttactggtgaattctgctacatatttaagggagaaaaaaaaataattctatatgaattcttccagaaaatgaaagaataagatatacttccaaaataattgtggaggtctggctttatgctgacagcaaatacagacaaattacaataatgtaatgtagtaaacataggagtgaaaatgataagcaaatttaacaaagtgaatccaacaacctaagaaaggcataatatacatcatgattaagggagatttatctcaggaatgccatgctcattcaacatttgaaaatcaactggtttgccatattaaccaaataa

SEQ ID NO: 401300 - DNA, 440 bp, Homo sapiens
acagccttagcaagctgccccaccagtctgaccagatagattgccctggggctgaaccctgcctctgcagggctggggtgaagggtgtgtggtcgtgggaatggcgctggcagtggcggtgaagggcctggtgtatgcaggctcagccttcttggaagtgagcaatgattgagggtgaaagaggacaacatgaaaaaaagcaataaaaggaaaagcagagacagacacgtgggggttttgcctttgctgcttatataattgcttttgtcataaatctgatgcatggaagtatgggtgggcatacgaaatgcagctgatcactctccaggatttggtattcttactgctttttacacagggtaaaaaatcaccttaagcatcaaggttatgaccatagcccaaccccatgactgatctcatgccctactcattcactctca

SEQ ID NO: 401301 - DNA, 524 bp, Homo sapiens
tagtaatcataaaagagcagtcgtctatctggatgaaattcagagagcatgtattattttgttttgtatttagcttcactggtcattgagttgtacataatcagattcttaaataattttaccttgagatttaaaatgacagtgtttcagcagccgtctactcttttttatttttcagacaagcaatgaacttttcctaacatctaattgattatgctatcatctcttctgttcttatacttaccttgttacaacctcttcagcagatgtcttgatcttggcttgttagggagattaggtattaataacctgatgtccataggcaaccatgtctgtgatctactgggagtgtataggagagagagagagtgtgtgtgtgtgtgtgtgtgtgtgtgtgtgttttccagtaagttttccttagtttctcaaaggcagtgttaggccctcctccaccctgcagaaagttaagaatcgctgtgatgcaatgtgaatgtactttcagataaggctgaagtgtgttattc

SEQ ID NO: 401302 - DNA, 532 bp, Homo sapiens
atcatgatatttcattctgatgttcatactcctacagagtttccatgctcataatctagtttagagcctgacaccttcctcccacactggaaaaactctagccccccgccccccttgaatcctgaaaaagaaaaggaaggcaagttgtattctcacccttgggccttctgcccacatcccctgttctggtattggtgacccaggcacacatcaagttcttgagacaactgcggaatcatagcctgagggctgaacagctgcttggctgcctgcgctcagtcagtttggctttgaagaccctgccttaaaaacagagaggttgtggatgggggaactctgcgcagaccaaccccagcaggggagtagagagcccacctgagcctcatcccaccttcactgatcacaggctgcagggcctcaaagaggcggctcagcatttctgaacctcatttttctcacctgtagccccaggatagttagatctatttacagggctgttgtgagatttaaataaattcacacatcaagccta

SEQ ID NO: 401303 - DNA, 364 bp, Homo sapiens
agaatgttccagagggagccaagtgagccaaagctgggagctgcggaagagccagatgcattcagtgaaccaaagctttccatggtcaaccctggggaatgctgcaggctcaagacaaggcatctagaatgacctctagtgttcctttaccactgccagtgtatgattcttcctcatgagcctgagtaggaatgtttcatatgggaagtgggtaggtggcggggtgcagcagctcacacctgtaatcccagcactttgggaggctgaggtgggaagattgctcgaagccaggagttcaataccagcctgggcaacacagcaagaccccgactctattaaatttaaaaaggaaaaaatgaagtgg

SEQ ID NO: 401304 - DNA, 366 bp, Homo sapiens
gttttcaggcaagcctcactttccagagtgcccttggaatcactgctatcatcagttggaattagttctttaattaaatcctggccatcgatcagcatccctttctatggcatttgacggagcttacagaatctgtgttgtaaacaaagcagaagcatcttatttcccagaactgtggtttattaacacctaaggaaactggttgtctgatactcatatttttaaaaaatgtgcttagtaattcataatcttttagtccttctagactgtcagcattgttggatatgctttatatatacttttgttatatgcttatttgtaagtttctttttcttaaatcgagaatctatgtgttcgtattttgtc

SEQ ID NO: 401305 - DNA, 366 bp, Homo sapiens
gagccaccacgcctggctaatttttgtattttagtagagatggggtttcactatgttggtgaggctggtctagaactcttgaccttaggcgatccacctgccttggcctcccaaagtgctgggattacaggcatgagccaccacacccggccatgagtacatgggttaacccttgtccaccccagggacccaactccccactgtgcttggaaatgggaaataaagcaggaagagtccctgttatttaccggtggcaagactctggccagaattgttaagcaagagcaaaattggctgctttggatattcgttccttcctttggagatggtgccttcaggaaaattatcagaacttgcatagaagag

SEQ ID NO: 401306 - DNA, 632 bp, Homo sapiens
  misc_feature (602)..(602): n is a, c, g, or t
ccgggttcacaccattctcctgcctcagcctcccgagtagctgggactacaggcgcccaccaccacgcccagctaatttttttttgtatttttagtagagacggggtttcaccgtgtttgccaggatggtctcgatctcctgacctcgtgatccacccgcctcggcctcccaaagtgctaggattacaggcgtgagccaccgtgcccggccgattgtagctcatttttaagggagtaattaatttaacaatgtagtgcagtgacatttttatatttgtaatctgtgctgattattgtaattgaattttcaacatggcaaagtcttatcaagttttgatatatttttgtttttatacagttggatccttatgactatgaaatgattgaagttgtcttgaaagttatagaacgagctgatgaaaagataaccaatattaatattaatcaggtataacaaatatatcaaagatgtaaaaatcatctttctgcttttatttggatcataaatcatatcattatccagggcctttccaaattatccattgaattccctttaaactctgtggtttattttaggtttttaaaaatctttacaaatcttntaaggtgttttgaggtgatttcctctcctt

SEQ ID NO: 401307 - DNA, 714 bp, Homo sapiens
ggatgtggcgagctagtgattaaaaaaaacttttttttttatttgagccgagattgtgccacttcactgcagcctgggtgacagtgagactccagctcaaaaaaataaagtaaaataatataaacatgcctgtaatcccatctattcaggatgctgaggtggcaggattgcttgagcccaggaattcaagtccagcctgagcacatagtgagatcccatctcaaaaaaacaaataaaacaaacaagagtgaaaaatagttatttctacgtgtagtgattatctgaggagggtcctataggaagctacatggctctgaggaagatgtcgggagttctagggtctgagataagaaggaaatgtactttgcattgtgtgatctttggaactgggttttttttagttttttgtttttacctttatgaagaagaaaactaattaaaatgcatttaaagataatccacttaaaaggtataaccttaattttttttaaaactgacttttttcccttctttgtctattcagtggcagttcttggattgaatttctaaataatgaagatgatcttaaagatatttttttacagctaaaagaaggaaaccttgtttgtgcacagtatctttggcttcgacatcgggtaacatgttttacattttttccttaacagctttatagctcctgagttaggtgattgaatcaatgttggagactaacaa

SEQ ID NO: 401308 - DNA, 711 bp, Homo sapiens
tggtctcaggaatggaaacttttgatggtatactattagatgattttatgacagtttaggattgggttactcttactggacaaaagttttttattttaatataggcattgagtattctgaaacatttgaagtcatacagaagaatttctcctcccgtggatctagaatatcagtatatgttggaacatgtcataactttgccatcagctgcccaaactagactgccttttcacctgatattctttggcacagcacagaacttctggaaaattctctctacagaactcagtgaagaatctttcccaacattgctcttaatttcgaaattaatgaaggtaatggattaaaacattgtaagacatttctgtatcctgcaattaattctgaccccgtatagaagatttttctgctgctttcatgtaaaaccttatatgtgaatatgtgcttcagccataaccttccttttctttgaagttctctctggacactctgtacgtgtctacagcaaaacacgttttcgaaaaaaaactgaagccaaagctcctgaagttaacacaagctaaatcctcaacactgattaacaaggaaataactaagatcacgcagaccatcgaatcctgcttactctctatagtcaacccagagtgggctgtagctattgccatcagccttgcccaggatatccctgaaggtatgagctcttcttttaaa

SEQ ID NO: 401309 - DNA, 4975 bp, Homo sapiens
ttcccttttggggtctttgctcttgaaggacagataattcttgcaaaatggttggaacaagcagccaggaaccttgaattaactgataaggcaaattggccagaaaatggacttcaattggcagagatattttttacagcagaaaaaacagacgagttgggattggcatcttcctggcattggatttccttgaaagattatcagaacacagaggaagtatgtcagctaaggactttggtaaataacttgcgagagttgatcacgttgcataggaagtacaactgcaaattagccctctctgattttgagaaggaaaatacaaccaccatagtgttccgaatgtttgataaagtgctggccccagagcttattccctccatcttagagaagtttataagagtttacatgagagaacatgacttgcaagaggaggaacttctcttgctgtacatagaggatttactgaatagatgcagctcaaagtccacatcactctttgaaacagcatgggaagcaaaggccatggcagtaatagcgtgtttatctgacacggacctcatatttgatgccgtgctcaagatcatgtatgcggcagtggttccttggagtgcagctgtggagcaactggtgaaacagcacctggaaatggaccatcccaaagtcaagttattacaggaaagttacaaactaatggagatgaaaaaacttttacgaggctatggaataagagaggtaaatctcttaaacaaggaaataatgagagtggttagatacattctcaaacaagatgtcccatcttctttagaagatgctttaaaggtagcccaagcgtttatgttatctgatgatgagatctacagtctaagaattattgacctgattgatagagaacagggtgaagactgtctccttctgttgaagtctttgcctcctgctgaagctgagaaaactgcagaaagagtcatcatatgggcacgactggcattacaagaagagccagatcattctaaagagggcaaggcctggagaatgtctgtagcgaagacatccgtggacattcttaagatactatgtgacattcagaaagacaatctgcagaagaaggacgaatgtgaagaaatgttgaaactatttaaagaggttgctagcttacaggagaactttgaggtctttctttcatttgaagattatagcaatagttccctggtagcagatctccgtgagcagcacattaaagctcacgaagttgcacaggcgaaacacaaacctgggagcaccccagagcccatagctgctgaggtgaggagcccaagcatggaatcaaagctgcacagacaggcactggccctgcagatgtccaaacaagagctggaggcagagctgaccttgagagccttaaaagatgggaacatcaaaacagcactgaaaaaatgcagcgacttgtttaagtatcactgcaatgctgacactgggaaattgctatttctgacatgtcagaagctttgtcagatgttggctgataatgtcccagtgacagtgcctgtgggactgaatcttccttccatgatacatgatctagcaagccaagctgccaccatttgcagtccagattttttactagatgctttagaactatgtaaacatactttaatggctgtagagctttccagacaatgccaaatggatgactgtggaatcctcatgaaagcttcttttgggacacataaagatccatatgaagagtggtcttacagtgacttcttcagtgaagatggaattgttcttgagtcacagatggtgcttccagtgatttatgaactgatttcatctcttgtgcctctagctgaaagcaagagatatcccttggagtctaccagtttgccatactgctcccttaatgaaggagatggccttgttttacctgttataaattccatctctgccctgcttcagaatcttcaggaatctagccagtgggagctagccctaagatttgtggttggttcatttggtacctgtcttcagcactctgtgtcaaacttcatgaatgccactttgagtgaaaagttatttggagagactacattagttaaatcaaggcatgttgttatggaattgaaagaaaaagctgttatatttatcagggaaaatgctacaacactactgcacaaagtatttaattgtcgcttggtagatcttgacctggcgttgggttactgcactctcttacctcaaaaagatgtgtttgaaaatctctggaagctcatagataaagcatggcagaattacgacaaaatcttggcaatatctctggtgggctctgagctggcaagtctctatcaggaaatagaaatggggcttaagttccgtgaactcagtactgatgcccagtggggcattcgtcttggtaaacttggtatttcttttcaaccagttttcaggcaacattttctcaccaagaaagacctcattaaagctcttgtggagaatatagatatggacacaagcctcattttggaatattgcagcacatttcagttggactgcgatgcagttcttcagctcttcattgaaacgctgctccacaacacaaatgccggccaaggccagggagatgcaagcatggactctgcaaagcggcggcatcccaaactcctggccaaagcccttgagatggttcctttactgacgagcacaaaagatttggtcatcagtcttagtggaatactacataaggttggatccttatgactatgaaatgattgaagttgtcttgaaagttatagaacgagctgatgaaaagataaccaatattaatattaatcaggcattgagtattctgaaacatttgaagtcatacagaagaatttctcctcccgtggatctagaatatcagtatatgttggaacatgtcataactttgccatcagctgcccaaactagactgccttttcacctgatattctttggcacagcacagaacttctggaaaattctctctacagaactcagtgaagaatctttcccaacattgctcttaatttcgaaattaatgaagttctctctggacactctgtacgtgtctacagcaaaacacgttttcgaaaaaaaactgaagccaaagctcctgaagttaacacaagctaaatcctcaacactgattaacaaggaaataactaagatcacgcagaccatcgaatcctgcttactctctatagtcaacccagagtgggctgtagctattgccatcagccttgcccaggatatccctgaaggttccttcaagatatctgctttgaaattctgcctttatttagctgagagatggctacagaatatcccatcgcaggacgaaaaacgtgaaaaagccgaggctttgttgaagaagcttcatatccagtaccggcgatcgggcacagaagctgtgctcatagcccacaagctgaacactgaggaatatttaagagtgatcggaaagccagcacatcttattgtcagtctctacgaacatcctagcatcaatcaaagaattcagaattcatctggcacagattatcctgatattcatgcagcagctaaagaaatagccgaagtcaatgaaattaatttggaaaaagtctgggacatgttgttggaaaaatggctatgcccttcaacaaaacctggtgaaaaaccatcagaattatttgaacttcaagaagatgaagccctacgaagagtgcagtatctcctcctgtctcgtccaattgattatagttcaagaatgctgtttgtatttgcaacatcaactacaaccacattaggtatgcatcagttaacttttgcccatagaactcgagctcttcagtgtctcttctatttggctgacaaggaaactatagaatctctctttaaaaaacccattgaagaagtgaaatcttatttgagatgtataacttttctggcatcatttgagactttgaatatccccatcacatatgaattattttgcagcagtcctaaagaaggaatgattaagggtctgtggaaaaaccacagccacgagtccatggcagtaagattggtgactgagctgtgtttagaatacaaaatctatgacctgcagctttggaatggactcttgcaaaagcttctgggcttcaatatgattccttatctaaggaaagttttaaaagccatctccagtatccattctttatggcaggttccctacttcagcaaagcgtggcagcgtgtgatacagataccactgctttcagcctcttgtcctttaagtcctgatcagctgtcagattgttctgagagtctcatcgctgtcctcgaatgtccagtctcaggtgatcttgacctgatcggagtcgccaggcagtatatccagttagaacttccggcttttgcattagcttgtctgatgctcatgccccactcagagaaaagacaccagcaaattaagaattttctgggttcctgtgaccctcaggttattttaaagcaattggaagagcatatgaacacgggccagctagcaggattttcacatcaaattagaagtctgattttgaataatatcatcaataagaaggagtttgggattttggcaaagaccaaatactttcaaatgttgaagatgcatgcgatgaataccaacaatatcactgagctagtgaactatttggcaaatgacttaagtttagatgaagcttcagtcttgataactgaatattcaaagcactgcgggaaacctgtgcctccagacactgctccctgtgaaattctgaagatgtttcttagtggattatcgtaaatcactgaacctttttttcaagaaggacaagaattttggagtctgctattaatggaccatatttattacagtttttaaattgtacaatctctgtattatagctatttgtctaacattaccccacatgtaataaataaaacaatatgagcataattgccccataaagaactc

SEQ ID NO: 401310 - DNA, 2596 bp, Homo sapiens
ccgggttcacaccattctcctgcctcagcctcccgagtagctgggactacaggcgcccaccaccacgcccagctaatttttttttgtatttttagtagagacggggtttcaccgtgtttgccaggatggtctcgatctcctgacctcgtgatccacccgcctcggcctcccaaagtgctaggattacaggcgtgagccaccgtgcccggccgattgtagctcatttttaagggagtaattaatttaacaatgtagtgcagtgacatttttatatttgtaatctgtgctgattattgtaattgaattttcaacatggcaaagtcttatcaagttttgatatatttttgtttttatacagttggatccttatgactatgaaatgattgaagttgtcttgaaagttatagaacgagctgatgaaaagataaccaatattaatattaatcaggcattgagtattctgaaacatttgaagtcatacagaagaatttctcctcccgtggatctagaatatcagtatatgttggaacatgtcataactttgccatcagctgcccaaactagactgccttttcacctgatattctttggcacagcacagaacttctggaaaattctctctacagaactcagtgaagaatctttcccaacattgctcttaatttcgaaattaatgaagttctctctggacactctgtacgtgtctacagcaaaacacgttttcgaaaaaaaactgaagccaaagctcctgaagttaacacaagctaaatcctcaacactgattaacaaggaaataactaagatcacgcagaccatcgaatcctgcttactctctatagtcaacccagagtgggctgtagctattgccatcagccttgcccaggatatccctgaaggttccttcaagatatctgctttgaaattctgcctttatttagctgagagatggctacagaatatcccatcgcaggacgaaaaacgtgaaaaagccgaggctttgttgaagaagcttcatatccagtaccggcgatcgggcacagaagctgtgctcatagcccacaagctgaacactgaggaatatttaagagtgatcggaaagccagcacatcttattgtcagtctctacgaacatcctagcatcaatcaaagaattcagaattcatctggcacagattatcctgatattcatgcagcagctaaagaaatagccgaagtcaatgaaattaatttggaaaaagtctgggacatgttgttggaaaaatggctatgcccttcaacaaaacctggtgaaaaaccatcagaattatttgaacttcaagaagatgaagccctacgaagagtgcagtatctcctcctgtctcgtccaattgattatagttcaagaatgctgtttgtatttgcaacatcaactacaaccacattaggtatgcatcagttaacttttgcccatagaactcgagctcttcagtgtctcttctatttggctgacaaggaaactatagaatctctctttaaaaaacccattgaagaagtgaaatcttatttgagatgtataacttttctggcatcatttgagactttgaatatccccatcacatatgaattattttgcagcagtcctaaagaaggaatgattaagggtctgtggaaaaaccacagccacgagtccatggcagtaagattggtgactgagctgtgtttagaatacaaaatctatgacctgcagctttggaatggactcttgcaaaagcttctgggcttcaatatgattccttatctaaggaaagttttaaaagccatctccagtatccattctttatggcaggttccctacttcagcaaagcgtggcagcgtgtgatacagataccactgctttcagcctcttgtcctttaagtcctgatcagctgtcagattgttctgagagtctcatcgctgtcctcgaatgtccagtctcaggtgatcttgacctgatcggagtcgccaggcagtatatccagttagaacttccggcttttgcattagcttgtctgatgctcatgccccactcagagaaaagacaccagcaaattaagaattttctgggttcctgtgaccctcaggttattttaaagcaattggaagagcatatgaacacgggccagctagcaggattttcacatcaaattagaagtctgattttgaataatatcatcaataagaaggagtttgggattttggcaaagaccaaatactttcaaatgttgaagatgcatgcgatgaataccaacaatatcactgagctagtgaactatttggcaaatgacttaagtttagatgaagcttcagtcttgataactgaatattcaaagcactgcgggaaacctgtgcctccagacactgctccctgtgaaattctgaagatgtttcttagtggattatcgtaaatcactgaacctttttttcaagaaggacaagaattttggagtctgctattaatggaccatatttattacagtttttaaattgtacaatctctgtattatagctatttgtctaacattaccccacatgtaataaataaaacaatatgagcataattgccccataaagaactc

SEQ ID NO: 401311 - DNA, 4897 bp, Homo sapiens
ttcccttttggggtctttgctcttgaaggacagataattcttgcaaaatggttggaacaagcagccaggaaccttgaattaactgataaggcaaattggccagaaaatggacttcaattggcagagatattttttacagcagaaaaaacagacgagttgggattggcatcttcctggcattggatttccttgaaagattatcagaacacagaggaagtatgtcagctaaggactttggtaaataacttgcgagagttgatcacgttgcataggaagtacaactgcaaattagccctctctgattttgagaaggaaaatacaaccaccatagtgttccgaatgtttgataaagtgctggccccagagcttattccctccatcttagagaagtttataagagtttacatgagagaacatgacttgcaagaggaggaacttctcttgctgtacatagaggatttactgaatagatgcagctcaaagtccacatcactctttgaaacagcatgggaagcaaaggccatggcagtaatagcgtgtttatctgacacggacctcatatttgatgccgtgctcaagatcatgtatgcggcagtggttccttggagtgcagctgtggagcaactggtgaaacagcacctggaaatggaccatcccaaagtcaagttattacaggaaagttacaaactaatggagatgaaaaaacttttacgaggctatggaataagagaggtaaatctcttaaacaaggaaataatgagagtggttagatacattctcaaacaagatgtcccatcttctttagaagatgctttaaaggtagcccaagcgtttatgttatctgatgatgagatctacagtctaagaattattgacctgattgatagagaacagggtgaagactgtctccttctgttgaagtctttgcctcctgctgaagctgagaaaactgcagaaagagtcatcatatgggcacgactggcattacaagaagagccagatcattctaaagagggcaaggcctggagaatgtctgtagcgaagacatccgtggacattcttaagatactatgtgacattcagaaagacaatctgcagaagaaggacgaatgtgaagaaatgttgaaactatttaaagaggttgctagcttacaggagaactttgaggtctttctttcatttgaagattatagcaatagttccctggtagcagatctccgtgagcagcacattaaagctcacgaagttgcacaggcgaaacacaaacctgggagcaccccagagcccatagctgctgaggtgaggagcccaagcatggaatcaaagctgcacagacaggcactggccctgcagatgtccaaacaagagctggaggcagagctgaccttgagagccttaaaagatgggaacatcaaaacagcactgaaaaaatgcagcgacttgtttaagtatcactgcaatgctgacactgggaaattgctatttctgacatgtcagaagctttgtcagatgttggctgataatgtcccagtgacagtgcctgtgggactgaatcttccttccatgatacatgatctagcaagccaagctgccaccatttgcagtccagattttttactagatgctttagaactatgtaaacatactttaatggctgtagagctttccagacaatgccaaatggatgactgtggaatcctcatgaaagcttcttttgggacacataaagatccatatgaagagtggtcttacagtgacttcttcagtgaagatggaattgttcttgagtcacagatggtgcttccagtgatttatgaactgatttcatctcttgtgcctctagctgaaagcaagagatatcccttggagtctaccagtttgccatactgctcccttaatgaaggagatggccttgttttacctgttataaattccatctctgccctgcttcagaatcttcaggaatctagccagtgggagctagccctaagatttgtggttggttcatttggtacctgtcttcagcactctgtgtcaaacttcatgaatgccactttgagtgaaaagttatttggagagactacattagttaaatcaaggcatgttgttatggaattgaaagaaaaagctgttatatttatcagggaaaatgctacaacactactgcacaaagtatttaattgtcgcttggtagatcttgacctggcgttgggttactgcactctcttacctcaaaaagatgtgtttgaaaatctctggaagctcatagataaagcatggcagaattacgacaaaatcttggcaatatctctggtgggctctgagctggcaagtctctatcaggaaatagaaatggggcttaagttccgtgaactcagtactgatgcccagtggggcattcgtcttggtaaacttggtatttcttttcaaccagttttcaggcaacattttctcaccaagaaagacctcattaaagctcttgtggagaatatagatatggacacaagcctcattttggaatattgcagcacatttcagttggactgcgatgcagttcttcagctcttcattgaaacgctgctccacaacacaaatgccggccaaggccagggagatgcaagcatggactctgcaaagcggcggcatcccaaactcctggccaaagcccttgagatggttcctttactgacgagcacaaaagatttggtcatcagtcttagtggaatactacataaggttggatccttatgactatgaaatgattgaagttgtcttgaaagttatagaacgagctgatgaaaagataaccaatattaatattaatcaggcattgagtattctgaaacatttgaagtcatacagaagaatttctcctcccgtggatctagaatatcagtatatgttggaacatgtcataactttgccatcagctgcccaaactagactgccttttcacctgatattctttggcacagcacagaacttctggaaaattctctctacagaactcagtgaagaatctttcccaacattgctcttaatttcgaaattaatgaagttctctctggacactctgtacgtgtctacagcaaaacacgttttcgaaaaaaaactgaagccaaagctcctgaagttaacacaagctaaatcctcaacactgattaacaaggaaataactaagatcacgcagaccatcgaatcctgcttactctctatagtcaacccagagtgggctgtagctattgccatcagccttgcccaggatatccctgaaggttccttcaagatatctgctttgaaattctgcctttatttagctgagagatggctacagaatatcccatcgcaggacgaaaaacgtgaaaaagccgaggctttgttgaagaagcttcatatccagtaccggcgatcgggcacagaagctgtgctcatagcccacaagctgaacactgaggaatatttaagagtgatcggaaagccagcacatcttattgtcagtctctacgaacatcctagcatcaatcaaagaattcagaattcatctggcacagattatcctgatattcatgcagcagctaaagaaatagccgaagtcaatgaaattaatttggaaaaagtctgggacatgttgttggaaaaatggctatgcccttcaacaaaacctggtgaaaaaccatcagaattatttgaacttcaagaagatgaagccctacgaagagtgcagtatctcctcctgtctcgtccaattgattatagttcaagaatgctgtttgtatttgcaacatcaactacaaccacattaggtatgcatcagttaacttttgcccatagaactcgagctcttcagtgtctcttctatttggctgacaaggaaactatagaatctctctttaaaaaacccattgaagaagtgaacagtcctaaagaaggaatgattaagggtctgtggaaaaaccacagccacgagtccatggcagtaagattggtgactgagctgtgtttagaatacaaaatctatgacctgcagctttggaatggactcttgcaaaagcttctgggcttcaatatgattccttatctaaggaaagttttaaaagccatctccagtatccattctttatggcaggttccctacttcagcaaagcgtggcagcgtgtgatacagataccactgctttcagcctcttgtcctttaagtcctgatcagctgtcagattgttctgagagtctcatcgctgtcctcgaatgtccagtctcaggtgatcttgacctgatcggagtcgccaggcagtatatccagttagaacttccggcttttgcattagcttgtctgatgctcatgccccactcagagaaaagacaccagcaaattaagaattttctgggttcctgtgaccctcaggttattttaaagcaattggaagagcatatgaacacgggccagctagcaggattttcacatcaaattagaagtctgattttgaataatatcatcaataagaaggagtttgggattttggcaaagaccaaatactttcaaatgttgaagatgcatgcgatgaataccaacaatatcactgagctagtgaactatttggcaaatgacttaagtttagatgaagcttcagtcttgataactgaatattcaaagcactgcgggaaacctgtgcctccagacactgctccctgtgaaattctgaagatgtttcttagtggattatcgtaaatcactgaacctttttttcaagaaggacaagaattttggagtctgctattaatggaccatatttattacagtttttaaattgtacaatctctgtattatagctatttgtctaacattaccccacatgtaataaataaaacaatatgagcataattgccccataaagaactc

SEQ ID NO: 401312 - DNA, 1362 bp, Homo sapiens
  misc_feature (67)..(67): n is a, c, g, or t
  misc_feature (85)..(85): n is a, c, g, or t
aattatgtaatcaatataatgtaatagtattagaagaaagggggggagggctttgtgagccaccagnattatttgttcttgaggnaaaacgaagccctacgaagagtgcagtatctcctcctgtctcgtccaattgattatagttcaagaatgctgtttgtatttgcaacatcaactacaaccacattaggtatgcatcagttaacttttgcccatagaactcgagctcttcagtgtctcttctatttggctgacaaggaaactatagaatctctctttaaaaaacccattgaagaagtgaaatcttatttgagatgtataacttttctggcatcatttgagactttgaatatccccatcacatatgaattattttgcagcagtcctaaagaaggaatgattaagggtctgtggaaaaaccacagccacgagtccatggcagtaagattggtgactgagctgtgtttagaatacaaaatctatgacctgcagctttggaatggactcttgcaaaagcttctgggcttcaatatgattccttatctaaggaaagttttaaaagccatctccagtatccattctttatggcaggttccctacttcagcaaagcgtggcagcgtgtgatacagataccactgctttcagcctcttgtcctttaagtcctgatcagctgtcagattgttctgagagtctcatcgctgtcctcgaatgtccagtctcaggtgatcttgacctgatcggagtcgccaggcagtatatccagttagaacttccggcttttgcattagcttgtctgatgctcatgccccactcagagaaaagacaccagcaaattaagaattttctgggttcctgtgaccctcaggttattttaaagcaattggaagagcatatgaacacgggccagctagcaggattttcacatcaaattagaagtctgattttgaataatatcatcaataagaaggagtttgggattttggcaaagaccaaatactttcaaatgttgaagatgcatgcgatgaataccaacaatatcactgagctagtgaactatttggcaaatgacttaagtttagatgaagcttcagtcttgataactgaatattcaaagcactgcgggaaacctgtgcctccagacactgctccctgtgaaattctgaagatgtttcttagtggattatcgtaaatcactgaacctttttttcaagaaggacaagaattttggagtctgctattaatggaccatatttattacagtttttaaattgtacaatctctgtattatagctatttgtctaacattaccccacatgtaataaataaaacaatatgagcataattgccccataaagaactc

SEQ ID NO: 401313 - DNA, 1226 bp, Homo sapiens
  misc_feature (31)..(31): n is a, c, g, or t
taactccgtagtcaccctcttgttgtacagncccagggcgatgatctacattaggtatgcatcagttaacttttgcccatagaactcgagctcttcagtgtctcttctatttggctgacaaggaaactatagaatctctctttaaaaaacccattgaagaagtgaaatcttatttgagatgtataacttttctggcatcatttgagactttgaatatccccatcacatatgaattattttgcagcagtcctaaagaaggaatgattaagggtctgtggaaaaaccacagccacgagtccatggcagtaagattggtgactgagctgtgtttagaatacaaaatctatgacctgcagctttggaatggactcttgcaaaagcttctgggcttcaatatgattccttatctaaggaaagttttaaaagccatctccagtatccattctttatggcaggttccctacttcagcaaagcgtggcagcgtgtgatacagataccactgctttcagcctcttgtcctttaagtcctgatcagctgtcagattgttctgagagtctcatcgctgtcctcgaatgtccagtctcaggtgatcttgacctgatcggagtcgccaggcagtatatccagttagaacttccggcttttgcattagcttgtctgatgctcatgccccactcagagaaaagacaccagcaaattaagaattttctgggttcctgtgaccctcaggttattttaaagcaattggaagagcatatgaacacgggccagctagcaggattttcacatcaaattagaagtctgattttgaataatatcatcaataagaaggagtttgggattttggcaaagaccaaatactttcaaatgttgaagatgcatgcgatgaataccaacaatatcactgagctagtgaactatttggcaaatgacttaagtttagatgaagcttcagtcttgataactgaatattcaaagcactgcgggaaacctgtgcctccagacactgctccctgtgaaattctgaagatgtttcttagtggattatcgtaaatcactgaacctttttttcaagaaggacaagaattttggagtctgctattaatggaccatatttattacagtttttaaattgtacaatctctgtattatagctatttgtctaacattaccccacatgtaataaataaaacaatatgagcataattgccccataaagaactc

SEQ ID NO: 401314 - DNA, 819 bp, Homo sapiens
attacaggtgtgagccaccgcacccggccgagatttcctgttttacaggttccctacttcagcaaagcgtggcagcgtgtgatacagataccactgctttcagcctcttgtcctttaagtcctgatcagctgtcagattgttctgagagtctcatcgctgtcctcgaatgtccagtctcaggtgatcttgacctgatcggagtcgccaggcagtatatccagttagaacttccggcttttgcattagcttgtctgatgctcatgccccactcagagaaaagacaccagcaaattaagaattttctgggttcctgtgaccctcaggttattttaaagcaattggaagagcatatgaacacgggccagctagcaggattttcacatcaaattagaagtctgattttgaataatatcatcaataagaaggagtttgggattttggcaaagaccaaatactttcaaatgttgaagatgcatgcgatgaataccaacaatatcactgagctagtgaactatttggcaaatgacttaagtttagatgaagcttcagtcttgataactgaatattcaaagcactgcgggaaacctgtgcctccagacactgctccctgtgaaattctgaagatgtttcttagtggattatcgtaaatcactgaacctttttttcaagaaggacaagaattttggagtctgctattaatggaccatatttattacagtttttaaattgtacaatctctgtattatagctatttgtctaacattaccccacatgtaataaataaaacaatatgagcataattgccccataaagaactc

SEQ ID NO: 401315 - DNA, 4884 bp, Homo sapiens
ttcccttttggggtctttgctcttgaaggacagataattcttgcaaaatggttggaacaagcagccaggaaccttgaattaactgataaggcaaattggccagaaaatggacttcaattggcagagatattttttacagcagaaaaaacagacgagttgggattggcatcttcctggcattggatttccttgaaagattatcagaacacagaggaagtatgtcagctaaggactttggtaaataacttgcgagagttgatcacgttgcataggaagtacaactgcaaattagccctctctgattttgagaaggaaaatacaaccaccatagtgttccgaatgtttgataaagtgctggccccagagcttattccctccatcttagagaagtttataagagtttacatgagagaacatgacttgcaagaggaggaacttctcttgctgtacatagaggatttactgaatagatgcagctcaaagtccacatcactctttgaaacagcatgggaagcaaaggccatggcagtaatagcgtgtttatctgacacggacctcatatttgatgccgtgctcaagatcatgtatgcggcagtggttccttggagtgcagctgtggagcaactggtgaaacagcacctggaaatggaccatcccaaagtcaagttattacaggaaagttacaaactaatggagatgaaaaaacttttacgaggctatggaataagagaggtaaatctcttaaacaaggaaataatgagagtggttagatacattctcaaacaagatgtcccatcttctttagaagatgctttaaaggtagcccaagcgtttatgttatctgatgatgagatctacagtctaagaattattgacctgattgatagagaacagggtgaagactgtctccttctgttgaagtctttgcctcctgctgaagctgagaaaactgcagaaagagtcatcatatgggcacgactggcattacaagaagagccagatcattctaaagagggcaaggcctggagaatgtctgtagcgaagacatccgtggacattcttaagatactatgtgacattcagaaagacaatctgcagaagaaggacgaatgtgaagaaatgttgaaactatttaaagaggttgctagcttacaggagaactttgaggtctttctttcatttgaagattatagcaatagttccctggtagcagatctccgtgagcagcacattaaagctcacgaagttgcacaggcgaaacacaaacctgggagcaccccagagcccatagctgctgaggtgaggagcccaagcatggaatcaaagctgcacagacaggcactggccctgcagatgtccaaacaagagctggaggcagagctgaccttgagagccttaaaagatgggaacatcaaaacagcactgaaaaaatgcagcgacttgtttaagtatcactgcaatgctgacactgggaaattgctatttctgacatgtcagaagctttgtcagatgttggctgataatgtcccagtgacagtgcctgtgggactgaatcttccttccatgatacatgatctagcaagccaagctgccaccatttgcagtccagattttttactagatgctttagaactatgtaaacatactttaatggctgtagagctttccagacaatgccaaatggatgactgtggaatcctcatgaaagcttcttttgggacacataaagatccatatgaagagtggtcttacagtgacttcttcagtgaagatggaattgttcttgagtcacagatggtgcttccagtgatttatgaactgatttcatctcttgtgcctctagctgaaagcaagagatatcccttggagtctaccagtttgccatactgctcccttaatgaaggagatggccttgttttacctgttataaattccatctctgccctgcttcagaatcttcaggaatctagccagtgggagctagccctaagatttgtggttggttcatttggtacctgtcttcagcactctgtgtcaaacttcatgaatgccactttgagtgaaaagttatttggagagactacattagttaaatcaaggcatgttgttatggaattgaaagaaaaagctgttatatttatcagggaaaatgctacaacactactgcacaaagtatttaattgtcgcttggtagatcttgacctggcgttgggttactgcactctcttacctcaaaaagatgtgtttgaaaatctctggaagctcatagataaagcatggcagaattacgacaaaatcttggcaatatctctggtgggctctgagctggcaagtctctatcaggaaatagaaatggggcttaagttccgtgaactcagtactgatgcccagtggggcattcgtcttggtaaacttggtatttcttttcaaccagttttcaggcaacattttctcaccaagaaagacctcattaaagctcttgtggagaatatagatatggacacaagcctcattttggaatattgcagcacatttcagttggactgcgatgcagttcttcagctcttcattgaaacgctgctccacaacacaaatgccggccaaggccagggagatgcaagcatggactctgcaaagcggcggcatcccaaactcctggccaaagcccttgagatggttcctttactgacgagcacaaaagatttggtcatcagtcttagtggaatactacataaggttggatccttatgactatgaaatgattgaagttgtcttgaaagttatagaacgagctgatgaaaagataaccaatattaatattaatcaggcattgagtattctgaaacatttgaagtcatacagaagaatttctcctcccgtggatctagaatatcagtatatgttggaacatgtcataactttgccatcagctgcccaaactagactgccttttcacctgatattctttggcacagcacagaacttctggaaaattctctctacagaactcagtgaagaatctttcccaacattgctcttaatttcgaaattaatgaagttctctctggacactctgtacgtgtctacagcaaaacacgttttcgaaaaaaaactgaagccaaagctcctgaagttaacacaagctaaatcctcaacactgattaacaaggaaataactaagatcacgcagaccatcgaatcctgcttactctctatagtcaacccagagtgggctgtagctattgccatcagccttgcccaggatatccctgaaggttccttcaagatatctgctttgaaattctgcctttatttagctgagagatggctacagaatatcccatcgcaggacgaaaaacgtgaaaaagccgaggctttgttgaagaagcttcatatccagtaccggcgatcgggcacagaagctgtgctcatagcccacaagctgaacactgaggaatatttaagagtgatcggaaagccagcacatcttattgtcagtctctacgaacatcctagcatcaatcaaagaattcagaattcatctggcacagattatcctgatattcatgcagcagctaaagaaatagccgaagtcaatgaaattaatttggaaaaagtctgggacatgttgttggaaaaatggctatgcccttcaacaaaacctggtgaaaaaccatcagaattatttgaacttcaagaagatgaagccctacgaagagtgcagtatctcctcctgtctcgtccaattgattatagttcaagaatgctgtttgtatttgcaacatcaactacaaccacattaggtatgcatcagttaacttttgcccatagaactcgagctcttcagtgtctcttctatttggctgacaaggaaactatagaatctctctttaaaaaacccattgaagaagtgaaatcttatttgagatgtataacttttctggcatcatttgagactttgaatatccccatcacatatgaattattttgcagcagtcctaaagaaggaatgattaagggtctgtggaaaaaccacagccacgagtccatggcagtaagattggtgactgagctgtgtttagaatacaaaatctatgacctgcagctttggaatggactcttgcaaaagcttctgggcttcaatatgattccttatctaaggaaagttttaaaagccatctccagtatccattctttatggcaggttccctacttcagcaaagcgtggcagcgtgtgatacagataccactgctttcagcctcttgtcctttaagtcctgatcagctgtcagattgttctgagagtctcatcgctgtcctcgaatgtccagtctcaggtgatcttgacctgatcggagtcgccaggcagtatatccagttagaacttccggcttttgcattagcttgtctgatgctcatgccccactcagagaaaagacaccagcaaattaagaattttctgggttcctgtgaccctcaggttattttaaagcaattggaagagcatatgaacacgggccagctagcaggattttcacatcaaattagaagtctgattttgaataatatcatcaataagaaggagtttgggattttggcaaagaccaaatactttcaaatgttgaagatgcatgcgatgaataccaacaatatcactgagctagtgaactatttggcaaatgacttaagatgtttcttagtggattatcgtaaatcactgaacctttttttcaagaaggacaagaattttggagtctgctattaatggaccatatttattacagtttttaaattgtacaatctctgtattatagctatttgtctaacattaccccacatgtaataaataaaacaatatgagcataattgccccataaagaactc

SEQ ID NO: 401316 - DNA, 4407 bp, Homo sapiens
ttcccttttggggtctttgctcttgaaggacagataattcttgcaaaatggttggaacaagcagccaggaaccttgaattaactgataaggcaaattggccagaaaatggacttcaattggcagagatattttttacagcagaaaaaacagacgagttgggattggcatcttcctggcattggatttccttgaaagattatcagaacacagaggaagtatgtcagctaaggactttggtaaataacttgcgagagttgatcacgttgcataggaagtacaactgcaaattagccctctctgattttgagaaggaaaatacaaccaccatagtgttccgaatgtttgataaagtgctggccccagagcttattccctccatcttagagaagtttataagagtttacatgagagaacatgacttgcaagaggaggaacttctcttgctgtacatagaggatttactgaatagatgcagctcaaagtccacatcactctttgaaacagcatgggaagcaaaggccatggcagtaatagcgtgtttatctgacacggacctcatatttgatgccgtgctcaagatcatgtatgcggcagtggttccttggagtgcagctgtggagcaactggtgaaacagcacctggaaatggaccatcccaaagtcaagttattacaggaaagttacaaactaatggagatgaaaaaacttttacgaggctatggaataagagaggtaaatctcttaaacaaggaaataatgagagtggttagatacattctcaaacaagatgtcccatcttctttagaagatgctttaaaggtagcccaagcgtttatgttatctgatgatgagatctacagtctaagaattattgacctgattgatagagaacagggtgaagactgtctccttctgttgaagtctttgcctcctgctgaagctgagaaaactgcagaaagagtcatcatatgggcacgactggcattacaagaagagccagatcattctaaagagggcaaggcctggagaatgtctgtagcgaagacatccgtggacattcttaagatactatgtgacattcagaaagacaatctgcagaagaaggacgaatgtgaagaaatgttgaaactatttaaagaggttgctagcttacaggagaactttgaggtctttctttcatttgaagattatagcaatagttccctggtagcagatctccgtgagcagcacattaaagctcacgaagttgcacaggcgaaacacaaacctgggagcaccccagagcccatagctgctgaggtgaggagcccaagcatggaatcaaagctgcacagacaggcactggccctgcagatgtccaaacaagagctggaggcagagctgaccttgagagccttaaaagatgggaacatcaaaacagcactgaaaaaatgcagcgacttgtttaagtatcactgcaatgctgacactgggaaattgctatttctgacatgtcagaagctttgtcagatgttggctgataatgtcccagtgacagtgcctgtgggactgaatcttccttccatgatacatgatctagcaagccaagctgccaccatttgcagtccagattttttactagatgctttagaactatgtaaacatactttaatggctgtagagctttccagacaatgccaaatggatgactgtggaatcctcatgaaagcttcttttgggacacataaagatccatatgaagagtggtcttacagtgacttcttcagtgaagatggaattgttcttgagtcacagatggtgcttccagtgatttatgaactgatttcatctcttgtgcctctagctgaaagcaagagatatcccttggagtctaccagtttgccatactgctcccttaatgaaggagatggccttgttttacctgttataaattccatctctgccctgcttcagaatcttcaggaatctagccagtgggagctagccctaagatttgtggttggttcatttggtacctgtcttcagcactctgtgtcaaacttcatgaatgccactttgagtgaaaagttatttggagagactacattagttaaatcaaggcatgttgttatggaattgaaagaaaaagctgttatatttatcagggaaaatgctacaacactactgcacaaagtatttaattgtcgcttggtagatcttgacctggcgttgggttactgcactctcttacctcaaaaagatgtgtttgaaaatctctggaagctcatagataaagcatggcagaattacgacaaaatcttggcaatatctctggtgggctctgagctggcaagtctctatcaggaaatagaaatggggcttaagttccgtgaactcagtactgatgcccagtggggcattcgtcttggtaaacttggtatttcttttcaaccagttttcaggcaacattttctcaccaagaaagacctcattaaagctcttgtggagaatatagatatggacacaagcctcattttggaatattgcagcacatttcagttggactgcgatgcagttcttcagctcttcattgaaacgctgctccacaacacaaatgccggccaaggccagggagatgcaagcatggactctgcaaagcggcggcatcccaaactcctggccaaagcccttgagatggttcctttactgacgagcacaaaagatttggtcatcagtcttagtggaatactacataaggttggatccttatgactatgaaatgattgaagttgtcttgaaagttatagaacgagctgatgaaaagataaccaatattaatattaatcaggcattgagtattctgaaacatttgaagtcatacagaagaatttctcctcccgtggatctagaatatcagtatatgttggaacatgtcataactttgccatcagctgcccaaactagactgccttttcacctgatattctttggcacagcacagaacttctggaaaattctctctacagaactcagtgaagaatctttcccaacattgctcttaatttcgaaattaatgaagttctctctggacactctgtacgtgtctacagcaaaacacgttttcgaaaaaaaactgaagccaaagctcctgaagttaacacaagctaaatcctcaacactgattaacaaggaaataactaagatcacgcagaccatcgaatcctgcttactctctatagtcaacccagagtgggctgtagctattgccatcagccttgcccaggatatccctgaaggttccttcaagatatctgctttgaaattctgcctttatttagctgagagatggctacagaatatcccatcgcaggacgaaaaacgtgaaaaagccgaggctttgttgaagaagcttcatatccagtaccggcgatcgggcacagaagctgtgctcatagcccacaagctgaacactgaggaatatttaagagtgatcggaaagccagcacatcttattgtcagtctctacgaacatcctagcatcaatcaaagaattcagaattcatctggcacagattatcctgatattcatgcagcagctaaagaaatagccgaagtcaatgaaattaatttggaaaaagtctgggacatgttgttggaaaaatggctatgcccttcaacaaaacctggtgaaaaaccatcagaattatttgaacttcaagaagatgaagccctacgaagagtgcagtatctcctcctgtctcgtccaattgattatagttcaagaatgctgtttgtatttgcaacatcaactacaaccacattaggtatgcatcagttaacttttgcccatagaactcgagctcttcagtgtctcttctatttggctgacaaggaaactatagaatctctctttaaaaaacccattgaagaagtgaaatcttatttgagatgtataacttttctggcatcatttgagactttgaatatccccatcacatatgaattattttgcagcagtcctaaagaaggaatgattaagggtctgtggaaaaaccacagccacgagtccatggcagtaagattggtgactgagctgtgtttagaatacaaaatctatgacctgcagctttggaatggactcttgcaaaagcttctgggcttcaatatgattccttatctaaggaaagttttaaaagccatctccagtatccattctttatggcaggttccctacttcagcaaagcgtggcagcgtgtgatacagataccactgctttcagcctcttgtcctttaagtcctgatcagcaaagaagataaagaagtttgtacaaagcaactttttataaatggatggctgtcaggcaaaaataaatttcctgtggacaagaccaagagcaaggcaagaggaaaataaacatgtttaaact

SEQ ID NO: 401317 - DNA, 3320 bp, Homo sapiens
ttcccttttggggtctttgctcttgaaggacagataattcttgcaaaatggttggaacaagcagccaggaaccttgaattaactgataaggcaaattggccagaaaatggacttcaattggcagagatattttttacagcagaaaaaacagacgagttgggattggcatcttcctggcattggatttccttgaaagattatcagaacacagaggaagtatgtcagctaaggactttggtaaataacttgcgagagttgatcacgttgcataggaagtacaactgcaaattagccctctctgattttgagaaggaaaatacaaccaccatagtgttccgaatgtttgataaagtgctggccccagagcttattccctccatcttagagaagtttataagagtttacatgagagaacatgacttgcaagaggaggaacttctcttgctgtacatagaggatttactgaatagatgcagctcaaagtccacatcactctttgaaacagcatgggaagcaaaggccatggcagtaatagcgtgtttatctgacacggacctcatatttgatgccgtgctcaagatcatgtatgcggcagtggttccttggagtgcagctgtggagcaactggtgaaacagcacctggaaatggaccatcccaaagtcaagttattacaggaaagttacaaactaatggagatgaaaaaacttttacgaggctatggaataagagaggtaaatctcttaaacaaggaaataatgagagtggttagatacattctcaaacaagatgtcccatcttctttagaagatgctttaaaggtagcccaagcgtttatgttatctgatgatgagatctacagtctaagaattattgacctgattgatagagaacagggtgaagactgtctccttctgttgaagtctttgcctcctgctgaagctgagaaaactgcagaaagagtcatcatatgggcacgactggcattacaagaagagccagatcattctaaagagggcaaggcctggagaatgtctgtagcgaagacatccgtggacattcttaagatactatgtgacattcagaaagacaatctgcagaagaaggacgaatgtgaagaaatgttgaaactatttaaagaggttgctagcttacaggagaactttgaggtctttctttcatttgaagattatagcaatagttccctggtagcagatctccgtgagcagcacattaaagctcacgaagttgcacaggcgaaacacaaacctgggagcaccccagagcccatagctgctgaggtgaggagcccaagcatggaatcaaagctgcacagacaggcactggccctgcagatgtccaaacaagagctggaggcagagctgaccttgagagccttaaaagatgggaacatcaaaacagcactgaaaaaatgcagcgacttgtttaagtatcactgcaatgctgacactgggaaattgctatttctgacatgtcagaagctttgtcagatgttggctgataatgtcccagtgacagtgcctgtgggactgaatcttccttccatgatacatgatctagcaagccaagctgccaccatttgcagtccagattttttactagatgctttagaactatgtaaacatactttaatggctgtagagctttccagacaatgccaaatggatgactgtggaatcctcatgaaagcttcttttgggacacataaagatccatatgaagagtggtcttacagtgacttcttcagtgaagatggaattgttcttgagtcacagatggtgcttccagtgatttatgaactgatttcatctcttgtgcctctagctgaaagcaagagatatcccttggagtctaccagtttgccatactgctcccttaatgaaggagatggccttgttttacctgttataaattccatctctgccctgcttcagaatcttcaggaatctagccagtgggagctagccctaagatttgtggttggttcatttggtacctgtcttcagcactctgtgtcaaacttcatgaatgccactttgagtgaaaagttatttggagagactacattagttaaatcaaggcatgttgttatggaattgaaagaaaaagctgttatatttatcagggaaaatgctacaacactactgcacaaagtatttaattgtcgcttggtagatcttgacctggcgttgggttactgcactctcttacctcaaaaagatgtgtttgaaaatctctggaagctcatagataaagcatggcagaattacgacaaaatcttggcaatatctctggtgggctctgagctggcaagtctctatcaggaaatagaaatggggcttaagttccgtgaactcagtactgatgcccagtggggcattcgtcttggtaaacttggtatttcttttcaaccagttttcaggcaacattttctcaccaagaaagacctcattaaagctcttgtggagaatatagatatggacacaagcctcattttggaatattgcagcacatttcagttggactgcgatgcagttcttcagctcttcattgaaacgctgctccacaacacaaatgccggccaaggccagggagatgcaagcatggactctgcaaagcggcggcatcccaaactcctggccaaagcccttgagatggttcctttactgacgagcacaaaagatttggtcatcagtcttagtggaatactacataaggttggatccttatgactatgaaatgattgaagttgtcttgaaagttatagaacgagctgatgaaaagataaccaatattaatattaatcaggcattgagtattctgaaacatttgaagtcatacagaagaatttctcctcccgtggatctagaatatcagtatatgttggaacatgtcataactttgccatcagctgcccaaactagactgccttttcacctgatattctttggcacagcacagaacttctggaaaattctctctacagaactcagtgaagaatctttcccaacattgctcttaatttcgaaattaatgaagttctctctggacactctgtacgtgtctacagcaaaacacgttttcgtaacaaggaaataactaagatcacgcagaccatcgaatcctgcttactctctatagtcaacccagagtgggctgtagctattgccatcagctgcagattctgaggtcttaattgttattcttataagcatctagaagaacgttaattccgatgcatgtcatctataggcaccttgctacttatgatcgtcctatccaatatgctgagtcacgactc

SEQ ID NO: 401318 - DNA, 6965 bp, Homo sapiens
ggcatggaacctaaagactagaggcggttgtgtgagtcaggaagaggggccagatatctgagtgttcctctttagtttcttcaattgcagataatatggtgtctaattttatgttgttcaggaaagacagtggttcctgactcaggaagacagtctcagaaacatgtggaatgatattgagctgctaacaaatgatgataccggaagtgggtacctgagtgtcggttcaagaaaagaacatggaactgctttatatcaagtagatttgctagtgaagatctcttctgaaaaggcctcattaaatccaaagatacaggcatgcagcttaagtgatgggtttattattgtagccgaccaatcagtgatattgcttgacagtatttgtagatcacttcaattgcatcttgtctttgatactgaagtggatgtagttggcctttgtcaagaaggaaagtttcttttggttggcgagagaagtggcaacctacatcttattcatgtaacatcaaaacaaacactactcactaatgcatttgttcagaaagctaacgatgaaaatcggcggacttaccagaatcttgtcattgagaaggatggttcaaatgaaggtacctattatatgctacttcttacatacagtggatttttttgtattacaaaccttcagcttttaaaaattcaacaagcaattgagaatgtagacttcagtacagcaaaaaagttacaaggacaaatcaagtccagttttatttctactgaaaattatcatactcttggttgtctcagtcttgtggctggagatttagcaagtgaagttcctgtgataattgggggaaccggtaattgtgcattctcaaaatgggaaccagattcttccaagaaaggaatgacagttaagaaccttattgatgcagagattattaaaggtgcaaagaagttccagctgatagacaatctactttttgttcttgatactgataacgtgctgagtttatgggatatttacactctaactcctgtatggaactggccctctcttcacgtagaagagtttcttcttactacagaagcagactctccttcatcagtcacgtggcaaggaattacaaatctcaaattaatagctctgacagcttcagctaataagaagatgaaaaacctcatggtttattcattacctacaatggaaatactatattctttggaagtatctagtgtttcttctctggtccaaacaggaattagcacagataccatataccttttagaaggagtttgcaaaaatgatccaaaattgtctgaagactcagtctctgtgttagtactcagatgtcttacggaagctttaccagaaaacagattgagtcggttacttcacaaacacagatttgctgaagctgagagttttgccattcagtttggactagatgttgagcttgtttacaaggtcaagtcaaatcatatattggagaaactggcattgagttctgtggatgccagtgaacagaccgaatggcaacaacttgtagacgacgctaaggaaaatctacataagatccaggatgatgaatttgtggtgaattactgcctgaaagctcagtggataacctatgaaaccactcaagagatgctgaattatgccaaaaccaggcttttgaagaaagaagataaaactgctctcatttattctgatggcttgaaagaggtgctaagagctcatgcaaaattgactactttttatggagcatttggaccagaaaaattcagtggcagttcttggattgaatttctaaataatgaagatgatcttaaagatatttttttacagctaaaagaaggaaaccttgtttgtgcacagtatctttggcttcgacatcgggcaaactttgaaagcagatttgatgtgaaaatgctggagagcttgctcaactcaatgtctgcatcagtctctttgcaaaagctgtgtccatggtttaaaaatgatgtgattccatttgtaagaaggactgtgcctgaaggacagataattcttgcaaaatggttggaacaagcagccaggaaccttgaattaactgataaggcaaattggccagaaaatggacttcaattggcagagatattttttacagcagaaaaaacagacgagttgggattggcatcttcctggcattggatttccttgaaagattatcagaacacagaggaagtatgtcagctaaggactttggtaaataacttgcgagagttgatcacgttgcataggaagtacaactgcaaattagccctctctgattttgagaaggaaaatacaaccaccatagtgttccgaatgtttgataaagtgctggccccagagcttattccctccatcttagagaagtttataagagtttacatgagagaacatgacttgcaagaggaggaacttctcttgctgtacatagaggatttactgaatagatgcagctcaaagtccacatcactctttgaaacagcatgggaagcaaaggccatggcagtaatagcgtgtttatctgacacggacctcatatttgatgccgtgctcaagatcatgtatgcggcagtggttccttggagtgcagctgtggagcaactggtgaaacagcacctggaaatggaccatcccaaagtcaagttattacaggaaagttacaaactaatggagatgaaaaaacttttacgaggctatggaataagagaggtaaatctcttaaacaaggaaataatgagagtggttagatacattctcaaacaagatgtcccatcttctttagaagatgctttaaaggtagcccaagcgtttatgttatctgatgatgagatctacagtctaagaattattgacctgattgatagagaacagggtgaagactgtctccttctgttgaagtctttgcctcctgctgaagctgagaaaactgcagaaagagtcatcatatgggcacgactggcattacaagaagagccagatcattctaaagagggcaaggcctggagaatgtctgtagcgaagacatccgtggacattcttaagatactatgtgacattcagaaagacaatctgcagaagaaggacgaatgtgaagaaatgttgaaactatttaaagaggttgctagcttacaggagaactttgaggtctttctttcatttgaagattatagcaatagttccctggtagcagatctccgtgagcagcacattaaagctcacgaagttgcacaggcgaaacacaaacctgggagcaccccagagcccatagctgctgaggtgaggagcccaagcatggaatcaaagctgcacagacaggcactggccctgcagatgtccaaacaagagctggaggcagagctgaccttgagagccttaaaagatgggaacatcaaaacagcactgaaaaaatgcagcgacttgtttaagtatcactgcaatgctgacactgggaaattgctatttctgacatgtcagaagctttgtcagatgttggctgataatgtcccagtgacagtgcctgtgggactgaatcttccttccatgatacatgatctagcaagccaagctgccaccatttgcagtccagattttttactagatgctttagaactatgtaaacatactttaatggctgtagagctttccagacaatgccaaatggatgactgtggaatcctcatgaaagcttcttttgggacacataaagatccatatgaagagtggtcttacagtgacttcttcagtgaagatggaattgttcttgagtcacagatggtgcttccagtgatttatgaactgatttcatctcttgtgcctctagctgaaagcaagagatatcccttggagtctaccagtttgccatactgctcccttaatgaaggagatggccttgttttacctgttataaattccatctctgccctgcttcagaatcttcaggaatctagccagtgggagctagccctaagatttgtggttggttcatttggtacctgtcttcagcactctgtgtcaaacttcatgaatgccactttgagtgaaaagttatttggagagactacattagttaaatcaaggcatgttgttatggaattgaaagaaaaagctgttatatttatcagggaaaatgctacaacactactgcacaaagtatttaattgtcgcttggtagatcttgacctggcgttgggttactgcactctcttacctcaaaaagatgtgtttgaaaatctctggaagctcatagataaagcatggcagaattacgacaaaatcttggcaatatctctggtgggctctgagctggcaagtctctatcaggaaatagaaatggggcttaagttccgtgaactcagtactgatgcccagtggggcattcgtcttggtaaacttggtatttcttttcaaccagttttcaggcaacattttctcaccaagaaagacctcattaaagctcttgtggagaatatagatatggacacaagcctcattttggaatattgcagcacatttcagttggactgcgatgcagttcttcagctcttcattgaaacgctgctccacaacacaaatgccggccaaggccagggagatgcaagcatggactctgcaaagcggcggcatcccaaactcctggccaaagcccttgagatggttcctttactgacgagcacaaaagatttggtcatcagtcttagtggaatactacataaggttggatccttatgactatgaaatgattgaagttgtcttgaaagttatagaacgagctgatgaaaagataaccaatattaatattaatcaggcattgagtattctgaaacatttgaagtcatacagaagaatttctcctcccgtggatctagaatatcagtatatgttggaacatgtcataactttgccatcagctgcccaaactagactgccttttcacctgatattctttggcacagcacagaacttctggaaaattctctctacagaactcagtgaagaatctttcccaacattgctcttaatttcgaaattaatgaagttctctctggacactctgtacgtgtctacagcaaaacacgttttcgaaaaaaaactgaagccaaagctcctgaagttaacacaagctaaatcctcaacactgattaacaaggaaataactaagatcacgcagaccatcgaatcctgcttactctctatagtcaacccagagtgggctgtagctattgccatcagccttgcccaggatatccctgaaggttccttcaagatatctgctttgaaattctgcctttatttagctgagagatggctacagaatatcccatcgcaggacgaaaaacgtgaaaaagccgaggctttgttgaagaagcttcatatccagtaccggcgatcgggcacagaagctgtgctcatagcccacaagctgaacactgaggaatatttaagagtgatcggaaagccagcacatcttattgtcagtctctacgaacatcctagcatcaatcaaagaattcagaattcatctggcacagattatcctgatattcatgcagcagctaaagaaatagccgaagtcaatgaaattaatttggaaaaagtctgggacatgttgttggaaaaatggctatgcccttcaacaaaacctggtgaaaaaccatcagaattatttgaacttcaagaagatgaagccctacgaagagtgcagtatctcctcctgtctcgtccaattgattatagttcaagaatgctgtttgtatttgcaacatcaactacaaccacattaggtatgcatcagttaacttttgcccatagaactcgagctcttcagtgtctcttctatttggctgacaaggaaactatagaatctctctttaaaaaacccattgaagaagtgaaatcttatttgagatgtataacttttctggcatcatttgagactttgaatatccccatcacatatgaattattttgcagcagtcctaaagaaggaatgattaagggtctgtggaaaaaccacagccacgagtccatggcagtaagattggtgactgagctgtgtttagaatacaaaatctatgacctgcagctttggaatggactcttgcaaaagcttctgggcttcaatatgattccttatctaaggaaagttttaaaagccatctccagtatccattctttatggcaggttccctacttcagcaaagcgtggcagcgtgtgatacagataccactgctttcagcctcttgtcctttaagtcctgatcagctgtcagattgttctgagagtctcatcgctgtcctcgaatgtccagtctcaggtgatcttgacctgatcggagtcgccaggcagtatatccagttagaacttccggcttttgcattagcttgtctgatgctcatgccccactcagagaaaagacaccagcaaattaagaattttctgggttcctgtgaccctcaggttattttaaagcaattggaagagcatatgaacacgggccagctagcaggattttcacatcaaattagaagtctgattttgaataatatcatcaataagaaggagtttgggattttggcaaagaccaaatactttcaaatgttgaagatgcatgcgatgaataccaacaatatcactgagctagtgaactatttggcaaatgacttaagtttagatgaagcttcagtcttgataactgaatattcaaagcactgcgggaaacctgtgcctccagacactgctccctgtgaaattctgaagatgtttcttagtggattatcgtaaatcactgaacctttttttcaagaaggacaagaattttggagtctgctattaatggaccatatttattacagtttttaaattgtacaatctctgtattatagctatttgtctaacattaccccacatgtaataaataaaacaatatgagcataattgccccataaagaactc

SEQ ID NO: 401319 - DNA, 2920 bp, Homo sapiens
aaaaatataagacattttatttgccaacagttgacttatcagaaaggtaatcagtacagaaatgctatatgttttgaagcttaattcttctgcagtaatggaactggtgttctgttgacattaacaatcaaacttttcagatgaagaggcaatggttaggatgactaagaggagtttcggacccatgtacacctcaaatctcagaatgatggctgggttgggtagtgtgaggttggaggagctatagacaaatgtttctttttgaaaaaggatactaagaaggcaagtcatgatgttgcccttactctgatacatttcagtgtagagggtttttttgctttgtttttttctttttatttctagatttcttttcaaccagttttcaggcaacattttctcaccaagaaagacctcattaaagctcttgtggagaatatagatatggacacaagcctcattttggaatattgcagcacatttcagttggactgcgatgcagttcttcagctcttcattgaaacgctgctccacaacacaaatgccggccaaggccagggagatgcaagcatggactctgcaaagcggcggcatcccaaactcctggccaaagcccttgagatggttcctttactgacgagcacaaaagatttggtcatcagtcttagtggaatactacataaggttggatccttatgactatgaaatgattgaagttgtcttgaaagttatagaacgagctgatgaaaagataaccaatattaatattaatcaggcattgagtattctgaaacatttgaagtcatacagaagaatttctcctcccgtggatctagaatatcagtatatgttggaacatgtcataactttgccatcagctgcccaaactagactgccttttcacctgatattctttggcacagcacagaacttctggaaaattctctctacagaactcagtgaagaatctttcccaacattgctcttaatttcgaaattaatgaagttctctctggacactctgtacgtgtctacagcaaaacacgttttcgaaaaaaaactgaagccaaagctcctgaagttaacacaagctaaatcctcaacactgattaacaaggaaataactaagatcacgcagaccatcgaatcctgcttactctctatagtcaacccagagtgggctgtagctattgccatcagccttgcccaggatatccctgaaggttccttcaagatatctgctttgaaattctgcctttatttagctgagagatggctacagaatatcccatcgcaggacgaaaaacgtgaaaaagccgaggctttgttgaagaagcttcatatccagtaccggcgatcgggcacagaagctgtgctcatagcccacaagctgaacactgaggaatatttaagagtgatcggaaagccagcacatcttattgtcagtctctacgaacatcctagcatcaatcaaagaattcagaattcatctggcacagattatcctgatattcatgcagcagctaaagaaatagccgaagtcaatgaaattaatttggaaaaagtctgggacatgttgttggaaaaatggctatgcccttcaacaaaacctggtgaaaaaccatcagaattatttgaacttcaagaagatgaagccctacgaagagtgcagtatctcctcctgtctcgtccaattgattatagttcaagaatgctgtttgtatttgcaacatcaactacaaccacattaggtatgcatcagttaacttttgcccatagaactcgagctcttcagtgtctcttctatttggctgacaaggaaactatagaatctctctttaaaaaacccattgaagaagtgaaatcttatttgagatgtataacttttctggcatcatttgagactttgaatatccccatcacatatgaattattttgcagcagtcctaaagaaggaatgattaagggtctgtggaaaaaccacagccacgagtccatggcagtaagattggtgactgagctgtgtttagaatacaaaatctatgacctgcagctttggaatggactcttgcaaaagcttctgggcttcaatatgattccttatctaaggaaagttttaaaagccatctccagtatccattctttatggcaggttccctacttcagcaaagcgtggcagcgtgtgatacagataccactgctttcagcctcttgtcctttaagtcctgatcagctgtcagattgttctgagagtctcatcgctgtcctcgaatgtccagtctcaggtgatcttgacctgatcggagtcgccaggcagtatatccagttagaacttccggcttttgcattagcttgtctgatgctcatgccccactcagagaaaagacaccagcaaattaagaattttctgggttcctgtgaccctcaggttattttaaagcaattggaagagcatatgaacacgggccagctagcaggattttcacatcaaattagaagtctgattttgaataatatcatcaataagaaggagtttgggattttggcaaagaccaaatactttcaaatgttgaagatgcatgcgatgaataccaacaatatcactgagctagtgaactatttggcaaatgacttaagtttagatgaagcttcagtcttgataactgaatattcaaagcactgcgggaaacctgtgcctccagacactgctccctgtgaaattctgaagatgtttcttagtggattatcgtaaatcactgaacctttttttcaagaaggacaagaattttggagtctgctattaatggaccatatttattacagtttttaaattgtacaatctctgtattatagctatttgtctaacattaccccacatgtaataaataaaacaatatgagcataattgccccataaagaactc

SEQ ID NO: 401320 - DNA, 2544 bp, Homo sapiens
ccgggttcacaccattctcctgcctcagcctcccgagtagctgggactacaggcgcccaccaccacgcccagctaatttttttttgtatttttagtagagacggggtttcaccgtgtttgccaggatggtctcgatctcctgacctcgtgatccacccgcctcggcctcccaaagtgctaggattacaggcgtgagccaccgtgcccggccgattgtagctcatttttaagggagtaattaatttaacaatgtagtgcagtgacatttttatatttgtaatctgtgctgattattgtaattgaatgttggatccttatgactatgaaatgattgaagttgtcttgaaagttatagaacgagctgatgaaaagataaccaatattaatattaatcaggcattgagtattctgaaacatttgaagtcatacagaagaatttctcctcccgtggatctagaatatcagtatatgttggaacatgtcataactttgccatcagctgcccaaactagactgccttttcacctgatattctttggcacagcacagaacttctggaaaattctctctacagaactcagtgaagaatctttcccaacattgctcttaatttcgaaattaatgaagttctctctggacactctgtacgtgtctacagcaaaacacgttttcgaaaaaaaactgaagccaaagctcctgaagttaacacaagctaaatcctcaacactgattaacaaggaaataactaagatcacgcagaccatcgaatcctgcttactctctatagtcaacccagagtgggctgtagctattgccatcagccttgcccaggatatccctgaaggttccttcaagatatctgctttgaaattctgcctttatttagctgagagatggctacagaatatcccatcgcaggacgaaaaacgtgaaaaagccgaggctttgttgaagaagcttcatatccagtaccggcgatcgggcacagaagctgtgctcatagcccacaagctgaacactgaggaatatttaagagtgatcggaaagccagcacatcttattgtcagtctctacgaacatcctagcatcaatcaaagaattcagaattcatctggcacagattatcctgatattcatgcagcagctaaagaaatagccgaagtcaatgaaattaatttggaaaaagtctgggacatgttgttggaaaaatggctatgcccttcaacaaaacctggtgaaaaaccatcagaattatttgaacttcaagaagatgaagccctacgaagagtgcagtatctcctcctgtctcgtccaattgattatagttcaagaatgctgtttgtatttgcaacatcaactacaaccacattaggtatgcatcagttaacttttgcccatagaactcgagctcttcagtgtctcttctatttggctgacaaggaaactatagaatctctctttaaaaaacccattgaagaagtgaaatcttatttgagatgtataacttttctggcatcatttgagactttgaatatccccatcacatatgaattattttgcagcagtcctaaagaaggaatgattaagggtctgtggaaaaaccacagccacgagtccatggcagtaagattggtgactgagctgtgtttagaatacaaaatctatgacctgcagctttggaatggactcttgcaaaagcttctgggcttcaatatgattccttatctaaggaaagttttaaaagccatctccagtatccattctttatggcaggttccctacttcagcaaagcgtggcagcgtgtgatacagataccactgctttcagcctcttgtcctttaagtcctgatcagctgtcagattgttctgagagtctcatcgctgtcctcgaatgtccagtctcaggtgatcttgacctgatcggagtcgccaggcagtatatccagttagaacttccggcttttgcattagcttgtctgatgctcatgccccactcagagaaaagacaccagcaaattaagaattttctgggttcctgtgaccctcaggttattttaaagcaattggaagagcatatgaacacgggccagctagcaggattttcacatcaaattagaagtctgattttgaataatatcatcaataagaaggagtttgggattttggcaaagaccaaatactttcaaatgttgaagatgcatgcgatgaataccaacaatatcactgagctagtgaactatttggcaaatgacttaagtttagatgaagcttcagtcttgataactgaatattcaaagcactgcgggaaacctgtgcctccagacactgctccctgtgaaattctgaagatgtttcttagtggattatcgtaaatcactgaacctttttttcaagaaggacaagaattttggagtctgctattaatggaccatatttattacagtttttaaattgtacaatctctgtattatagctatttgtctaacattaccccacatgtaataaataaaacaatatgagcataattgccccataaagaactc

SEQ ID NO: 401321 - DNA, 1367 bp, Homo sapiens
caggaattcggcacgagcagggacggctgtgtggatatcggcttcgaaaggatctcaccactgagctgagttgggagctgaccattcccccagaagtacagcggatcgtcaaggtgaaggggaaacgcagcagtgagcacgttcattcccagggccgtgtgatgggggaccgcagtgtgctctacaagacattaggtatgcatcagttaacttttgcccatagaactcgagctcttcagtgtctcttctatttggctgacaaggaaactatagaatctctctttaaaaaacccattgaagaagtgaaatcttatttgagatgtataacttttctggcatcatttgagactttgaatatccccatcacatatgaattattttgcagcagtcctaaagaaggaatgattaagggtctgtggaaaaaccacagccacgagtccatggcagtaagattggtgactgagctgtgtttagaatacaaaatctatgacctgcagctttggaatggactcttgcaaaagcttctgggcttcaatatgattccttatctaaggaaagttttaaaagccatctccagtatccattctttatggcaggttccctacttcagcaaagcgtggcagcgtgtgatacagataccactgctttcagcctcttgtcctttaagtcctgatcagctgtcagattgttctgagagtctcatcgctgtcctcgaatgtccagtctcaggtgatcttgacctgatcggagtcgccaggcagtatatccagttagaacttccggcttttgcattagcttgtctgatgctcatgccccactcagagaaaagacaccagcaaattaagaattttctgggttcctgtgaccctcaggttattttaaagcaattggaagagcatatgaacacgggccagctagcaggattttcacatcaaattagaagtctgattttgaataatatcatcaataagaaggagtttgggattttggcaaagaccaaatactttcaaatgttgaagatgcatgcgatgaataccaacaatatcactgagctagtgaactatttggcaaatgacttaagtttagatgaagcttcagtcttgataactgaatattcaaagcactgcgggaaacctgtgcctccagacactgctccctgtgaaattctgaagatgtttcttagtggattatcgtaaatcactgaacctttttttcaagaaggacaagaattttggagtctgctattaatggaccatatttattacagtttttaaattgtacaatctctgtattatagctatttgtctaacattaccccacatgtaataaataaaacaatatgagcataattgccccataaagaactc

SEQ ID NO: 401322 - DNA, 1233 bp, Homo sapiens
tcctctctctcctactcccgcgccacgccccatacgcgacccaggaccggtcagacattaggtatgcatcagttaacttttgcccatagaactcgagctcttcagtgtctcttctatttggctgacaaggaaactatagaatctctctttaaaaaacccattgaagaagtgaaatcttatttgagatgtataacttttctggcatcatttgagactttgaatatccccatcacatatgaattattttgcagcagtcctaaagaaggaatgattaagggtctgtggaaaaaccacagccacgagtccatggcagtaagattggtgactgagctgtgtttagaatacaaaatctatgacctgcagctttggaatggactcttgcaaaagcttctgggcttcaatatgattccttatctaaggaaagttttaaaagccatctccagtatccattctttatggcaggttccctacttcagcaaagcgtggcagcgtgtgatacagataccactgctttcagcctcttgtcctttaagtcctgatcagctgtcagattgttctgagagtctcatcgctgtcctcgaatgtccagtctcaggtgatcttgacctgatcggagtcgccaggcagtatatccagttagaacttccggcttttgcattagcttgtctgatgctcatgccccactcagagaaaagacaccagcaaattaagaattttctgggttcctgtgaccctcaggttattttaaagcaattggaagagcatatgaacacgggccagctagcaggattttcacatcaaattagaagtctgattttgaataatatcatcaataagaaggagtttgggattttggcaaagaccaaatactttcaaatgttgaagatgcatgcgatgaataccaacaatatcactgagctagtgaactatttggcaaatgacttaagtttagatgaagcttcagtcttgataactgaatattcaaagcactgcgggaaacctgtgcctccagacactgctccctgtgaaattctgaagatgtttcttagtggattatcgtaaatcactgaacctttttttcaagaaggacaagaattttggagtctgctattaatggaccatatttattacagtttttaaattgtacaatctctgtattatagctatttgtctaacattaccccacatgtaataaataaaacaatatgagcataattgccccataaagaactc

SEQ ID NO: 401323 - DNA, 750 bp, Homo sapiens
tggggcaaggtgttaaaccaaaacccttgttttcagcctcctgcctttaagtctagacaactgcacaattggttgtaaaattctcaccctgtcctcaaatgtccagtctcaggtgatcttgacctgatcggagtcgccaggcagtatatccagttagaacttccggcttttgcattagcttgtctgatgctcatgccccactcagagaaaagacaccagcaaattaagaattttctgggttcctgtgaccctcaggttattttaaagcaattggaagagcatatgaacacgggccagctagcaggattttcacatcaaattagaagtctgattttgaataatatcatcaataagaaggagtttgggattttggcaaagaccaaatactttcaaatgttgaagatgcatgcgatgaataccaacaatatcactgagctagtgaactatttggcaaatgacttaagtttagatgaagcttcagtcttgataactgaatattcaaagcactgcgggaaacctgtgcctccagacactgctccctgtgaaattctgaagatgtttcttagtggattatcgtaaatcactgaacctttttttcaagaaggacaagaattttggagtctgctattaatggaccatatttattacagtttttaaattgtacaatctctgtattatagctatttgtctaacattaccccacatgtaataaataaaacaatatgagcataattgccccataaagaactc

SEQ ID NO: 401324 - DNA, 4336 bp, Homo sapiens
ttcccttttggggtctttgctcttgaaggacagataattcttgcaaaatggttggaacaagcagccaggaaccttgaattaactgataaggcaaattggccagaaaatggacttcaattggcagagatattttttacagcagaaaaaacagacgagttgggattggcatcttcctggcattggatttccttgaaagattatcagaacacagaggaagtatgtcagctaaggactttggtaaataacttgcgagagttgatcacgttgcataggaagtacaactgcaaattagccctctctgattttgagaaggaaaatacaaccaccatagtgttccgaatgtttgataaagtgctggccccagagcttattccctccatcttagagaagtttataagagtttacatgagagaacatgacttgcaagaggaggaacttctcttgctgtacatagaggatttactgaatagatgcagctcaaagtccacatcactctttgaaacagcatgggaagcaaaggccatggcagtaatagcgtgtttatctgacacggacctcatatttgatgccgtgctcaagatcatgtatgcggcagtggttccttggagtgcagctgtggagcaactggtgaaacagcacctggaaatggaccatcccaaagtcaagttattacaggaaagttacaaactaatggagatgaaaaaacttttacgaggctatggaataagagaggtaaatctcttaaacaaggaaataatgagagtggttagatacattctcaaacaagatgtcccatcttctttagaagatgctttaaaggtagcccaagcgtttatgttatctgatgatgagatctacagtctaagaattattgacctgattgatagagaacagggtgaagactgtctccttctgttgaagtctttgcctcctgctgaagctgagaaaactgcagaaagagtcatcatatgggcacgactggcattacaagaagagccagatcattctaaagagggcaaggcctggagaatgtctgtagcgaagacatccgtggacattcttaagatactatgtgacattcagaaagacaatctgcagaagaaggacgaatgtgaagaaatgttgaaactatttaaagaggttgctagcttacaggagaactttgaggtctttctttcatttgaagattatagcaatagttccctggtagcagatctccgtgagcagcacattaaagctcacgaagttgcacaggcgaaacacaaacctgggagcaccccagagcccatagctgctgaggtgaggagcccaagcatggaatcaaagctgcacagacaggcactggccctgcagatgtccaaacaagagctggaggcagagctgaccttgagagccttaaaagatgggaacatcaaaacagcactgaaaaaatgcagcgacttgtttaagtatcactgcaatgctgacactgggaaattgctatttctgacatgtcagaagctttgtcagatgttggctgataatgtcccagtgacagtgcctgtgggactgaatcttccttccatgatacatgatctagcaagccaagctgccaccatttgcagtccagattttttactagatgctttagaactatgtaaacatactttaatggctgtagagctttccagacaatgccaaatggatgactgtggaatcctcatgaaagcttcttttgggacacataaagatccatatgaagagtggtcttacagtgacttcttcagtgaagatggaattgttcttgagtcacagatggtgcttccagtgatttatgaactgatttcatctcttgtgcctctagctgaaagcaagagatatcccttggagtctaccagtttgccatactgctcccttaatgaaggagatggccttgttttacctgttataaattccatctctgccctgcttcagaatcttcaggaatctagccagtgggagctagccctaagatttgtggttggttcatttggtacctgtcttcagcactctgtgtcaaacttcatgaatgccactttgagtgaaaagttatttggagagactacattagttaaatcaaggcatgttgttatggaattgaaagaaaaagctgttatatttatcagggaaaatgctacaacactactgcacaaagtatttaattgtcgcttggtagatcttgacctggcgttgggttactgcactctcttacctcaaaaagatgtgtttgaaaatctctggaagctcatagataaagcatggcagaattacgacaaaatcttggcaatatctctggtgggctctgagctggcaagtctctatcaggaaatagaaatggggcttaagttccgtgaactcagtactgatgcccagtggggcattcgtcttggtaaacttggtatttcttttcaaccagttttcaggcaacattttctcaccaagaaagacctcattaaagctcttgtggagaatatagatatggacacaagcctcattttggaatattgcagcacatttcagttggactgcgatgcagttcttcagctcttcattgaaacgctgctccacaacacaaatgccggccaaggccagggagatgcaagcatggactctgcaaagcggcggcatcccaaactcctggccaaagcccttgagatggttcctttactgacgagcacaaaagatttggtcatcagtcttagtggaatactacataaggttggatccttatgactatgaaatgattgaagttgtcttgaaagttatagaacgagctgatgaaaagataaccaatattaatattaatcaggcattgagtattctgaaacatttgaagtcatacagaagaatttctcctcccgtggatctagaatatcagtatatgttggaacatgtcataactttgccatcagctgcccaaactagactgccttttcacctgatattctttggcacagcacagaacttctggaaaattctctctacagaactcagtgaagaatctttcccaacattgctcttaatttcgaaattaatgaagttctctctggacactctgtacgtgtctacagcaaaacacgttttcgaaaaaaaactgaagccaaagctcctgaagttaacacaagctaaatcctcaacactgattaacaaggaaataactaagatcacgcagaccatcgaatcctgcttactctctatagtcaacccagagtgggctgtagctattgccatcagccttgcccaggatatccctgaaggttccttcaagatatctgctttgaaattctgcctttatttagctgagagatggctacagaatatcccatcgcaggacgaaaaacgtgaaaaagccgaggctttgttgaagaagcttcatatccagtaccggcgatcgggcacagaagctgtgctcatagcccacaagctgaacactgaggaatatttaagagtgatcggaaagccagcacatcttattgtcagtctctacgaacatcctagcatcaatcaaagaattcagaattcatctggcacagattatcctgatattcatgcagcagctaaagaaatagccgaagtcaatgaaattaatttggaaaaagtctgggacatgttgttggaaaaatggctatgcccttcaacaaaacctggtgaaaaaccatcagaattatttgaacttcaagaagatgaagccctacgaagagtgcagtatctcctcctgtctcgtccaattgattatagttcaagaatgctgtttgtatttgcaacatcaactacaaccgtaagctctagaaacttaatccaaactcttctgtgcatctcagcttaacatttttttcctgtttatttaccatgcttgattgcattaacagatgattcagataatgctcacgtacatatgtattcaaagtctgtctcatctcctaaggcaaggcattgtcttgcaccatgctccatttagttctgggtctctgtaacatctggcttaggcgtgctgaatgggtggcacctattggacagtttccactgggctggtctggcattcacagtgggttaactccctggtcagtccacattcctgaagccaggagccaaacaaactgtccacaaacaagtctccaccaaggcctaatctggctgcatgctctggtcagaccaccccttctgcccactaaattctagctagattgaacttgcaatttccctaacggcaatatgacctttagcttcaggttcttgcctatagaaatgtcctctgaggcagttggagcagagagaggagaaggggatggaccagtaggcaaatgattctcagaaaagg

SEQ ID NO: 401325 - DNA, 528 bp, Homo sapiens
catagggatgcaagtgtcgagaagactgggtataggtatactatatgattggaaggctagaggtggtcctttattttattgaaacatagcgaagaaattatcttagaattttgtgttttactaaatgaatatgaaacttcacatttcatacagcagatattaagaagggcctgctatatacctaaggccatactagatacatgacattcatatatcgtttgattcccacttcaacccagtaaagtgtaggtacttttacttccttctgtcctcattgaggaaactgaagttcattgagactgtgcactcacatcacccagggaataagtaagatgtgttgttctagagctactactgctactactggctggtaagagccaattgttaaatatccaagaacttgtaacccagccatggtttgcattggccacaggaggcacatttataccttagaaatcagcaaatgctgcaaatcagagctctctttgaatttccagagtcatttgctaggacactttgcatcttgaa

SEQ ID NO: 401326 - DNA, 457 bp, Homo sapiens
ttttttttgagatggagtctcgtcctgtcgcccaggctggagtgcaatggtgccatctcggctcactgcaacctctgcctcctaggttcaagcgattctcctgcctcagcctcctgagtagctgggattacaggcgcgagccaccacgcccggctaattttttgtatctttagtagagatggggtttcaccatgttggccaggatggtctcgaactcctgacctcaagtgatccgcccacctcagcctcccaaagtgctgggattacagacgtgagccaccgcgcccggcgcatacatttaatttctgatagtaagtaattctacatgattatatctgtcaaatgactactccatgttccttgaagttatttttttaaacatcacaaccattttgatgggactcttactaaaatgtattattttccttctgtcttcataaaaagataatatggtgag

SEQ ID NO: 401327 - DNA, 324 bp, Homo sapiens
gaccttgtaattcccaacccaaatggccttaggtctcttcaaagtgcctgcagaagtttcttccaatattccttttacagagggtggatagcttagctggggcgcattcctggtcctgaatgttggccagggggtggctggttagggtgacggtgatggtggatcaaatttggacatattggtggcgtgtccacatgaggacccttgaagtgtgggtagagcctgggatgggaagagaatgaagtcaggttttatagcccccacaaatgctagaaataggcctggccatcacagcattcaccgtacaatattgctttgattcct

SEQ ID NO: 401328 - DNA, 180 bp, Homo sapiens
tacgacaaataaccctactcatgttgcttaagtgtacttaaagtttctcatcttacacaaactttgttggtatatggctaattctgcatctagaataatgcatgatctcattctttcaagctgaatttcttttaaagctttttcactaaaagctgtatacacacgtctttacttctggga

SEQ ID NO: 401329 - DNA, 694 bp, Homo sapiens
ttgcttatgctgaggactgctgtgatttgaatgtacccaccaaaactcaggttgaaatgtaattgccattgtaacagtgttgagagttgagaccttcaagaggtctcatgattaggtcatgaggagtactgttagttattgcaggagtgggttcctaataactggataagtttggctcccatcttgcctctctgtctctcatgctgtcttgggcctttcaccatgaggtgaccctccccatatgcaggcaccgtgctcttggacttcccaggctccacaactgtgagaaataaatttattttctttataaattacccagtctgttgtattctgttatagcagcagaaaatgggctgagacagaaagtagtatgaccccaactgagaagtctcctagggggaaagaaaaaaaaatcatcagttcttagtattacctctttggaatgtattttttataaaatctaaattcacaaaaagaagctgagagtatgtgatgcaatagagcttcatttttgtaccagataaatgtactggctgaatacataattgtaatgactgaaagtacacagtccttattaatttctactggcaagatcttctgggaaagcagaagaaaaaaagaggaagcatggtgaaacacacacaacacacaagaaggaagacaacttaggagaagtaacaaataggagaagaaa

SEQ ID NO: 401330 - DNA, 1153 bp, Homo sapiens
gtggtcctgaggtgacatacatcctcagcttatgaagataacaggattaagagattaaagtaaagacaggcataagaaattataaaagtattatttgggaactgataaatgtccatgaaattttcacaattcatgttcctttgctgtggctccagccggtccctccgttcggggtccctgactttccacaacacacaagaaaatttaaaaaatttaaaaccaactattcctccaaaaattaaaaatagaaatatcatatgatccaggaatttcactcttcagtatatactcagaagaactggaagcagggatgtgaacataaatgtgtacatcactgttcatagcattattcacagtagttaaaaaggggaaacagcccaaatgtccatcaacagatgaatggatgaacaaaatgggatatttaagttatgtacaatggaacattattcagccatagaaaagaatgaaattctgatacgtgctgcaacatgggtgaaccttaaaaacactgtgctaagtgaaataacccagacaaagggaaaatataatatgattccacttgtatgaagtacctagactaggcagatttgtgagcgacagaaagtgccacagacgttaccagaggctgagagtaaggggcaatggggagggaggtattgtttaatgggtacagagcttcagtgtgggaagatgaaaaagtcctggaagatgaaagaaaaaattctggaaaattatagtagtgatgggttacctaatattgtgaaagtacttaatgctactgaattatacactaaaaaattgttaaagtggtaaattttgttacatgtattttactggaatgaaaacaattaaaaccatctataaatcatggtatccagaggaaacaataagtattttggctgattttaacactttttttcccctgtagatatgtgttttataaaatttggctaataatactatgcatgtaatcctgagctcttgaattttacattttaattgtattttccttatcattaaatacaatgaaatcaccacctttaatggttgcataatttaacattatatggatgttccatgtaatgttaaatatgtgtaatgttccatgtcatttaattgtattttccatgtcattaaatataatgaaatcatc

SEQ ID NO: 401331 - DNA, 696 bp, Homo sapiens
ctacgactcgttccagcaccgtgggggctgacacccatctcactgctggataaaagagaatgagatcctctctccatcctacgttggatttgcttgctcacacaaactgacccttagggacagaattgttcaactacaattagatttagttaactaatcctggaagcgaagcttagcatatcagacagggttctggcaggagactcactgccctcagaaagttcaccctcacaggctgcaacgcagtgactgtctacagcgatggggatgtggcaggggctaaggaagccaacaagagattgtcaccttcttagaggagaaagccaagatggggagatattaacccctatgcgtgaaaacatgaggggaggaaggaatgtttagcccagtgagactcagaggcacgagtcagcacctattacagacgtggtgcagaaacatggaggacatggagaagaaatatcctgaccttgttccactttcaccctccaattccctgacagtggttcccattgactgagcccagctcgcagtcacaggcagggagcaggggtcaatctcctggtgcacaggcaggctgaggagggaatgaatgtaggaaagggctggggagagaaaataagtagcatgccttacttaagagcctcaggatctttatctgtaaaattggatgataacatctacttaatagtgcag

SEQ ID NO: 401332 - DNA, 590 bp, Homo sapiens
aaactgtttgcaaagtacatgtctgataaagggcttgtatcaagaatatgtaaagaactctcaaatgtgataaataagaaataaacaacccaatcgaaacattagcaaaagatttgaacagacacctcaccaaagaagtcatttggatgacaaatactcccatgaaaagttgctcaacatcattagtcattagggagacatgaattaaaaccatagcgagaaagcactacacacccattagaatgtttgaattagaaagactgaccataccaagtgttggtgaggatgtggagcaactggaaggaattctcatacacttctggtgggaatataaattggtataactttggaaaacagttagatggtttctttctttctcttttcttttcttttttgtagagacagggtgtcagtatgttgcccaggctggtctcaaacttctggcctcaaacgatcctcccatcttggcctctcaaagtgttggaattacaggcatgagcaactgcaccctgccaggatggcttcttaataagttaaacgtatacttttatacgttttgaagagaaacaaaatgtgtgtccataccgaga

SEQ ID NO: 401333 - DNA, 324 bp, Homo sapiens
ccagacagtctctcgctccaaaggggctggccacaagcaccatgaagacagcagtacccactgactcagcaatttcaccagctggaagtcatcccaaggagatatcacagaaagaaaaggccatcttgcgtaaagatgatcactgtgtcattactcaaaatagccccaaactgggaaacacccagctatccagcaataggggtagtgaattacagaacatcaactagatggaatattatgcacccactaaaattagactacgtgaaaacacagaaacaacatcagtaataaaatgttaataaaacagaagcagctcagtacaca

SEQ ID NO: 401334 - DNA, 538 bp, Homo sapiens
cgcgcgccagcaggtgggcgcgttctcccgcgcgcgtgcgcgcgtcgaagccctatacatcacgttccccgagagcagcgtcccctccccgccgggagcgcgcgcctcccatcctcgcgccgggtcctgctcggtctctcagagccgcacactccgcggagctcctgccacagccgtcgccttcgcggcggctctccagccccgcgcctcagcctcggcgccgcatcaccgcgtcccaggcctccttccctccctctgccactccccctccctttcccgctcttcttgcccacccggccggcagagagagcctggatacgaagcaggcgggcttcagagtgggttggaaaaatggaggtgccgcgcctggatcatgccctcaacagccccaccagcccctgtgaggaggtgatcaaaaacctcagcctggaggccattcagctgtgcgaccgggacggtaagagcggccgggaccgcgaggaaagggacagagttcgcgccgaggcgccggggccactctggctccgccgacgccgct

SEQ ID NO: 401335 - DNA, 2038 bp, Homo sapiens
cgcgcgccagcaggtgggcgcgttctcccgcgcgcgtgcgcgcgtcgaagccctatacatcacgttccccgagagcagcgtcccctccccgccgggagcgcgcgcctcccatcctcgcgccgggtcctgctcggtctctcagagccgcacactccgcggagctcctgccacagccgtcgccttcgcggcggctctccagccccgcgcctcagcctcggcgccgcatcaccgcgtcccaggcctccttccctccctctgccactccccctccctttcccgctcttcttgcccacccggccggcagagagagcctggatacgaagcaggcgggcttcagagtgggttggaaaaatggaggtgccgcgcctggatcatgccctcaacagccccaccagcccctgtgaggaggtgatcaaaaacctcagcctggaggccattcagctgtgcgaccgggacgggaacaaatcacaagacagtggcatagcagagatggaagaacttcctgtaccacataacatcaaaataagcaatataacgtgtgactcattcaagatttcatgggaaatggattcaaaatcaaaggatcgcattacacactattttattgacctcaacaagaaagagaacaagaactccaataaatttaaacacaaggatgttcccacaaaattggtggcaaaagctgttcccttgcctatgactgtccgtggacactggtttttaagcccaagaactgaatatacagtagcagtgcagactgcctcaaaacaagttgatggtgattatgttgtgtctgaatggagtgaaattatagaattctgcaccgcagactattcaaaagttcatctaacacaattgttggagaaggctgaagtgattgcaggacgcatgcttaagttttctgttttttatcgtaatcagcacaaagaatattttgactatgttcgagaacatcatgggaatgctatgcagccatctgtcaaggataacagtggtagccatggctctcctatcagtggaaaattagaaggcatcttcttcagctgcagcactgaattcaatactggaaagccaccccaggattcaccttatggaagatacaggtttgagattgccgcagaaaaactttttaaccccaatactaacttatactttggggacttctactgtatgtacactgcttatcattatgtgattcttgttattgctcctgtgggatcaccaggagatgaattttgtaagcagcgccttcctcaactaaattctaaggataataaatttttgacctgtacagaagaagatggggtgctggtttaccaccatgcccaggatgtcattttagaagtcatttacactgaccctgtggatctttctctgggcaccgtggcagaaatcactggtcatcagctcatgagtttgtctactgcaaatgcaaagaaagatcccagctgcaaaacctgtaatatcagtgttggacgttaatgcccacttttcttattcttactcagccccttttcctcccttaggagcattggtcctctgttgtccatttttatcaccagatgttttccactgaagcatgcacatgccactgtcaccaaaacaaacaactaccactttccaaatttcattcagaaccattttagtgttttcctattccctacccctcccactactttcaatgatgaaataccctaagttaagttctccttttgacactttattgcctagatgctgcaatgtttttatgtttcctttatgccaaacataacaaaacagttatatagactgctttagcaaagtacacaataatggcttataaatggtgtttaaatatgcattcattttaatctactgaacaaatattgggataactccaaaccgcatgaaagggtgtaattgcagcatgagttaaatcttgaagcctagaattgtcagcacttccaacttcttgtttgacagtgttatttatgttatttatattagctaacaggaaacaactactgtgtttcaacataataaatataatagaaaaata

SEQ ID NO: 401336 - DNA, 2514 bp, Homo sapiens
cgcgcgccagcaggtgggcgcgttctcccgcgcgcgtgcgcgcgtcgaagccctatacatcacgttccccgagagcagcgtcccctccccgccgggagcgcgcgcctcccatcctcgcgccgggtcctgctcggtctctcagagccgcacactccgcggagctcctgccacagccgtcgccttcgcggcggctctccagccccgcgcctcagcctcggcgccgcatcaccgcgtcccaggcctccttccctccctctgccactccccctccctttcccgctcttcttgcccacccggccggcagagagagcctggatacgaagcaggcgggcttcagagtgggttggaaaaatggaggtgccgcgcctggatcatgccctcaacagccccaccagcccctgtgaggaggtgatcaaaaacctcagcctggaggccattcagctgtgcgaccgggacgggaacaaatcacaagacagtggcatagcagagatggaagaacttcctgtaccacataacatcaaaataagcaatataacgtgtgactcattcaagatttcatgggaaatggattcaaaatcaaaggatcgcattacacactattttattgacctcaacaagaaagagaacaagaactccaataaatttaaacacaaggatgttcccacaaaattggtggcaaaagctgttcccttgcctatgactgtccgtggacactggtttttaagcccaagaactgaatatacagtagcagtgcagactgcctcaaaacaagttgatggtgattatgttgtgtctgaatggagtgaaattatagaattctgcaccgcagactattcaaaagttcatctaacacaattgttggagaaggctgaagtgattgcaggacgcatgcttaagttttctgttttttatcgtaatcagcacaaagaatattttgactatgttcgagaacatcatgggaatgctatgcagccatctgtcaaggataacagtggtagccatggctctcctatcagtggaaaattagaaggcatcttcttcagctgcagcactgaattcaatactggaaagccaccccaggattcaccttatggaagatacaggtttgagattgccgcagaaaaactttttaaccccaatactaacttatactttggggacttctactgtatgtacactgcttatcattatgtgattcttgttattgctcctgtgggatcaccaggagatgaattttgtaagcagcgccttcctcaactaaattctaaggataataaatttttgacctgtacagaagaagatggggtgctggtttaccaccatgcccaggatgtcattttagaagtcatttacactgaccctgtggatctttctctgggcaccgtggcagaaatcactggtcatcagctcatgagtttgtctactgcaaatgcaaagaaagatcccagctgcaaaacctgtaatatcagtgttggacgttaatgcccacttttcttattcttactcagccccttttcctcccttaggagcattggtcctctgttgtccatttttatcaccagatgttttccactgaagcatgcacatgccactgtcaccaaaacaaacaactaccactttccaaatttcattcagaaccattttagtgttttcctattccctacccctcccactactttcaatgatgaaataccctaagttaagttctccttttgacactttattgcctagatgctgcaatgtttttatgtttcctttatgccaaacataacaaaacagttatatagactgctttagcaaagtacacaataatggcttataaatggtgtttaaatatgcattcattttaatctactgaacaaatattgggataactccaaaccgcatgaaagggtgtaattgcagcatgagttaaatcttgaagcctagaattgtcagcacttccaacttcttgtttgacagtgttatttatgttatttatattagctaacaggaaacaactactgtgtttcaacataataaatataatagaaaaataaaaaaaaagaaaaaaaagacaacaatgagaatcaaatcgggaagcccaataaacacgaccaccaaaaagcacacgccaaacatgacaacgaaaagtcgaaaaacacgtacaaaacatgcaccaaccaaggaacacaaagacaccgacacacaaagctaaccacgcgcgaaaaaaaacatattcgatctagcatgaaaaaagccacacaacaaggagcactacctgctctgaaaatgtagtggttatcttaataatattatgtgtctgtagtcgaactacctccatgaattaacacatactcacagttgtgcctgtaaacacacagacctcttcaaatacgccatattcctcagagcgtaagagattgtattatactgatggtgtgtagctcctacattacacatcccatagctgctctactattgattaataaaaccagactacgaaagtaatcatatactagttttgatctcatg

SEQ ID NO: 401337 - DNA, 2129 bp, Homo sapiens
cgcgcgccagcaggtgggcgcgttctcccgcgcgcgtgcgcgcgtcgaagccctatacatcacgttccccgagagcagcgtcccctccccgccgggagcgcgcgcctcccatcctcgcgccgggtcctgctcggtctctcagagccgcacactccgcggagctcctgccacagccgtcgccttcgcggcggctctccagccccgcgcctcagcctcggcgccgcatcaccgcgtcccaggcctccttccctccctctgccactccccctccctttcccgctcttcttgcccacccggccggcagagagagcctggatacgaagcaggcgggcttcagagtgggttggaaaaatggaggtgccgcgcctggatcatgccctcaacagccccaccagcccctgtgaggaggtgatcaaaaacctcagcctggaggccattcagctgtgcgaccgggacgttgtttttgaagaacttacatccaaacagacaagaaaaggataaaagcaccattggttcatggcaagttattacattttaagtgattaactggaacaaatcacaagacagtggcatagcagagatggaagaacttcctgtaccacataacatcaaaataagcaatataacgtgtgactcattcaagatttcatgggaaatggattcaaaatcaaaggatcgcattacacactattttattgacctcaacaagaaagagaacaagaactccaataaatttaaacacaaggatgttcccacaaaattggtggcaaaagctgttcccttgcctatgactgtccgtggacactggtttttaagcccaagaactgaatatacagtagcagtgcagactgcctcaaaacaagttgatggtgattatgttgtgtctgaatggagtgaaattatagaattctgcaccgcagactattcaaaagttcatctaacacaattgttggagaaggctgaagtgattgcaggacgcatgcttaagttttctgttttttatcgtaatcagcacaaagaatattttgactatgttcgagaacatcatgggaatgctatgcagccatctgtcaaggataacagtggtagccatggctctcctatcagtggaaaattagaaggcatcttcttcagctgcagcactgaattcaatactggaaagccaccccaggattcaccttatggaagatacaggtttgagattgccgcagaaaaactttttaaccccaatactaacttatactttggggacttctactgtatgtacactgcttatcattatgtgattcttgttattgctcctgtgggatcaccaggagatgaattttgtaagcagcgccttcctcaactaaattctaaggataataaatttttgacctgtacagaagaagatggggtgctggtttaccaccatgcccaggatgtcattttagaagtcatttacactgaccctgtggatctttctctgggcaccgtggcagaaatcactggtcatcagctcatgagtttgtctactgcaaatgcaaagaaagatcccagctgcaaaacctgtaatatcagtgttggacgttaatgcccacttttcttattcttactcagccccttttcctcccttaggagcattggtcctctgttgtccatttttatcaccagatgttttccactgaagcatgcacatgccactgtcaccaaaacaaacaactaccactttccaaatttcattcagaaccattttagtgttttcctattccctacccctcccactactttcaatgatgaaataccctaagttaagttctccttttgacactttattgcctagatgctgcaatgtttttatgtttcctttatgccaaacataacaaaacagttatatagactgctttagcaaagtacacaataatggcttataaatggtgtttaaatatgcattcattttaatctactgaacaaatattgggataactccaaaccgcatgaaagggtgtaattgcagcatgagttaaatcttgaagcctagaattgtcagcacttccaacttcttgtttgacagtgttatttatgttatttatattagctaacaggaaacaactactgtgtttcaacataataaatataatagaaaaata

SEQ ID NO: 401338 - DNA, 1012 bp, Homo sapiens
cgcgcgccagcaggtgggcgcgttctcccgcgcgcgtgcgcgcgtcgaagccctatacatcacgttccccgagagcagcgtcccctccccgccgggagcgcgcgcctcccatcctcgcgccgggtcctgctcggtctctcagagccgcacactccgcggagctcctgccacagccgtcgccttcgcggcggctctccagccccgcgcctcagcctcggcgccgcatcaccgcgtcccaggcctccttccctccctctgccactccccctccctttcccgctcttcttgcccacccggccggcagagagagcctggatacgaagcaggcgggcttcagagtgggttggaaaaatggaggtgccgcgcctggatcatgccctcaacagccccaccagcccctgtgaggaggtgatcaaaaacctcagcctggaggccattcagctgtgcgaccgggacgggaacaaatcacaagacagtggcatagcagagatggaagaacttcctgtaccacataacatcaaaataagcaatataacgtgtgactcattcaagatttcatgggaaatggattcaaaatcaaaggatcgcattacacactattttattgacctcaacaagaaagagaacaagaactccaataaatttaaacacaaggatgttcccacaaaattggtggcaaaagctgttcccttgcctatgactgtccgtggacactggtttttaagcccaagaactgaatatacagtagcagtgcagactgcctcaaaacaagttgatggtgattatgttgtgtctgaatggagtgaaattatagaattctgcaccgcagactattcaaaagttcatctaacacaattgttggagaaggctgaagtgattgcaggacgcatgcttaagttttctgttttttatcgtaatcagcacaaagaatattttgactatgttcggtaagattcaaaaatatatagtgatttgttttactaaatatagtttcaaattctaggctcaggtt

SEQ ID NO: 401339 - DNA, 1120 bp, Homo sapiens
cgcgcgccagcaggtgggcgcgttctcccgcgcgcgtgcgcgcgtcgaagccctatacatcacgttccccgagagcagcgtcccctccccgccgggagcgcgcgcctcccatcctcgcgccgggtcctgctcggtctctcagagccgcacactccgcggagctcctgccacagccgtcgccttcgcggcggctctccagccccgcgcctcagcctcggcgccgcatcaccgcgtcccaggcctccttccctccctctgccactccccctccctttcccgctcttcttgcccacccggccggcagagagagcctggatacgaagcaggcgggcttcagagtgggttggaaaaatggaggtgccgcgcctggatcatgccctcaacagccccaccagcccctgtgaggaggtgatcaaaaacctcagcctggaggccattcagctgtgcgaccgggacgggaacaaatcacaagacagtggcatagcagagatggaagaacttcctgtaccacataacatcaaaataagcaatataacgtgtgactcattcaagatttcatgggaaatggattcaaaatcaaaggatcgcattacacactattttattgacctcaacaagaaagagaacaagaactccaataaatttaaacacaaggatgttcccacaaaattggtggcaaaagctgttcccttgcctatgactgtccgtggacactggtttttaagcccaagaactgaatatacagtagcagtgcagactgcctcaaaacaagttgatggtgattatgttgtgtctgaatggagtgaaattatagaattctgcaccgcaggtaagagaactaggtacaaatatagaaaagctttagttgttctgggaaagctaattatagaaaaatatttcttttttgtaattataaagtgatatatgtgacattggtcattttttgcgttgtcagtagcattgtgtaacagaataaacaatgttgtattgattggaggaagctgaagttctcagtagaaaaatctgagtaatggcttcaaatcatttttttctatatccatagtttgatttcttcaagatgaaagctatgcaaataaaaaggtatgcagtttgaaaatat

SEQ ID NO: 401340 - DNA, 2221 bp, Homo sapiens
cgcgcgccagcaggtgggcgcgttctcccgcgcgcgtgcgcgcgtcgaagccctatacatcacgttccccgagagcagcgtcccctccccgccgggagcgcgcgcctcccatcctcgcgccgggtcctgctcggtctctcagagccgcacactccgcggagctcctgccacagccgtcgccttcgcggcggctctccagccccgcgcctcagcctcggcgccgcatcaccgcgtcccaggcctccttccctccctctgccactccccctccctttcccgctcttcttgcccacccggccggcagagagagcctggatacgaagcaggcgggcttcagagtgggttggaaaaatggaggtgccgcgcctggatcatgccctcaacagccccaccagcccctgtgaggaggtgatcaaaaacctcagcctggaggccattcagctgtgcgaccgggacgggaacaaatcacaagacagtggcatagcagagatggaagaacttcctgtaccacataacatcaaaataagcaatataacgtgtgactcattcaagatttcatgggaaatggattcaaaatcaaaggatcgcattacacactattttattgacctcaacaagaaagagaacaagaactccaataaatttaaacacaaggatgttcccacaaaattggtggcaaaagctgttcccttgcctatgactgtccgtggacactggtttttaagcccaagaactgaatatacagtagcagtgcagactgcctcaaaacaagttgatggtgattatgttgtgtctgaatggagtgaaattatagaattctgcaccgcagactattcaaaagttcatctaacacaattgttggagaaggctgaagtgattgcaggacgcatgcttaagttttctgttttttatcgtaatcagcacaaagaatattttgactatgttcgagaacatcatgggaatgctatgcagccatctgtcaaggataacagtggtagccatggctctcctatcagtggaaaattagaaggcatcttcttcagctgcagcactgaattcaatactggaaagccaccccaggattcaccttatggaagatacaggtttgagattgccgcagaaaaactttttaaccccaatactaacttatactttggggacttctactgtatgtacactgcttatcattatgtgattcttgttattgctcctgtgggatcaccaggagatgaattttgtaagcagcgccttcctcaactaaattctaaggataataaatttttgacctgtacagaagaagatggggtgctggtttaccaccatgcccaggatgtcattttagaagtcatttacactgaccctgtggatctttctctgggcaccgtggcagaaatcactggtcatcagctcatgagtttgtctactgcaaatgcaaagaaagatcccagctgcaaaacctgtaatatcagtgttggacgttaatgcccacttttcttattcttactcagccccttttcctcccttaggagcattggtcctctgttgtccatttttatcaccagatgttttccactgaagcatgcacatgccactgtcaccaaaacaaacaactaccactttccaaatttcattcagaaccattttagtgttttcctattccctacccctcccactactttcaatgatgaaataccctaagttaagttctccttttgacactttattgcctagatgctgcaatgtttttatgtttcctttatgccaaacataacaaaacagttatatagactgctttagcaaagtacacaataatggcttataaatggtgtttaaatatgcattcattttaatctactgaacaaatattgggataactccaaaccgcatgaaagggtgtaattgcagcatgagttaaatcttgaagcctagaattgtcagcacttccaacttcttgtttgacagtgttatttatgttatttatattagctaacaggaaacaactactgtgtttcaacataataaatataatagaaaaatattttatttgtattgttgtataaaatatttacaatcatatagaatatatagagttacattttaatagcaactgtgtacatgtcacgaaaccatttcccttatcaaagatgtaatttgtaaacctcaaatagttgtgtatctgtcctgttagaagtagatgacttcaattaaacaaatttatgaa

SEQ ID NO: 401341 - DNA, 2861 bp, Homo sapiens
cgcgcgccagcaggtgggcgcgttctcccgcgcgcgtgcgcgcgtcgaagccctatacatcacgttccccgagagcagcgtcccctccccgccgggagcgcgcgcctcccatcctcgcgccgggtcctgctcggtctctcagagccgcacactccgcggagctcctgccacagccgtcgccttcgcggcggctctccagccccgcgcctcagcctcggcgccgcatcaccgcgtcccaggcctccttccctccctctgccactccccctccctttcccgctcttcttgcccacccggccggcagagagagcctggatacgaagcaggcgggcttcagagtgggttggaaaaatggaggtgccgcgcctggatcatgccctcaacagccccaccagcccctgtgaggaggtgatcaaaaacctcagcctggaggccattcagctgtgcgaccgggacgggaacaaatcacaagacagtggcatagcagagatggaagaacttcctgtaccacataacatcaaaataagcaatataacgtgtgactcattcaagatttcatgggaaatggattcaaaatcaaaggatcgcattacacactattttattgacctcaacaagaaagagaacaagaactccaataaatttaaacacaaggatgttcccacaaaattggtggcaaaagctgttcccttgcctatgactgtccgtggacactggtttttaagcccaagaactgaatatacagtagcagtgcagactgcctcaaaacaagttgatggtgattatgttgtgtctgaatggagtgaaattatagaattctgcaccgcagactattcaaaagttcatctaacacaattgttggagaaggctgaagtgattgcaggacgcatgcttaagttttctgttttttatcgtaatcagcacaaagaatattttgactatgttcgagaacatcatgggaatgctatgcagccatctgtcaaggataacagtggtagccatggctctcctatcagtggaaaattagaaggcatcttcttcagctgcagcactgaattcaatactggaaagccaccccaggattcaccttatggaagatacaggtttgagattgccgcagaaaaactttttaaccccaatactaacttatactttggggacttctactgtatgtacactgcttatcattatgtgattcttgttattgctcctgtgggatcaccaggagatgaattttgtaagcagcgccttcctcaactaaattctaaggataataaatttttgacctgtacagaagaagatggggtgctggtttaccaccatgcccaggatgtcattttagaagtcatttacactgaccctgtggatctttctctgggcaccgtggcagaaatcactggtcatcagctcatgagtttgtctactgcaaatgcaaagaaagatcccagctgcaaaacctgtaatatcagtgttggacgttaatgcccacttttcttattcttactcagccccttttcctcccttaggagcattggtcctctgttgtccatttttatcaccagatgttttccactgaagcatgcacatgccactgtcaccaaaacaaacaactaccactttccaaatttcattcagaaccattttagtgttttcctattccctacccctcccactactttcaatgatgaaataccctaagttaagttctccttttgacactttattgcctagatgctgcaatgtttttatgtttcctttatgccaaacataacaaaacagttatatagactgctttagcaaagtacacaataatggcttataaatggtgtttaaatatgcattcattttaatctactgaacaaatattgggataactccaaaccgcatgaaagggtgtaattgcagcatgagttaaatcttgaagcctagaattgtcagcacttccaacttcttgtttgacagtgttatttatgttatttatattagctaacaggaaacaactactgtgtttcaacataataaatataatagaaaaatattttatttgtattgttgtataaaatatttacaatcatatagaatatatagagttacattttaatagcaactgtgtacatgtcacgaaaccatttcccttatcaaagatgtaatttgtaaacctcaaatagttgtgtatctgtcctgttagaagtagatgacttcaattaaacaaatttatgaaggacattattctgattcataaaagttataaaatattaggtaaatacagagaaaacaataagcctctgaaataagtctgtttctgaaatagtcaatagtcttcccatccaaactataagagaatgtgaatttcttcaacatcatacttaaacattacagaaaatagaaatacaaacaaggttggtacatgagagaaaatgttgaccttttacttccttttacaaaaatgaaaataataaacatgttttcgtataaaataacacaaaatgatatacactgaagttgatgaagcaaataaatattctggcttctttttcaaggtatcagggcaaacaatttccaaacttttcattttgtacagaaggatgaataactacagctcatgggaaatgttttgactttacaaagtatagatgttggaacattaagaaaaatgtatattcccaatgaaaaaatagttatatcatcttatagtaaaccaaaagattagcaataatactatggacacattagattatatactacagacacatatctatccaaaatacctattttaaatttttaatacaatattttattttaatataaacatctgtcagttatagacaaagataataattcacaaagtacatgctatcaga

SEQ ID NO: 401342 - DNA, 1948 bp, Homo sapiens
tgccccgacgaggcgtttccgatctttgccgcagtccggatttcctgggtctctgggcactgaaggggaaatgccctcgggatgtttctagcaacccccttcccccaacacacacacactagttggcattctcttccagaaacttatcattttcttttttaaacctcccatcctcagactccccaaattaacaagtctttttagcctcttggattgggattaggatgacagtttttcagtgagggcgcagaaaaacagtgcatttcagcaccaaggacagacacaatcttcatggttcctgggctctgagtcagactgtcgaaaatattggcctaatatatgtgctgtgattcagactttgtggcgaggaacaaatcacaagacagtggcatagcagagatggaagaacttcctgtaccacataacatcaaaataagcaatataacgtgtgactcattcaagatttcatgggaaatggattcaaaatcaaaggatcgcattacacactattttattgacctcaacaagaaagagaacaagaactccaataaatttaaacacaaggatgttcccacaaaattggtggcaaaagctgttcccttgcctatgactgtccgtggacactggtttttaagcccaagaactgaatatacagtagcagtgcagactgcctcaaaacaagttgatggtgattatgttgtgtctgaatggagtgaaattatagaattctgcaccgcagactattcaaaagttcatctaacacaattgttggagaaggctgaagtgattgcaggacgcatgcttaagttttctgttttttatcgtaatcagcacaaagaatattttgactatgttcgagaacatcatgggaatgctatgcagccatctgtcaaggataacagtggtagccatggctctcctatcagtggaaaattagaaggcatcttcttcagctgcagcactgaattcaatactggaaagccaccccaggattcaccttatggaagatacaggtttgagattgccgcagaaaaactttttaaccccaatactaacttatactttggggacttctactgtatgtacactgcttatcattatgtgattcttgttattgctcctgtgggatcaccaggagatgaattttgtaagcagcgccttcctcaactaaattctaaggataataaatttttgacctgtacagaagaagatggggtgctggtttaccaccatgcccaggatgtcattttagaagtcatttacactgaccctgtggatctttctctgggcaccgtggcagaaatcactggtcatcagctcatgagtttgtctactgcaaatgcaaagaaagatcccagctgcaaaacctgtaatatcagtgttggacgttaatgcccacttttcttattcttactcagccccttttcctcccttaggagcattggtcctctgttgtccatttttatcaccagatgttttccactgaagcatgcacatgccactgtcaccaaaacaaacaactaccactttccaaatttcattcagaaccattttagtgttttcctattccctacccctcccactactttcaatgatgaaataccctaagttaagttctccttttgacactttattgcctagatgctgcaatgtttttatgtttcctttatgccaaacataacaaaacagttatatagactgctttagcaaagtacacaataatggcttataaatggtgtttaaatatgcattcattttaatctactgaacaaatattgggataactccaaaccgcatgaaagggtgtaattgcagcatgagttaaatcttgaagcctagaattgtcagcacttccaacttcttgtttgacagtgttatttatgttatttatattagctaacaggaaacaactactgtgtttcaacataataaatataatagaaaaata

SEQ ID NO: 401343 - DNA, 1220 bp, Homo sapiens
ttattctgatagtaagagaggtattcaggcctttaacagtagatgtttgacttttaggccattcaaatatataaatcagtgggtttaccactattgtattaagcagtgaccacttgttttctcttgcagagaacatcatgggaatgctatgcagccatctgtcaaggataacagtggtagccatggctctcctatcagtggaaaattagaaggcatcttcttcagctgcagcactgaattcaatactggaaagccaccccaggattcaccttatggaagatacaggtttgagattgccgcagaaaaactttttaaccccaatactaacttatactttggggacttctactgtatgtacactgcttatcattatgtgattcttgttattgctcctgtgggatcaccaggagatgaattttgtaagcagcgccttcctcaactaaattctaaggataataaatttttgacctgtacagaagaagatggggtgctggtttaccaccatgcccaggatgtcattttagaagtcatttacactgaccctgtggatctttctctgggcaccgtggcagaaatcactggtcatcagctcatgagtttgtctactgcaaatgcaaagaaagatcccagctgcaaaacctgtaatatcagtgttggacgttaatgcccacttttcttattcttactcagccccttttcctcccttaggagcattggtcctctgttgtccatttttatcaccagatgttttccactgaagcatgcacatgccactgtcaccaaaacaaacaactaccactttccaaatttcattcagaaccattttagtgttttcctattccctacccctcccactactttcaatgatgaaataccctaagttaagttctccttttgacactttattgcctagatgctgcaatgtttttatgtttcctttatgccaaacataacaaaacagttatatagactgctttagcaaagtacacaataatggcttataaatggtgtttaaatatgcattcattttaatctactgaacaaatattgggataactccaaaccgcatgaaagggtgtaattgcagcatgagttaaatcttgaagcctagaattgtcagcacttccaacttcttgtttgacagtgttatttatgttatttatattagctaacaggaaacaactactgtgtttcaacataataaatataatagaaaaata

SEQ ID NO: 401344 - DNA, 1104 bp, Homo sapiens
gccacatgtggcccacagaccgtgggttggacaggcttgttctaaatgtttagtttttttcccccaattcaccagcagttaccttcatgccaagtgggcagcagacacaagacaatcacttggcaaaatctattctttcaatactaacattatttacaaaggaaaaggaagaagcttgaaagaacacagaaagccaaaagacctaattgaacgtctgttaagaaccagctccttcctccaactgtgccagaaagtaactaagcttttggctggtccagcaagacagggcagtcaggctgacaatggtgctcttgctgaactttcagccagagtgcgattctgaactcccgggtgaacggtacaaggaaatcctgactgcaggctgggtcaacccgcccaatgccatcggacaaagaataaaacattactaccagggttccaaatgtgagccatctgactacgtcttgcacactgaaacctcagactagccaattctgcactccaatctccttcaaaagagagccgggagagactgctgcgagggacaggcacagaagaaagaccctgtgagaacacagtgagaaggtggccatctgcaaagaggcctgccaggagggaggcctcagaagaaagcaaacctgcagacatcttgatcttgaacttctagcctccagaactgtgagaaaataaagttctgtttaaggaaaaaaaaaaaagagagagagtgtgtgttgaatattctttcagttctatcttaaaatcaattacactggaaaaaggcaaaacgaagcaaataaatgacttctttcccttttcctgaattcctgacctccactcttctgacttcccaaccccacctctccagacagaaggaggactgatttgggtaagcctaagagccacagccgaagcacttactgtgactgtcagtcccaaagaatgcaatattcatcatcactgtcacacggaatgtgagaaagagaaaagtgatcccaggttacagtaacaaacctacagccaaagttaatttcagcgttacagagctaaggcaaacagaaaacgttacgggtgtattcaatattaaaacatatttcaccatcaacg

SEQ ID NO: 401345 - DNA, 854 bp, Homo sapiens
gccactatgcccagccaactagctccctttctcctgcagaaataagaaaaagtctctctctctcatagggccatcagtaaataaagccaaaagttgtgccactgaagagcgatacaaaggaacagagcgcgaacggcttctaaatttctagccctctcgcagggcatcctgactgaactgtgtctaagggtcggtcggtttaccactggacgggtgctgcatcggcaaggccaagttgaacaccggatggtgccaaccatcggttgtttggcagcagctttgaacgtagcgcctgtgaactcaggaatgcacagttgacttgggaagcagtattactagatctggaggcaaccacaggacactaaacttctcccagcctcttcaggaaagaaacctcattctttggcaagcaggaggtgacactagatggctgtgaatgtgatccgctcactgacactctgtaaaggccaatcaatgcactgtctgtctctccttttaggagtaagccatcccacaagttctataccatatttttagtgacagttgaggttgtagatacactttataacattttatagtttaaagagctttattaatgcaataaattaactttgtacacatttttatataaaaaaacagcaagtgatttcagaatgttgtaggcctcattagagcttggtctccaaaaatctgtttgaaaaaagcaacatgttcttcacagtgttcccctagaaaggaagagatttaattgccagttagatgtggcatgaaatgagggacaaagaaagcatctcgtaggtgtgtctactgggttttaacttatttttctttaataaaatacattgttttcctaa

SEQ ID NO: 401346 - DNA, 4663 bp, Homo sapiens
tttgctcctgctcctccgctcctcctgcgcggggtgctgaaacagcccggggaagtagagccgcctccggggagcccaaccagccgaacgccgccggcgtcagcagccttgcgcggccacagcatgaccgctcgcggcctggcccttggcctcctcctgctgctactgtgtccagcgcaggtgttttcacagtcctgtgtttggtatggagagtgtggaattgcatatggggacaagaggtacaattgcgaatattctggcccaccaaaaccattgccaaaggatggatatgacttagtgcaggaactctgtccaggattcttctttggcaatgtcagtctctgttgtgatgttcggcagcttcagacactaaaagacaacctgcagctgcctctacagtttctgtccagatgtccatcctgtttttataacctactgaacctgttttgtgagctgacatgtagccctcgacagagtcagtttttgaatgttacagctactgaagattatgttgatcctgttacaaaccagacgaaaacaaatgtgaaagagttacaatactacgtcggacagagttttgccaatgcaatgtacaatgcctgccgggatgtggaggccccctcaagtaatgacaaggccctgggactcctgtgtgggaaggacgctgacgcctgtaatgccaccaactggattgaatacatgttcaataaggacaatggacaggcaccttttaccatcactcctgtgttttcagattttccagtccatgggatggagcccatgaacaatgccaccaaaggctgtgacgagtctgtggatgaggtcacagcaccatgtagctgccaagactgctctattgtctgtggccccaagccccagcccccacctcctcctgctccctggacgatccttggcttggacgccatgtatgtcatcatgtggatcacctacatggcgtttttgcttgtgttttttggagcattttttgcagtgtggtgctacagaaaacggtattttgtctccgagtacactcccatcgatagcaatatagctttttctgttaatgcaagtgacaaaggagaggcgtcctgctgtgaccctgtcagcgcagcatttgagggctgcttgaggcggctgttcacacgctgggggtctttctgcgtccgaaaccctggctgtgtcattttcttctcgctggtcttcattactgcgtgttcgtcaggcctggtgtttgtccgggtcacaaccaatccagttgacctctggtcagcccccagcagccaggctcgcctggaaaaagagtactttgaccagcactttgggcctttcttccggacggagcagctcatcatccgggcccctctcactgacaaacacatttaccagccatacccttcgggagctgatgtaccctttggacctccgcttgacatacagatactgcaccaggttcttgacttacaaatagccatcgaaaacattactgcctcttatgacaatgagactgtgacacttcaagacatctgcttggcccctctttcaccgtataacacgaactgcaccattttgagtgtgttaaattacttccagaacagccattccgtgctggaccacaagaaaggggacgacttctttgtgtatgccgattaccacacgcactttctgtactgcgtacgggctcctgcctctctgaatgatacaagtttgctccatgacccttgtctgggtacgtttggtggaccagtgttcccgtggcttgtgttgggaggctatgatgatcaaaactacaataacgccactgcccttgtgattaccttccctgtcaataattactataatgatacagagaagctccagagggcccaggcctgggaaaaagagtttattaattttgtgaaaaactacaagaatcccaatctgaccatttccttcactgctgaacgaagtattgaagatgaactaaatcgtgaaagtgacagtgatgtcttcaccgttgtaattagctatgccatcatgtttctatatatttccctagccttggggcacatcaaaagctgtcgcaggcttctggtggattcgaaggtctcactaggcatcgcgggcatcttgatcgtgctgagctcggtggcttgctccttgggtgtcttcagctacattgggttgcccttgaccctcattgtgattgaagtcatcccgttcctggtgctggctgttggagtggacaacatcttcattctggtgcaggcctaccagagagatgaacgtcttcaaggggaaaccctggatcagcagctgggcagggtcctaggagaagtggctcccagtatgttcctgtcatccttttctgagactgtagcatttttcttaggagcattgtccgtgatgccagccgtgcacaccttctctctctttgcgggattggcagtcttcattgactttcttctgcagattacctgtttcgtgagtctcttggggttagacattaaacgtcaagagaaaaatcggctagacatcttttgctgtgtcagaggtgctgaagatggaacaagcgtccaggcctcagagagctgtttgtttcgcttcttcaaaaactcctattctccacttctgctaaaggactggatgagaccaattgtgatagcaatatttgtgggtgttctgtcattcagcatcgcagtcctgaacaaagtagatattggattggatcagtctctttcgatgccagatgactcctacatggtggattatttcaaatccatcagtcagtacctgcatgcgggtccgcctgtgtactttgtcctggaggaagggcacgactacacttcttccaaggggcagaacatggtgtgcggcggcatgggctgcaacaatgattccctggtgcagcagatatttaacgcggcgcagctggacaactatacccgaataggcttcgccccctcgtcctggatcgacgattatttcgactgggtgaagccacagtcgtcttgctgtcgagtggacaatatcactgaccagttctgcaatgcttcagtggttgaccctgcctgcgttcgctgcaggcctctgactccggaaggcaaacagaggcctcaggggggagacttcatgagattcctgcccatgttcctttcggataaccctaaccccaagtgtggcaaagggggacatgctgcctatagttctgcagttaacatcctccttggccatggcaccagggtcggagccacgtacttcatgacctaccacaccgtgctgcagacctctgctgactttattgacgctctgaagaaagcccgacttatagccagtaatgtcaccgaaaccatgggcattaacggcagtgcctaccgagtatttccttacagtgtgttttatgtcttctacgaacagtacctgaccatcattgacgacactatcttcaacctcggtgtgtccctgggcgcgatatttctggtgaccatggtcctcctgggctgtgagctctggtctgcagtcatcatgtgtgccaccatcgccatggtcttggtcaacatgtttggagttatgtggctctggggcatcagtctgaacgctgtatccttggtcaacctggtgatgagctgtggcatctccgtggagttctgcagccacataaccagagcgttcacggtgagcatgaaaggcagccgcgtggagcgcgcggaagaggcacttgcccacatgggcagctccgtgttcagtggaatcacacttacaaaatttggagggattgtggtgttggcttttgccaaatctcaaattttccagatattctacttcaggatgtatttggccatggtcttactgggagccactcacggattaatatttctccctgtcttactcagttacatagggccatcagtaaataaagccaaaagttgtgccactgaagagcgatacaaaggaacagagcgcgaacggcttctaaatttctagccctctcgcagggcatcctgactgaactgtgtctaagggtcggtcggtttaccactggacgggtgctgcatcggcaaggccaagttgaacaccggatggtgccaaccatcggttgtttggcagcagctttgaacgtagcgcctgtgaactcaggaatgcacagttgacttgggaagcagtattactagatctggaggcaaccacaggacactaaacttctcccagcctcttcaggaaagaaacctcattctttggcaagcaggaggtgacactagatggctgtgaatgtgatccgctcactgacactctgtaaaggccaatcaatgcactgtctgtctctccttttaggagtaagccatcccacaagttctataccatatttttagtgacagttgaggttgtagatacactttataacattttatagtttaaagagctttattaatgcaataaattaactttgtacacatttttatataaaaaaacagcaagtgatttcagaatgttgtaggcctcattagagcttggtctccaaaaatctgtttgaaaaaagcaacatgttcttcacagtgttcccctagaaaggaagagatttaattgccagttagatgtggcatgaaatgagggacaaagaaagcatctcgtaggtgtgtctactgggttttaacttatttttctttaataaaatacattgttttcctaa

SEQ ID NO: 401347 - DNA, 5591 bp, Homo sapiens
tttgctcctgctcctccgctcctcctgcgcggggtgctgaaacagcccggggaagtagagccgcctccggggagcccaaccagccgaacgccgccggcgtcagcagccttgcgcggccacagcatgaccgctcgcggcctggcccttggcctcctcctgctgctactgtgtccagcgcaggtgttttcacagtcctgtgtttggtatggagagtgtggaattgcatatggggacaagaggtacaattgcgaatattctggcccaccaaaaccattgccaaaggatggatatgacttagtgcaggaactctgtccaggattcttctttggcaatgtcagtctctgttgtgatgttcggcagcttcagacactaaaagacaacctgcagctgcctctacagtttctgtccagatgtccatcctgtttttataacctactgaacctgttttgtgagctgacatgtagccctcgacagagtcagtttttgaatgttacagctactgaagattatgttgatcctgttacaaaccagacgaaaacaaatgtgaaagagttacaatactacgtcggacagagttttgccaatgcaatgtacaatgcctgccgggatgtggaggccccctcaagtaatgacaaggccctgggactcctgtgtgggaaggacgctgacgcctgtaatgccaccaactggattgaatacatgttcaataaggacaatggacaggcaccttttaccatcactcctgtgttttcagattttccagtccatgggatggagcccatgaacaatgccaccaaaggctgtgacgagtctgtggatgaggtcacagcaccatgtagctgccaagactgctctattgtctgtggccccaagccccagcccccacctcctcctgctccctggacgatccttggcttggacgccatgtatgtcatcatgtggatcacctacatggcgtttttgcttgtgttttttggagcattttttgcagtgtggtgctacagaaaacggtattttgtctccgagtacactcccatcgatagcaatatagctttttctgttaatgcaagtgacaaaggagaggcgtcctgctgtgaccctgtcagcgcagcatttgagggctgcttgaggcggctgttcacacgctgggggtctttctgcgtccgaaaccctggctgtgtcattttcttctcgctggtcttcattactgcgtgttcgtcaggcctggtgtttgtccgggtcacaaccaatccagttgacctctggtcagcccccagcagccaggctcgcctggaaaaagagtactttgaccagcactttgggcctttcttccggacggagcagctcatcatccgggcccctctcactgacaaacacatttaccagccatacccttcgggagctgatgtaccctttggacctccgcttgacatacagatactgcaccaggttcttgacttacaaatagccatcgaaaacattactgcctcttatgacaatgagactgtgacacttcaagacatctgcttggcccctctttcaccgtataacacgaactgcaccattttgagtgtgttaaattacttccagaacagccattccgtgctggaccacaagaaaggggacgacttctttgtgtatgccgattaccacacgcactttctgtactgcgtacgggctcctgcctctctgaatgatacaagtttgctccatgacccttgtctgggtacgtttggtggaccagtgttcccgtggcttgtgttgggaggctatgatgatcaaaactacaataacgccactgcccttgtgattaccttccctgtcaataattactataatgatacagagaagctccagagggcccaggcctgggaaaaagagtttattaattttgtgaaaaactacaagaatcccaatctgaccatttccttcactgctgaacgaagtattgaagatgaactaaatcgtgaaagtgacagtgatgtcttcaccgttgtaattagctatgccatcatgtttctatatatttccctagccttggggcacatcaaaagctgtcgcaggcttctggtggattcgaaggtctcactaggcatcgcgggcatcttgatcgtgctgagctcggtggcttgctccttgggtgtcttcagctacattgggttgcccttgaccctcattgtgattgaagtcatcccgttcctggtgctggctgttggagtggacaacatcttcattctggtgcaggcctaccagagagatgaacgtcttcaaggggaaaccctggatcagcagctgggcagggtcctaggagaagtggctcccagtatgttcctgtcatccttttctgagactgtagcatttttcttaggagcattgtccgtgatgccagccgtgcacaccttctctctctttgcgggattggcagtcttcattgactttcttctgcagattacctgtttcgtgagtctcttggggttagacattaaacgtcaagagaaaaatcggctagacatcttttgctgtgtcagaggtgctgaagatggaacaagcgtccaggcctcagagagctgtttgtttcgcttcttcaaaaactcctattctccacttctgctaaaggactggatgagaccaattgtgatagcaatatttgtgggtgttctgtcattcagcatcgcagtcctgaacaaagtagatattggattggatcagtctctttcgatgccagatgactcctacatggtggattatttcaaatccatcagtcagtacctgcatgcgggtccgcctgtgtactttgtcctggaggaagggcacgactacacttcttccaaggggcagaacatggtgtgcggcggcatgggctgcaacaatgattccctggtgcagcagatatttaacgcggcgcagctggacaactatacccgaataggcttcgccccctcgtcctggatcgacgattatttcgactgggtgaagccacagtcgtcttgctgtcgagtggacaatatcactgaccagttctgcaatgcttcagtggttgaccctgcctgcgttcgctgcaggcctctgactccggaaggcaaacagaggcctcaggggggagacttcatgagattcctgcccatgttcctttcggataaccctaaccccaagtgtggcaaagggggacatgctgcctatagttctgcagttaacatcctccttggccatggcaccagggtcggagccacgtacttcatgacctaccacaccgtgctgcagacctctgctgactttattgacgctctgaagaaagcccgacttatagccagtaatgtcaccgaaaccatgggcattaacggcagtgcctaccgagtatttccttacagtgtgttttatgtcttctacgaacagtacctgaccatcattgacgacactatcttcaacctcggtgtgtccctgggcgcgatatttctggtgaccatggtcctcctgggctgtgagctctggtctgcagtcatcatgtgtgccaccatcgccatggtcttggtcaacatgtttggagttatgtggctctggggcatcagtctgaacgctgtatccttggtcaacctggtgatgagctgtggcatctccgtggagttctgcagccacataaccagagcgttcacggtgagcatgaaaggcagccgcgtggagcgcgcggaagaggcacttgcccacatgggcagctccgtgagtaccctgagcagggccacgccggcagagtcgcaccacaaagtaatcctcctcagtgactgaagagtctggatcctgtacttacaaagcagcttctaaggattgcaagctttcaggcaattcatgaattagctgccacatcgtggacagaacggacgttctgtggaactgtacctgttggtacggctcctttttaggtggcagtgtgctgaagcaggaaaataacagacaagttaaacatgagacagctggcagtctttcccatttaaaatgcaggggagcccgggccagaacccagcgtgtgatgtgcggttggtgcctggagagtcgtcttggttcaactctacaccctggcttagcctatctctttaccactgtagaaaatacctggtaaagagtaaaaactaaaactttgtttcgtaacacttttaaatatttaagttttcacctgagaatataaagaaagataatcaattgggagacacgatgcagtgtctgtgcagaatacacagcttttaacttggtcatacctctcccccaggatcataaggcagcaaatagtgttaggtagtagatgatgctacctgggttcagttcccattgctttgaaccttgaatattaagaaatccccataagggctggccacggtggctcatgcctataaccccagcactttgggaggccaaggctggcggaccacttgcggccaggggttcgagaccatggccaacatggtgaaaccccatctctactaaaaacacaaaaattagccaggcatggtggcgtgcacctgtttaatcccagctactcaggaggctggggcaggagaatcacttgaacctgggagaaatccttgtaaggaagtgtttttgttcaattacaggttggtaaaagtggtttctaacacagtatctcttcttttaggtgttcagtggaatcacacttacaaaatttggagggattgtggtgttggcttttgccaaatctcaaattttccagatattctacttcaggatgtatttggccatggtcttactgggagccactcacggattaatatttctccctgtcttactcagttacatagggccatcagtaaataaagccaaaagttgtgccactgaagagcgatacaaaggaacagagcgcgaacggcttctaaatttctagccctctcgcagggcatcctgactgaactgtgtctaagggtcggtcggtttaccactggacgggtgctgcatcggcaaggccaagttgaacaccggatggtgccaaccatcggttgtttggcagcagctttgaacgtagcgcctgtgaactcaggaatgcacagttgacttgggaagcagtattactagatctggaggcaaccacaggacactaaacttctcccagcctcttcaggaaagaaacctcattctttggcaagcaggaggtgacactagatggctgtgaatgtgatccgctcactgacactctgtaaaggccaatcaatgcactgtctgtctctccttttaggagtaagccatcccacaagttctataccatatttttagtgacagttgaggttgtagatacactttataacattttatagtttaaagagctttattaatgcaataaattaactttgtacacatttttatataaaaaaacagcaagtgatttcagaatgttgtaggcctcattagagcttggtctccaaaaatctgtttgaaaaaagcaacatgttcttcacagtgttcccctagaaaggaagagatttaattgccagttagatgtggcatgaaatgagggacaaagaaagcatctcgtaggtgtgtctactgggttttaacttatttttctttaataaaatacattgttttcctaa

SEQ ID NO: 401348 - DNA, 4604 bp, Homo sapiens
tttgctcctgctcctccgctcctcctgcgcggggtgctgaaacagcccggggaagtagagccgcctccggggagcccaaccagccgaacgccgccggcgtcagcagccttgcgcggccacagcatgaccgctcgcggcctggcccttggcctcctcctgctgctactgtgtccagcgcaggtgttttcacagtcctgtgtttggtatggagagtgtggaattgcatatggggacaagaggtacaattgcgaatattctggcccaccaaaaccattgccaaaggatggatatgacttagtgcaggaactctgtccaggattcttctttggcaatgtcagtctctgttgtgatgttcggcagcttcagacactaaaagacaacctgcagctgcctctacagtttctgtccagatgtccatcctgtttttataacctactgaacctgttttgtgagctgacatgtagccctcgacagagtcagtttttgaatgttacagctactgaagattatgttgatcctgttacaaaccagacgaaaacaaatgtgaaagagttacaatactacgtcggacagagttttgccaatgcaatgtacaatgcctgccgggatgtggaggccccctcaagtaatgacaaggccctgggactcctgtgtgggaaggacgctgacgcctgtaatgccaccaactggattgaatacatgttcaataaggacaatggacaggcaccttttaccatcactcctgtgttttcagattttccagtccatgggatggagcccatgaacaatgccaccaaaggctgtgacgagtctgtggatgaggtcacagcaccatgtagctgccaagactgctctattgtctgtggccccaagccccagcccccacctcctcctgctccctggacgatccttggcttggacgccatgtatgtcatcatgtggatcacctacatggcgtttttgcttgtgttttttggagcattttttgcagtgtggtgctacagaaaacggtattttgtctccgagtacactcccatcgatagcaatatagctttttctgttaatgcaagtgacaaaggagaggcgtcctgctgtgaccctgtcagcgcagcatttgagggctgcttgaggcggctgttcacacgctgggggtctttctgcgtccgaaaccctggctgtgtcattttcttctcgctggtcttcattactgcgtgttcgtcaggcctggtgtttgtccgggtcacaaccaatccagttgacctctggtcagcccccagcagccaggctcgcctggaaaaagagtactttgaccagcactttgggcctttcttccggacggagcagctcatcatccgggcccctctcactgacaaacacatttaccagccatacccttcgggagctgatgtaccctttggacctccgcttgacatacagatactgcaccaggttcttgacttacaaatagccatcgaaaacattactgcctcttatgacaatgagactgtgacacttcaagacatctgcttggcccctctttcaccgtataacacgaactgcaccattttgagtgtgttaaattacttccagaacagccattccgtgctggaccacaagaaaggggacgacttctttgtgtatgccgattaccacacgcactttctgtactgcgtacgggctcctgcctctctgaatgatacaagtttgctccatgacccttgtctgggtacgtttggtggaccagtgttcccgtggcttgtgttgggaggctatgatgatcaaaactacaataacgccactgcccttgtgattaccttccctgtcaataattactataatgatacagagaagctccagagggcccaggcctgggaaaaagagtttattaattttgtgaaaaactacaagaatcccaatctgaccatttccttcactgctgaacgaagtattgaagatgaactaaatcgtgaaagtgacagtgatgtcttcaccgttgtaattagctatgccatcatgtttctatatatttccctagccttggggcacatcaaaagctgtcgcaggcttctggtggattcgaaggtctcactaggcatcgcgggcatcttgatcgtgctgagctcggtggcttgctccttgggtgtcttcagctacattgggttgcccttgaccctcattgtgattgaagtcatcccgttcctggtgctggctgttggagtggacaacatcttcattctggtgcaggcctaccagagagatgaacgtcttcaaggggaaaccctggatcagcagctgggcagggtcctaggagaagtggctcccagtatgttcctgtcatccttttctgagactgtagcatttttcttaggagcattgtccgtgatgccagccgtgcacaccttctctctctttgcgggattggcagtcttcattgactttcttctgcagattacctgtttcgtgagtctcttggggttagacattaaacgtcaagagaaaaatcggctagacatcttttgctgtgtcagaggtgctgaagatggaacaagcgtccaggcctcagagagctgtttgtttcgcttcttcaaaaactcctattctccacttctgctaaaggactggatgagaccaattgtgatagcaatatttgtgggtgttctgtcattcagcatcgcagtcctgaacaaagtagatattggattggatcagtctctttcgatgccagatgactcctacatggtggattatttcaaatccatcagtcagtacctgcatgcgggtccgcctgtgtactttgtcctggaggaagggcacgactacacttcttccaaggggcagaacatggtgtgcggcggcatgggctgcaacaatgattccctggtgcagcagatatttaacgcggcgcagctggacaactatacccgaataggcttcgccccctcgtcctggatcgacgattatttcgactgggtgaagccacagtcgtcttgctgtcgagtggacaatatcactgaccagttctgcaatgcttcagtggttgaccctgcctgcgttcgctgcaggcctctgactccggaaggcaaacagaggcctcaggggggagacttcatgagattcctgcccatgttcctttcggataaccctaaccccaagtgtggcaaagggggacatgctgcctatagttctgcagttaacatcctccttggccatggcaccagggtcggagccacgtacttcatgacctaccacaccgtgctgcagacctctgctgactttattgacgctctgaagaaagcccgacttatagccagtaatgtcaccgaaaccatgggcattaacggcagtgcctaccgagtatttccttacagtgtgttttatgtcttctacgaacagtacctgaccatcattgacgacactatcttcaacctcggtgtgtccctgggcgcgatatttctggtgaccatggtcctcctgggctgtgagctctggtctgcagtcatcatgtgtgccaccatcgccatggtcttggtcaacatgtttggagttatgtggctctggggcatcagtctgaacgctgtatccttggtcaacctggtgatgagctgtggcatctccgtggagttctgcagccacataaccagagcgttcacggtgagcatgaaaggcagccgcgtggagcgcgcggaagaggcacttgcccacatgggcagctccgtgttcagtggaatcacacttacaaaatttggagggattgtggtgttggcttttgccaaatctcaaattttccagatattctacttcaggatgtatttggccatggtcttactgggagccactcacggattaatatttctccctgtcttactcagttacatagcgcgaacggcttctaaatttctagccctctcgcagggcatcctgactgaactgtgtctaagggtcggtcggtttaccactggacgggtgctgcatcggcaaggccaagttgaacaccggatggtgccaaccatcggttgtttggcagcagctttgaacgtagcgcctgtgaactcaggaatgcacagttgacttgggaagcagtattactagatctggaggcaaccacaggacactaaacttctcccagcctcttcaggaaagaaacctcattctttggcaagcaggaggtgacactagatggctgtgaatgtgatccgctcactgacactctgtaaaggccaatcaatgcactgtctgtctctccttttaggagtaagccatcccacaagttctataccatatttttagtgacagttgaggttgtagatacactttataacattttatagtttaaagagctttattaatgcaataaattaactttgtacacatttttatataaaaaaacagcaagtgatttcagaatgttgtaggcctcattagagcttggtctccaaaaatctgtttgaaaaaagcaacatgttcttcacagtgttcccctagaaaggaagagatttaattgccagttagatgtggcatgaaatgagggacaaagaaagcatctcgtaggtgtgtctactgggttttaacttatttttctttaataaaatacattgttttcctaa

SEQ ID NO: 401349 - DNA, 4730 bp, Homo sapiens
tttgctcctgctcctccgctcctcctgcgcggggtgctgaaacagcccggggaagtagagccgcctccggggagcccaaccagccgaacgccgccggcgtcagcagccttgcgcggccacagcatgaccgctcgcggcctggcccttggcctcctcctgctgctactgtgtccagcgcaggtgttttcacagtcctgtgtttggtatggagagtgtggaattgcatatggggacaagaggtacaattgcgaatattctggcccaccaaaaccattgccaaaggatggatatgacttagtgcaggaactctgtccaggattcttctttggcaatgtcagtctctgttgtgatgttcggcagcttcagacactaaaagacaacctgcagctgcctctacagtttctgtccagatgtccatcctgtttttataacctactgaacctgttttgtgagctgacatgtagccctcgacagagtcagtttttgaatgttacagctactgaagattatgttgatcctgttacaaaccagacgaaaacaaatgtgaaagagttacaatactacgtcggacagagttttgccaatgcaatgtacaatgcctgccgggatgtggaggccccctcaagtaatgacaaggccctgggactcctgtgtgggaaggacgctgacgcctgtaatgccaccaactggattgaatacatgttcaataaggacaatggacaggcaccttttaccatcactcctgtgttttcagattttccagtccatgggatggagcccatgaacaatgccaccaaaggctgtgacgagtctgtggatgaggtcacagcaccatgtagctgccaagactgctctattgtctgtggccccaagccccagcccccacctcctcctgctccctggacgatccttggcttggacgccatgtatgtcatcatgtggatcacctacatggcgtttttgcttgtgttttttggagcattttttgcagtgtggtgctacagaaaacggtattttgtctccgagtacactcccatcgatagcaatatagctttttctgttaatgcaagtgacaaaggagaggcgtcctgctgtgaccctgtcagcgcagcatttgagggctgcttgaggcggctgttcacacgctgggggtctttctgcgtccgaaaccctggctgtgtcattttcttctcgctggtcttcattactgcgtgttcgtcaggcctggtgtttgtccgggtcacaaccaatccagttgacctctggtcagcccccagcagccaggctcgcctggaaaaagagtactttgaccagcactttgggcctttcttccggacggagcagctcatcatccgggcccctctcactgacaaacacatttaccagccatacccttcgggagctgatgtaccctttggacctccgcttgacatacagatactgcaccaggttcttgacttacaaatagccatcgaaaacattactgcctcttatgacaatgagactgtgacacttcaagacatctgcttggcccctctttcaccgtataacacgaactgcaccattttgagtgtgttaaattacttccagaacagccattccgtgctggaccacaagaaaggggacgacttctttgtgtatgccgattaccacacgcactttctgtactgcgtacgggctcctgcctctctgaatgatacaagtttgctccatgacccttgtctgggtacgtttggtggaccagtgttcccgtggcttgtgttgggaggctatgatgatcaaaactacaataacgccactgcccttgtgattaccttccctgtcaataattactataatgatacagagaagctccagagggcccaggcctgggaaaaagagtttattaattttgtgaaaaactacaagaatcccaatctgaccatttccttcactgctgaacgaagtattgaagatgaactaaatcgtgaaagtgacagtgatgtcttcaccgttgtaattagctatgccatcatgtttctatatatttccctagccttggggcacatcaaaagctgtcgcaggcttctggtggattcgaaggtctcactaggcatcgcgggcatcttgatcgtgctgagctcggtggcttgctccttgggtgtcttcagctacattgggttgcccttgaccctcattgtgattgaagtcatcccgttcctggtgctggctgttggagtggacaacatcttcattctggtgcaggcctaccagagagatgaacgtcttcaaggggaaaccctggatcagcagctgggcagggtcctaggagaagtggctcccagtatgttcctgtcatccttttctgagactgtagcatttttcttaggagcattgtccgtgatgccagccgtgcacaccttctctctctttgcgggattggcagtcttcattgactttcttctgcagattacctgtttcgtgagtctcttggggttagacattaaacgtcaagagaaaaatcggctagacatcttttgctgtgtcagaggtgctgaagatggaacaagcgtccaggcctcagagagctgtttgtttcgcttcttcaaaaactcctattctccacttctgctaaaggactggatgagaccaattgtgatagcaatatttgtgggtgttctgtcattcagcatcgcagtcctgaacaaagtagatattggattggatcagtctctttcgatgccagatgactcctacatggtggattatttcaaatccatcagtcagtacctgcatgcgggtccgcctgtgtactttgtcctggaggaagggcacgactacacttcttccaaggggcagaacatggtgtgcggcggcatgggctgcaacaatgattccctggtgcagcagatatttaacgcggcgcagctggacaactatacccgaataggcttcgccccctcgtcctggatcgacgattatttcgactgggtgaagccacagtcgtcttgctgtcgagtggacaatatcactgaccagttctgcaatgcttcagtggttgaccctgcctgcgttcgctgcaggcctctgactccggaaggcaaacagaggcctcaggggggagacttcatgagattcctgcccatgttcctttcggataaccctaaccccaagtgtggcaaagggggacatgctgcctatagttctgcagttaacatcctccttggccatggcaccagggtcggagccacgtacttcatgacctaccacaccgtgctgcagacctctgctgactttattgacgctctgaagaaagcccgacttatagccagtaatgtcaccgaaaccatgggcattaacggcagtgcctaccgagtatttccttacagtgtgttttatgtcttctacgaacagtacctgaccatcattgacgacactatcttcaacctcggtgtgtccctgggcgcgatatttctggtgaccatggtcctcctgggctgtgagctctggtctgcagtcatcatgtgtgccaccatcgccatggtcttggtcaacatgtttggagttatgtggctctggggcatcagtctgaacgctgtatccttggtcaacctggtgatgagctgtggcatctccgtggagttctgcagccacataaccagagcgttcacggtgagcatgaaaggcagccgcgtggagcgcgcggaagaggcacttgcccacatgggcagctccgtgttcagtggaatcacacttacaaaatttggagggattgtggtgttggcttttgccaaatctcaaattttccagatattctacttcaggatgtatttggccatggtcttactgggagccactcacggattaatatttctccctgtcttactcagttacatagggccatcagtaaataaagccaaaagttgtgccactgaagagcgatacaaaggaacagagcgcgaacggcttctaaatttctagccctctcgcagggcatcctgactgaactgtgtctaagggtcggtcggtttaccactggacgggtgctgcatcggcaaggccaagttgaacaccggatggtgccaaccatcggttgtttggcagcagctttgaacgtagcgcctgtgaactcaggaatgcacagttgacttgggaagcagtattactagatctggaggcaaccacaggacactaaacttctcccagcctcttcaggaaagaaacctcattctttggcaagcaggaggtgacactagatggctgtgaatgtgatccgctcactgacactctgtaaaggccaatcaatgcactgtctgtctctccttttaggagtaagccatcccacaagttctataccatatttttagtgacagttgaggttgtagatacactttataacattttatagtttaaagagctttattaatgcaataaattaactttgtacacatttttatataaaaaaacagcaagtgatttcagaatgttgtaggcctcattagagcttggtctccaaaaatctgtttgaaaaaagcaacatgttcttcacagtgttcccctagaaaggaagagatttaattgccagttagatgtggcatgaaatgagggacaaagaaagcatctcgtaggtgtgtctactgggttttaacttatttttctttaataaaatacattgttttcctaagttttggggttaccctatctgctttgagagacaaatacaaaagctaaatggaagagattctatctaa

SEQ ID NO: 401350 - DNA, 1006 bp, Homo sapiens
cggacgcgtgggtcgacccacgcgtccggagtgcacttgcccacatgggccagctccgtgttcagtggaatcacacttacaaaatttggagggattgtggtgttggcttttgccaaatctcaaattttccagatattctacttcaggatgtatttggccatggtcttactgggagccactcacggattaatatttctccctgtcttactcagttacatagggccatcagtaaataaagccaaaagttgtgccactgaagagcgatacaaaggaacagagcgcgaacggcttctaaatttctagccctctcgcagggcatcctgactgaactgtgtctaagggtcggtcggtttaccactggacgggtgctgcatcggcaaggccaagttgaacaccggatggtgccaaccatcggttgtttggcagcagctttgaacgtagcgcctgtgaactcaggaatgcacagttgacttgggaagcagtattactagatctggaggcaaccacaggacactaaacttctcccagcctcttcaggaaagaaacctcattctttggcaagcaggaggtgacactagatggctgtgaatgtgatccgctcactgacactctgtaaaggccaatcaatgcactgtctgtctctccttttaggagtaagccatcccacaagttctataccatatttttagtgacagttgaggttgtagatacactttataacattttatagtttaaagagctttattaatgcaataaattaactttgtacacatttttatataaaaaaacagcaagtgatttcagaatgttgtaggcctcattagagcttggtctccaaaaatctgtttgaaaaaagcaacatgttcttcacagtgttcccctagaaaggaagagatttaattgccagttagatgtggcatgaaatgagggacaaagaaagcatctcgtaggtgtgtctactgggttttaacttatttttctttaataaaatacattgttttcctaa

SEQ ID NO: 401351 - DNA, 4339 bp, Homo sapiens
tttgctcctgctcctccgctcctcctgcgcggggtgctgaaacagcccggggaagtagagccgcctccggggagcccaaccagccgaacgccgccggcgtcagcagccttgcgcggccacagcatgaccgctcgcggcctggcccttggcctcctcctgctgctactgtgtccagcgcaggtgttttcacagtcctgtgtttggtatggagagtgtggaattgcatatggggacaagaggtacaattgcgaatattctggcccaccaaaaccattgccaaaggatggatatgacttagtgcaggaactctgtccaggattcttctttggcaatgtcagtctctgttgtgatgttcggcagcttcagacactaaaagacaacctgcagctgcctctacagtttctgtccagatgtccatcctgtttttataacctactgaacctgttttgtgagctgacatgtagccctcgacagagtcagtttttgaatgttacagctactgaagattatgttgatcctgttacaaaccagacgaaaacaaatgtgaaagagttacaatactacgtcggacagagttttgccaatgcaatgtacaatgcctgccgggatgtggaggccccctcaagtaatgacaaggccctgggactcctgtgtgggaaggacgctgacgcctgtaatgccaccaactggattgaatacatgttcaataaggacaatggacaggcaccttttaccatcactcctgtgttttcagattttccagtccatgggatggagcccatgaacaatgccaccaaaggctgtgacgagtctgtggatgaggtcacagcaccatgtagctgccaagactgctctattgtctgtggccccaagccccagcccccacctcctcctgctccctggacgatccttggcttggacgccatgtatgtcatcatgtggatcacctacatggcgtttttgcttgtgttttttggagcattttttgcagtgtggtgctacagaaaacggtattttgtctccgagtacactcccatcgatagcaatatagctttttctgttaatgcaagtgacaaaggagaggcgtcctgctgtgaccctgtcagcgcagcatttgagggctgcttgaggcggctgttcacacgctgggggtctttctgcgtccgaaaccctggctgtgtcattttcttctcgctggtcttcattactgcgtgttcgtcaggcctggtgtttgtccgggtcacaaccaatccagttgacctctggtcagcccccagcagccaggctcgcctggaaaaagagtactttgaccagcactttgggcctttcttccggacggagcagctcatcatccgggcccctctcactgacaaacacatttaccagccatacccttcgggagctgatgtaccctttggacctccgcttgacatacagatactgcaccaggttcttgacttacaaatagccatcgaaaacattactgcctcttatgacaatgagactgtgacacttcaagacatctgcttggcccctctttcaccgtataacacgaactgcaccattttgagtgtgttaaattacttccagaacagccattccgtgctggaccacaagaaaggggacgacttctttgtgtatgccgattaccacacgcactttctgtactgcgtacgggctcctgcctctctgaatgatacaagtttgctccatgacccttgtctgggtacgtttggtggaccagtgttcccgtggcttgtgttgggaggctatgatgatcaaaactacaataacgccactgcccttgtgattaccttccctgtcaataattactataatgatacagagaagctccagagggcccaggcctgggaaaaagagtttattaattttgtgaaaaactacaagaatcccaatctgaccatttccttcactgctgaacgaagtattgaagatgaactaaatcgtgaaagtgacagtgatgtcttcaccgttgtaattagctatgccatcatgtttctatatatttccctagccttggggcacatcaaaagctgtcgcaggcttctggtggattcgaaggtctcactaggcatcgcgggcatcttgatcgtgctgagctcggtggcttgctccttgggtgtcttcagctacattgggttgcccttgaccctcattgtgattgaagtcatcccgttcctggtgctggctgttggagtggacaacatcttcattctggtgcaggcctaccagagagatgaacgtcttcaaggggaaaccctggatcagcagctgggcagggtcctaggagaagtggctcccagtatgttcctgtcatccttttctgagactgtagcatttttcttaggagcattgtccgtgatgccagccgtgcacaccttctctctctttgcgggattggcagtcttcattgactttcttctgcagattacctgtttcgtgagtctcttggggttagacattaaacgtcaagagaaaaatcggctagacatcttttgctgtgtcagaggtgctgaagatggaacaagcgtccaggcctcagagagctgtttgtttcgcttcttcaaaaactcctattctccacttctgctaaaggactggatgagaccaattgtgatagcaatatttgtgggtgttctgtcattcagcatcgcagtcctgaacaaagtagatattggattggatcagtctctttcgatgccagatgactcctacatggtggattatttcaaatccatcagtcagtacctgcatgcgggtccgcctgtgtactttgtcctggaggaagggcacgactacacttcttccaaggggcagaacatggtgtgcggcggcatgggctgcaacaatgattccctggtgcagcagatatttaacgcggcgcagctggacaactatacccgaataggcttcgccccctcgtcctggatcgacgattatttcgactgggtgaagccacagtcgtcttgctgtcgagtggacaatatcactgaccagttctgcaatgcttcagtggttgaccctgcctgcgttcgctgcaggcctctgactccggaaggcaaacagaggcctcaggggggagacttcatgagattcctgcccatgttcctttcggataaccctaaccccaagtgtggcaaagggggacatgctgcctatagttctgcagttaacatcctccttggccatggcaccagggtcggagccacgtacttcatgacctaccacaccgtgctgcagacctctgctgactttattgacgctctgaagaaagcccgacttatagccagtaatgtcaccgaaaccatgggcattaacggcagtgcctaccgagtatttccttacagtgtgttttatgtcttctacgaacagtacctgaccatcattgacgacactatcttcaacctcggtgtgtccctgggcgcgatatttctggtgaccatggtcctcctgggctgtgagctctggtctgcagtcatcatgtgtgccaccatcgccatggtcttggtcaacatgtttggagttatgtggctctggggcatcagtctgaacgctgtatccttggtcaacctggtgatgagctgtggcatctccgtggagttctgcagccacataaccagagcgttcacggtgagcatgaaaggcagccgcgtggagcgcgcggaagaggcacttgcccacatgggcagctccgtgttcagtggaatcacacttacaaaatttggagggattgtggtgttggcttttgccaaatctcaaattttccagatattctacttcaggatgtatttggccatggtcttactgggagccactcacggattaatatttctccctgtcttactcagttacatagcaaagcttctggaaagaactatctacttgtgcatctcacagcacattcattatgcaacccagatggctccactacagtgtctcatgaccgcctcagacagatgttaaaaagtgaactcagctgggcacagcggcctacacctgtaatcccagcactgtgagaggatgaagcaggaggatcacaggaattcgagaccagcctcagcaacacagtgagaccccgtctctattccaatacatacattttttaaattaaaaattcatttaaaaaaaaaaaactcaagggatggattacagaagggcccaaggaaacttttcggggtctgaacatgttcattgccttgattgtggtgatggtttcatgggtgtatacatgtcaaaactcacatattgcataatattaagtgtgtacagtttattatgtgtcaactatgcctcaataaagctgcttttaaaaatcttt

SEQ ID NO: 401352 - DNA, 4726 bp, Homo sapiens
tttgctcctgctcctccgctcctcctgcgcggggtgctgaaacagcccggggaagtagagccgcctccggggagcccaaccagccgaacgccgccggcgtcagcagccttgcgcggccacagcatgaccgctcgcggcctggcccttggcctcctcctgctgctactgtgtccagcgcaggtgttttcacagtcctgtgtttggtatggagagtgtggaattgcatatggggacaagaggtacaattgcgaatattctggcccaccaaaaccattgccaaaggatggatatgacttagtgcaggaactctgtccaggattcttctttggcaatgtcagtctctgttgtgatgttcggcagcttcagacactaaaagacaacctgcagctgcctctacagtttctgtccagatgtccatcctgtttttataacctactgaacctgttttgtgagctgacatgtagccctcgacagagtcagtttttgaatgttacagctactgaagattatgttgatcctgttacaaaccagacgaaaacaaatgtgaaagagttacaatactacgtcggacagagttttgccaatgcaatgtacaatgcctgccgggatgtggaggccccctcaagtaatgacaaggccctgggactcctgtgtgggaaggacgctgacgcctgtaatgccaccaactggattgaatacatgttcaataaggacaatggacaggcaccttttaccatcactcctgtgttttcagattttccagtccatgggatggagcccatgaacaatgccaccaaaggctgtgacgagtctgtggatgaggtcacagcaccatgtagctgccaagactgctctattgtctgtggccccaagccccagcccccacctcctcctgctccctggacgatccttggcttggacgccatgtatgtcatcatgtggatcacctacatggcgtttttgcttgtgttttttggagcattttttgcagtgtggtgctacagaaaacggtattttgtctccgagtacactcccatcgatagcaatatagctttttctgttaatgcaagtgacaaaggagaggcgtcctgctgtgaccctgtcagcgcagcatttgagggctgcttgaggcggctgttcacacgctgggggtctttctgcgtccgaaaccctggctgtgtcattttcttctcgctggtcttcattactgcgtgttcgtcaggcctggtgtttgtccgggtcacaaccaatccagttgacctctggtcagcccccagcagccaggctcgcctggaaaaagagtactttgaccagcactttgggcctttcttccggacggagcagctcatcatccgggcccctctcactgacaaacacatttaccagccatacccttcgggagctgatgtaccctttggacctccgcttgacatacagatactgcaccaggttcttgacttacaaatagccatcgaaaacattactgcctcttatgacaatgagactgtgacacttcaagacatctgcttggcccctctttcaccgtataacacgaactgcaccattttgagtgtgttaaattacttccagaacagccattccgtgctggaccacaagaaaggggacgacttctttgtgtatgccgattaccacacgcactttctgtactgcgtacgggctcctgcctctctgaatgatacaagtttgctccatgacccttgtctgggtacgtttggtggaccagtgttcccgtggcttgtgttgggaggctatgatgatcaaaactacaataacgccactgcccttgtgattaccttccctgtcaataattactataatgatacagagaagctccagagggcccaggcctgggaaaaagagtttattaattttgtgaaaaactacaagaatcccaatctgaccatttccttcactgctgaacgaagtattgaagatgaactaaatcgtgaaagtgacagtgatgtcttcaccgttgtaattagctatgccatcatgtttctatatatttccctagccttggggcacatcaaaagctgtcgcaggcttctggtggattcgaaggtctcactaggcatcgcgggcatcttgatcgtgctgagctcggtggcttgctccttgggtgtcttcagctacattgggttgcccttgaccctcattgtgattgaagtcatcccgttcctggtgctggctgttggagtggacaacatcttcattctggtgcaggcctaccagagagatgaacgtcttcaaggggaaaccctggatcagcagctgggcagggtcctaggagaagtggctcccagtatgttcctgtcatccttttctgagactgtagcatttttcttaggagcattgtccgtgatgccagccgtgcacaccttctctctctttgcgggattggcagtcttcattgactttcttctgcagattacctgtttcgtgagtctcttggggttagacattaaacgtcaagagaaaaatcggctagacatcttttgctgtgtcagaggtgctgaagatggaacaagcgtccaggcctcagagagctgtttgtttcgcttcttcaaaaactcctattctccacttctgctaaaggactggatgagaccaattgtgatagcaatatttgtgggtgttctgtcattcagcatcgcagtcctgaacaaagtagatattggattggatcagtctctttcgatgccagatgactcctacatggtggattatttcaaatccatcagtcagtacctgcatgcgggtccgcctgtgtactttgtcctggaggaagggcacgactacacttcttccaaggggcagaacatggtgtgcggcggcatgggctgcaacaatgattccctggtgcagcagatatttaacgcggcgcagctggacaactatacccgaataggcttcgccccctcgtcctggatcgacgattatttcgactgggtgaagccacagtcgtcttgctgtcgagtggacaatatcactgaccagttctgcaatgcttcagtggttgaccctgcctgcgttcgctgcaggcctctgactccggaaggcaaacagaggcctcaggggggagacttcatgagattcctgcccatgttcctttcggataaccctaaccccaagtgtggcaaagggggacatgctgcctatagttctgcagttaacatcctccttggccatggcaccagggtcggagccacgtacttcatgacctaccacaccgtgctgcagacctctgctgactttattgacgctctgaagaaagcccgacttatagccagtaatgtcaccgaaaccatgggcattaacggcagtgcctaccgagtatttccttacagtgtgttttatgtcttctacgaacagtacctgaccatcattgacgacactatcttcaacctcggtgtgtccctgggcgcgatatttctggtgaccatggtcctcctgggctgtgagctctggtctgcagtcatcatgtgtgccaccatcgccatggtcttggtcaacatgtttggagttatgtggctctggggcatcagtctgaacgctgtatccttggtcaacctggtgatgagctgtggcatctccgtggagttctgcagccacataaccagagcgttcacggtgagcatgaaaggcagccgcgtggagcgcgcggaagaggcacttgcccacatgggcagctccgtgagtaccctgagcagggccacgccggcagagtcgcaccacaaagtaatcctcctcagtgactgaagagtctggatcctgtacttacaaagcagcttctaaggattgcaagctttcaggcaattcatgaattagctgccacatcgtggacagaacggacgttctgtggaactgtacctgttggtacggctcctttttaggtggcagtgtgctgaagcaggaaaataacagacaagttaaacatgagacagctggcagtctttcccatttaaaatgcaggggagcccgggccagaacccagcgtgtgatgtgcggttggtgcctggagagtcgtcttggttcaactctacaccctggcttagcctatctctttaccactgtagaaaatacctggtaaagagtaaaaactaaaactttgtttcgtaacacttttaaatatttaagttttcacctgagaatataaagaaagaccctgtgagaacacagtgagaaggtggccatctgcaaagaggcctgccaggagggaggcctcagaagaaagcaaacctgcagacatcttgatcttgaacttctagcctccagaactgtgagaaaataaagttctgtttaaggaaaaaaaaaaaagagagagagtgtgtgttgaatattctttcagttctatcttaaaatcaattacactggaaaaaggcaaaacgaagcaaataaatgacttctttcccttttcctgaattcctgacctccactcttctgacttcccaaccccacctctccagacagaaggaggactgatttgggtaagcctaagagccacagccgaagcacttactgtgactgtcagtcccaaagaatgcaatattcatcatcactgtcacacggaatgtgagaaagagaaaagtgatcccaggttacagtaacaaacctacagccaaagttaatttcagcgttacagagctaaggcaaacagaaaacgttacgggtgtattcaatattaaaacatatttcaccatcaacg

SEQ ID NO: 401353 - DNA, 2549 bp, Homo sapiens
tttgctcctgctcctccgctcctcctgcgcggggtgctgaaacagcccggggaagtagagccgcctccggggagcccaaccagccgaacgccgccggcgtcagcagccttgcgcggccacagcatgaccgctcgcggcctggcccttggcctcctcctgctgctactgtgtccagcgcaggtgttttcacagtcctgtgtttggtatggagagtgtggaattgcatatggggacaagaggtacaattgcgaatattctggcccaccaaaaccattgccaaaggatggatatgacttagtgcaggaactctgtccaggattcttctttggcaatgtcagtctctgttgtgatgttcggcagcttcagacactaaaagacaacctgcagctgcctctacagtttctgtccagatgtccatcctgtttttataacctactgaacctgttttgtgagctgacatgtagccctcgacagagtcagtttttgaatgttacagctactgaagattatgttgatcctgttacaaaccagacgaaaacaaatgtgaaagagttacaatactacgtcggacagagttttgccaatgcaatgtacaatgcctgccgggatgtggaggccccctcaagtaatgacaaggccctgggactcctgtgtgggaaggacgctgacgcctgtaatgccaccaactggattgaatacatgttcaataaggacaatggacaggcaccttttaccatcactcctgtgttttcagattttccagtccatgggatggagcccatgaacaatgccaccaaaggctgtgacgagtctgtggatgaggtcacagcaccatgtagctgccaagactgctctattgtctgtggccccaagccccagcccccacctcctcctgctccctggacgatccttggcttggacgccatgtatgtcatcatgtggatcacctacatggcgtttttgcttgtgttttttggagcattttttgcagtgtggtgctacagaaaacggtattttgtctccgagtacactcccatcgatagcaatatagctttttctgttaatgcaagtgacaaaggagaggcgtcctgctgtgaccctgtcagcgcagcatttgagggctgcttgaggcggctgttcacacgctgggggtctttctgcgtccgaaaccctggctgtgtcattttcttctcgctggtcttcattactgcgtgttcgtcaggcctggtgtttgtccgggtcacaaccaatccagttgacctctggtcagcccccagcagccaggctcgcctggaaaaagagtactttgaccagcactttgggcctttcttccggacggagcagctcatcatccgggcccctctcactgacaaacacatttaccagccatacccttcgggagctgatgtaccctttggacctccgcttgacatacagatactgcaccaggttcttgacttacaaatagccatcgaaaacattactgcctcttatgacaatgagactgtgacacttcaagacatctgcttggcccctctttcaccgtataacacgaactgcaccattttgagtgtgttaaattacttccagaacagccattccgtgctggaccacaagaaaggggacgacttctttgtgtatgccgattaccacacgcactttctgtactgcgtacgggctcctgcctctctgaatgatacaagtttgctccatgacccttgtctgggtacgtttggtggaccagtgttcccgtggcttgtgttgggaggctatgatggtaagtaagagaagctttgacttttccttttagataaagtcatctcggttttgtcattagcatcaagtggtaattatgaagatttcataaattgggcagttttgttaatttcttacctcttgaatcccagaatagtatctcctttggctttgggtttgggtttcattccagatttaaaagaagtggattgggttagccatttttaggtcacacatgcctttgagaagctgtcgaaggctaagtacctttccccagaataatgcaattgcaaacctctgcattgttgttcagcttgaaggtcatgggcctccgaagttcatttatagaccctctagggagctcatggacctcaggtaagagcctctgtgatagagaaaagatagtatgtgaggtatgtggaaaaagaaacaaagttgatggattttttttcttctaagccagtcagttgagtatttggacactcttacagtgtgaagagcagctggtttgctctttcctggttcctgtagcactttagaaccaattgtacttgacaaaatgaggtgattattcatgtgacacctttggcatcttaagccaaattacaggctcaacaggttttgcccaaccagttaagaatccagataggttttcttctcctcacttggtggcaggggagaagttgcaatctgtatttaaaatttactgtgcatcagagaggaaaatgccatttctaattgttggagaagggatggtgtcagcaactgactagccataggggaaacaattgact

SEQ ID NO: 401354 - DNA, 2171 bp, Homo sapiens
  misc_feature (2015)..(2015): n is a, c, g, or t
  misc_feature (2022)..(2022): n is a, c, g, or t
  misc_feature (2024)..(2025): n is a, c, g, or t
tttgctcctgctcctccgctcctcctgcgcggggtgctgaaacagcccggggaagtagagccgcctccggggagcccaaccagccgaacgccgccggcgtcagcagccttgcgcggccacagcatgaccgctcgcggcctggcccttggcctcctcctgctgctactgtgtccagcgcaggtgttttcacagtcctgtgtttggtatggagagtgtggaattgcatatggggacaagaggtacaattgcgaatattctggcccaccaaaaccattgccaaaggatggatatgacttagtgcaggaactctgtccaggattcttctttggcaatgtcagtctctgttgtgatgttcggcagcttcagacactaaaagacaacctgcagctgcctctacagtttctgtccagatgtccatcctgtttttataacctactgaacctgttttgtgagctgacatgtagccctcgacagagtcagtttttgaatgttacagctactgaagattatgttgatcctgttacaaaccagacgaaaacaaatgtgaaagagttacaatactacgtcggacagagttttgccaatgcaatgtacaatgcctgccgggatgtggaggccccctcaagtaatgacaaggccctgggactcctgtgtgggaaggacgctgacgcctgtaatgccaccaactggattgaatacatgttcaataaggacaatggacaggcaccttttaccatcactcctgtgttttcagattttccagtccatgggatggagcccatgaacaatgccaccaaaggctgtgacgagtctgtggatgaggtcacagcaccatgtagctgccaagactgctctattgtctgtggccccaagccccagcccccacctcctcctgctccctggacgatccttggcttggacgccatgtatgtcatcatgtggatcacctacatggcgtttttgcttgtgttttttggagcattttttgcagtgtggtgctacagaaaacggtattttgtctccgagtacactcccatcgatagcaatatagctttttctgttaatgcaagtgacaaaggagaggcgtcctgctgtgaccctgtcagcgcagcatttgagggctgcttgaggcggctgttcacacgctgggggtctttctgcgtccgaaaccctggctgtgtcattttcttctcgctggtcttcattactgcgtgttcgtcaggcctggtgtttgtccgggtcacaaccaatccagttgacctctggtcagcccccagcagccaggctcgcctggaaaaagagtactttgaccagcactttgggcctttcttccggacggagcagctcatcatccgggcccctctcactgacaaacacatttaccagccatacccttcgggagctgatgtaccctttggacctccgcttgacatacagatactgcaccaggttcttgacttacaaatagccatcgaaaacattactgcctcttatgacaatgagactgtgacacttcaagacatctgcttggcccctctttcaccgtataacacgaactgcaccattttgagtgtgttaaattacttccagaacagccattccgtgctggaccacaagaaaggggacgacttctttgtgtatgccgattaccacacgcactttctgtactgcgtacgggctcctgcctctctgaatgatacaagtttgctccatgacccttgtctgggtacgtttggtggaccagtgttcccgtggcttgtgttgggaggctatgatgatcaaaactacaataacgccactgcccttgtgattaccttccctgtcaataattactataatgatacagagaagctccagagggcccaggcctgggaaaaagagtttattaattttgtgaaaaactacaagaatcccaatctgaccatttccttcactgctgaacgaagtattgaagatgaactaaatcgtgaaagtgacagtgatgtcttcaccgttgtaattagccagaaaaaaanataaatntnntaatatataattataaaattatcattatatttatattctttataaatatttttattataatatattaactaaaaaaaaaccttcagggggggcccgggcccaatttgccctaatgggggccgattacacataacgggccgcggttt

SEQ ID NO: 401355 - DNA, 346 bp, Homo sapiens
catgttttaattgtatgtaacgtttctgttgcctacatctattttcttcattccaactttttggtttatcttaaagtttatttcacataatccagttttttcttatttgtccagtccatcacctaagaatgcaaactcataacatgtgttgccggagcagacctagaaatgtttacaagtcctctctgaaacacagaattgtacattcaactctaggtttaatacagccctgtaaagtaaaaaggaggaccttttagtaacaagtgggacagacaaccctgtaactaattggtgattgtgtctgtcgcctctctcaggtggattcgaaggtctcactaggcatcgc

SEQ ID NO: 401356 - DNA, 376 bp, Homo sapiens
atcatccgggcccctctcactgacaaacacatttaccagccatacccttcgggagctgatgtaccctttggacctccgcttgacatacagatactgcaccaggtaacctgctgtttgaagaaataagtcactctagatgaccttgtggtttgctggcttttacatgttgactactgctagatggggatttggggctgaatgtcatggtatatcttgaaaatcttagcgtataatggcaaagctgcctttaagttaggtttcaagaaagtgaatgatgttgaacttaatggaatatttattgttgctcacttttgtatttacttcagatagtagaccttgcctttttcttgaaattgagatgagcagagaaagaaga

SEQ ID NO: 401357 - DNA, 444 bp, Homo sapiens
tcaagacatctgcttggcccctctttcaccgtataacacgaactgcaccattttgagtgtgttaaattacttccagaacagccattccgtgctggaccacaagaaaggggacgacttctttgtgtatgccgattaccacacgcactttctgtactgcgtacggtaagtggcaagagacaatcattggtagacaccattcttgggtctgacttagggtacatgggcaaaagcttgttttatgagcataacccagaggtgagcaaacaacaagaccttgccctgtgaagtttacatcatctttttttttttttttgagacagggtctcgctctgtcgcccaggctggagtgcagtggcgcaatcttggctcactgtaacctccggctcccaagttcaagcgattctcatacctcagcctcctgagtagctaggactacaggtgtgt

SEQ ID NO: 401358 - DNA, 5470 bp, Homo sapiens
tttgctcctgctcctccgctcctcctgcgcggggtgctgaaacagcccggggaagtagagccgcctccggggagcccaaccagccgaacgccgccggcgtcagcagccttgcgcggccacagcatgaccgctcgcggcctggcccttggcctcctcctgctgctactgtgtccagcgcaggtgttttcacagtcctgtgtttggtatggagagtgtggaattgcatatggggacaagaggtacaattgcgaatattctggcccaccaaaaccattgccaaaggatggatatgacttagtgcaggaactctgtccaggattcttctttggcaatgtcagtctctgttgtgatgttcggcagcttcagacactaaaagacaacctgcagctgcctctacagtttctgtccagatgtccatcctgtttttataacctactgaacctgttttgtgagctgacatgtagccctcgacagagtcagtttttgaatgttacagctactgaagattatgttgatcctgttacaaaccagacgaaaacaaatgtgaaagagttacaatactacgtcggacagagttttgccaatgcaatgtacaatgcctgccgggatgtggaggccccctcaagtaatgacaaggccctgggactcctgtgtgggaaggacgctgacgcctgtaatgccaccaactggattgaatacatgttcaataaggacaatggacaggcaccttttaccatcactcctgtgttttcagattttccagtccatgggatggagcccatgaacaatgccaccaaaggctgtgacgagtctgtggatgaggtcacagcaccatgtagctgccaagactgctctattgtctgtggccccaagccccagcccccacctcctcctgctccctggacgatccttggcttggacgccatgtatgtcatcatgtggatcacctacatggcgtttttgcttgtgttttttggagcattttttgcagtgtggtgctacagaaaacggtattttgtctccgagtacactcccatcgatagcaatatagctttttctgttaatgcaagtgacaaaggagaggcgtcctgctgtgaccctgtcagcgcagcatttgagggctgcttgaggcggctgttcacacgctgggggtctttctgcgtccgaaaccctggctgtgtcattttcttctcgctggtcttcattactgcgtgttcgtcaggcctggtgtttgtccgggtcacaaccaatccagttgacctctggtcagcccccagcagccaggctcgcctggaaaaagagtactttgaccagcactttgggcctttcttccggacggagcagctcatcatccgggcccctctcactgacaaacacatttaccagccatacccttcgggagctgatgtaccctttggacctccgcttgacatacagatactgcaccaggttcttgacttacaaatagccatcgaaaacattactgcctcttatgacaatgagactgtgacacttcaagacatctgcttggcccctctttcaccgtataacacgaactgcaccattttgagtgtgttaaattacttccagaacagccattccgtgctggaccacaagaaaggggacgacttctttgtgtatgccgattaccacacgcactttctgtactgcgtacgggctcctgcctctctgaatgatacaagtttgctccatgacccttgtctgggtacgtttggtggaccagtgttcccgtggcttgtgttgggaggctatgatgatcaaaactacaataacgccactgcccttgtgattaccttccctgtcaataattactataatgatacagagaagctccagagggcccaggcctgggaaaaagagtttattaattttgtgaaaaactacaagaatcccaatctgaccatttccttcactgctgaacgaagtattgaagatgaactaaatcgtgaaagtgacagtgatgtcttcaccgttgtaattagctatgccatcatgtttctatatatttccctagccttggggcacatcaaaagctgtcgcaggcttctggtggattcgaaggtctcactaggcatcgcgggcatcttgatcgtgctgagctcggtggcttgctccttgggtgtcttcagctacattgggttgcccttgaccctcattgtgattgaagtcatcccgttcctggtgctggctgttggagtggacaacatcttcattctggtgcaggcctaccagagagatgaacgtcttcaaggggaaaccctggatcagcagctgggcagggtcctaggagaagtggctcccagtatgttcctgtcatccttttctgagactgtagcatttttcttaggagcattgtccgtgatgccagccgtgcacaccttctctctctttgcgggattggcagtcttcattgactttcttctgcagattacctgtttcgtgagtctcttggggttagacattaaacgtcaagagaaaaatcggctagacatcttttgctgtgtcagaggtgctgaagatggaacaagcgtccaggcctcagagagctgtttgtttcgcttcttcaaaaactcctattctccacttctgctaaaggactggatgagaccaattgtgatagcaatatttgtgggtgttctgtcattcagcatcgcagtcctgaacaaagtagatattggattggatcagtctctttcgatgccagatgactcctacatggtggattatttcaaatccatcagtcagtacctgcatgcgggtccgcctgtgtactttgtcctggaggaagggcacgactacacttcttccaaggggcagaacatggtgtgcggcggcatgggctgcaacaatgattccctggtgcagcagatatttaacgcggcgcagctggacaactatacccgaataggcttcgccccctcgtcctggatcgacgattatttcgactgggtgaagccacagtcgtcttgctgtcgagtggacaatatcactgaccagttctgcaatgcttcagtggttgaccctgcctgcgttcgctgcaggcctctgactccggaaggcaaacagaggcctcaggggggagacttcatgagattcctgcccatgttcctttcggataaccctaaccccaagtgtggcaaagggggacatgctgcctatagttctgcagttaacatcctccttggccatggcaccagggtcggagccacgtacttcatgacctaccacaccgtgctgcagacctctgctgactttattgacgctctgaagaaagcccgacttatagccagtaatgtcaccgaaaccatgggcattaacggcagtgcctaccgagtatttccttacagtgtgttttatgtcttctacgaacagtacctgaccatcattgacgacactatcttcaacctcggtgtgtccctgggcgcgatatttctggtgaccatggtcctcctgggctgtgagctctggtctgcagtcatcatgtgtgccaccatcgccatggtcttggtcaacatgtttggagttatgtggctctggggcatcagtctgaacgctgtatccttggtcaacctggtgatgagctgtggcatctccgtggagttctgcagccacataaccagagcgttcacggtgagcatgaaaggcagccgcgtggagcgcgcggaagaggcacttgcccacatgggcagctccgtgttcagtggaatcacacttacaaaatttggagggattgtggtgttggcttttgccaaatctcaaattttccagatattctacttcaggatgtatttggccatggtcttactgggagccactcacggattaatatttctccctgtcttactcagttacatagggccatcagtaaataaagccaaaagttgtgccactgaagagcgatacaaaggaacagagcgcgaacggcttctaaatttctagccctctcgcagggcatcctgactgaactgtgtctaagggtcggtcggtttaccactggacgggtgctgcatcggcaaggccaagttgaacaccggatggtgccaaccatcggttgtttggcagcagctttgaacgtagcgcctgtgaactcaggaatgcacagttgacttgggaagcagtattactagatctggaggcaaccacaggacactaaacttctcccagcctcttcaggaaagaaacctcattctttggcaagcaggaggtgacactagatggctgtgaatgtgatccgctcactgacactctgtaaaggccaatcaatgcactgtctgtctctccttttaggagtaagccatcccacaagttctataccatatttttagtgacagttgaggttgtagatacactttataacattttatagtttaaagagctttattaatgcaataaattaactttgtacacatttttatataaaaaaacagcaagtgatttcagaatgttgtaggcctcattagagcttggtctccaaaaatctgtttgaaaaaagcaacatgttcttcacagtgttcccctagaaaggaagagatttaattgccagttagatgtggcatgaaatgagggacaaagaaagcatctcgtaggtgtgtctactgggttttaacttatttttctttaataaaatacattgttttcctaaaaaaaaaaaaaaaaaaaaaaaaaaaaaaaaaaaaaaaaaaaaaaaaaaaaaaaaaaaaaaaaaaaaaaaaaaaaaaaaaaaaaaaacaaaaacaaaaaaaaaaaggggggggcacacacaaaaatatccccaaggaggacaccaaaaaacacaaacacacaatattcagaaagaagggcgccacataaaagagagcagcaaaaaaaaaaagcacagcagcggacgcgccgcaataaaaaaacagagccagaggggggagaacacaagcggcaagggcaacacatccagggaagagaaacactaagcgcggggggaaaacaagggggaaaaaacacacacggaaaacaaaaagcagcgaccaggagggaagaacaacaaaacaccaacccgcgagcggaactaaggggggaacacaacaccacgacgcacaacaccgaggcgcgacgaaaacacatgcccacacgaggaacaagaaacaacaaaaacactacaggggggagtaatacaagaaaataagacccaccacaacagaaacaacaggaccagcacatagaaaaagccgaccacacacccacacatacgcacaggcaccccgaacacagccgcacgagcacacgcagacaccggtaaatagacacaacaagacaaacccaaccaacacacaaaaaacaaagacagagaaagagaacaaaaaacagaaagaaaaaagagacaaacaacagaacaaaccagaccaaccaaatctagagaggtagaaacaaaaggagagacataatcacgaaagcaaacaagagaaagaaaacagag

SEQ ID NO: 401359 - DNA, 4200 bp, Homo sapiens
gcaaagttaatcttcaagagatgggcctcacacatgcccaggctgtctggaactcctggtcttaagcaattctcttgcctcagtcttcccaagcactggtgagccactgtgttagggtcttccacactggagactatcagattacagctaaggttccatacatgctgaattaaagtaagtttagggctgggctcaatggcttatgcctgtaattccagcactttgggaggctcagacgagaggctcacttgaggccgggagttcaagaccagcctaggcaatgtttgcatgtctctaaaaaaaagaaaaaagagaatttaaaaagaaaaaaaagcgtacaattcagtagctttactatattcacgtgtatgtgcagccatcaccacagtcaattttgggacttaggggaaagaaggcagtaattagggaggaggaggccaggaggaggaagaaagcatttcatgggattacaggaatgtcccaaaaacaacctcactgtgatgaagtccactaatgctatttcttcacttctgtttttcagaaaacggtattttgtctccgagtacactcccatcgatagcaatatagctttttctgttaatgcaagtgacaaaggagaggcgtcctgctgtgaccctgtcagcgcagcatttgagggctgcttgaggcggctgttcacacgctgggggtctttctgcgtccgaaaccctggctgtgtcattttcttctcgctggtcttcattactgcgtgttcgtcaggcctggtgtttgtccgggtcacaaccaatccagttgacctctggtcagcccccagcagccaggctcgcctggaaaaagagtactttgaccagcactttgggcctttcttccggacggagcagctcatcatccgggcccctctcactgacaaacacatttaccagccatacccttcgggagctgatgtaccctttggacctccgcttgacatacagatactgcaccaggttcttgacttacaaatagccatcgaaaacattactgcctcttatgacaatgagactgtgacacttcaagacatctgcttggcccctctttcaccgtataacacgaactgcaccattttgagtgtgttaaattacttccagaacagccattccgtgctggaccacaagaaaggggacgacttctttgtgtatgccgattaccacacgcactttctgtactgcgtacgggctcctgcctctctgaatgatacaagtttgctccatgacccttgtctgggtacgtttggtggaccagtgttcccgtggcttgtgttgggaggctatgatgatcaaaactacaataacgccactgcccttgtgattaccttccctgtcaataattactataatgatacagagaagctccagagggcccaggcctgggaaaaagagtttattaattttgtgaaaaactacaagaatcccaatctgaccatttccttcactgctgaacgaagtattgaagatgaactaaatcgtgaaagtgacagtgatgtcttcaccgttgtaattagctatgccatcatgtttctatatatttccctagccttggggcacatcaaaagctgtcgcaggcttctggtggattcgaaggtctcactaggcatcgcgggcatcttgatcgtgctgagctcggtggcttgctccttgggtgtcttcagctacattgggttgcccttgaccctcattgtgattgaagtcatcccgttcctggtgctggctgttggagtggacaacatcttcattctggtgcaggcctaccagagagatgaacgtcttcaaggggaaaccctggatcagcagctgggcagggtcctaggagaagtggctcccagtatgttcctgtcatccttttctgagactgtagcatttttcttaggagcattgtccgtgatgccagccgtgcacaccttctctctctttgcgggattggcagtcttcattgactttcttctgcagattacctgtttcgtgagtctcttggggttagacattaaacgtcaagagaaaaatcggctagacatcttttgctgtgtcagaggtgctgaagatggaacaagcgtccaggcctcagagagctgtttgtttcgcttcttcaaaaactcctattctccacttctgctaaaggactggatgagaccaattgtgatagcaatatttgtgggtgttctgtcattcagcatcgcagtcctgaacaaagtagatattggattggatcagtctctttcgatgccagatgactcctacatggtggattatttcaaatccatcagtcagtacctgcatgcgggtccgcctgtgtactttgtcctggaggaagggcacgactacacttcttccaaggggcagaacatggtgtgcggcggcatgggctgcaacaatgattccctggtgcagcagatatttaacgcggcgcagctggacaactatacccgaataggcttcgccccctcgtcctggatcgacgattatttcgactgggtgaagccacagtcgtcttgctgtcgagtggacaatatcactgaccagttctgcaatgcttcagtggttgaccctgcctgcgttcgctgcaggcctctgactccggaaggcaaacagaggcctcaggggggagacttcatgagattcctgcccatgttcctttcggataaccctaaccccaagtgtggcaaagggggacatgctgcctatagttctgcagttaacatcctccttggccatggcaccagggtcggagccacgtacttcatgacctaccacaccgtgctgcagacctctgctgactttattgacgctctgaagaaagcccgacttatagccagtaatgtcaccgaaaccatgggcattaacggcagtgcctaccgagtatttccttacagtgtgttttatgtcttctacgaacagtacctgaccatcattgacgacactatcttcaacctcggtgtgtccctgggcgcgatatttctggtgaccatggtcctcctgggctgtgagctctggtctgcagtcatcatgtgtgccaccatcgccatggtcttggtcaacatgtttggagttatgtggctctggggcatcagtctgaacgctgtatccttggtcaacctggtgatgagctgtggcatctccgtggagttctgcagccacataaccagagcgttcacggtgagcatgaaaggcagccgcgtggagcgcgcggaagaggcacttgcccacatgggcagctccgtgttcagtggaatcacacttacaaaatttggagggattgtggtgttggcttttgccaaatctcaaattttccagatattctacttcaggatgtatttggccatggtcttactgggagccactcacggattaatatttctccctgtcttactcagttacatagggccatcagtaaataaagccaaaagttgtgccactgaagagcgatacaaaggaacagagcgcgaacggcttctaaatttctagccctctcgcagggcatcctgactgaactgtgtctaagggtcggtcggtttaccactggacgggtgctgcatcggcaaggccaagttgaacaccggatggtgccaaccatcggttgtttggcagcagctttgaacgtagcgcctgtgaactcaggaatgcacagttgacttgggaagcagtattactagatctggaggcaaccacaggacactaaacttctcccagcctcttcaggaaagaaacctcattctttggcaagcaggaggtgacactagatggctgtgaatgtgatccgctcactgacactctgtaaaggccaatcaatgcactgtctgtctctccttttaggagtaagccatcccacaagttctataccatatttttagtgacagttgaggttgtagatacactttataacattttatagtttaaagagctttattaatgcaataaattaactttgtacacatttttatataaaaaaacagcaagtgatttcagaatgttgtaggcctcattagagcttggtctccaaaaatctgtttgaaaaaagcaacatgttcttcacagtgttcccctagaaaggaagagatttaattgccagttagatgtggcatgaaatgagggacaaagaaagcatctcgtaggtgtgtctactgggttttaacttatttttctttaataaaatacattgttttcctaa

SEQ ID NO: 401360 - DNA, 5003 bp, Homo sapiens
tttgctcctgctcctccgctcctcctgcgcggggtgctgaaacagcccggggaagtagagccgcctccggggagcccaaccagccgaacgccgccggcgtcagcagccttgcgcggccacagcatgaccgctcgcggcctggcccttggcctcctcctgctgctactgtgtccagcgcaggtgttttcacagtcctgtgtttggtatggagagtgtggaattgcatatggggacaagaggtacaattgcgaatattctggcccaccaaaaccattgccaaaggatggatatgacttagtgcaggaactctgtccaggattcttctttggcaatgtcagtctctgttgtgatgttcggcagcttcagacactaaaagacaacctgcagctgcctctacagtttctgtccagatgtccatcctgtttttataacctactgaacctgttttgtgagctgacatgtagccctcgacagagtcagtttttgaatgttacagctactgaagattatgttgatcctgttacaaaccagacgaaaacaaatgtgaaagagttacaatactacgtcggacagagttttgccaatgcaatgtacaatgcctgccgggatgtggaggccccctcaagtaatgacaaggccctgggactcctgtgtgggaaggacgctgacgcctgtaatgccaccaactggattgaatacatgttcaataaggacaatggacaggcaccttttaccatcactcctgtgttttcagattttccagtccatgggatggagcccatgaacaatgccaccaaaggctgtgacgagtctgtggatgaggtcacagcaccatgtagctgccaagactgctctattgtctgtggccccaagccccagcccccacctcctcctgctccctggacgatccttggcttggacgccatgtatgtcatcatgtggatcacctacatggcgtttttgcttgtgttttttggagcattttttgcagtgtggtgctacagaaaacggtattttgtctccgagtacactcccatcgatagcaatatagctttttctgttaatgcaagtgacaaaggagaggcgtcctgctgtgaccctgtcagcgcagcatttgagggctgcttgaggcggctgttcacacgctgggggtctttctgcgtccgaaaccctggctgtgtcattttcttctcgctggtcttcattactgcgtgttcgtcaggcctggtgtttgtccgggtcacaaccaatccagttgacctctggtcagcccccagcagccaggctcgcctggaaaaagagtactttgaccagcactttgggcctttcttccggacggagcagctcatcatccgggcccctctcactgacaaacacatttaccagccatacccttcgggagctgatgtaccctttggacctccgcttgacatacagatactgcaccaggttcttgacttacaaatagccatcgaaaacattactgcctcttatgacaatgagactgtgacacttcaagacatctgcttggcccctctttcaccgtataacacgaactgcaccattttgagtgtgttaaattacttccagaacagccattccgtgctggaccacaagaaaggggacgacttctttgtgtatgccgattaccacacgcactttctgtactgcgtacgggctcctgcctctctgaatgatacaagtttgctccatgacccttgtctgggtacgtttggtggaccagtgttcccgtggcttgtgttgggaggctatgatgatcaaaactacaataacgccactgcccttgtgattaccttccctgtcaataattactataatgatacagagaagctccagagggcccaggcctgggaaaaagagtttattaattttgtgaaaaactacaagaatcccaatctgaccatttccttcactgctgaacgaagtattgaagatgaactaaatcgtgaaagtgacagtgatgtcttcaccgttgtaattagctatgccatcatgtttctatatatttccctagccttggggcacatcaaaagctgtcgcaggcttctggtggattcgaaggtctcactaggcatcgcgggcatcttgatcgtgctgagctcggtggcttgctccttgggtgtcttcagctacattgggttgcccttgaccctcattgtgattgaagtcatcccgttcctggtgctggctgttggagtggacaacatcttcattctggtgcaggcctaccagagagatgaacgtcttcaaggggaaaccctggatcagcagctgggcagggtcctaggagaagtggctcccagtatgttcctgtcatccttttctgagactgtagcatttttcttaggagcattgtccgtgatgccagccgtgcacaccttctctctctttgcgggattggcagtcttcattgactttcttctgcagattacctgtttcgtgagtctcttggggttagacattaaacgtcaagagaaaaatcggctagacatcttttgctgtgtcagaggtgctgaagatggaacaagcgtccaggcctcagagagctgtttgtttcgcttcttcaaaaactcctattctccacttctgctaaaggactggatgagaccaattgtgatagcaatatttgtgggtgttctgtcattcagcatcgcagtcctgaacaaagtagatattggattggatcagtctctttcgatgccagatgactcctacatggtggattatttcaaatccatcagtcagtacctgcatgcgggtccgcctgtgtactttgtcctggaggaagggcacgactacacttcttccaaggggcagaacatggtgtgcggcggcatgggctgcaacaatgattccctggtgcagcagatatttaacgcggcgcagctggacaactagtcagtaccaccttgtcttgtacttcagaagcagcggaggaggctctcagccaggcagtcagctcaggcctgaaatgtctcactgaaaatagactttcttggaaaagttgtttttatgcaaaatgtatgttaaatctggctttaccttaaaaaacctttgaaaggactaatttaccacctaatactttgaaggcttttttcattaagtgctcatgtagtttttcttttgactgttagcagtataaaacgtagaaaaggaagttaggttttaagaaaaagtactgaaactaaagacttcctccctgtggagcaggtcagtaaccctgtctgtcctctctagtacccgaataggcttcgccccctcgtcctggatcgacgattatttcgactgggtgaagccacagtcgtcttgctgtcgagtggacaatatcactgaccagttctgcaatgcttcagtggttgaccctgcctgcgttcgctgcaggcctctgactccggaaggcaaacagaggcctcaggggggagacttcatgagattcctgcccatgttcctttcggataaccctaaccccaagtgtggcaaagggggacatgctgcctatagttctgcagttaacatcctccttggccatggcaccagggtcggagccacgtacttcatgacctaccacaccgtgctgcagacctctgctgactttattgacgctctgaagaaagcccgacttatagccagtaatgtcaccgaaaccatgggcattaacggcagtgcctaccgagtatttccttacagtgtgttttatgtcttctacgaacagtacctgaccatcattgacgacactatcttcaacctcggtgtgtccctgggcgcgatatttctggtgaccatggtcctcctgggctgtgagctctggtctgcagtcatcatgtgtgccaccatcgccatggtcttggtcaacatgtttggagttatgtggctctggggcatcagtctgaacgctgtatccttggtcaacctggtgatgagctgtggcatctccgtggagttctgcagccacataaccagagcgttcacggtgagcatgaaaggcagccgcgtggagcgcgcggaagaggcacttgcccacatgggcagctccgtgttcagtggaatcacacttacaaaatttggagggattgtggtgttggcttttgccaaatctcaaattttccagatattctacttcaggatgtatttggccatggtcttactgggagccactcacggattaatatttctccctgtcttactcagttacatagggccatcagtaaataaagccaaaagttgtgccactgaagagcgatacaaaggaacagagcgcgaacggcttctaaatttctagccctctcgcagggcatcctgactgaactgtgtctaagggtcggtcggtttaccactggacgggtgctgcatcggcaaggccaagttgaacaccggatggtgccaaccatcggttgtttggcagcagctttgaacgtagcgcctgtgaactcaggaatgcacagttgacttgggaagcagtattactagatctggaggcaaccacaggacactaaacttctcccagcctcttcaggaaagaaacctcattctttggcaagcaggaggtgacactagatggctgtgaatgtgatccgctcactgacactctgtaaaggccaatcaatgcactgtctgtctctccttttaggagtaagccatcccacaagttctataccatatttttagtgacagttgaggttgtagatacactttataacattttatagtttaaagagctttattaatgcaataaattaactttgtacacatttttatataaaaaaacagcaagtgatttcagaatgttgtaggcctcattagagcttggtctccaaaaatctgtttgaaaaaagcaacatgttcttcacagtgttcccctagaaaggaagagatttaattgccagttagatgtggcatgaaatgagggacaaagaaagcatctcgtaggtgtgtctactgggttttaacttatttttctttaataaaatacattgttttcctaa

SEQ ID NO: 401361 - DNA, 4772 bp, Homo sapiens
tttgctcctgctcctccgctcctcctgcgcggggtgctgaaacagcccggggaagtagagccgcctccggggagcccaaccagccgaacgccgccggcgtcagcagccttgcgcggccacagcatgaccgctcgcggcctggcccttggcctcctcctgctgctactgtgtccagcgcaggtgttttcacagtcctgtgtttggtatggagagtgtggaattgcatatggggacaagaggtacaattgcgaatattctggcccaccaaaaccattgccaaaggatggatatgacttagtgcaggaactctgtccaggattcttctttggcaatgtcagtctctgttgtgatgttcggcagcttcagacactaaaagacaacctgcagctgcctctacagtttctgtccagatgtccatcctgtttttataacctactgaacctgttttgtgagctgacatgtagccctcgacagagtcagtttttgaatgttacagctactgaagattatgttgatcctgttacaaaccagacgaaaacaaatgtgaaagagttacaatactacgtcggacagagttttgccaatgcaatgtacaatgcctgccgggatgtggaggccccctcaagtaatgacaaggccctgggactcctgtgtgggaaggacgctgacgcctgtaatgccaccaactggattgaatacatgttcaataaggacaatggacaggcaccttttaccatcactcctgtgttttcagattttccagtccatgggatggagcccatgaacaatgccaccaaaggctgtgacgagtctgtggatgaggtcacagcaccatgtagctgccaagactgctctattgtctgtggccccaagccccagcccccacctcctcctgctccctggacgatccttggcttggacgccatgtatgtcatcatgtggatcacctacatggcgtttttgcttgtgttttttggagcattttttgcagtgtggtgctacagaaaacggtattttgtctccgagtacactcccatcgatagcaatatagctttttctgttaatgcaagtgacaaaggagaggcgtcctgctgtgaccctgtcagcgcagcatttgagggctgcttgaggcggctgttcacacgctgggggtctttctgcgtccgaaaccctggctgtgtcattttcttctcgctggtcttcattactgcgtgttcgtcaggcctggtgtttgtccgggtcacaaccaatccagttgacctctggtcagcccccagcagccaggctcgcctggaaaaagagtactttgaccagcactttgggcctttcttccggacggagcagctcatcatccgggcccctctcactgacaaacacatttaccagccatacccttcgggagctgatgtaccctttggacctccgcttgacatacagatactgcaccaggttcttgacttacaaatagccatcgaaaacattactgcctcttatgacaatgagactgtgacacttcaagacatctgcttggcccctctttcaccgtataacacgaactgcaccattttgagtgtgttaaattacttccagaacagccattccgtgctggaccacaagaaaggggacgacttctttgtgtatgccgattaccacacgcactttctgtactgcgtacgggctcctgcctctctgaatgatacaagtttgctccatgacccttgtctgggtacgtttggtggaccagtgttcccgtggcttgtgttgggaggctatgatgatcaaaactacaataacgccactgcccttgtgattaccttccctgtcaataattactataatgatacagagaagctccagagggcccaggcctgggaaaaagagtttattaattttgtgaaaaactacaagaatcccaatctgaccatttccttcactgctgaacgaagtattgaagatgaactaaatcgtgaaagtgacagtgatgtcttcaccgttgtaattagctatgccatcatgtttctatatatttccctagccttggggcacatcaaaagctgtcgcaggcttctggtggattcgaaggtctcactaggcatcgcgggcatcttgatcgtgctgagctcggtggcttgctccttgggtgtcttcagctacattgggttgcccttgaccctcattgtgattgaagtcatcccgttcctggtgctggctgttggagtggacaacatcttcattctggtgcaggcctaccagagagatgaacgtcttcaaggggaaaccctggatcagcagctgggcagggtcctaggagaagtggctcccagtatgttcctgtcatccttttctgagactgtagcatttttcttaggagcattgtccgtgatgccagccgtgcacaccttctctctctttgcgggattggcagtcttcattgactttcttctgcagattacctgtttcgtgagtctcttggggttagacattaaacgtcaagagaaaaatcggctagacatcttttgctgtgtcagaggtgctgaagatggaacaagcgtccaggcctcagagagctgtttgtttcgcttcttcaaaaactcctattctccacttctgctaaaggactggatgagaccaattgtgatagcaatatttgtgggtgttctgtcattcagcatcgcagtcctgaacaaagtagatattggattggatcagtctctttcgatgccagatgactcctacatggtggattatttcaaatccatcagtcagtacctgcatgcgggtccgcctgtgtactttgtcctggaggaagggcacgactacacttcttccaaggggcagaacatggtgtgcggcggcatgggctgcaacaatgattccctggtgcagcagatatttaacgcggcgcagctggacaactatacccgaataggcttcgccccctcgtcctggatcgacgattatttcgactgggtgaagccacagtcgtcttgctgtcgagtggacaatatcactgaccagttctgcaatgcttcagtggttgaccctgcctgcgttcgctgcaggcctctgactccggaaggcaaacagaggcctcaggggggagacttcatgagattcctgcccatgttcctttcggataaccctaaccccaagtgtggcaaagggggacatgctgcctatagttctgcagttaacatcctccttggccatggcaccagggtcggagccacgtacttcatgacctaccacaccgtgctgcagacctctgctgactttattgacgctctgaagaaagcccgacttatagccagtaatgtcaccgaaaccatgggcattaacggcagtgcctaccgagtatttccttacagtgtgttttatgtcttctacgaacagtacctgaccatcattgacgacactatcttcaacctcggtgtgtccctgggcgcgatatttctggtgaccatggtcctcctgggctgtgagctctggtctgcagtcatcatgtgtgccaccatcgccatggtcttggtcaacatgtttggagttatgtggctctggggcatcagtctgaacgctgtatccttggtcaacctggtgatgagctgtggcatctccgtggagttctgcagccacataaccagagcgttcacggtgagcatgaaaggcagccgcgtggagcgcgcggaagaggcacttgcccacatgggcagctccgtgttcagtggaatcacacttacaaaatttggagggattgtggtgttggcttttgccaaatctcaaattttccagatattctacttcaggatgtatttggccatggtcttactgggagccactcacggattaatatttctccctgtcttactcagttacatagggccatcagtaaataaagccaaaagttgtgccactgaagagcgatacaaaggaacagagcgcgaacggcttctaaatttctagccctctcgcagggcatcctgactgaactgtgtctaagggtcggtcggtttaccactggacgggtgctgcatcggcaaggccaagttgaacaccggatggtgccaaccatcggttgtttggcagcagctttgaacgtagcgcctgtgaactcaggaatgcacagttgacttgggaagcagtattactagatctggaggcaaccacaggacactaaacttctcccagcctcttcaggaaagaaacctcattctttggcaagcaggaggtgacactagatggctgtgaatgtgatccgctcactgacactctgtaaaggccaatcaatgcactgtctgtctctccttttaggagtaagccatcccacaagttctataccatatttttagtgacagttgaggttgtagatacactttataacccccccaaaaatttttttttttttttttttttttaaaaaatttaaaaaaggggttttttttttttaaaaaaaaaaaggggaaaaagggcccccctttctttttttaaaattttttaaaaaatttggccccaaaatttaaaaaatttaacctttgtacacatttttatataaaaaaacagcaagtgatttcagaatgttgtaggcctcattagagcttggtctccaaaaatctgtttgaaaaaagcaacatgttcttcacagtgttcccctagaaaggaagagatttaattgccagttagatgtggcatgaaatgagggacaaagaaagcatctcgtaggtgtgtctactgggttttaacttatttttctttaataaaatacattgttttcctaa

SEQ ID NO: 401362 - DNA, 5267 bp, Homo sapiens
tttgctcctgctcctccgctcctcctgcgcggggtgctgaaacagcccggggaagtagagccgcctccggggagcccaaccagccgaacgccgccggcgtcagcagccttgcgcggccacagcatgaccgctcgcggcctggcccttggcctcctcctgctgctactgtgtccagcgcaggtgttttcacagtcctgtgtttggtatggagagtgtggaattgcatatggggacaagaggtacaattgcgaatattctggcccaccaaaaccattgccaaaggatggatatgacttagtgcaggaactctgtccaggattcttctttggcaatgtcagtctctgttgtgatgttcggcagcttcagacactaaaagacaacctgcagctgcctctacagtttctgtccagatgtccatcctgtttttataacctactgaacctgttttgtgagctgacatgtagccctcgacagagtcagtttttgaatgttacagctactgaagattatgttgatcctgttacaaaccagacgaaaacaaatgtgaaagagttacaatactacgtcggacagagttttgccaatgcaatgtacaatgcctgccgggatgtggaggccccctcaagtaatgacaaggccctgggactcctgtgtgggaaggacgctgacgcctgtaatgccaccaactggattgaatacatgttcaataaggacaatggacaggcaccttttaccatcactcctgtgttttcagattttccagtccatgggatggagcccatgaacaatgccaccaaaggctgtgacgagtctgtggatgaggtcacagcaccatgtagctgccaagactgctctattgtctgtggccccaagccccagcccccacctcctcctgctccctggacgatccttggcttggacgccatgtatgtcatcatgtggatcacctacatggcgtttttgcttgtgttttttggagcattttttgcagtgtggtgctacagaaaacggtattttgtctccgagtacactcccatcgatagcaatatagctttttctgttaatgcaagtgacaaaggagaggcgtcctgctgtgaccctgtcagcgcagcatttgagggctgcttgaggcggctgttcacacgctgggggtctttctgcgtccgaaaccctggctgtgtcattttcttctcgctggtcttcattactgcgtgttcgtcaggcctggtgtttgtccgggtcacaaccaatccagttgacctctggtcagcccccagcagccaggctcgcctggaaaaagagtactttgaccagcactttgggcctttcttccggacggagcagctcatcatccgggcccctctcactgacaaacacatttaccagccatacccttcgggagctgatgtaccctttggacctccgcttgacatacagatactgcaccaggttcttgacttacaaatagccatcgaaaacattactgcctcttatgacaatgagactgtgacacttcaagacatctgcttggcccctctttcaccgtataacacgaactgcaccattttgagtgtgttaaattacttccagaacagccattccgtgctggaccacaagaaaggggacgacttctttgtgtatgccgattaccacacgcactttctgtactgcgtacgggctcctgcctctctgaatgatacaagtttgctccatgacccttgtctgggtacgtttggtggaccagtgttcccgtggcttgtgttgggaggctatgatgatcaaaactacaataacgccactgcccttgtgattaccttccctgtcaataattactataatgatacagagaagctccagagggcccaggcctgggaaaaagagtttattaattttgtgaaaaactacaagaatcccaatctgaccatttccttcactgctgaacgaagtattgaagatgaactaaatcgtgaaagtgacagtgatgtcttcaccgttgtaattagctatgccatcatgtttctatatatttccctagccttggggcacatcaaaagctgtcgcaggcttctggtggattcgaaggtctcactaggcatcgcgggcatcttgatcgtgctgagctcggtggcttgctccttgggtgtcttcagctacattgggttgcccttgaccctcattgtgattgaagtcatcccgttcctggtgctggctgttggagtggacaacatcttcattctggtgcaggcctaccagagagatgaacgtcttcaaggggaaaccctggatcagcagctgggcagggtcctaggagaagtggctcccagtatgttcctgtcatccttttctgagactgtagcatttttcttaggagcattgtccgtgatgccagccgtgcacaccttctctctctttgcgggattggcagtcttcattgactttcttctgcagattacctgtttcgtgagtctcttggggttagacattaaacgtcaagagaaaaatcggctagacatcttttgctgtgtcagaggtgctgaagatggaacaagcgtccaggcctcagagagctgtttgtttcgcttcttcaaaaactcctattctccacttctgctaaaggactggatgagaccaattgtgatagcaatatttgtgggtgttctgtcattcagcatcgcagtcctgaacaaagtagatattggattggatcagtctctttcgatgccagatgactcctacatggtggattatttcaaatccatcagtcagtacctgcatgcgggtccgcctgtgtactttgtcctggaggaagggcacgactacacttcttccaaggggcagaacatggtgtgcggcggcatgggctgcaacaatgattccctggtgcagcagatatttaacgcggcgcagctggacaactatacccgaataggcttcgccccctcgtcctggatcgacgattatttcgactgggtgaagccacagtcgtcttgctgtcgagtggacaatatcactgaccagttctgcaatgcttcagtggttgaccctgcctgcgttcgctgcaggcctctgactccggaaggcaaacagaggcctcaggggggagacttcatgagattcctgcccatgttcctttcggataaccctaaccccaagtgtggcaaagggggacatgctgcctatagttctgcagttaacatcctccttggccatggcaccagggtcggagccacgtacttcatgacctaccacaccgtgctgcagacctctgctgactttattgacgctctgaagaaagcccgacttatagccagtaatgtcaccgaaaccatgggcattaacggcagtgcctaccgagtatttccttacagtgtgttttatgtcttctacgaacagtacctgaccatcattgacgacactatcttcaacctcggtgtgtccctgggcgcgatatttctggtgaccatggtcctcctgggctgtgagctctggtctgcagtcatcatgtgtgccaccatcgccatggtcttggtcaacatgtttggagttatgtggctctggggcatcagtctgaacgctgtatccttggtcaacctggtgatgagctgtggcatctccgtggagttctgcagccacataaccagagcgttcacggtgagcatgaaaggcagccgcgtggagcgcgcggaagaggcacttgcccacatgggcagctccgtgagtaccctgagcagggccacgccggcagagtcgcaccacaaagtaatcctcctcagtgactgaagagtctggatcctgtacttacaaagcagcttctaaggattgcaagctttcaggcaattcatgaattagctgccacatcgtggacagaacggacgttctgtggaactgtacctgttggtacggctcctttttaggtggcagtgtgctgaagcaggaaaataacagacaagttaaacatgagacagctggcagtctttcccatttaaaatgcaggggagcccgggccagaacccagcgtgtgatgtgcggttggtgcctggagagtcgtcttggttcaactctacaccctggcttagcctatctctttaccactgtagaaaatacctggtaaagagtaaaaactaaaactttgtttcgtaacacttttaaatatttaagttttcacctgagaatataaagaaagataatcaattgggagacacgatgcagtgtctgtgcagaatacacagcttttaacttggtcatacctctcccccaggatcataaggcagcaaatagtgttaggtagtagatgatgctacctgggttcagttcccattgctttgaaccttgaatattaagaaatccccataagggctggccacggtggctcatgcctataaccccagcactttgggaggccaaggctggcggaccacttgcggccaggggttcgagaccatggccaacatggtgaaaccccatctctactaaaaacacaaaaattagccaggcatggtggcgtgcacctgtttaatcccagctactcaggaggctggggcaggagaatcacttgaacctgggagaaatccttgtaaggaagtgtttttgttcaattacaggttggtaaaagtggtttctaacacagtatctcttcttttaggtgttcagtggaatcacacttacaaaatttggagggattgtggtgttggcttttgccaaatctcaaattttccagatattctacttcaggatgtatttggccatggtcttactgggagccactcacggattaatatttctccctgtcttactcagttacatagcaaagcttctggaaagaactatctacttgtgcatctcacagcacattcattatgcaacccagatggctccactacagtgtctcatgaccgcctcagacagatgttaaaaagtgaactcagctgggcacagcggcctacacctgtaatcccagcactgtgagaggatgaagcaggaggatcacaggaattcgagaccagcctcagcaacacagtgagaccccgtctctattccaatacatacattttttaaattaaaaattcatttaaaaaaaaaaaactcaagggatggattacagaagggcccaaggaaacttttcggggtctgaacatgttcattgccttgattgtggtgatggtttcatgggtgtatacatgtcaaaactcacatattgcataatattaagtgtgtacagtttattatgtgtcaactatgcctcaataaagctgcttttaaaaatcttt

SEQ ID NO: 401363 - DNA, 4030 bp, Homo sapiens
tttgctcctgctcctccgctcctcctgcgcggggtgctgaaacagcccggggaagtagagccgcctccggggagcccaaccagccgaacgccgccggcgtcagcagccttgcgcggccacagcatgaccgctcgcggcctggcccttggcctcctcctgctgctactgtgtccagcgcaggtgttttcacagtcctgtgtttggtatggagagtgtggaattgcatatggggacaagaggtacaattgcgaatattctggcccaccaaaaccattgccaaaggatggatatgacttagtgcaggaactctgtccaggattcttctttggcaatgtcagtctctgttgtgatgttcggcagcttcagacactaaaagacaacctgcagctgcctctacagtttctgtccagatgtccatcctgtttttataacctactgaacctgttttgtgagctgacatgtagccctcgacagagtcagtttttgaatgttacagctactgaagattatgttgatcctgttacaaaccagacgaaaacaaatgtgaaagagttacaatactacgtcggacagagttttgccaatgcaatgtacaatgcctgccgggatgtggaggccccctcaagtaatgacaaggccctgggactcctgtgtgggaaggacgctgacgcctgtaatgccaccaactggattgaatacatgttcaataaggacaatggacaggcaccttttaccatcactcctgtgttttcagattttccagtccatgggatggagcccatgaacaatgccaccaaaggctgtgacgagtctgtggatgaggtcacagcaccatgtagctgccaagactgctctattgtctgtggccccaagccccagcccccacctcctcctgctccctggacgatccttggcttggacgccatgtatgtcatcatgtggatcacctacatggcgtttttgcttgtgttttttggagcattttttgcagtgtggtgctacagaaaacggtattttgtctccgagtacactcccatcgatagcaatatagctttttctgttaatgcaagtgacaaaggagaggcgtcctgctgtgaccctgtcagcgcagcatttgagggctgcttgaggcggctgttcacacgctgggggtctttctgcgtccgaaaccctggctgtgtcattttcttctcgctggtcttcattactgcgtgttcgtcaggcctggtgtttgtccgggtcacaaccaatccagttgacctctggtcagcccccagcagccaggctcgcctggaaaaagagtactttgaccagcactttgggcctttcttccggacggagcagctcatcatccgggcccctctcactgacaaacacatttaccagccatacccttcgggagctgatgtaccctttggacctccgcttgacatacagatactgcaccaggttcttgacttacaaatagccatcgaaaacattactgcctcttatgacaatgagactgtgacacttcaagacatctgcttggcccctctttcaccgtataacacgaactgcaccattttgagtgtgttaaattacttccagaacagccattccgtgctggaccacaagaaaggggacgacttctttgtgtatgccgattaccacacgcactttctgtactgcgtacgggctcctgcctctctgaatgatacaagtttgctccatgacccttgtctgggtacgtttggtggaccagtgttcccgtggcttgtgttgggaggctatgatgatcaaaactacaataacgccactgcccttgtgattaccttccctgtcaataattactataatgatacagagaagctccagagggcccaggcctgggaaaaagagtttattaattttgtgaaaaactacaagaatcccaatctgaccatttccttcactgctgaacgaagtattgaagatgaactaaatcgtgaaagtgacagtgatgtcttcaccgttgtaattagctatgccatcatgtttctatatatttccctagccttggggcacatcaaaagctgtcgcaggcttctggtggattcgaaggtctcactaggcatcgcgggcatcttgatcgtgctgagctcggtggcttgctccttgggtgtcttcagctacattgggttgcccttgaccctcattgtgattgaagtcatcccgttcctggtgctggctgttggagtggacaacatcttcattctggtgcaggcctaccagagagatgaacgtcttcaaggggaaaccctggatcagcagctgggcagggtcctaggagaagtggctcccagtatgttcctgtcatccttttctgagactgtagcatttttcttaggagcattgtccgtgatgccagccgtgcacaccttctctctctttgcgggattggcagtcttcattgactttcttctgcagattacctgtttcgtgagtctcttggggttagacattaaacgtcaagagaaaaatcggctagacatcttttgctgtgtcagaggtgctgaagatggaacaagcgtccaggcctcagagagctgtttgtttcgcttcttcaaaaactcctattctccacttctgctaaaggactggatgagaccaattgtgatagcaatatttgtgggtgttctgtcattcagcatcgcagtcctgaacaaagtagatattggattggatcagtctctttcgatgccagatgactcctacatggtggattatttcaaatccatcagtcagtacctgcatgcgggtccgcctgtgtactttgtcctggaggaagggcacgactacacttcttccaaggggcagaacatggtgtgcggcggcatgggctgcaacaatgattccctggtgcagcagatatttaacgcggcgcagctggacaactatacccgaataggcttcgccccctcgtcctggatcgacgattatttcgactgggtgaagccacagtcgtcttgctgtcgagtggacaatatcactgaccagttctgcaatgcttcagtggttgaccctgcctgcgttcgctgcaggcctctgactccggaaggcaaacagaggcctcaggggggagacttcatgagattcctgcccatgttcctttcggataaccctaaccccaagtgtggcaaagggggacatgctgcctatagttctgcagttaacatcctccttggccatggcaccagggtcggagccacgtacttcatgacctaccacaccgtgctgcagacctctgctgactttattgacgctctgaagaaagcccgacttatagccagtaatgtcaccgaaaccatgggcattaacggcagtgcctaccgagtatttccttacagtgtgttttatgtcttctacgaacagtacctgaccatcattgacgacactatcttcaacctcggtgtgtccctgggcgcgatatttctggtgaccatggtcctcctgggctgtgagctctggtctgcagtcatcatgtgtgccaccatcgccatggtcttggtcaacatgtttggagttatgtggctctggggcatcagtctgaacgctgtatccttggtcaacctggtgatgagctgtggcatctccgtggagttctgcagccacataaccagagcgttcacggtgagcatgaaaggcagccgcgtggagcgcgcggaagaggcacttgcccacatgggcagctccgtgttcagtggaatcacacttacaaaatttggagggattgtggtgttggcttttgccaaatctcaaattttccagatattctacttcaggatgtatttggccatggtcttactgggagccactcacggattaatatttctccctgtcttactcagttacataggtaagagttctcatcttaaaagggtggcacaatagaaggacattactgaaagggaattctatcctgaggcattcttttcaagtatttgaactcatactaatggtcatttgataatgataaatgatactgagtaaaaaaatttcttctaaaaga

SEQ ID NO: 401364 - DNA, 2848 bp, Homo sapiens
tttgctcctgctcctccgctcctcctgcgcggggtgctgaaacagcccggggaagtagagccgcctccggggagcccaaccagccgaacgccgccggcgtcagcagccttgcgcggccacagcatgaccgctcgcggcctggcccttggcctcctcctgctgctactgtgtccagcgcaggtgttttcacagtcctgtgtttggtatggagagtgtggaattgcatatggggacaagaggtacaattgcgaatattctggcccaccaaaaccattgccaaaggatggatatgacttagtgcaggaactctgtccaggattcttctttggcaatgtcagtctctgttgtgatgttcggcagcttcagacactaaaagacaacctgcagctgcctctacagtttctgtccagatgtccatcctgtttttataacctactgaacctgttttgtgagctgacatgtagccctcgacagagtcagtttttgaatgttacagctactgaagattatgttgatcctgttacaaaccagacgaaaacaaatgtgaaagagttacaatactacgtcggacagagttttgccaatgcaatgtacaatgcctgccgggatgtggaggccccctcaagtaatgacaaggccctgggactcctgtgtgggaaggacgctgacgcctgtaatgccaccaactggattgaatacatgttcaataaggacaatggacaggcaccttttaccatcactcctgtgttttcagattttccagtccatgggatggagcccatgaacaatgccaccaaaggctgtgacgagtctgtggatgaggtcacagcaccatgtagctgccaagactgctctattgtctgtggccccaagccccagcccccacctcctcctgctccctggacgatccttggcttggacgccatgtatgtcatcatgtggatcacctacatggcgtttttgcttgtgttttttggagcattttttgcagtgtggtgctacagaaaacggtattttgtctccgagtacactcccatcgatagcaatatagctttttctgttaatgcaagtgacaaaggagaggcgtcctgctgtgaccctgtcagcgcagcatttgagggctgcttgaggcggctgttcacacgctgggggtctttctgcgtccgaaaccctggctgtgtcattttcttctcgctggtcttcattactgcgtgttcgtcaggcctggtgtttgtccgggtcacaaccaatccagttgacctctggtcagcccccagcagccaggctcgcctggaaaaagagtactttgaccagcactttgggcctttcttccggacggagcagctcatcatccgggcccctctcactgacaaacacatttaccagccatacccttcgggagctgatgtaccctttggacctccgcttgacatacagatactgcaccaggttcttgacttacaaatagccatcgaaaacattactgcctcttatgacaatgagactgtgacacttcaagacatctgcttggcccctctttcaccgtataacacgaactgcaccattttgagtgtgttaaattacttccagaacagccattccgtgctggaccacaagaaaggggacgacttctttgtgtatgccgattaccacacgcactttctgtactgcgtacgggctcctgcctctctgaatgatacaagtttgctccatgacccttgtctgggtacgtttggtggaccagtgttcccgtggcttgtgttgggaggctatgatgatcaaaactacaataacgccactgcccttgtgattaccttccctgtcaataattactataatgatacagagaagctccagagggcccaggcctgggaaaaagagtttattaattttgtgaaaaactacaagaatcccaatctgaccatttccttcactgctgaacgaagtattgaagatgaactaaatcgtgaaagtgacagtgatgtcttcaccgttgtaattagctatgccatcatgtttctatatatttccctagccttggggcacatcaaaagctgtcgcaggcttctggtggattcgaaggtctcactaggcatcgcgggcatcttgatcgtgctgagctcggtggcttgctccttgggtgtcttcagctacattgggttgcccttgaccctcattgtgattgaagtcatcccgttcctggtgctggctgttggagtggacaacatcttcattctggtgcaggcctaccagagagatgaacgtcttcaaggggaaaccctggatcagcagctgggcagggtcctaggagaagtggctcccagtatgttcctgtcatccttttctgagactgtagcatttttcttaggagcattgtccgtgatgccagccgtgcacaccttctctctctttgcgggattggcagtcttcattgactttcttctgcagattacctgtttcgtgagtctcttggggttagacattaaacgtcaagaggtaagttggtgccaggattatagtctatttaatttgagtctagaatctagaggaagcagctagcgggtataacctttgtttccctctgtcccctcagaaaaatcggctagacatcttttgctgtgtcagaggtgctgaagatggaacaagcgtccaggcctcagagagctgtttgtttcgcttcttcaaaaactcctattctccacttctgctaaaggactggatgagaccaattgtggtatgcgcttatctgtggtttttctctttcctctcactgaaacagattatcacatgccttctaagaagccagacagcctgggaaggagattcttaaagctgttaaaatgtatct

SEQ ID NO: 401365 - DNA, 177 bp, Homo sapiens
gcatatggagttcgtgtttcccttcaagaggccttttgtaagatcttgcctcgtgaattacagcaagcatcttgtctcctttttcctttgggtttcctcttctagcaatgtacaatgcctgccgggatgtggaggccccctcaagtaatgacaaggccctgggactcctgtgtggga

SEQ ID NO: 401366 - DNA, 305 bp, Homo sapiens
caaatgattaaatttcagctctcacaaatgtggaaagtaatgctcaagagagaagaaaatcaatggcaaatgttagagtttaagataaaattctccatccaaattactgcatatggtgccatttgctccattttctccttcttcctaatgaggttactctaggacagctgtgaagattcttgtactcttattagtgagagactgccagtgaaaccaatatgtcatttgtcataaactttgagtcactgacccagaggtgagactaactgtataagaaataaacaaatgtgttctgcttgaccctg

SEQ ID NO: 401367 - DNA, 165 bp, Homo sapiens
aaattttagtctttttattaaaccagacattttattttcaggcagttacataaataaaaatttatatctctagctatacagattatcattgcagtaataataagaatattaaaacctgtaaataatcaaaaggttgttacaataaattatggcaagttcatatga

SEQ ID NO: 401368 - DNA, 573 bp, Homo sapiens
gtacatttccccaattggaaggctactgccttcaaaagttagctttgggtactgctttctcttatgtttacaagaaaaccacagccaaatgccttgcctgcccatctgtgccatattagacatctggacaaacttggcccttgtatgcacatcaacgtgatggattgcagatttgttctgtcaacttccacagaacattcactcaagatacagctctccaagaaaagtctctttacctgtgtttctaagaagctctttatctttgaatgcatgactcataaattggatacattacaagagcttaagaagcagatttatagcagggattctttggtaaatctattcatcctgaaaattcccttggttactcaatttagtgatatttaagtatactccctttgctattacataattgttgtaaacaatatatcattgcactcagtttttacagctgtttacaaattgggcaacataatttcaggcagaaattatcgaaaatgagaccagcctttaagccattttgtgaaagcttacttagaagtaatttttgaaaaaaaaaaaaaaaaactttac

SEQ ID NO: 401369 - DNA, 443 bp, Homo sapiens
agaccaggaccatgtagtcagccccattcacctaagtatatgttttcaggatgtgggaggaaacccgagtatccagatgaactggatatcatccaggcagacatggggagaatgtgcacactccatacagacagtgacctcagtcaggaatcagggtttcttatcaatgatataatgaaaagacattggaccggctgggcggtgtggcttacacctgtaatcctagcactttgggaggctgaggcgggtggatcacgaggtcagaagttcaagaccagcctggccaagatggcgaaaccccgtctctattaaaaatacaaaaattggccaggcacggtggctcacgcctgtaatcccagcactttgggaggctgaggcgggtggatcataaggtcagaatttcaagaccagcctggccaggatggtgaaaccccatctctact

SEQ ID NO: 401370 - DNA, 723 bp, Homo sapiens
  misc_feature (13)..(14): n is a, c, g, or t
tgcagtggctcanncctgtaatcccagcactttgggatatttaacaaagtattaatgcaaaaagaaaatcttggacaatacctcaaagtttaaaaaaatttaatttcacgttaatggaggcagggaagcaaagaaaataaaaggcaacacagacgccatggaaatgtgattatgtaagccatttacagttttaaaagaaaatccacacttactgagtactgtgtactatgtccaacaaacgatacgatataccaatagaaaaaaaagagacataatctaagtccacatcaacttaaaaatttagaaatggagggtagacaaatacataactattttacaaggaggaggctggctgtggtggctcatgcctgtaatcagcacactttgggtggctgatgcgtgcgcgcagatcacttgaggccaggagttcaagaccagccgggccaccatggcaaaacctattaaaaacacaaaaaattaggccgggtgcagtggctcaagcctgtaatcccagcactttgggagggagggttgaggcaggaagttgagaccacgcttacaaataggggaaactcgctctactaaaatgccccaaaaataccagcattgtggacatcccggatcccacttcttggaagctgaacacaaaatcttgatttggaggggaggttgcatgagttctattcaacactgtctccacccggccggagaggggattctctg

SEQ ID NO: 401371 - DNA, 597 bp, Homo sapiens
  misc_feature (13)..(14): n is a, c, g, or t
  misc_feature (553)..(553): n is a, c, g, or t
tgcagtggctcanncctgtaatcccagcactttgggaggccgaggagggcagatcacgaggtcaggagatcgagaccatcctggctaacacagggaaaccccatctctattaaaaatacaaaaaataggccgggcgcggtggctcacacctgtaatcccagcactttgggatatttaacaaagtattaatgcaaaaagaaaatcttggacaatacctcaaagtttaaaaaaatttaatttcacgttaatggaggcagggaagcaaagaaaataaaaggcaacacagacgccatggaaatgtgattatgtaagccatttacagttttaaaagaaaatccacacttactgagtactgtgtactatgtccaacaaacgatacgatataccaatagaacaaatacataactattttacaaggaggaggctggctgtggtggctcatgcctgtaatcagcacactttgggtggctgatgcgtgcgcgcagatcacttgaggccaggagttcaagaccagccgggccaccatggcaaaaccctatacacaataggccgnggttaggagaatgacaggcttaagattccccggtggattccgcg

SEQ ID NO: 401372 - DNA, 740 bp, Homo sapiens
gtgaaagaaagggttatgggctctagaatcagaagaattggagttacagaatgtcagctccaacttgtcctagaggagtgacttttggaaaatttggacttttggaaaaaattacattaatttttccccctcattcattaattgagttacaggtaaaaccacacagtgactaacatatatagattgctaaataaatggcaattatttatttatttactgggacaggtcttactgtagcacccaggctggagtgtagtagcgtgcagcctcggctcactgcaacctctgcctcccaggctcaagtgatcctcctgcctcagcctctggagtggctgggactacaggcacaagccagcacacccagctaattcttttgtattttttgtggagacggggtcttgttatgttgcccatgctggtctcctgagctcaaacagtctgcctgctcatgcctgtaatcccagcactttgggaggctgaggcgggcggatcatgaggtcaggagatcgagaccatcctggctaacacggtgaaaccctgtctctactaaaaatacaaaaaatcagccaggcacggtggtgggcgcctgtagtcccagctacttgggaggctgaggcaggagaatgacgtgaacccgggaggcggagcttgcagtgagccgagatatcgccactgcactccagcctgggcaacagaacgagactccgtctcaaaaaaaaaaaaaaaaaaaaaaaaaaacc

SEQ ID NO: 401373 - DNA, 198 bp, Homo sapiens
cggcaggtggggtgcttcttgcggcaggagatgacgctgcgcaggatatgaaggagtctggtcccctctgttttctgcaccttgactttccaagtgggacatgaaatgtcatttgcctcttctgtcttcaatgctgaggggaccctggggtcaagggaagagcaggcctttggagtcagaccttacctgttggagccg

SEQ ID NO: 401374 - DNA, 719 bp, Homo sapiens
  misc_feature (642)..(642): n is a, c, g, or t
tgtgtactctctggtccacacactgatttccccttttctgtttcatggggtgacttgctgaccttctctgtgcatggctagtagtactctattgactggcaagggttgtgtcttccacttgggtcttccaagctgctgaagaaagcaacacagaaagtatagctgacaataattatctgtcaaatgtatgtgaatcacagtgtggatggtcgacctgttgtttcttttttctctttgaaaggaagatttcagttttctctgcagccatggtactttataaattatttcctcttccatctcttaaaagtcactgttatttaccaccccattagctgtggatggggtgaaatgcccactcatgcagcacaggaggatacacagattgtcacacatcttttcaggagaccacacagcagtgggtagtgtagtattaaataaatgcctgaaatatgagctgggaatgcattgcacttcaaggaattttatccataggatgtaactgggaaagtgcagaagaatgcatatatatatagttgttcattgttacatgttttatgatagcaaaaaaaaattaaaaactccgagactaagtctctcctcgtgccgaattctgcccaaggggccaaaacgtgactcgcccgntccgcgcttgtttccccgtgcccgctccccgggccgtagacaagcatttcgaggagaagcccaagaggtgtgaagac

SEQ ID NO: 401375 - DNA, 559 bp, Homo sapiens
tttaaagtactaggcaccaaacagttgttcagtgggtctccaaaaattctgtagtgaagcctgattatactggaaagaggcagtgggtgccttaaggatggtttggttgtatcatcagacttaagtgcgggtgttagtttgggagtaattagttgagttgtactactgaatttggagggaataaaaccaacttttagagattttgattcttttagtaatactgataatctgaaaatataaaattacttgatgcgcaataattattacttgattttaaagaaatctcacacacccaaatagctacagtggtggtagtttcataaaagctaaaggtaacattctacagttgttggtcacttaggagagaaggaatattacaaatgatagcaattcagttcattctctttactgtataagtgtttgtgttttacttttcaaaaacttttgtataacatgtatctctaatatgtacaacctatttttattaaaaagttcattgtaaatgtaaagtttgggttactttggtgttccaaacaataaaaaagaatacacaaaaaaa

SEQ ID NO: 401376 - DNA, 397 bp, Homo sapiens
actgcactcccgtctgggtgacagggtgaaactccatctcaaaacacaaaaacaaatttctacagtaaacaaactgatagagagggaaagtagatccatagtctccaggggctgggatgagaggagaatgggaaatgactgctgacaggtacagggtttctttgggggattacttactaaaatgttatggaattacatagtagtgccgataattacatagctttgtagatacactaaaaccaatgaattgtacatttcataggtgaattttatggtttataaaagataacaatttaagcttttctttaaaatacagaaaacctgtagaataagaaaaatatttacaaatcatatcaagggattaatatccaaaacatatttttaaaacgcctagaat

SEQ ID NO: 401377 - DNA, 333 bp, Homo sapiens
gaaaagccacatagaacttttgactctctctactgttggctggaagccttactgacaacataaatcgttgattaacacattttttgtatgttagatcatcatgaaggtcttccccctcatcatcttcaaattgagtaggctgaagaggaggaggaagaggagtggttgggttggcattgctgtctaaagggtggtagaggtggaggaggtggaaggggaggctggagcagcagacacacttggtgtaacttttactgaagaaaattcttgtgtaagtggacctgtgcagttcaaacccttgttttcaaggttcaactgtgtgtgtgtgtggca

SEQ ID NO: 401378 - DNA, 251 bp, Homo sapiens
tttttttgctaattctgttaacacatgatcagccaaaatcagaatgaactaacttcttcagtctcagaactcccaccattccccacatatcggagcacagacagatacggtatcgctgcaggagaaacgtcaaccatcaggaaataagagtgacacatgcccatttcctgtatattcaagggtcagtccattaagaaaccacatgttagaatgtgggtcgcattccagtaatgcctcaaggtaaaacattt

SEQ ID NO: 401379 - DNA, 379 bp, Homo sapiens
atcattgttgtttttcctttaaaaagcccagttaagcaataaaaagtaatttaggttttgcacagaaacagtcccaaacaaccatgaagcagatctataaggctaacacagaaggcttgaaaattattgaaagcaaaagaaaaatcattccattgaacaataagctatctcttggacttactgtggttaaagaaccacaatattctttttcaaaataagatataccacaataaaataatcaaggcagtgcccaccagagccaaatgaagcacatgaaggaaaagggtattacatcttagtaatagttggatacgtttatatattagaaaggttgataaagatgatagggaaactacagtaaatctgtgtatacacatgt

SEQ ID NO: 401380 - DNA, 504 bp, Homo sapiens
  misc_feature (28)..(28): n is a, c, g, or t
  misc_feature (80)..(80): n is a, c, g, or t
tatcaaagtttacaacgcgcatagcatntgagccaccaagcccacctctaagcatggtcctaaagatagacctggggtcntgaagatggtcctggggtacacaagggcatggctagtgatgagaacaagacggggaggcaggttctgtgaactgtgggacaaccacgcagagcaccgggcagctactagaaggtgtggggtaatgagggaaagcacccaagataaattaattgaaaaaggccaggggacagcatcgctactgggatcccacgcgtgtagccaaggaaaaggacacacatggatgggtttatttataaagagaatttctggatggaatcctataaaacttttagcagtgactgcctctcagaaggaagagcggggatctgagggtgggagaagcttttctttgtgcgcccctttgtgatgtttaaattgtggttatgtgcgcacatagtcctttttttttccaatggacaataaagagaaacctttaatgactca

SEQ ID NO: 401381 - DNA, 418 bp, Homo sapiens
attcagaatacagcatggttaggagtaggatgcacataggggaatttcaggggaacccactccaagatccacatgtaggactcagcacatccagatacgggtgctctcgtaccttgttggtatccacctctgctctccttcattcagctatgttcattctcctgtgatcaacaagcaaagaatggtaaatccgttttctcttaagaatattgaaatatattagctccatatttgtcagttctttctttgtttttcttgtggagttcaaaaagcgattgtgaaatatagggatgaagagactacagacattgccagtgaatactctccgttccgtccttcctacccacccaaacaggtaacttgtgaaaatcaaattcaaagaaaaactccaattaaacttatttttgaggcaaggatt

SEQ ID NO: 401382 - DNA, 710 bp, Homo sapiens
ccctgttgtcttatattggatttcctaaaaatagactctgaggtggagacttatgtgcagaaggtctcttggcgaatgctccagggaggcgtgcgtgtaaggaagtgagacagacccacctcaggcccctgggacttccactggccagacgccctgtgcctacttgtgtcatgggatacagggcccatctcttcccatctccacactctgaccacacgctagtagcttgaaatcagccatggtgcaactattggcatcacaaaaatggacaaatgcttcaaactggggcctgacttattgttttgttgattgccaggcttaaaaagtgatggaaaggatgctaataatgcatattaaaccaaaaaagtgcgtcatgtctgtagctgtgacattgtgaatagcacaagcattgaggttacatgcttctgatatttgaaaacccttattggattcaacaaagaattcactcatgtcattgtctatcaggtgaagctctgatgcacattttttgctttcacttttgccttattcattaatataaacagaatgtcaatcaaccttcatgttgtgtctacgctcaatcatccctgatgaccctacgctgactacagatgcagaattcagcaaaaaccaatgaaagcattcggtgagaatcaatggctatatggagcttacaataaaccgtattgtgtattttattattacgtata

SEQ ID NO: 401383 - DNA, 290 bp, Homo sapiens
tctccagggaactgacttcttcctcctcatggtccacttgaaattccaggaaaaggaacagatgtgcaaggaattgcagcctggagaaacatagtgtatttggagacttgcatgtaaatggataaaatgtcaatcaaccttcatgttgtgtctacgctcaatcatccctgatgaccctacgctgactacagatgcagaattcagcaaaaaccaatgaaagcattcggtgagaatcaatggctatatggagcttacaataaaccgtattgtgtattttattattacgtata

SEQ ID NO: 401384 - DNA, 134 bp, Homo sapiens
attatatatataatttattatatgcatataaatagatgtataattttactttctatgctttgtatacttaatagaatgagtgtattaatgtattcctataatttctcatagcataatttgacattgtcttatat

SEQ ID NO: 401385 - DNA, 439 bp, Homo sapiens
actctgataattaaaaggattttatcttcataaggaaatcgacatttgctgtcaggatgccagaccacaattctatagaagcttttctctttttttttgattgatatggtttggctgtgtgtctccacccaaatctcatgtcgaattgtaatccccatatgtgaggggatgctcctggtgggaggtaattgggtcatgagggtggatttcctccttcctgtttttgtgatagtgagtgagttctcacgagatctgatggtttaaaagtgtatgacactttccccttcactctctgtctctcctgctctgccatggtaagatgtgcttgctttctcttcatcttccaccatgattgtaagtttcctgaggccttccaaccatgcttcctgtccagcatgtggaactggaactgtgagtcaattaaacctcttttattcat

SEQ ID NO: 401386 - DNA, 1018 bp, Homo sapiens
actgttactccatgttgaaggtaaaacagaggcacagagaggttatgtgacttgcccaaggtcacacagctggtaaggggtggagcctgtgattcagacccagtcagtctggctgcagagcatgagctctgaatcaaatgttctcctgcctccattcttaccttttagaaagatgacagcaagttgcatacgtgacctcctcacccccaggagtgtgtgtgtgcacatgtgtatatatatgcacacatacgcgcaccagtagctcagcaagggagggaggctcaggaatgggctcgtgggcctctgtgtgttgatggctgggtttgcagaacctagggagtccggcgtctgtgtgcgtgatgctcctcccttcgtccctccctgctcgcgtggttcccagtgggtggggtgccctgttgcctctggtttagagccgtgcaggatgttaccacagaccgtgtaccaggagtgttcacccaaacttgtgaagggccctggactcccaggaaggagctcagatctaggactgggagtggacggcggccgccggaggagtgagagggggcagtgcgcttgccatgcccggggcccgtcctcctgggcctctctcggcgcttgggcaacctgtgtattgcccacacgtgtgccgctgcttgcagctcctggccaccaccctcctctttgtgtctggacgaatctgactgctctgagcacctcttcagagtggaatcatacaggacagtgtctaccgcaactcccagcacacagcaagtgctcagcacacccggaacacagacttcttacctcctttcccattgtgggcaaaagatgagagaggagatctgagtgcagacatcgcgctggcttggccaagtgctctgttatctttagcaagatgaagagctttgtcaggtgggtaacaaaaaaaattctgacacaggccgggcgcggtggctcacgtctgtaatctcagcgctttgagaagtgtgtcagcccttgagaagacaccgggcaagct

SEQ ID NO: 401387 - DNA, 635 bp, Homo sapiens
gcaagtgtttagaagaagacatggttctttctctgtcttctttaaacaggttatatgcggttatatgcacataaaacaactagaaagatcttctaaggtaccatttatgcaggtgctggatagtatgatacttaaggaacaccagaaacgtgaagggtgatcatggagtagagagcatttacagtacttcttagccactagatgttaatgttcgttatgctgcaaactaaacaaatgctctgtaggttatatatacgtactgatagagatttatgttgtaaatgtgtagaaaaaggtctggaaggatacatatcaaatataactgtgattctgtcttacctctgaggagagctggttggggtggtctcatttttgttagaactaataaatatggtccatattcattttataaaatagttgacggtatctcacacttcattgcacagccaactgaatattaaggattttttaaatagttgaatgtttattgaatattttaaaaataatataaatacatatatatgtatacatatatacacataatgtgaataatgactgtcacctttaatgtacaggtgtgtattagtccattttcacactgctgataaaaacatacccaagactgggcaatttac

SEQ ID NO: 401388 - DNA, 298 bp, Homo sapiens
gctcgaccagtgagctgttattcatgccattgcactccagccagggcaacagaacaagaccctgcagcctcgacctcccaggctcaagcaatcctcctgtctcagcctcctaagtagctgaaactacaggcgcatgccaccacacctagctaacttttttattttttgtagagatgaggtctcactatgttgtccaggctggtctcgaactcctggcctcaactgatcctcccaccccagcctcccaagtgctgggattacaggcatcagccaccacgcccagccgaatagtatattt

SEQ ID NO: 401389 - DNA, 371 bp, Homo sapiens
aacgattatggccaagaagtcaccttaggggaaaaacataagaagaattcttgcttgcaagagagaaggaagcctatagggagagtgaggggagaggccgaaagagagagaaggaaaaaggataaaagagaaatagccaacaaggcggacacaagaaaaagggagagatgagagaaacaggagaggacaaggagacaagaagcagagaggcaagagacagggacagcaatgggactcggaaaggacatgggagagagctggaggaagctgacagagggaagggaagaaccccccgccgtcaaaggcaggactcaagaacgctgcctttcgtgcaagtgagatgggctccgctgcccgcgcccgcttgttct

SEQ ID NO: 401390 - DNA, 607 bp, Homo sapiens
  misc_feature (593)..(593): n is a, c, g, or t
attcagggagtacatatgcacgttcgttatgatggaatcagttgtaccccaaacctcagaattcagattttttaagtataattttatatatagattttgaattaattatgccataaccaattgttttttaatataattctatttttagtgcttgggcatatatattataggttatccctattttaatagaatatattattgtagaaaaataagtttcacgttacctgtgtcttaatggctgcatgaaaacttgtgtttatttttccctttcaaaaaatttgttggcttggaatgctttacaaaaattgtagaggatcacaaggtataattcagattgcagaaattacattggttgagcagaaaaaaatgatacatgtgacttggtgtttgagtaatggaaaccttcccaaggctttttcagaagtaaatggaaaaatatgcatttcactaatatcctagagaaagagagttattaatactaatttgggaaaaattataatagcatttaccgaaggatccaaatttttttaaataacagaagcatttaatcagtcctggcgtggtgctgcacccctgtagtcccaactacttgngaggttgaggcagg

SEQ ID NO: 401391 - DNA, 606 bp, Homo sapiens
tgtgggttaattattctgggtgttccacctgccactcattccactctaagaacctataccttggagtgagtgggacaggagatataaatctcttctccccagatagtttctgtgtctctctcagtgtgggcaactcgttacacaagtgtgattctgacgtttgtagctaaggtaatttaaaaaatgaaataaaatcatggttcctgaacaaggccaatgacttcatctggtggtggagagaaaaatctagctgcactagaatgacattctgttggactgagactctgtcagccttcaatgtagagcctttctaaaggattttcaagggaaactctgactacttacactgttcgcctcacgtgctgacttaaaacctaaccactgtgtaagatgcaactctagtctgtggacctaaagttcagatttcaaacttaagggttaaaaattttccatggcacatttttctaaattaaaaatatacaaatagaggatgatctctataaatacaaaacatttccatgagattccaaatgcaaggccagtaattccactctaaattttctcatgaaagaaaacatacaggatggcaagattacagctgggata

SEQ ID NO: 401392 - DNA, 595 bp, Homo sapiens
atgtgtgcagctattagtaaaataaataatttataaagatttagtgggatgacatcagccagaatggtgaaataggatctatgcctgaaatcctctcctccataaaatcaacaagaacagtggcaaaaatcatcaatatcgactttttcagaactctggaaattaaccaaaggcttgcaacaatttgtagagtgtttactaaagaaaaacagctggatttttgtaacaacagcaaggtttttggcattttaacttgccatagtcctatacttttctcccagccccgtgtcagcctagataaccacagtaatcacagtgaaaaatagtgacttagcaactggtagaggggacaaaacagaatttgacccactccaaagccagacaactgttattattcgacatgtttgatagttccttggaaaatctcactcatgaggcttattgttatttagtctgacttcaaactcaccaagtatgtttgtcaaatgttcagtggcaattttaaatatcacagctatcagaggcatgtgtgggaacttaatccccaatagtaaagggattaatgccattatctggggaatgggttcattataaa

SEQ ID NO: 401393 - DNA, 405 bp, Homo sapiens
caatggagaacagctctttgcagatttatttgaagaggagagggcaatgtgccatcagatcattggcccacaacacaaccagacacatgtgtcattgctttggggtccctttgctgtgtctcccttgaggcaccatggtctttccgggaagtaacgttgaaatctgaccatgagggaaaatggacagatgatgaagagaagataagaaagcttgagtacaaacacttctggctcttccttacaggcaaccatgatgctaacagcgtacgtttcttagaaaacccatgtatctaatccaacgcttgcaagagtcttggtatggcggattttctgaaaaaggcttaatttgaagtatcattttatgtttcttaatttgaaattcaaatatacatgtatgcctataga

SEQ ID NO: 401394 - DNA, 822 bp, Homo sapiens
tggcaagcccagcacacagcggggaagttggtcttgcagaaagagtggaaagatgtgccttgaccaccagagggcatgcatttgagcagaaaatcacaggcctctgctcaaaaccaaggatagtcttgtcctaggcaacagggtaggaagagcaccaagtcctggaattaccactggccccacgatgagactctgaacatgcccgcacccctccctaggcctcctgtttaccttctgcagagcaaggaattggggccagacagcgcccaagctccattgtaccaattacgcccaatggccacagcccaccgcctggtccccaaagactgtgggagctctgtgcactgggtgtggcctctgatgtcacttctcctgaataagtggtatgtgaggctcctggactcatcacatcgtggttaagactaaggcctctggggccggactgcttgagttcaaatcccagacctatactcatcagaggcgtaggcttggacacattgcttatcctcctttgcctcagtttcctcctatcttaaatcaggctgctagccacctgccttcgtgtgaagtgcgtgaatctgcacaacgcatgtagacggtgcatggcactgagtgagcactcaataaacgtcagcctcttgacgcttttcaggcctgggactctgaatagaacttaacgaagttcatggcaggaaagggtacagagtccaagagaaaagagacaaccagacaatggagataatctgacttgatgtcattgtaaagccataaaccaggccagcgttcccctgagggtgctctgtaaaagaaagggttttgtga

SEQ ID NO: 401395 - DNA, 518 bp, Homo sapiens
ggcttttattggaggcgacagtgccagaatttcaaagacgcattttaagagactcctttatggggttccccagcaaacgctgaagccatcaacgtgaaaccagccagtgagtgtcgggatggacggcccggggccgggcagaaactccagctcagctgtgtggctctgcaggcagcagatcggcccccactgcaccgtctccagagaaccagagcaaacgcccatgtgccccgttgacagtaccgcggatgaagacactgcattgtaccaggagagttcactgttttattcattgaattttgattacgtgttatcctaaggagatacactgatttcataagcaaggcaggaagaataaaccgcaggaggaagctgctgtcatttctcaggcccggcttcgtttcaggaaacaagggttctgctcaagcacaagcaccgttcctgaagtagatgcatggaagtcattaggggagatgtctgcagcccctgagatggaagaagcctgtcgggagcggccg

SEQ ID NO: 401396 - DNA, 499 bp, Homo sapiens
agaatgttagactgtaagacacttacaatctggcattaagtctcgtttattaagataagggggggattgaagccccattgtttttattttgagaaaatgtatctaagacatgtaatattttataatgacatttggagttttcatttacgataataactttttgtaatgtcagctaattctaattgagacaatactatgttgtagtgattaggaattggaaatttttctgtgaaagaaatagcagaaggtgaaatgtatttctttgtactgtgtgtgtgtgtgtgtgcactgttttagtagcatataatcctttacgttctcatgaaactaaaaattaagggagcaatgtctaaggaattatttcatcctgggaaatatggacagatttagagcaaattcagtaattgtattcagtctttgagataggaaagtttgttataaacatcagttgggcacataatgtaaacatttaattattaaattcagaaaagtttaactt

SEQ ID NO: 401397 - DNA, 254 bp, Homo sapiens
ctaatttggaatctatatgctttttttttttgagggttactctagctattacaatatgcatacttgttatagtctgaagtcagtctcttgtcctctttctgacaatcaaagatctttacacttttataatttatatacaattgtctattttgataatatatatgtgtttctatgtgaatatatgtacatacatatctttgaagagatagtagatttgcatgtagttgtaagagttaatactgagacatcctgtg

SEQ ID NO: 401398 - DNA, 1280 bp, Homo sapiens
  misc_feature (1280)..(1280): n is a, c, g, or t
gacgaagacttcatgccatgcaaacacggggaaaatcaaaactgcccaagccaaaggatctgaaattatggcctgtcagagcttctgggttttactcttgacaaatgattaccttttaaagaaataaccggccgggcacagtggcttacccctgtaatcccagcattttgggaggccgaggtgggcggatcacctgaggttgggagttcgaggccagcctgaccaacatggagaaaccccctctctacttaaaatacaaaaaattagccggactgtcttaaaaaaaaaaaagagtccaaaccccaccccctacccccgctaatccccactcttccatcccatttgggtctgaacaggtcatcgccgcctcatttcctcggcggccaattgggggcgccagagagcagcggacgcccctccaccgactttccagcgcttgggaggcggagtgagacgccctgtaatcccagccctgcctttcgctggttgtgagctcttggccatgttactgacctctcagagcctcagcgctgggttaaaatagaactggtgtcctgataatgggtgaggccccagtggaataacgcacgtgaaatacacatactgggcgtccacttaattaaggccctatcctcattgcctgccaagttcccaaaagagggatgggtttgggtgggaggttgagaggggaggttcccggcctttccagcagtgccccctctgccgtctgggcctggcagatgcgtgttgatcccagcgttttctccagcgtgcgctcgcttgctaggtcgacgtgatcagtgagctttctccgcccgtgttctcctgagtgtcctgagagcagcccgtttctgcccctcttgcgattacaaagtcaagcccagagcctgacccacagtagtgctcaataaaggcttagaaaaagctcggaaaaaaccaaaaaacgcaaaaacaacaacacacaccacacggcgaccccgccccaaaagctcccccacaggggccccccaccacgcgaacggcgtaatcacgcggaatttactcgctgcacaaaagcggggccccccccatgcgtgaagcgctggagatctaaccacacgcaccaggagcgcccgagcgcgagacaacgattgacagacacacccacactgaatcgtgcgtcaaacactgggcaaagcctcaggggacaagtctggagagcagaaagagagcaccgaaacaatagatgactgcgggggcacaacccacggagtcgggagccgaaacttatccctcacggn

SEQ ID NO: 401399 - DNA, 1057 bp, Homo sapiens
  misc_feature (1057)..(1057): n is a, c, g, or t
gacgaagacttcatgccatgcaaacacggggaaaatcaaaactgcccaagccaaaggatctgaaattatggcctgtcagagcttctgggttttactcttgacaaatgattaccttttaaagaaataaccggccgggcacagtggcttacccctgtaatcccagcattttgggaggccgaggtgggcggatcacctgaggttgggagttcgaggccagcctgaccaacatggagaaaccccctctctacttaaaatacaaaaaattagccggactgtcttaaaaaaaaaaaagagtccaaaccccaccccctacccccgctaatccccactcttccatcccatttgggtctgaacaggtcatcgccgcctcatttcctcggcggccaattgggggcgccagagagcagcggacgcccctccaccgactttccagcgcttgggaggcggagtgagacgccctgtaatcccagccctgcctttcgctggttgtgagctcttggccatgttactgacctctcagagcctcagcgctgggttaaaatagaactggtgtcctgataatgggtcgacgtgatcagtgagctttctccgcccgtgttctcctgagtgtcctgagagcagcccgtttctgcccctcttgcgattacaaagtcaagcccagagcctgacccacagtagtgctcaataaaggcttagaaaaagctcggaaaaaaccaaaaaacgcaaaaacaacaacacacaccacacggcgaccccgccccaaaagctcccccacaggggccccccaccacgcgaacggcgtaatcacgcggaatttactcgctgcacaaaagcggggccccccccatgcgtgaagcgctggagatctaaccacacgcaccaggagcgcccgagcgcgagacaacgattgacagacacacccacactgaatcgtgcgtcaaacactgggcaaagcctcaggggacaagtctggagagcagaaagagagcaccgaaacaatagatgactgcgggggcacaacccacggagtcgggagccgaaacttatccctcacggn

SEQ ID NO: 401400 - DNA, 978 bp, Homo sapiens
cgttcgtcagcggcgagtggcctcgcggcgccggattcgtcgctccgccaagagtgcgcctgcgcggtcgctggggctcgcacttcagcttcccctcccccggcgccctctggggctccgagcccggcgggaccatgttcaccagcaccggctccagtgggctctatggagtttctccctgtcgtccaggctggagtacaatggtgtgatctcggctcactgcagtctctgtctcctgggttcaaacaaggcgcctctgtcgaagagccttctgctggtccccagtgccctctccctcctgctcgccctcctcctgcctcactgccagaagctctttgtgtatgaccttcacgcagtcaagaacgacttccagatttggaggttgatatgtggaagaataatttgccttgatttgaaagatactttctgcagtagtctgcttatttataattttaggatatttgaaagaagatatggaagcagaaaatttgcatcctttttgctgggttcctgggttttgtcagccttatttgactttctcctcattgaagctatgcagtatttctttggcatcactgcagctagtaatttgccttctggattcctggcacctgtgtttgctctgtttgtaccattttactgctccataccaagagtccaagtggcacacaaagttctggtctcccgcacgtccatcaccaaaccaagaacaatgcattcttactactacttggggcaactagcagccttacatcatcaccctaccatgaggatccccgtaagcagatcatgggccacattggaaagacccacctacaacactggagaacactataattgctatcccgtgaacctcatcgtcagacactaacgcgaagcacacccacataacacacaaaccaataccaccacaaaaacgcacggaccacaaatttcccagtaggcactgcacacccatagacactatctccacccaca

SEQ ID NO: 401401 - DNA, 1168 bp, Homo sapiens
  misc_feature (1009)..(1009): n is a, c, g, or t
  misc_feature (1019)..(1020): n is a, c, g, or t
tgcttctttctcttggacgtagttgtagctcctgtgctgggcatcttaccgtgacatccttggcacgcatttgattcactgattcattgcagtggtgaaactgacatagcttgggggccacgaggagagccaccagctgccaggaggagtcagagaagtcttgtgggaagagctgagcagtgttgcacaagctgagtttcctaggcaggaaagtggaaagcagaacctgcgtcagtggagagtcaaagcagccagcgtgttcagggagcagctgtgtggatttttgagagggccttgtgtgtgttgggccagatgaggggaagcagagaggaggacagtggtggcagactccagtgatgaaagcgaactggggagctttgccatcacatctttatgaagcattttatctttggatactggagcctatggaaggaagggtttttttggtttgttttttatttttttttgtttttgtttgtttgtttgttttttgagacggagtctcgctctgtcgcccaggctggagtgcagtggcgcgatcttggctcactgcaagctctgcctcctggattcacgccattctcctgcctcagcctcccgagtagtagctgggactacaggtgcccaccaccaagcccggctaattttatgtatttttagtagagacggggtttcaccgtgttagccaggatggtctcgatctcctgacctcatgatccgcccgcctcggcctcccaaagtgctgggattacaggcgtgagacactacgcccggcggaaggaagggtttttaagcaagggagtgttgtgatcagagttgtattttaggaagagagtactgccaacaatgttaagaaatggattagagagaagcaagactcctggcacctgtgtttgctctgtttgtaccattttactgctccataccaagagtccaagtggcacaaattctgggtccgttgtccatcacaaacaagacattgatttatatattgggactgcagtttaancctggtctannttggattgggcctaatgggtttaccacacgaacggatggttggggccgtcggcccaaaaggaaagaggaggtggcgggcatctccatgccaggagggcaaacccgggaaaacaggcgttctctccagaaagataaggggggaaagcca

SEQ ID NO: 401402 - DNA, 832 bp, Homo sapiens
atattctcactccctccccccaccccatacaacacataaaaaaacaaatctcctggcacctgtgtttgctctgtttgtaccattttactgctccataccaagagtccaagtggcacaaattctgggtccgttgtccatcacaaacaagacattgatttatatattgggactgcagcttttcacctctggttcctacatctggattgtagccataagtggacttatgtccggcttgtgcctccaccaaaaaccgttccacgcagcataatgcgctctgcatccagagatggatggaaaaaaactgctctagcacactcagcgctccaccccgtattcttgcacaacccaccttcgtagccaaaacttttcttagcagttaccatttacatacacagacatcatacaacgatattcccttgaaccttctctgatacatattcaaatacaacccgtcactagtcaccacaccccccctataacaataatcaatacaatcccctcaccctaacaccaccagccgctgtcctccacaacaggtaacgttacatgccaaacaatatgcaaatgaaccacacattcatagacatagatcgcacaccacctttcccaatacctacctaagccattcagtatcgcgagcacctcccgccccttacactcaagcaaagcatctacactttcgtccacgcacatatcgaccacataacgtcgcggtcgcattgtgacccaacgaaaagcacctcccagcaataacacatattcactccgaactcagccgcaaaaacctcgcccaccatcatcacttatattgacacaccaactgccactcgcg

SEQ ID NO: 401403 - DNA, 2342 bp, Homo sapiens
cgttcgtcagcggcgagtggcctcgcggcgccggattcgtcgctccgccaagagtgcgcctgcgcggtcgctggggctcgcacttcagcttcccctcccccggcgccctctggggctccgagcccggcgggaccatgttcaccagcaccggctccagtgggctctatggagtttctccctgtcgtccaggctggagtacaatggtgtgatctcggctcactgcagtctctgtctcctgggttcaaacaaggcgcctctgtcgaagagccttctgctggtccccagtgccctctccctcctgctcgccctcctcctgcctcactgccagaagctctttgtgtatgaccttcacgcagtcaagaacgacttccagatttggaggttgatatgtggaagaataatttgccttgatttgaaagatactttctgcagtagtctgcttatttataattttaggatatttgaaagaagatatggaagcagaaaatttgcatcctttttgctgggttcctgggttttgtcagccttatttgactttctcctcattgaagctatgcagtatttctttggcatcactgcagctagtaatttgccttctggattcctggcacctgtgtttgctctgtttgtaccattttactgctccataccaagagtccaagtggcacaaattctgggtccgttgtccatcacaaacaagacattgatttatatattgggactgcagcttttcacctctggttcctacatctggattgtagccataagtggacttatgtccggtctgtgctacgacagcaaaatgttccaggtgcatcaggtgctctgcatccccagctggatggcaaaattcttttcttggacacttgaacccatcttctcttcttcagaacccaccagcgaagccagaattgggatgggagccacgctggacatccagagacagcagagaatggagctgctggaccggcagctgatgttctctcagtttgcacaagggaggcgacagagacagcagcagggaggaatgatcaattggaatcgtctttttcctcctttacgtcagcgacaaaacgtaaactatcagggcggtcggcagtctgagccagcagcgccccctctagaagtttctgaggaacaggtcgcccggctcatggagatgggattttccagaggtgatgctttggaagccctgagagcttcaaacaatgacctcaatgtcgccaccaacttcctgctgcagcactgatagtcccaggccaacactgggaccggaccggcagccgagtgacagtgcgtggtccccaccatcagatcagcccggggaccgagcatctctggtgctgatgttcttgtgggaagagggaggttccaccgcacccctgccctcaaccgcaagactgttgccgttttagtgtggagataagtttgccattacattagcatgtattttctatctatattttttattgggcattttccctaggttggagagtcagcactcgttttgaatgtgtttaaaatgcattaaaatggaagatttctgcaggcagttgaatggcactccagatggggaattgctgtaaccctcttactgtaacatgtcatctcctgcgtcgtgatggggagagggtaatgttacttcacaaaggacatgtcagatccttcttcatggacttttttagttactgttttttctctcaaacttgttttcgaatctcctgggagtgagggagaaacagggagctgaatcctcccccaagctgttccaggccagaggactctgcagtaccttctcctacatctagtaacaaagaatggtgataaccatgcactggttcaaggttctggagttctccatgaaacttgggttaattttgctcagagtatccggagttagccactaggctgcgggtgaaatgggatggagtagaacaacagcaggcttcctggagccacatgggctgactagggcactctgtggctggcctggcacgggctcagcccaggaagaggagaaacgatcccttgcctgcccctccctgtggcagggctaactgcctggccctcctggctcgcagccagccagccccctggcagcaggttctcctcagggcttgggtcttcaacctgtggcgacaggaggcagggcagactgtggaggacaggatgcaggtcagggagagggaaggcaggggtggaccgccatgagcatgaaaagacccgaagcaagttgactcttgcaatgtgcaactgttatgttctgcaaaatgagcaacgatgtatcaaattgatgcaaatttagatgttgatacttacaataaagtttttaatgtgtttta

SEQ ID NO: 401404 - DNA, 2032 bp, Homo sapiens
cgttcgtcagcggcgagtggcctcgcggcgccggattcgtcgctccgccaagagtgcgcctgcgcggtcgctggggctcgcacttcagcttcccctcccccggcgccctctggggctccgagcccggcgggaccatgttcaccagcaccggctccagtgggctctacaaggcgcctctgtcgaagagccttctgctggtccccagtgccctctccctcctgctcgccctcctcctgcctcactgccagaagctctttgtgtatgaccttcacgcagtcaagaacgacttccagcctggcacctgtgtttgctctgtttgtaccattttactgctccataccaagagtccaagtggcacaaattctgggtccgttgtccatcacaaacaagacattgatttatatattgggactgcagcttttcacctctggttcctacatctggattgtagccataagtggacttatgtccggtctgtgctacgacagcaaaatgttccaggtgcatcaggtgctctgcatccccagctggatggcaaaattcttttcttggacacttgaacccatcttctcttcttcagaacccaccagcgaagccagaattgggatgggagccacgctggacatccagagacagcagagaatggagctgctggaccggcagctgatgttctctcagtttgcacaagggaggcgacagagacagcagcagggaggaatgatcaattggaatcgtctttttcctcctttacgtcagcgacaaaacgtaaactatcagggcggtcggcagtctgagccagcagcgccccctctagaagtttctgaggaacaggtcgcccggctcatggagatgggattttccagaggtgatgctttggaagccctgagagcttcaaacaatgacctcaatgtcgccaccaacttcctgctgcagcactgatagtcccaggccaacactgggaccggaccggcagccgagtgacagtgcgtggtccccaccatcagatcagcccggggaccgagcatctctggtgctgatgttcttgtgggaagagggaggttccaccgcacccctgccctcaaccgcaagactgttgccgttttagtgtggagataagtttgccattacattagcatgtattttctatctatattttttattgggcattttccctaggttggagagtcagcactcgttttgaatgtgtttaaaatgcattaaaatggaagatttctgcaggcagttgaatggcactccagatggggaattgctgtaaccctcttactgtaacatgtcatctcctgcgtcgtgatggggagagggtaatgttacttcacaaaggacatgtcagatccttcttcatggacttttttagttactgttttttctctcaaacttgttttcgaatctcctgggagtgagggagaaacagggagctgaatcctcccccaagctgttccaggccagaggactctgcagtaccttctcctacatctagtaacaaagaatggtgataaccatgcactggttcaaggttctggagttctccatgaaacttgggttaattttgctcagagtatccggagttagccactaggctgcgggtgaaatgggatggagtagaacaacagcaggcttcctggagccacatgggctgactagggcactctgtggctggcctggcacgggctcagcccaggaagaggagaaacgatcccttgcctgcccctccctgtggcagggctaactgcctggccctcctggctcgcagccagccagccccctggcagcaggttctcctcagggcttgggtcttcaacctgtggcgacaggaggcagggcagactgtggaggacaggatgcaggtcagggagagggaaggcaggggtggaccgccatgagcatgaaaagacccgaagcaagttgactcttgcaatgtgcaactgttatgttctgcaaaatgagcaacgatgtatcaaattgatgcaaatttagatgttgatacttacaataaagtttttaatgtgtttta

SEQ ID NO: 401405 - DNA, 2332 bp, Homo sapiens
cgttcgtcagcggcgagtggcctcgcggcgccggattcgtcgctccgccaagagtgcgcctgcgcggtcgctggggctcgcacttcagcttcccctcccccggcgccctctggggctccgagcccggcgggaccatgttcaccagcaccggctccagtgggctctacaaggcgcctctgtcgaagagccttctgctggtccccagtgccctctccctcctgctcgccctcctcctgcctcactgccagaagctctttgtgtatgaccttcacgcagtcaagaacgacttccagatttggaggttgatatgtggaagaataatttgccttgatttgaaagatactttctgcagtagtctgcttatttataattttaggatatttgaaagaagatatggaagcagaaaatttgcatcctttttgctgggttcctgggttttgtcagccttatttgactttctcctcattgaagctatgcagtatttctttggcatcactgcagctagtaatttgccttctggattcctggcacctgtgtttgctctgtttgtaccattttactgctccataccaagagtccaagtggcacaaattctgggtccgttgtccatcacaaacaagacattgatttatatattgggactgcagcttttcacctctggttcctacatctggattgtagccataagtggacttatgtccggtctgtgctacgacagcaaaatgttccaggtgcatcaggtgctctgcatccccagctggatggcaaaattcttttcttggacacttgaacccatcttctcttcttcagaacccaccagcgaagccagaattgggatgggagccacgctggacatccagagacagcagagaatggagctgctggaccggcagctgatgttctctcagtttgcacaagggaggcgacagagacagcagcagggaggaatgatcaattggaatcgtctttttcctcctttacgtcagcgacaaaacgtaaactatcagggcggtcggcagtctgagccagcagcgccccctctagaagtttctgaggaacaggtcgcccggctcatggagatgggattttccagaggtgatgctttggaagccctgagagcttcaaacaatgacctcaatgtcgccaccaacttcctgctgcagcactgatagtcccaggccaacactgggaccggaccggcagccgagtgacagtgcgtggtccccaccatcagatcagcccggggaccgagcatctctggtgctgatgttcttgtgggaagagggaggttccaccgcacccctgccctcaaccgcaagactgttgccgttttagtgtggagataagtttgccattacattagcatgtattttctatctatattttttattgggcattttccctaggttggagagtcagcactcgttttgaatgtgtttaaaatgcattaaaatggaagatttctgcaggcagttgaatggcactccagatggggaattgctgtaaccctcttactgtaacatgtcatctcctgcgtcgtgatggggagagggtaatgttacttcacaaaggacatgtcagatccttcttcatggacttttttagttactgttttttctctcaaacttgttttcgaatctcctgggagtgagggagaaacagggagctgaatcctcccccaagctgttccaggccagaggactctgcagtaccttctcctacatctagtaacaaagaatggtgataaccatgcactggttcaaggttctggagttctccatgaaacttgggttaattttgctcagagtatccggagttagccactaggctgcgggtgaaatgggatggagtagaacaacagcaggcttcctggagccacatgggctgactagggcactctgtggctggcctggcacgggctcagcccaggaagaggagaaacgatcccttgcctgcccctccctgtggcagggctaactgcctggccctcctggctcgcagccagccagccccctggcagcaggttctcctcagggcttgggtcttcaacctgtggcgacaggaggcagggcagactgtggaggacaggatgcaggtcagggagagggaaggcaggggtggaccgccatgagcatgaaaagacccgaagcaagttgactcttgcaatgtgcaactgttatgttctgcaaaatgagcaacgatgtatcaaattgatgcaaatttagatgttgatacttacaataaagtttttaatgtgttttactcttcagtatttttctatcagacttgtacaaataaagccttgttccaggctatacatatttaccagtca

SEQ ID NO: 401406 - DNA, 2222 bp, Homo sapiens
cgttcgtcagcggcgagtggcctcgcggcgccggattcgtcgctccgccaagagtgcgcctgcgcggtcgctggggctcgcacttcagcttcccctcccccggcgccctctggggctccgagcccggcgggaccatgttcaccagcaccggctccagtgggctctacaaggcgcctctgtcgaagagccttctgctggtccccagtgccctctccctcctgctcgccctcctcctgcctcactgccagaagctctttgtgtatgaccttcacgcagtcaagaacgacttccagatttggaggttgatatgtggaagaataatttgccttgatttgaaagatactttctgcagtagtctgcttatttataattttaggatatttgaaagaagatatggaagcagaaaatttgcatcctttttgctgggttcctgggttttgtcagccttatttgactttctcctcattgaagctatgcagtatttctttggcatcactgcagctagtaatttgccttctggattcctggcacctgtgtttgctctgtttgtaccattttactgctccataccaagagtccaagtggcacaaattctgggtccgttgtccatcacaaacaagacattgatttatatattgggactgcagcttttcacctctggttcctacatctggattgtagccataagtggacttatcaggtgctctgcatccccagctggatggcaaaattcttttcttggacacttgaacccatcttctcttcttcagaacccaccagcgaagccagaattgggatgggagccacgctggacatccagagacagcagagaatggagctgctggaccggcagctgatgttctctcagtttgcacaagggaggcgacagagacagcagcagggaggaatgatcaattggaatcgtctttttcctcctttacgtcagcgacaaaacgtaaactatcagggcggtcggcagtctgagccagcagcgccccctctagaagtttctgaggaacaggtcgcccggctcatggagatgggattttccagaggtgatgctttggaagccctgagagcttcaaacaatgacctcaatgtcgccaccaacttcctgctgcagcactgatagtcccaggccaacactgggaccggaccggcagccgagtgacagtgcgtggtccccaccatcagatcagcccggggaccgagcatctctggtgctgatgttcttgtgggaagagggaggttccaccgcacccctgccctcaaccgcaagactgttgccgttttagtgtggagataagtttgccattacattagcatgtattttctatctatattttttattgggcattttccctaggttggagagtcagcactcgttttgaatgtgtttaaaatgcattaaaatggaagatttctgcaggcagttgaatggcactccagatggggaattgctgtaaccctcttactgtaacatgtcatctcctgcgtcgtgatggggagagggtaatgttacttcacaaaggacatgtcagatccttcttcatggacttttttagttactgttttttctctcaaacttgttttcgaatctcctgggagtgagggagaaacagggagctgaatcctcccccaagctgttccaggccagaggactctgcagtaccttctcctacatctagtaacaaagaatggtgataaccatgcactggttcaaggttctggagttctccatgaaacttgggttaattttgctcagagtatccggagttagccactaggctgcgggtgaaatgggatggagtagaacaacagcaggcttcctggagccacatgggctgactagggcactctgtggctggcctggcacgggctcagcccaggaagaggagaaacgatcccttgcctgcccctccctgtggcagggctaactgcctggccctcctggctcgcagccagccagccccctggcagcaggttctcctcagggcttgggtcttcaacctgtggcgacaggaggcagggcagactgtggaggacaggatgcaggtcagggagagggaaggcaggggtggaccgccatgagcatgaaaagacccgaagcaagttgactcttgcaatgtgcaactgttatgttctgcaaaatgagcaacgatgtatcaaattgatgcaaatttagatgttgatacttacaataaagtttttaatgtgtttta

SEQ ID NO: 401407 - DNA, 2277 bp, Homo sapiens
cgttcgtcagcggcgagtggcctcgcggcgccggattcgtcgctccgccaagagtgcgcctgcgcggtcgctggggctcgcacttcagcttcccctcccccggcgccctctggggctccgagcccggcgggaccatgttcaccagcaccggctccagtgggctctacaaggcgcctctgtcgaagagccttctgctggtccccagtgccctctccctcctgctcgccctcctcctgcctcactgccagaagctctttgtgtatgaccttcacgcagtcaagaacgacttccagatttggaggttgatatgtggaagaataatttgccttgatttgaaagatactttctgcagtagtctgcttatttataattttaggatatttgaaagaagatatggaagcagaaaatttgcatcctttttgctgggttcctgggttttgtcagccttatttgactttctcctcattgaagctatgcagtatttctttggcatcactgcagctagtaatttgccttctggattcctggcacctgtgtttgctctgtttgtaccattttactgctccataccaagagtccaagtggcacaaattctgggtccgttgtccatcacaaacaagacattgatttatatattgggactgcagcttttcacctctggttcctacatctggattgtagccataagtggacttatgtccggtctgtgctacgacagcaaaatgttccaggtgcatcaggtgctctgcatccccagctggatggcaaaattcttttcttggacacttgaacccatcttctcttcttcagaacccaccagcgaagccagaattgggatgggagccacgctggacatccagagacagcagagaatggagctgctggaccggcagctgatgttctctcagtttgcacaagggaggcgacagagacagcagcagggaggaatgatcaattggaatcgtctttttcctcctttacgtcagcgacaaaacgtaaactatcagggcggtcggcagtctgagccagcagcgccccctctagaagtttctgaggaacaggtcgcccggctcatggagatgggattttccagaggtgatgctttggaagccctgagagcttcaaacaatgacctcaatgtcgccaccaacttcctgctgcagcactgatagtcccaggccaacactgggaccggaccggcagccgagtgacagtgcgtggtccccaccatcagatcagcccggggaccgagcatctctggtgctgatgttcttgtgggaagagggaggttccaccgcacccctgccctcaaccgcaagactgttgccgttttagtgtggagataagtttgccattacattagcatgtattttctatctatattttttattgggcattttccctaggttggagagtcagcactcgttttgaatgtgtttaaaatgcattaaaatggaagatttctgcaggcagttgaatggcactccagatggggaattgctgtaaccctcttactgtaacatgtcatctcctgcgtcgtgatggggagagggtaatgttacttcacaaaggacatgtcagatccttcttcatggacttttttagttactgttttttctctcaaacttgttttcgaatctcctgggagtgagggagaaacagggagctgaatcctcccccaagctgttccaggccagaggactctgcagtaccttctcctacatctagtaacaaagaatggtgataaccatgcactggttcaaggttctggagttctccatgaaacttgggttaattttgctcagagtatccggagttagccactaggctgcgggtgaaatgggatggagtagaacaacagcaggcttcctggagccacatgggctgactagggcactctgtggctggcctggcacgggctcagcccaggaagaggagaaacgatcccttgcctgcccctccctgtggcagggctaactgcctggccctcctggctcgcagccagccagccccctggcagcaggttctcctcagggcttgggtcttcaacctgtggcgacaggaggcagggcagactgtggaggacaggatgcaggtcagggagagggaaggcaggggtggaccgccatgagcatgaaaagacccgaagcaagttgactcttgcaatgtgcaactgttatgttctgcaaaatgagcaacgatgtatcaaattgatgcaatatcacgtgatactacataattattccgtgccgttcttttgtgtcttgcctcttgtcg

SEQ ID NO: 401408 - DNA, 2208 bp, Homo sapiens
cgttcgtcagcggcgagtggcctcgcggcgccggattcgtcgctccgccaagagtgcgcctgcgcggtcgctggggctcgcacttcagcttcccctcccccggcgccctctggggctccgagcccggcgggaccatgttcaccagcaccggctccagtgggctctacaaggcgcctctgtcgaagagccttctgctggtccccagtgccctctccctcctgctcgccctcctcctgcctcactgccagaagctctttgtgtatgaccttcacgcagtcaagaacgacttccagatttggaggttgatatgtggaagaataatttgccttgatttgaaagatactttctgcagtagtctgcttatttataattttaggatatttgaaagaagatatggaagcagaaaatttgcatcctttttgctgggttcctgggttttgtcagccttatttgactttctcctcattgaagctatgcagtatttctttggcatcactgcagctagtaatttgccttctggattcctggcacctgtgtttgctctgtttgtaccattttactgctccataccaagagtccaagtggcacaaattctgggtccgttgtccatcacaaacaagacattgatttatatattgggactgcagcttttcacctctggttcctacatctggattgtagccataagtggacttatgtccggtctgtgctacgacagcaaaatgttccaggtgcatcaggtgctctgcatccccagctggatggcaaaattcttttcttggacacttgaacccatcttctcttcttcagaacccaccagcgaagccagaattgggatgggagccacgctggacatccagagacagcagagaatggagctgctggaccggcagctgatgttctctcagtttgcacaagggaggcgacagagacagcagcagggaggaatgatcaattggaatcgtctttttcctcctttacgtcagcgacaaaacgtaaactatcagggcggtcggcagtctgagccagcagcgccccctctagaagtttctgaggaacaggtcgcccggctcatggagatgggattttccagaggtgatgctttggaagccctgagagcttcaaacaatgacctcaatgtcgccaccaacttcctgctgcagcactgatagtcccaggccaacactgggaccggaccggcagccgagtgacagtgcgtggtccccaccatcagatcagcccggggaccgagcatctctggtgctgatgttcttgtgggaagagggaggttccaccgcacccctgccctcaaccgcaagactgttgccgttttagtgtggagataagtttgccattacattagcatgtattttctatctatattttttattgggcattttccctaggttggagagtcagcactcgttttgaatgtgtttaaaatgcattaaaatggaagatttctgcaggcagttgaatggcactccagatggggaattgctgtaaccctcttactgtaacatgtcatctcctgcgtcgtgatggggagagggtaatgttacttcacaaaggacatgtcagatccttcttcatggacttttttagttactgttttttctctcaaacttgttttcgaatctcctgggagtgagggagaaacagggagctgaatcctcccccaagctgttccaggccagaggactctgcagtaccttctcctacatctagtaacaaagaatggtgataaccatgcactggttcaaggttctggagttctccatgaaacttgggttaattttgctcagagtatccggagttagccactaggctgcgggtgaaatgggatggagtagaacaacagcaggcttcctggagccacatgggctgactagggcactctgtggctggctgtggcagggctaactgcctggccctcctggctcgcagccagccagccccctggcagcaggttctcctcagggcttgggtcttcaacctgtggcgacaggaggcagggcagactgtggaggacaggatgcaggtcagggagagggaaggcaggggtggaccgccatgagcatgaaaagacccgaagcaagttgactcttgcaatgtgcaactgttatgttctgcaaaatgagcaacgatgtatcaaattgatgcaaatttagatgttgatacttacaataaagtttttaatgtgtttta

SEQ ID NO: 401409 - DNA, 2160 bp, Homo sapiens
cgttcgtcagcggcgagtggcctcgcggcgccggattcgtcgctccgccaagagtgcgcctgcgcggtcgctggggctcgcacttcagcttcccctcccccggcgccctctggggctccgagcccggcgggaccatgttcaccagcaccggctccagtgggctctacaaggcgcctctgtcgaagagccttctgctggtccccagtgccctctccctcctgctcgccctcctcctgcctcactgccagaagctctttgtgtatgaccttcacgcagtcaagaacgacttccagatttggaggttgatatgtggaagaataatttgccttgatttgaaagatactttctgcagtagtctgcttatttataattttaggatatttgaaagaagatatggaagcagaaaatttgcatcctttttgctgggttcctgggttttgtcagccttatttgactttctcctcattgaagctatgcagtatttctttggcatcactgcagctagtaatttgccttctggattcctggcacctgtgtttgctctgtttgtaccattttactgctccataccaagagtccaagtggcacaaattctgggtccgttgtccatcacaaacaagacattgatttatatattgggactgcagcttttcacctctggttcctacatctggattgtagccataagtggacttatgtccggtctgtgctacgacagcaaaatgttccaggtgcatcaggtgctctgcatccccagctggatggcaaaattcttttcttggacacttgaacccatcttctcttcttcagaacccaccagcgaagccagaattgggatgggagccacgctggacatccagagacagcagagaatggagctgctggaccggcagctgatgttctctcagtttgcacaagggaggcgacagagacagcagcagggaggaatgatcaattggaatcgtctttttcctcctttacgtcagcgacaaaacgtaaactatcagggcggtcggcagtctgagccagcagcgccccctctagaagtttctgaggaacaggtcgcccggctcatggagatgggattttccagaggtgatgctttggaagccctgagagcttcaaacaatgacctcaatgtcgccaccaacttcctgctgcagcactgatagtcccaggccaacactgggaccggaccggcagccgagtgacagtgcgtggtccccaccatcagatcagcccggggaccgagcatctctggtgctgatgttcttgtgggaagagggaggttccaccgcacccctgccctcaaccgcaagactgttgccgttttagtgtggagataagtttgccattacattagcatgtattttctatctatattttttattgggcattttccctaggttggagagtcagcactcgttttgaatgtgtttaaaatgcattaaaatggaagatttctgcaggcagttgaatggcactccagatggggaattgctgtaaccctcttactgtaacatgtcatctcctgcgtcgtgatggggagagggtaatgttacttcacaaaggacatgtcagatccttcttcatggacttttttagttactgttttttctctcaaacttgttttcgaatctcctgggagtgagggagaaacagggagctgaatcctcccccaagctgttccaggccagaggactctgcagtaccttctcctacatctagtaacaaagaatggtgataaccatgcactggttcaaggttctggagttctccatgaaacttgggttaattttgctcagagtatccggagttagccactaggctgcgggtgaaatgggatggagtagaacaacagcaggcttcctggagccacatgggctgactagggcactctgtggctggcctggcacgggctcagcccaggaagaggagaaacgatcccttgcctgcccctcccgcagggcagactgtggaggacaggatgcaggtcagggagagggaaggcaggggtggaccgccatgagcatgaaaagacccgaagcaagttgactcttgcaatgtgcaactgttatgttctgcaaaatgagcaacgatgtatcaaattgatgcaaatttagatgttgatacttacaataaagtttttaatgtgtttta

SEQ ID NO: 401410 - DNA, 2475 bp, Homo sapiens
cgttcgtcagcggcgagtggcctcgcggcgccggattcgtcgctccgccaagagtgcgcctgcgcggtcgctggggctcgcacttcagcttcccctcccccggcgccctctggggctccgagcccggcgggaccatgttcaccagcaccggctccagtgggctctacaaggcgcctctgtcgaagagccttctgctggtccccagtgccctctccctcctgctcgccctcctcctgcctcactgccagaagctctttgtgtatgaccttcacgcagtcaagaacgacttccagatttggaggttgatatgtggaagaataatttgccttgatttgaaagatactttctgcagtagtctgcttatttataattttaggatatttgaaagaagatatggaagcagaaaatttgcatcctttttgctgggttcctgggttttgtcagccttatttgactttctcctcattgaagctatgcagtatttctttggcatcactgcagctagtaatttgccttctggattcctggcacctgtgtttgctctgtttgtaccattttactgctccataccaagagtccaagtggcacaaattctgggtccgttgtccatcacaaacaagacattgatttatatattgggactgcagcttttcacctctggttcctacatctggattgtagccataagtggacttatgtccggtctgtgctacgacagcaaaatgttccaggtgcatcaggtgctctgcatccccagctggatggcaaaattcttttcttggacacttgaacccatcttctcttcttcagaacccaccagcgaagccagaattgggatgggagccacgctggacatccagagacagcagagaatggagctgctggaccggcagctgatgttctctcagtttgcacaagggaggcgacagagacagcagcagggaggaatgatcaattggaatcgtctttttcctcctttacgtcagcgacaaaacgtaaactatcagggcggtcggcagtctgagccagcagcgccccctctagaagtttctgaggaacaggtcgcccggctcatggagatgggattttccagaggtgatgctttggaagccctgagagcttcaaacaatgacctcaatgtcgccaccaacttcctgctgcagcactgatagtcccaggccaacactgggaccggaccggcagccgagtgacagtgcgtggtccccaccatcagatcagcccggggaccgagcatctctggtgctgatgttcttgtgggaagagggaggttccaccgcacccctgccctcaaccgcaagactgttgccgttttagtgtggagataagtttgccattacattagcatgtattttctatctatattttttattgggcattttccctaggttggagagtcagcactcgttttgaatgtgtttaaaatgcattaaaatggaagatttctgcaggcagttgaatggcactccagatggggaattgctgtaaccctcttactgtaacatgtcatctcctgcgtcgtgatggggagagggtaatgttacttcacaaaggacatgtcagatccttcttcatggacttttttagttactgttttttctctcaaacttgttttcgaatctcctgggagtgagggagaaacagggagctgaatcctcccccaagctgttccaggccagaggactctgcagtaccttctcctacatctagtaacaaagaatggtgataaccatgcactggttcaaggttctggagttctccatgaaacttgggttaattttgctcagagtatccggagttagccactaggctgcgggtgaaatgggatggagtagaacaacagcaggcttcctggagccacatgggctgactagggcactctgtggctggctgtggcagggctaactgcctggccctcctggctcgcagccagccagccccctggcagcaggttctcctcagggcttgggtcttcaacctgtggcgacaggaggcagggcagactgtggaggacaggatgcaggtcagggagagggaaggcaggggtggaccgccatgagcatgaaaagacccgaagcaagttgactcttgcaatgtgcaactgttatgttctgcaaaatgagcaacgatgtatcaaattgatgcaaatttagatgttgatacttacaataaagtttttaatgtgttttaaaaaaaaaaaaaaaaaaaaaaaaaaaaaaaaaaaaaacaaaaaacaaaaaacaaaaaaaaaacgccgggggcgtatatatattatggggggcgaggagagaaaaaaagaggggggtataaacaggggagcagggggggcatagaagtggttgcgggcgcagcactgtttttgtgcaccaaagggggggaaatctgggggggtcccactataaaggaggggagcatatactattcagtaaaagagcggagaataaggaggtaataaaa

SEQ ID NO: 401411 - DNA, 1580 bp, Homo sapiens
agggctgagcatgggtcaccaccatagggaatcaaacgacgctgagtcgtgtgtcctcgcagtgagcctgggcagctcatgccgacctgcttccaaggcctggtcccagtaggccactttaccctcagaagccctgtgtccttgtctgtagaatgagggttatgtgcgatcatgcatatatattggctacacatagtgaacattgaaaaatttgtacctggtataacttttaagtatcagattccatattgaaatgaaaattggtttttttgtaaacagttttgacctttgccacaaggctcacatgaagaacatttggggcccagggataagcggcaatgtcagcgccctcaggtttctgcgttttctctgcctgcaggtcgcccggctcatggagatgggattttccagaggtgatgctttggaagccctgagagcttcaaacaatgacctcaatgtcgccaccaacttcctgctgcagcactgatagtcccaggccaacactgggaccggaccggcagccgagtgacagtgcgtggtccccaccatcagatcagcccggggaccgagcatctctggtgctgatgttcttgtgggaagagggaggttccaccgcacccctgccctcaaccgcaagactgttgccgttttagtgtggagataagtttgccattacattagcatgtattttctatctatattttttattgggcattttccctaggttggagagtcagcactcgttttgaatgtgtttaaaatgcattaaaatggaagatttctgcaggcagttgaatggcactccagatggggaattgctgtaaccctcttactgtaacatgtcatctcctgcgtcgtgatggggagagggtaatgttacttcacaaaggacatgtcagatccttcttcatggacttttttagttactgttttttctctcaaacttgttttcgaatctcctgggagtgagggagaaacagggagctgaatcctcccccaagctgttccaggccagaggactctgcagtaccttctcctacatctagtaacaaagaatggtgataaccatgcactggttcaaggttctggagttctccatgaaacttgggttaattttgctcagagtatccggagttagccactaggctgcgggtgaaatgggatggagtagaacaacagcaggcttcctggagccacatgggctgactagggcactctgtggctggcctggcacgggctcagcccaggaagaggagaaacgatcccttgcctgcccctccctgtggcagggctaactgcctggccctcctggctcgcagccagccagccccctggcagcaggttctcctcagggcttgggtcttcaacctgtggcgacaggaggcagggcagactgtggaggacaggatgcaggtcagggagagggaaggcaggggtggaccgccatgagcatgaaaagacccgaagcaagttgactcttgcaatgtgcaactgttatgttctgcaaaatgagcaacgatgtatcaaattgatgcaaatttagatgttgatacttacaataaagtttttaatgtgtttta

SEQ ID NO: 401412 - DNA, 2627 bp, Homo sapiens
cgttcgtcagcggcgagtggcctcgcggcgccggattcgtcgctccgccaagagtgcgcctgcgcggtcgctggggctcgcacttcagcttcccctcccccggcgccctctggggctccgagcccggcgggaccatgttcaccagcaccggctccagtgggctctacaaggcgcctctgtcgaagagccttctgctggtccccagtgccctctccctcctgctcgccctcctcctgcctcactgccagaagctctttgtgtatgaccttcacgcagtcaagaacgacttccagatttggaggttgatatgtggaagaataatttgccttgatttgaaagatactttctgcagtagtctgcttatttataattttaggatatttgaaagaagatatggaagcagaaaatttgcatcctttttgctgggttcctgggttttgtcagccttatttgactttctcctcattgaagctatgcagtatttctttggcatcactgcagctagtaatttgccttctggattcctggcacctgtgtttgctctgtttgtaccattttactgctccataccaagagtccaagtggcacaaattctgggtccgttgtccatcacaaacaagacattgatttatatattgggactgcagcttttcacctctggttcctacatctggattgtagccataagtggacttatgtccggtctgtgctacgacagcaaaatgttccaggtgcatcaggtgctctgcatccccagctggatggcaaaattcttttcttggacacttgaacccatcttctcttcttcagaacccaccagcgaagccagaattgggatgggagccacgctggacatccagagacagcagagaatggagctgctggaccggcagctgatgttctctcagtttgcacaagggaggcgacagagacagcagcagggaggaatgatcaattggaatcgtctttttcctcctttacgtcagcgacaaaacgtaaactatcagggcggtcggcagtctgagccagcagcgccccctctagaagtttctgaggaacagaccaatgaatgactgcaagcccatgaagccaacactgacgaagttgcagtatgcagcgccgtgcctcgcctcgcctcgcctcaccattgcctccactcacgccagaacaagtgtctatcctagcacagtcttttccagagtctcagtgtcctaccagcattctcattttgtcctccacatgtttattggtcacttttgatcttcacattcagccttctctaactggtgctgggcaccgggtgtgtcaggctctgtgttggggggaagcaagccaggcctggtgccagccctcaagggagctcaccgtctatgagggagaccagatccatgcaaggccctaacccagtacccaactcatgcaagtacctagtgccagtccttagagcagaggagacctgtaaacattcattcctgtactttaacaacttgacatcaggagattttacattgaaactttctcttcctgtggatgttagatcggatcaggtgctcatggtgagttctgatgcttctcatcccagtagctggactacagagacaggaagcagcctgcagagaaaatgaagtagtccagggtttcagtgtgagttaatgtgtgttgtggctaatgtggtgctttcgatagggagagagatgggctgaccatctataataccattatttatatagtcatcagagttgtgtatttgctaaactttataaatacatgtgtattttagaacaacacagtctttttgttagaatgttatgctcaccatttacgctgccctccataggagaatagtggtcctgagaggtcatgtttattgagcgctggtcatgtgcccgtcactgttctgggcttctcacatgcatcctttcatctcccaaattgcgaggaaacagagagtcaaagcctggtcccctgcatgtggtcacacggggccaactccaaagctcgggtctccctgccaccctgcgctgaggtcagacctaagacagcatgcagcttcccctgcatttttatttcacggaagcatgaacctggttttctgtccctacaagttgagtatcccttatccaaaatgcatgctgctctagtccttcagtaagcccatcacatattttctctgtgtcgtctgtagacactttttctgcagcgttagcatcatctccatcatcactgttgtcacagtcaccttgactcagaaccatctcagctatttcaccatgggtcagttaatgaacagctggagcccccttatcgatattaaaaacttcaatatctggctgggctcagtggctcatgcctgtaattccagcaagttgggaggccgaggtgggcagatcacttgaggtcaggagttcgagaccagcctggccaacatagtgaaaccccatctctactaaaaacacaaaaattagccaggcatggtggcacatgcctgtagtcccagctacttgggaggctgaggcaggagaatggcttgaacccaggaggtggaggttgcagtgagccgagatcacatcactgcactccaacctgggtgactgagcaagactctgtctcaaaaataaaataaaaaa

SEQ ID NO: 401413 - DNA, 298 bp, Homo sapiens
aagcaagggagtgttgtgatcagagttgtattttaggaagagagtactgccaacaatgttaagaaatggattagagagaagcaagactgtaagtagaaagacacataagacttttgaatctgtcaaggtgaaggtgtcaaattgacattcagaaccaggtgaggggtgggcaggcagttttaggtctcacttcattttcttagcccaagctatagaaagggttgagattgtatgaggagatgagagagcaagaagaaaaggctataatggaaccatggagaagccagaagagtggtgt

SEQ ID NO: 401414 - DNA, 2262 bp, Homo sapiens
cgttcgtcagcggcgagtggcctcgcggcgccggattcgtcgctccgccaagagtgcgcctgcgcggtcgctggggctcgcacttcagcttcccctcccccggcgccctctggggctccgagcccggcgggaccatgttcaccagcaccggctccagtgggctctacaaggcgcctctgtcgaagagccttctgctggtccccagtgccctctccctcctgctcgccctcctcctgcctcactgccagaagctctttgtgtatgaccttcacgcagtcaagaacgacttccagatttggaggttgatatgtggaagaataatttgccttgatttgaaagatactttctgcagtagtctgcttatttataattttaggatatttgaaagaagatatggaagcagaaaatttgcatcctttttgctgggttcctgggttttgtcagccttatttgactttctcctcattgaagctatgcagtatttctttggcatcactgcagctagtaatttgccttctggattcctggcacctgtgtttgctctgtttgtaccattttactgctccataccaagagtccaagtggcacaaattctgggtccgttgtccatcacaaacaagacattgatttatatattgggactgcagcttttcacctctggttcctacatctggattgtagccataagtggacttatgtccggtctgtgctacgacagcaaaatgttccaggtgcatcaggtgctctgcatccccagctggatggcaaaattcttttcttggacacttgaacccatcttctcttcttcagaacccaccagcgaagccagaattgggatgggagccacgctggacatccagagacagcagagaatggagctgctggaccggcagctgatgttctctcagtttgcacaagggaggcgacagagacagcagcagggaggaatgatcaattggaatcgtctttttcctcctttacgtcagcgacaaaacgtaaactatcagggcggtcggcagtctgagccagcagcgccccctctagaagtttctgaggaacaggtcgcccggctcatggagatgggattttccagaggtgatgctttggaagccctgagagcttcaaacaatgacctcaatgtcgccaccaacttcctgctgcagcactgatagtcccaggccaacactgggaccggaccggcagccgagtgacagtgcgtggtccccaccatcagatcagcccggggaccgagcatctctggtgctgatgttcttgtgggaagagggaggttccaccgcacccctgccctcaaccgcaagactgttgccgttttagtgtggagataagtttgccattacattagcatgtattttctatctatattttttattgggcattttccctaggttggagagtcagcactcgttttgaatgtgtttaaaatgcattaaaatggaagatttctgcaggcagttgaatggcactccagatggggaattgctgtaaccctcttactgtaacatgtcatctcctgcgtcgtgatggggagagggtaatgttacttcacaaaggacatgtcagatccttcttcatggacttttttagttactgttttttctctcaaacttgttttcgaatctcctgggagtgagggagaaacagggagctgaatcctcccccaagctgttccaggccagaggactctgcagtaccttctcctacatctagtaacaaagaatggtgataaccatgcactggttcaaggttctggagttctccatgaaacttgggttaattttgctcagagtatccggagttagccactaggctgcgggtgaaatgggatggagtagaacaacagcaggcttcctggagccacatgggctgactagggcactctgtggctggcctggcacgggctcagcccaggaagaggagaaacgatcccttgcctgcccctccctgtggcagggctaactgcctggccctcctggctcgcagccagccagccccctggcagcaggttctcctcagggcttgggtcttcaacctgtggcgacaggaggcagggcagactgtggaggacaggatgcaggtcagggagagggaaggcaggggtggaccgccatgagcatgaaaagacccgaagcaagttgactcttgcaatgtgcaactgttatgttctgcaaaatgagcaacgatgtatcaaattgatgcaaatttagatgttgatacttacaataaagtttttaatgtgtttta

SEQ ID NO: 401415 - DNA, 1895 bp, Homo sapiens
gtcgagaggctgcctgagtcagaggctgtatgtcattaggttcttctaacgtctaaagtgctgtgagtatggaggaacattgtcagacacaagaaagagcatcaagcaagtcagctgaattctttgggccgccacctcactgtgtataaaataaagcctggcacctgtgtttgctctgtttgtaccattttactgctccataccaagagtccaagtggcacaaattctgggtccgttgtccatcacaaacaagacattgatttatatattgggactgcagcttttcacctctggttcctacatctggattgtagccataagtggacttatgtccggtctgtgctacgacagcaaaatgttccaggtgcatcaggtgctctgcatccccagctggatggcaaaattcttttcttggacacttgaacccatcttctcttcttcagaacccaccagcgaagccagaattgggatgggagccacgctggacatccagagacagcagagaatggagctgctggaccggcagctgatgttctctcagtttgcacaagggaggcgacagagacagcagcagggaggaatgatcaattggaatcgtctttttcctcctttacgtcagcgacaaaacgtaaactatcagggcggtcggcagtctgagccagcagcgccccctctagaagtttctgaggaacaggtcgcccggctcatggagatgggattttccagaggtgatgctttggaagccctgagagcttcaaacaatgacctcaatgtcgccaccaacttcctgctgcagcactgatagtcccaggccaacactgggaccggaccggcagccgagtgacagtgcgtggtccccaccatcagatcagcccggggaccgagcatctctggtgctgatgttcttgtgggaagagggaggttccaccgcacccctgccctcaaccgcaagactgttgccgttttagtgtggagataagtttgccattacattagcatgtattttctatctatattttttattgggcattttccctaggttggagagtcagcactcgttttgaatgtgtttaaaatgcattaaaatggaagatttctgcaggcagttgaatggcactccagatggggaattgctgtaaccctcttactgtaacatgtcatctcctgcgtcgtgatggggagagggtaatgttacttcacaaaggacatgtcagatccttcttcatggacttttttagttactgttttttctctcaaacttgttttcgaatctcctgggagtgagggagaaacagggagctgaatcctcccccaagctgttccaggccagaggactctgcagtaccttctcctacatctagtaacaaagaatggtgataaccatgcactggttcaaggttctggagttctccatgaaacttgggttaattttgctcagagtatccggagttagccactaggctgcgggtgaaatgggatggagtagaacaacagcaggcttcctggagccacatgggctgactagggcactctgtggctggcctggcacgggctcagcccaggaagaggagaaacgatcccttgcctgcccctccctgtggcagggctaactgcctggccctcctggctcgcagccagccagccccctggcagcaggttctcctcagggcttgggtcttcaacctgtggcgacaggaggcagggcagactgtggaggacaggatgcaggtcagggagagggaaggcaggggtggaccgccatgagcatgaaaagacccgaagcaagttgactcttgcaatgtgcaactgttatgttctgcaaaatgagcaacgatgtatcaaattgatgcaaatttagatgttgatacttacaataaagtttttaatgtgtttta

SEQ ID NO: 401416 - DNA, 2618 bp, Homo sapiens
tgcttctttctcttggacgtagttgtagctcctgtgctgggcatcttaccgtgacatccttggcacgcatttgattcactgattcattgcagtggtgaaactgacatagcttgggggccacgaggagagccaccagctgccaggaggagtcagagaagtcttgtgggaagagctgagcagtgttgcacaagctgagtttcctaggcaggaaagtggaaagcagaacctgcgtcagtggagagtcaaagcagccagcgtgttcagggagcagctgtgtggatttttgagagggccttgtgtgtgttgggccagatgaggggaagcagagaggaggacagtggtggcagactccagtgatgaaagcgaactggggagctttgccatcacatctttatgaagcattttatctttggatactggagcctatggaaggaagggtttttttggtttgttttttatttttttttgtttttgtttgtttgtttgttttttgagacggagtctcgctctgtcgcccaggctggagtgcagtggcgcgatcttggctcactgcaagctctgcctcctggattcacgccattctcctgcctcagcctcccgagtagtagctgggactacaggtgcccaccaccaagcccggctaattttatgtatttttagtagagacggggtttcaccgtgttagccaggatggtctcgatctcctgacctcatgatccgcccgcctcggcctcccaaagtgctgggattacaggcgtgagacactacgcccggcggaaggaagggtttttaagcaagggagtgttgtgatcagagttgtattttaggaagagagtactgccaacaatgttaagaaatggattagagagaagcaagactcctggcacctgtgtttgctctgtttgtaccattttactgctccataccaagagtccaagtggcacaaattctgggtccgttgtccatcacaaacaagacattgatttatatattgggactgcagcttttcacctctggttcctacatctggattgtagccataagtggacttatgtccggtctgtgctacgacagcaaaatgttccaggtgcatcaggtgctctgcatccccagctggatggcaaaattcttttcttggacacttgaacccatcttctcttcttcagaacccaccagcgaagccagaattgggatgggagccacgctggacatccagagacagcagagaatggagctgctggaccggcagctgatgttctctcagtttgcacaagggaggcgacagagacagcagcagggaggaatgatcaattggaatcgtctttttcctcctttacgtcagcgacaaaacgtaaactatcagggcggtcggcagtctgagccagcagcgccccctctagaagtttctgaggaacaggtcgcccggctcatggagatgggattttccagaggtgatgctttggaagccctgagagcttcaaacaatgacctcaatgtcgccaccaacttcctgctgcagcactgatagtcccaggccaacactgggaccggaccggcagccgagtgacagtgcgtggtccccaccatcagatcagcccggggaccgagcatctctggtgctgatgttcttgtgggaagagggaggttccaccgcacccctgccctcaaccgcaagactgttgccgttttagtgtggagataagtttgccattacattagcatgtattttctatctatattttttattgggcattttccctaggttggagagtcagcactcgttttgaatgtgtttaaaatgcattaaaatggaagatttctgcaggcagttgaatggcactccagatggggaattgctgtaaccctcttactgtaacatgtcatctcctgcgtcgtgatggggagagggtaatgttacttcacaaaggacatgtcagatccttcttcatggacttttttagttactgttttttctctcaaacttgttttcgaatctcctgggagtgagggagaaacagggagctgaatcctcccccaagctgttccaggccagaggactctgcagtaccttctcctacatctagtaacaaagaatggtgataaccatgcactggttcaaggttctggagttctccatgaaacttgggttaattttgctcagagtatccggagttagccactaggctgcgggtgaaatgggatggagtagaacaacagcaggcttcctggagccacatgggctgactagggcactctgtggctggcctggcacgggctcagcccaggaagaggagaaacgatcccttgcctgcccctccctgtggcagggctaactgcctggccctcctggctcgcagccagccagccccctggcagcaggttctcctcagggcttgggtcttcaacctgtggcgacaggaggcagggcagactgtggaggacaggatgcaggtcagggagagggaaggcaggggtggaccgccatgagcatgaaaagacccgaagcaagttgactcttgcaatgtgcaactgttatgttctgcaaaatgagcaacgatgtatcaaattgatgcaaatttagatgttgatacttacaataaagtttttaatgtgtttta

SEQ ID NO: 401417 - DNA, 1860 bp, Homo sapiens
cgttcgtcagcggcgagtggcctcgcggcgccggattcgtcgctccgccaagagtgcgcctgcgcggtcgctggggctcgcacttcagcttcccctcccccggcgccctctggggctccgagcccggcgggaccatgttcaccagcaccggctccagtgggctctacaaggcgcctctgtcgaagagccttctgctggtccccagtgccctctccctcctgctcgccctcctcctgcctcactgccagaagctctttgtgtatgaccttcacgcagtcaagaacgacttccagatgtccggtctgtgctacgacagcaaaatgttccaggtgcatcaggtgctctgcatccccagctggatggcaaaattcttttcttggacacttgaacccatcttctcttcttcagaacccaccagcgaagccagaattgggatgggagccacgctggacatccagagacagcagagaatggagctgctggaccggcagctgatgttctctcagtttgcacaagggaggcgacagagacagcagcagggaggaatgatcaattggaatcgtctttttcctcctttacgtcagcgacaaaacgtaaactatcagggcggtcggcagtctgagccagcagcgccccctctagaagtttctgaggaacaggtcgcccggctcatggagatgggattttccagaggtgatgctttggaagccctgagagcttcaaacaatgacctcaatgtcgccaccaacttcctgctgcagcactgatagtcccaggccaacactgggaccggaccggcagccgagtgacagtgcgtggtccccaccatcagatcagcccggggaccgagcatctctggtgctgatgttcttgtgggaagagggaggttccaccgcacccctgccctcaaccgcaagactgttgccgttttagtgtggagataagtttgccattacattagcatgtattttctatctatattttttattgggcattttccctaggttggagagtcagcactcgttttgaatgtgtttaaaatgcattaaaatggaagatttctgcaggcagttgaatggcactccagatggggaattgctgtaaccctcttactgtaacatgtcatctcctgcgtcgtgatggggagagggtaatgttacttcacaaaggacatgtcagatccttcttcatggacttttttagttactgttttttctctcaaacttgttttcgaatctcctgggagtgagggagaaacagggagctgaatcctcccccaagctgttccaggccagaggactctgcagtaccttctcctacatctagtaacaaagaatggtgataaccatgcactggttcaaggttctggagttctccatgaaacttgggttaattttgctcagagtatccggagttagccactaggctgcgggtgaaatgggatggagtagaacaacagcaggcttcctggagccacatgggctgactagggcactctgtggctggcctggcacgggctcagcccaggaagaggagaaacgatcccttgcctgcccctccctgtggcagggctaactgcctggccctcctggctcgcagccagccagccccctggcagcaggttctcctcagggcttgggtcttcaacctgtggcgacaggaggcagggcagactgtggaggacaggatgcaggtcagggagagggaaggcaggggtggaccgccatgagcatgaaaagacccgaagcaagttgactcttgcaatgtgcaactgttatgttctgcaaaatgagcaacgatgtatcaaattgatgcaaatttagatgttgatacttacaataaagtttttaatgtgtttta

SEQ ID NO: 401418 - DNA, 2529 bp, Homo sapiens
cgttcgtcagcggcgagtggcctcgcggcgccggattcgtcgctccgccaagagtgcgcctgcgcggtcgctggggctcgcacttcagcttcccctcccccggcgccctctggggctccgagcccggcgggaccatgttcaccagcaccggctccagtgggctctacaaggcgcctctgtcgaagagccttctgctggtccccagtgccctctccctcctgctcgccctcctcctgcctcactgccagaagctctttgtgtatgaccttcacgcagtcaagaacgacttccagatttggaggttgatatgtggaagaataatttgccttgatttgaaagatactttctgcagtagtctgcttatttataattttaggatatttgaaagaagatatggaagcagaaaatttgcatcctttttgctgggttcctgggttttgtcagccttatttgactttctcctcattgaagctatgcagtatttctttggcatcactgcagctagtaatttgccttctggattcctggcacctgtgtttgctctgtttgtaccattttactgctccataccaagagtccaagtggcacaaattctgggtccgttgtccatcacaaacaagacattgatttatatattgggactgcagcttttcacctctggttcctacatctggattgtagccataagtggacttatgtccggtctgtgctacgacagcaaaatgttccaggtgcatcaggtgctctgcatccccagctggatggcaaaattcttttcttggacacttgaacccatcttctcttcttcagaacccaccagcgaagccagaattgggatgggagccacgctggacatccagagacagcagagaatggagctgctggaccggcagctgatgttctctcagtttgcacaagggaggcgacagagacagcagcagggaggaatgatcaattggaatcgtctttttcctcctttacgtcagcgacaaaacgtaaactatcagggcggtcggcagtctgagccagcagcgccccctctagaagtttctgaggaacaggtcgcccggctcatggagatgggattttccagaggtgatgctttggaagccctgagagcttcaaacaatgacctcaatgtcgccaccaacttcctgctgcagcactgatagtcccaggccaacactgggaccggaccggcagccgagtgacagtgcgtggtccccaccatcagatcagcccggggaccgagcatctctggtgctgatgttcttgtgggaagagggaggttccaccgcacccctgccctcaaccgcaagactgttgccgttttagtgtggagataagtttgccattacattagcatgtattttctatctatattttttattgggcattttccctaggttggagagtcagcactcgttttgaatgtgtttaaaatgcattaaaatggaagatttctgcaggcagttgaatggcactccagatggggaattgctgtaaccctcttactgtaacatgtcatctcctgcgtcgtgatggggagagggtaatgttacttcacaaaggacatgtcagatccttcttcatggacttttttagttactgttttttctctcaaacttgttttcgaatctcctgggagtgagggagaaacagggagctgaatcctcccccaagctgttccaggccagaggactctgcagtaccttctcctacatctagtaacaaagaatggtgataaccatgcactggttcaaggttctggagttctccatgaaacttgggttaattttgctcagagtatccggagttagccactaggctgcgggtgaaatgggatggagtagaacaacagcaggcttcctggagccacatgggctgactagggcactctgtggctggcctggcacgggctcagcccaggaagaggagaaacgatcccttgcctgcccctccctgtggcagggctaactgcctggccctcctggctcgcagccagccagccccctggcagcaggttctcctcagggcttgggtcttcaacctgtggcgacaggaggcagggcagactgtggaggacaggatgcaggtcagggagagggaaggcaggggtggaccgccatgagcatgaaaagacccgaagcaagttgactcttgcaatgtgcaactgttatgttctgcaaaatgagcaacgatgtatcaaattgatgcaaatttagatgttgatacttacaataaagtttttaatgtgttttaaaaaaaaaaaaaaaaaaaaaaaaaaaaaaaaaaaaaacaaaaaacaaaaaacaaaaaaaaaacgccgggggcgtatatatattatggggggcgaggagagaaaaaaagaggggggtataaacaggggagcagggggggcatagaagtggttgcgggcgcagcactgtttttgtgcaccaaagggggggaaatctgggggggtcccactataaaggaggggagcatatactattcagtaaaagagcggagaataaggaggtaataaaa

SEQ ID NO: 401419 - DNA, 2101 bp, Homo sapiens
cgttcgtcagcggcgagtggcctcgcggcgccggattcgtcgctccgccaagagtgcgcctgcgcggtcgctggggctcgcacttcagcttcccctcccccggcgccctctggggctccgagcccggcgggaccatgttcaccagcaccggctccagtgggctctacaaggcgcctctgtcgaagagccttctgctggtccccagtgccctctccctcctgctcgccctcctcctgcctcactgccagaagctctttgtgtatgaccttcacgcagtcaagaacgacttccagatttggaggttgatatgtggaagaataatttgccttgatttgaaagatactttctgcagtagtctgcttatttataattttaggatatttgaaagaagatatggaagcagaaaatttgcatcctttttgctgggttcctgggttttgtcagccttatttgactttctcctcattgaagctatgcagtatttctttggcatcactgcagctagtaatttgccttctggattcctggcacctgtgtttgctctgtttgtaccattttactgctccataccaagagtccaagtggcacaaattctgggtccgttgtccatcacaaacaagacattgatttatatattgggactgcagcttttcacctctggttcctacatctggattgtagccataagtggacttatgtccggtctgtgctacgacagcaaaatgttccaggtgcatcaggtgctctgcatccccagctggatggcaaaattcttttcttggacacttgaacccatcttctcttcttcagaacccaccagcgaagccagaattgggatgggagccacgctggacatccagagacagcagagaatggagctgctggaccggcagctgatgttctctcagtttgcacaagggaggcgacagagacagcagcagggaggaatgatcaattggaatcgtctttttcctcctttacgtcagcgacaaaacgtaaactatcagggcggtcggcagtctgagccagcagcgccccctctagaagtttctgaggaacaggtcgcccggctcatggagatgggattttccagaggtgatgctttggaagccctgagagcttcaaacaatgacctcaatgtcgccaccaacttcctgctgcagcactgatagtcccaggccaacactgggaccggaccggcagccgagtgacagtgcgtggtccccaccatcagatcagcccggggaccgagcatctctggtgctgatgttcttgtgggaagagggaggttccaccgcacccctgccctcaaccgcaagactgttgccgttttagtgtggagataagtttgccattacattagcatgtattttctatctatattttttattgggcattttccctaggttggagagtcagcactcgttttgaatgtgtttaaaatgcattaaaatggaagatttctgcaggcagttgaatggcactccagatggggaattgctgtaaccctcttactgtaacatgtcatctcctgcgtcgtgatggggagagggtaatgttacttcacaaaggacatgtcagatccttcttcatggacttttttagttactgttttttctctcaaacttgttttcgaatctcctgggagtgagggagaaacagggagctgaatcctcccccaagctgttccaggccagaggactctgcagtaccttctcctacatctagtaacaaagaatggtgataaccatgcactggttcaaggttctggagttctccatgaaacttgggttaattttgctcagagtatccggagttagccactaggctgcgggtgaaatgggatggagtagaacaacagcaggcttcctggagccacatgggctgactagggcactctgtggctggcctggcacgggctcagcccaggaagaggagaaacgatcccttgcctgcccctcccttccaggccagaggactctgcagtaccttctcctacatctagtaacaaagaatggtgataaccatgcactggttcaaggttctggagttctccatgaaacttgggttaattttgctcagagtatccagagttagccac

SEQ ID NO: 401420 - DNA, 1471 bp, Homo sapiens
cgttcgtcagcggcgagtggcctcgcggcgccggattcgtcgctccgccaagagtgcgcctgcgcggtcgctggggctcgcacttcagcttcccctcccccggcgccctctggggctccgagcccggcgggaccatgttcaccagcaccggctccagtgggctctacaaggcgcctctgtcgaagagccttctgctggtccccagtgccctctccctcctgctcgccctcctcctgcctcactgccagaagctctttgtgtatgaccttcacgcagtcaagaacgacttccagatttggaggttgatatgtggaagaataatttgccttgatttgaaagatactttctgcagtagtctgcttatttataattttaggatatttgaaagaagatatggaagcagaaaatttgcatcctttttgctgggttcctgggttttgtcagccttatttgactttctcctcattgaagctatgcagtatttctttggcatcactgcagctagtaatttgccttctggattcctggcacctgtgtttgctctgtttgtaccattttactgctccataccaagagtccaagtggcacaaattctgggtccgttgtccatcacaaacaagacattgatttatatattgggactgcagcttttcacctctggttcctacatctggattgtagccataagtggacttatgtccggtctgtgctacgacagcaaaatgttccaggtgcatcaggtgctctgcatccccagctggatggcaaaattcttttcttggacacttgaacccatcttctcttcttcagaacccaccagcgaagccagaattgggatgggagccacgctggacatccagagacagcagagaatggagctgctggaccggcagctgatgttctctcagtttgcacaagggaggcgacagagacagcagcagggaggaatgatcaattggaatcgtctttttcctcctttacgtcagcgacaaaacgtaaactatcagggcggtcggcagtctgagccagcagcgccccctctagaagtttctgaggaacaggtcgcccggctcatggagatgggattttccagaggtgatgctttggaagccctgagagcttcaaacaatgacctcaatgtcgccaccaacttcctgctgcagcactgatagtcccaggccaacactgggaccggaccggcagccgagtgacagtgcgtggtccccaccatcagatcagcccggggaccgagcatctctggtgctgatgttcttgtgggaagagggaggttccaccgcacccctgccctcaaccgcaagactgttgccgttttagtgtggagataagtttgccattacattagcatgtattttctatctatattttttattgggcattttaaacacattcaaaacgagtgctgactctccaacctagggaaaatgcccaataaaaaatatagatagaaaat

SEQ ID NO: 401421 - DNA, 1201 bp, Homo sapiens
cgttcgtcagcggcgagtggcctcgcggcgccggattcgtcgctccgccaagagtgcgcctgcgcggtcgctggggctcgcacttcagcttcccctcccccggcgccctctggggctccgagcccggcgggaccatgttcaccagcaccggctccagtgggctctacaaggcgcctctgtcgaagagccttctgctggtccccagtgccctctccctcctgctcgccctcctcctgcctcactgccagaagctctttgtgtatgaccttcacgcagtcaagaacgacttccagatttggaggttgatatgtggaagaataatttgccttgatttgaaagatactttctgcagtagtctgcttatttataattttaggatatttgaaagaagatatggaagcagaaaatttgcatcctttttgctgggttcctgggttttgtcagccttatttgactttctcctcattgaagctatgcagtatttctttggcatcactgcagctagtaatttgccttctggattcctggcacctgtgtttgctctgtttgtaccattttactgctccataccaagagtccaagtggcacaaattctgggtccgttgtccatcacaaacaagacattgatttatatattgggactgcagcttttcacctctggttcctacatctggattgtagccataagtggacttatgtccggtctgtgctacgacagcaaaatgttccaggtgcatcaggtgctctgcatccccagctggatggcaaaattcttttcttggacacttgaacccatcttctcttcttcagaacccaccagcgaagccagaattgggatgggagccacgctggacatccagagacagcagagaatggagctgctggaccggcagctgatgttctctcagtttgcacaagggaggcgacagagacagcagcagggaggaatgatcaattggaatcgtctttttcctcctttacgtcagcgacaaaacgtaaactatcagggcggtcggcagtctgagccagcagcgccccctctagaagtttctgaggaacaggtaattaatcagtaatacctggtactcattctaaatccatgtttcagagttgaagcagtttcgatcaacaggactcaaaagtaatcaagcgtgtaaatacaaagatggtgacagcagtccatctgccaccatgatagaga

SEQ ID NO: 401422 - DNA, 540 bp, Homo sapiens
cagtctccagaattcgctgctatcacaccaagtcatgctgttgccctgtgacctcacacttcccattccatggccttgtcttggcagggagtaaaaaatcccacttctttttactttagtgggtctcaactgcagcatttcagaaacaaattttgatttgacactcaggagaataaaaacaagttgagggcagaatgtatttggaaaagcttaagacaaatttactgatattattttatgatcatttaggattacagatcaatttacctccataaatctttgaattgtcactgtgaccacaggatgaaaatcctttattagccattttataggttaaaacaaaaaattgactacacagccgacttccctcagataactatgaagtctattatgagtactgaatgaccaaagaacatggaaaaaatgcatatgaataaatactgaaatgtttatgaaagatatttatgaaagatattaagacttctgtgtttaggtatgcacatatgataaaataaatctaaaaacattaaaaaaaactaa

SEQ ID NO: 401423 - DNA, 597 bp, Homo sapiens
gatgacagtgacagtggagaactgaagtctataaaagttaagacctagatctagatgctcctgaatttcccctttttattcttaacaacacttcctttgtgctgtgatctcaagcaactgagcctaggtctttttattcttgtctgatataacagaaggtagaggatgaaataaatgagtttattaggtaacacattttgaaaattgtgtttaagatttagatgatatattttagaacttctaataaattcagaggaattcaatgtcaaaggaaacttttgtatagttatacattgcttaatgtttatacatacatccatgtagcatacttctaataatatctttaattatactagttattttaaaataacccacaaatactcaaggaattgttcagtttgtgaactgtgtgagaactacagtttttcatggtaacatttatttgtgtggtttttaaaagtgatcacaggacatctcatctagatgaataattagaataaatacttgtctcttggagacgattttgggtgtagtctttactagaggcataggtatggactccaagttggctctaatattatgagatacccttgagta

SEQ ID NO: 401424 - DNA, 591 bp, Homo sapiens
ttaagatttcaacaagacacagtgtctcatcacataatgcaaagtacaaccccaaaatattcagcatatgaagaaccaggacaatcttaattcacttggcaaagagaatcctcgaataacaatactgagaagacacagatgttacaatcatctgacacatacttttaaatagttattacaacaatgatccatgaatgaaaggataacactcttgaagtgaatggaaaattgggaagtcttagcaagtatctggaagctctaaacactgattttaacttaaaaattaaaaaatgtattcatcaaaactattaggagaaaaaaagcttcaatgggttatttcaataacaaaattgagacactcagaataaagtcaatgaacttgaaaacacaacaaaaataccaacctaacctgaacaataaagaaaaatgagtgcttttgcaaatgaacagagcctccgggacaaacagaaaaataagaaaaatctaacacatcattgtaatcctgcaggaagaagagaaagaggtcctccagaaagaaaactccgaagaattaatggctgaaaacatatcaaatttatcaaaacactttag

SEQ ID NO: 401425 - DNA, 476 bp, Homo sapiens
ctcccagaaggcaaagattacatcttcttgtacttcttattcccaggatccaggatagaattatctcaaattctaaattagttgtgtgtgacttcatgaaatttttttctttgagaagagaaactcctttggttaaaggacacacagctttctgactatactgctgtttggaaggggtgtgttttttaaaatgttaattagaatttatttggctttcgaaaattcataaacataatggaaacagaaatgacacaggaggcttcagaccacatccctttaaggtaactactctgcccacctgctttcccacaggctcagtgtggccagagctgactgcgaggctggctttatgctgctgctgtggtgggacctgggccccataacctgtaccctcctgaagggaggcccacagtgccagtccacaggtcgatgcagccttggttcgctgcctctggtgctgactgcaggggcctggc

SEQ ID NO: 401426 - DNA, 233 bp, Homo sapiens
tcttcattcacaattccaccctcctcatgcaatccacatcatacacattcacagaaataactcccaccacacagcacttcaacaagaatatccatctagtgaaagccaactgtaggcgtactttctcctatttacttttctctctcattcacatataccccagcttacatacagctccattcacatacacttatgtaaatacacatgtgtgcacatcaaaacaccatcactca

SEQ ID NO: 401427 - DNA, 428 bp, Homo sapiens
aaaagccttctcggttcccctagttgaaataagtcttcttccctcttccaggttcctttagcacttactatctctcttataacttgtttcatagtcatccttatttcagatttatttgtgtgtgtatgtcctgcaggaacatggagtgtaggaatctcacttccatcccactccatagcagccagcccagtcctcagcccatctattcagtgggtgctcagtctgtctttgtttaatcacttgaatttgaatgtgagaagggacttcagaacagccattcatatccctttgtaaagagttctgaactcttgcttaatcattgttgactgactcctctacatggcaaagcagaggaaaccttatgtctttcttgagttaaaattaccataccttgttataattctctatttctgtaatgttggcccaca

SEQ ID NO: 401428 - DNA, 2364 bp, Homo sapiens
  misc_feature (883)..(883): n is a, c, g, or t
  misc_feature (916)..(916): n is a, c, g, or t
  misc_feature (1085)..(1085): n is a, c, g, or t
  misc_feature (1182)..(1182): n is a, c, g, or t
  misc_feature (1245)..(1245): n is a, c, g, or t
  misc_feature (1388)..(1388): n is a, c, g, or t
  misc_feature (1629)..(1629): n is a, c, g, or t
  misc_feature (1744)..(1744): n is a, c, g, or t
  misc_feature (1803)..(1803): n is a, c, g, or t
ctgaggtaaagttgggagcgcagcggcgttggcggcggcggcggcggcagcggcagcgcggcggggccggtattctaccttgtaaatactgttatttgtatatactgtaaatgatgacatcggtgggcactaaccgagcccggggaaactgggaacaacctcaaaaccaaaaccagacacagcacaagcagcggccacaggccactgcagaacaaattagacttgcacagatgatttcggaccataatgatgctgactttgaggagaaggtgaaacaattgattgatattacaggcaagaaccaggatgaatgtgtgattgctttgcatgactgcaatggagatgtcaacagagctatcaatgttcttctggaaggaaacccagacacgcattcctgggagatggtcgggaagaagaagggagtctcaggccagaaggatggtggccagacggaatccaatgaggaaggcaaagaaaatcgagaccgggacagagactatagtcggcgacgtggtgggccaccaagacgggggagaggtgccagccgtggacgagagtttcgaggtcaggaaaatggattggatggcaccaagagtggagggccttctggaagaggaacagaaagaggcagaaggggccgtggccgaggcagaggtggctctggtaggcgaggaggaaggttttctgctcaaggaatgggaacctttaacccagctgattatgcagagccagccaatactgatgataactatggcaatagcagcggcaatacgtggaacaacactggccactttgaaccagatgatgggacgagtgcatggaggactgcaaccctcgtgccgaattcggcacgaggggtgagccgagatcgtgccattgcacnctagcctgggcaacaagagtgaaactccgtctnaaaacaaaaccaaaccaaagtactgggattataggcatgagccactgtcccgcccttacgtttgtttgtgtgttttttttttttttgagacagtgtatcgctctgtcccccaggctggagtgcagtggcacaatctcggttcactgcaacctccacctccagggttcangcgattctcctgccttaacctcccgactagctgtgactacaggtgcctgccaccacgcccggctaatttttgtatttttagtagagatggggtttcnccatattagccaggctggtcttgaactcctgaccttgtgatctgcctgcctcggcctcccaanatgctgggattacaggcgtgagccactgcacccggccacattttttttcccctcattttcacacacacaaaactaacagtaatcccttaatatttttaatgttgaaatatcccaaagactttttttttttttttttttttganatggagtctcactgtgtctcccaggctggagtgtggtggcatgatctctgcttactgcaacctctgccttccgggctcaagagattctcctgcctcagcctgccaagtagctgggaatacaggcgtgtgccactatgcccagctaatttttatgttgttaacagagatggagtttcaccatgttggccaggctggtcttgaactcctgacctcaggtgatctgcccacctcagcatcccanagtattgggattacaggcatgagccactgcactcagtcccttgtttttaaaagcaataaaggttagtgggggccgggtgcggtggctcacacctgtaattccagcactttgggangcttaggtgggcagatcacttgagctgaggagttcgagactagcctcggcaatgtggcnaaaccccgcctctataaaaaatacaaaaatgaggaaggggtggtggcacgtgcctgtagtcccagcactgggggagctgaggtggggaggatggtttgagcctgggaggcaaaggttgcagtgagccaggatcatgccgcttcactccaacctgggccacagaaacagaccctgtcttaaaaaaaaaaaaagagggtagtgggttttggaggaaggaggtcttgcttctgaagtcccagctcttctatctagccaggtgactttgggcaagttgtttattgtttatactccttcgtaaaatactgctgacttctctgcattgttgggaatgagatgtttgtcaaggatttagcatgtggtgataaatcagtaaatgttgaatatttcctggtattaataataaaggctaggaataaaaattcatacttaaaggaaaatggacttttatttatttatttatttttgagacagaaatcgcttgaacccgggaggcggaggttgcagtgagctgagattgcaccactgcaccccagcctgggcgacagagcgcaactccatctc

SEQ ID NO: 401429 - DNA, 343 bp, Homo sapiens
ttttatttttatttttagtagagatgaagtctcactatgttgcccagggtggtcttgaactcctggacttaagtgatcctcctgcctcaggctcccaaagtgctgagattataggcgtgagccaccatgctcagcctcaaacactttccacttcgtctctctcttttatcaggcctttggctttggattttctttctgtagctgctctttctattccttgaatgattcagccagctctcctctaacacttcggctagttaggtgcatctctttgcaaagggaactcattttttcctccggtgtatatatttttaaacttttcattatggaaaatttcacatat

SEQ ID NO: 401430 - DNA, 311 bp, Homo sapiens
ctgtaattgggctaatacctataaggcacaggatgattctgactcccatgattcagagcatgttgagcttagcatggtcttatgtattaatagtttaaaaacacagtgaatgaacacaatcctaatgaacaatttctaaagatggacagagcacttcacctggtaattacttttcacatcctttcattcacgtactcacttgctgcacagctactatctcctcactcgtgagtattattcctcacttatctgtctgttgagcaagaacaacgcagacactaaacaccctgatgctgcttggtcctgaagaa

SEQ ID NO: 401431 - DNA, 393 bp, Homo sapiens
atctcaaactaatatctacctataaataaagaatagtatagaactccctcggaagctgacataagggttcaacccactgaaatgcaacaccaatgaggtatgttacagaatttggcagaattgtaccagtcttttatggttccaaggtctgggctaatagaactttaaccaagatttggggttttaggtttcctctttcttatccttcagacatgacatcacttgggcatattttttctatcaattaaactcataaaatatatgatgctaaaaaaaggggccaggcagttttctgactgtctctacagccaaaagaaatagagctgaaacagctgaatccagataattcaaaggagaggtagagggatcaagaagagaaagagggaaagaaag

SEQ ID NO: 401432 - DNA, 727 bp, Homo sapiens
cccagccaccttttcctcatccaataatactcgaagctgtcattgggtgattttgaggattaaatgagaaagcatttagcccagtgcctcatgcagagaaggtgcttttttttctattaactttacaagcagtaatgctgaaccttagtcagtgtctttctctgtaatatacatgtgagccaatcaggtagaatctcagtggcacccagggctggctcacagaatgtgtctgtctagtgaatgttggttcagtgaaggaactttgcatcaggtggttcggcaggtgtatttctgttccagtttcaaaccaggtgactacgtgttaggacgtagcaatctgaagcccttctgaaaggaacatgttttattaaaagtgccttgtaagccaccatgtcaaatctagccaagatgctggtggacaacccattagtcactttattcagagatcagattctaactgcccatagggctgaaatctttggccagattttcccaggaggagccctcagagaacagtggcccaggtgcccaacaggaccctacacagtcggtttctttccttgttcggggacagacagagcgattggcgatagctgttaccatctcacttaaaaatacttgagcaagttattttccctcctcgggagctcttagacaagcaagttcttacttaacaacaaaaaatgctttgcttcattccttttctccttgatcttatatttccatt

SEQ ID NO: 401433 - DNA, 701 bp, Homo sapiens
cagataaaagtgatggcttctagagggaaagaatctgtttttcattataaatcatggtttcgcttttaactattaagcaattaaaaatataatacaattttaaagaaataagaacaattctacaagtatccacacagaaaagaaggatgaaaaaaggaaaactaaaccaaaggtctcagaatcctcctctgggagactggaatttccaaaattggaatggccacaataattatctcccacatgagctgtcctataatgtgactttgctgctactccctgcacatggagatgaaatctattctcccccattagaatatgtgtgggccatgtgactgttctgaccaataggatacagtataagtgatgtggtgagttctaggtatagcccttaactagtttggcaggttgctgcctcggagccacaaactgctatgtaagaagtccaggctactttgctgaagagacaggccaaatagaagggcaaggagtttccagacacatgagtgaaaaagacatcttgaatatctggccagccaagctttaagatgtttgttacacagcaggaaataaccagaacatcaccagcaacaaggaatgctagaacagaatgtagcaatgtccacaaagactagaaggaaagggatatgagctgagaattctgtacacagcctcgacatgttcggggtcctctagagtaacct

SEQ ID NO: 401434 - DNA, 479 bp, Homo sapiens
ctctccccaaatcttatgaaagttagagtttatcaaagaagatgattcttcagaggaatttaagagtagaaagcactgaggcatatcctacccccaccacaaaccaagtgaggaaatccccaaaagcatcattcagaaatagttgatagtgggacacatgctagcagagctgaagcagtttgtaggaatctctgttgttgtaggaatctctctgttgctgtctgtgtagagagacttcttgggaggactagacacatgatctatgagaactgcagaaatctcagcacataatgactctatctaagcctctgcattaagagaggaccacagtctagcatgatctctagcagcatgaggccctgtccctaggatgaccccagttcccctgcccctccattgaaatgcctacctgagaaagctcaatactgccaggtgaatttatttgcttcagccatgcctgaagacaggcctctgacctc

SEQ ID NO: 401435 - DNA, 456 bp, Homo sapiens
cgcagcacagcgtagtccaaatgccagaaacctggcaacaacgatatcgtgcgggagtcggtccgagatgtcccagggaatctgaacgtcttcccagccgctcaggatgtctctgattgtcatgatccccattagaacgtctcagaaactgccaaccaccatggcttccatgaagccccaagaatccttcagcaaagctccatgttgcaaactaaagcccagggtgtgcatcatgaagacgccatccctgtgtcccgggttcagaggcttgtacccgggactcgggcatgagaccccattacgggcctgagcacagcaccaagaccgtcaaacgctaaaaacaggcacaggtggaagtctcacgtggcccgcccccccgcatctagacttgtgttttacagtaaatgacgaaatgcagtccagatacctaaaagatgaaaactaatctttgtgatt

SEQ ID NO: 401436 - DNA, 466 bp, Homo sapiens
tggtggcacttgcggctgcagttgtttaccctgagataactttgccacgaaatatctcgcttttattattatttttacatcactgtagtatatcaactttggaaacaaaagacatcattctgtccatagcattctgtttttagtagtggtatttccatttacacaaacaaaaatcgagaaaatttgacagagaattactatactcaatcgctgaaaatgtcagatccttagaaaacatagcattcttatgcatgatgttaacatcgtactcaaatacttgatgcctagaggttcattcgatgaatccaggttttttgaaatagatgtttctgatgattcagacaattctgatgttaattctctttagaaataactcccaagaagagttttatattttattttcacagtaaaaatcagtcagatttgcagtagccttgaagagagtgttcatgtaaaattaaatgcg

SEQ ID NO: 401437 - DNA, 546 bp, Homo sapiens
  misc_feature (404)..(405): n is a, c, g, or t
  misc_feature (407)..(407): n is a, c, g, or t
caaactcttgaccttgtgatccgcccacctcggcctcccaaagtgctgggattacaggcatgagtcaccacgcccagccagatacagatatataaattttatataagttaatattatatataattgtatttatatagttatgcagtaaaatataaatattcatgttattttatttaataatgtatattttatattatctgtttataattatacatttatatatttgatattgttatacaaatatgtggttatataatatggtatagatataaatataaatttatttttactgtgtaatatagaaatagatataattttatttctcctaaccactctgaaatatatatatgtgtgtgtgtgtgtatatatatgtgtgtgtgtgtgtatatatatatactcacgcnnanaaaaaatttttatagagatattttttaatatattattaattaatttatttattatggtaaactaaattattttatattttaaatatgtaattaaattgtttaataattataaaatatttacgtttgatatggtttagaa

SEQ ID NO: 401438 - DNA, 215 bp, Homo sapiens
atttgaaatgcttcacatttaatagttagttgattgtcatcatatctctatcagtaggcgtattatcattcctgtttctaaatgtgagcatgcagcaggcaatgccagtgtaaacactgaacaatccattacataatcatccctgttaatgttttatgcaggtaaatgtatagaggaaaagaaagatgggaaaaagaaaaaaaggaagtggaaag

SEQ ID NO: 401439 - DNA, 438 bp, Homo sapiens
ctgtaaacacatactgtctagtacctttggcttattttaatttaataatatatctcacatcacattcttctgaaagaagtataaaaggaaaaaaaaacatacctaggtgatcagaccatatcaacatatctggagctaatttcttaaaatttggcaaattcggccgggtgcggtggctctcgcctgtaatcccagcactttgggaggccaaggcgggcagatcacaaggtcaggagtttgagaccagcctggccaacatggtgaaaccccgtctctactaaaaatacaaaaattaggcgtggtggcgggctcctgcaatcccagctgcctgggatgctgaagcaggaaaatcgcttgaacccgggaggtggaagttgcagtcagctgagatcatgctactgcacttcagcctgggtgacagagtgagactctgtctca

SEQ ID NO: 401440 - DNA, 503 bp, Homo sapiens
tgggcccctaggaaacctggatgttgtttccctgttagtctgagttcagaaatactcccatgtcaccaactctgtctttgttcttattataaaattattactaatgagagcggccatttatgaagtcagttctctgagccaggcgctgggcgaggcactttgcattcatctcagtcttgacaacagtccggtggaggtaggaggtcttgaccccgttgacagtgaggagtggagacttaccaggtgacacaagtgctgttcatcaaacagctgttgaacgatgagactgggagtgagaccagctttgttcacctacgaaatctatgccttccacaaagccatttccactgggatctgagaggtgcctccggtaccactgtatagtgagccccatggcctaggtttccactgggaagaccccagctccagccctccttcctttcctgtctgggtccttcccaagctctgcaagaggatgtgcagggtcagctgtgcagagtgtg

SEQ ID NO: 401441 - DNA, 138 bp, Homo sapiens
agagttaatggtaatggaccagaatgatagcagtggagctgggaattctggatccattttgaaagcagaagaaaaacaaacaaataggctttcctgatgcattggctgtggggtatgagaggatgagagaagtcaagg

SEQ ID NO: 401442 - DNA, 219 bp, Homo sapiens
agggtttcaccatgttcaggctggtctcgaacgccagacttcaagcgatccacccacttcagcttcccaaagtgttgggattacaggcgtgagccactgcacccagcctggatttttttttcaagctaacaatatgctatctacaaaactttcaacacaaagatacaggtttgacaactaaagggagacagcatatacactaggcaaaaaggcatgaga

SEQ ID NO: 401443 - DNA, 237 bp, Homo sapiens
acatttctgaaatctggatgtgtcttataattggtggcatccttcgattataattggcaccactcttttccctttcttaatggtacataaactaatagtacatcttatgactgaacagcatcttacattcaaggacaagtgccatgtctccatctaaatccatcatgttatctctaagctgatagaatattacatagccattaaaactatcataagacagactttaatttatttcac

SEQ ID NO: 401444 - DNA, 3210 bp, Homo sapiens
ggcacgaggcaacaacacggccctggtcgtcgtcgccgctgcggtaacggagcggtttgggtggcggagcctgcgttcgcgccttcccactcccctcgccaccgcccgagcccaggttatcctgaatacatgtctaacaattttccttgcaacgttagctgttgtttttcactgtttccaaaggatcaaaattgcttcagaaattggagacatatttgatttaaaaggaaaaacttgaacaaatggacaatatgtctattacgaatacaccaacaagtaatgatgcctgtctgagcattgtgcatagtttgatgtgccatagacaaggtggagagagtgaaacatttgcaaaaagagcaattgaaagtttggtaaagaagctgaaggagaaaaaagatgaattggattctttaataacagctataactacaaatggagctcatcctagtaaatgtgttaccatacagagaacattggatgggaggcttcaggtggctggtcggaaaggatttcctcatgtgatctatgcccgtctctggaggtggcctgatcttcacaaaaatgaactaaaacatgttaaatattgtcagtatgcgtttgacttaaaatgtgatagtgtctgtgtgaatccatatcactacgaacgagttgtatcacctggaattgatctctcaggattaacactgcagagtaatgctccatcaagtatgatggtgaaggatgaatatgtgcatgactttgagggacagccatcgttgtccactgaaggacattcaattcaaaccatccagcatccaccaagtaatcgtgcatcgacagagacatacagcaccccagctctgttagccccatctgagtctaatgctaccagcactgccaactttcccaacattcctgtggcttccacaagtcagcctgccagtatactggggggcagccatagtgaaggactgttgcagatagcatcagggcctcagccaggacagcagcagaatggatttactggtcagccagctacttaccatcataacagcactaccacctggactggaagtaggactgcaccatacacacctaatttgcctcaccaccaaaacggccatcttcagcaccacccgcctatgccgccccatcccggacattactggcctgttcacaatgagcttgcattccagcctcccatttccaatcatcctgctcctgagtattggtgttccattgcttactttgaaatggatgttcaggtaggagagacatttaaggttccttcaagctgccctattgttactgttgatggatacgtggacccttctggaggagatcgcttttgtttgggtcaactctccaatgtccacaggacagaagccattgagagagcaaggttgcacataggcaaaggtgtgcagttggaatgtaaaggtgaaggtgatgtttgggtcaggtgccttagtgaccacgcggtctttgtacagagttactacttagacagagaagctgggcgtgcacctggagatgctgttcataagatctacccaagtgcatatataaaggtctttgatttgcgtcagtgtcatcgacagatgcagcagcaggcggctactgcacaagctgcagcagctgcccaggcagcagccgtggcaggaaacatccctggcccaggatcagtaggtggaatagctccagctatcagtctgtcagctgctgctggaattggtgttgatgaccttcgtcgcttatgcatactcaggatgagttttgtgaaaggctggggaccggattacccaagacagagcatcaaagaaacaccttgctggattgaaattcacttacaccgggccctccagctcctagacgaagtacttcataccatgccgattgcagacccacaacctttagactgaggtcttttaccgttggggcccttaaccttatcaggatggtggactacaaaatacaatcctgtttataatctgaagatatatttcacttttgttctgctttatcttttcataaagggttgaaaatgtgtttgctgccttgctcctagcagacagaaactggattaaaacaattttttttttcctcttcagaacttgtcaggcatggctcagagcttgaagattaggagaaacacattcttattaattcttcacctgttatgtatgaaggaatcattccagtgctagaaaatttagccctttaaaacgtcttagagccttttatctgcagaacatcgatatgtatatcattctacagaataatccagtattgctgattttaaaggcagagaagttctcaaagttaattcacctatgttattttgtgtacaagttgttattgttgaacatacttcaaaaataatgtgccatgtgggtgagttaattttaccaagagtaactttactctgtgtttaaaaagtaagttaataatgtattgtaatctttcatccaaaatattttttgcaagttatattagtgaagatggtttcaattcagattgtcttgcaacttcagttttatttttgccaaggcaaaaaactcttaatctgtgtgtatattgagaatcccttaaaattaccagacaaaaaaatttaaaattacgtttgttattcctagtggatgactgttgatgaagtatacttttcccctgttaaacagtagttgtattcttctgtatttctaggcacaaggttggttgctaagaagcctataagaggaatttcttttccttcattcatagggaaaggttttgtattttttaaaacactaaaagcagcgtcactctacctaatgtctcactgttctgcaaaggtggcaatgcttaaactaaataatgaataaactgaatattttggaaactgctaaattctatgttaaatactgtgcagaataatggaaacattacagttcataataggtagtttggatatttttgtacttgatttgatgtgactttttttggtataatgtttaaatcatgtatgttatgatattgtttaaaattcagtttttgtatcttggggcaagactgcaaacttttttatatcttttggttattctaagccctttgccatcaatgatcatatcaattggcagtgactttgtatagagaatttaagtagaaaagttgcagatgtattgactgtaccacagacacaatatgtatgctttttacctagctggtagcataaataaaactgaatctcaacat

SEQ ID NO: 401445 - DNA, 1349 bp, Homo sapiens
gcctggaactgcaggatacactcccctcctgctacctaggcaggcgtgagggtgtgacggccgcgcattcgccagacgagagcgatggctgagaacgccgcaccaggtctgatctcagagctgaagctggctgtgccctggggccacatcgcagccaaagcctggggctccctgcagggccctccagttctctgcctgcacggctggctggacaatgccagctccttcgacagactcatccctcttctcccgcaagacttttattacgttgccatggatttcggaggtcatgggctctcgtcccattacagcccaggtgtcccatattacctccagacttttgtgagtgagatccgaagagttgtggcagccttgaaatggaatcgattctccattctgggccacagcttcggtggcgtcgtgggcggaatgtttttctgtaccttccccgagatggtggataaacttatcttgctggacacgccgctctttctcctggaatcagatgaaatggagaacttgctgacctacaagcggagagccatagagcacgtgctgcaggtagaggcctcccaggagccctcgcacgtgttcagcctgaagcagctgctgcagaggcagagaacagcattgacttcgtcagcagggagctgtgtgcgcattccatcaggaagctgcaggcccatgtcctgttgatcaaagcagtccacggatattttgatccaagagagaattactctgacaaggagtccctgtctatcatgatagacacaatgaaatccaccctcaaagaggactacttcggatacaatcacagcaaccctggcctcggccctgccctgtccctgccatgcaacttcacaactcagctggcctagacccctgggaggcctccaagtccctaagcggttccagtttgtggaagtcccaggcaatcactgtgtccacatgagcgaaccccagcacgtggccagtatcatcagctccttcttacagtgcacacacacgctcccagcccagctgtagctctgggcctggaactatgaagacctagtgctcccagactcaacactgggactctgagttcctgagccccacaacaaggccagggatggtggggacaggcctcactagtcttgaggcccagcctaggatggtagtcaggggaaggagcgagattccaacttcaacatctgtgacctcaagggggagacagagtctgggttccagggctgctgtctcctggctaataatctccagccagctggaggaaggaagggcgggctgggcccacctagcctttccctgctgcccaactggatggaaaataaaaggttcttgtattctca

SEQ ID NO: 401446 - DNA, 403 bp, Homo sapiens
gtatgcagctggggagggagtgagggaatgtcacccacagctcttttgtcccccaggtggcgtcgtgggcggaatggtgagtagatggctttgtctggccaactggggctcccttgggtggagtggggaggggagcacaaaggaggaaggagaaggtacctgggacagaaagtgcctcctcctgtcacagtgatagtccttataccaggaagttggtgtaaacggtggagactcctggtagagttcatgtttccacgcccccatacccggtcccaccgcaccctggagtccagccatcaccaaggtctggagctcagtgctgggtgcagacttaggggtggtgggggaaggcacaccatagatagaagattctcctctggcctcttggtcagcaccctccccc

SEQ ID NO: 401447 - DNA, 1206 bp, Homo sapiens
agctaatagtcacactttttttttttttttgagatggagtctcactctgtcgctcaggctggagtgcagtgggaagatctcagcttactgtaacctccacctcccgggttcaagcgactctcgtgcctcagcctcctgagtagctgggattacaggcacctgccaccatgcccagctaatttttatatttttaagagatgggggttcaccatgttggccaggctggtctcaaactcctgacctcaggcgatccgcccaccttggcctcccaaagtgctggttttgcagatgggagccaccatgcccagcctagtctcactttataggctcccaaaccacagcagaacacctggctgcctcatccctctgcacccatcacgccagtgggcatgctggctgtaggtggggatggcctttgcccgggttcctgggagcacctggtgttttatggtcacctacccacttacacctgaccctggggcctctgcagttttcttggcgttgtcaccacaaaaggaagaagcccacctgtggctggctggctggccgccaggtcagagccaaggcaggcagggccttcctgtctggcttcttgaaggcagacacaagtctgcaggctgctcacgtcatctcattatcttttctcacgaggactacttcggatacaatcacagcaaccctggcctcggccctgccctgtccctgccatgcaacttcacaactcagctggcctagacccctgggaggcctccaagtccctaagcggttccagtttgtggaagtcccaggcaatcactgtgtccacatgagcgaaccccagcacgtggccagtatcatcagctccttcttacagtgcacacacacgctcccagcccagctgtagctctgggcctggaactatgaagacctagtgctcccagactcaacactgggactctgagttcctgagccccacaacaaggccagggatggtggggacaggcctcactagtcttgaggcccagcctaggatggtagtcaggggaaggagcgagattccaacttcaacatctgtgacctcaagggggagacagagtctgggttccagggctgctgtctcctggctaataatctccagccagctggaggaaggaagggcgggctgggcccacctagcctttccctgctgcccaactggatggaaaataaaaggttcttgtattctca

SEQ ID NO: 401448 - DNA, 1080 bp, Homo sapiens
atgagtgagaacgccgcaccagacttttattacgttgccatggatttcggaggtcatgggctctcgtcccattacagcccaggtgtcccatattacctccagacttttgtgagtgagatccgaagagttgtggcaggtggcgtcgtgggcggaatgtttttctgtaccttccccgagatggtggataaacttatcttgctggacacgccgctctttctcctggaatcagatgaaatggagaacttgctgacctacaagcggagagccatagagcacgtgctgcaggtagaggcctcccaggagccctcgcacgtgttcagcctgaagcagctgctgcagaggttactgaagagcaatagccacttgagtgaggagtgcggggagcttctcctgcaaagaggaaccacgaaggtggccacaggtctggttctgaacagagaccagaggctcgcctgggcagagaacagcattgacttcatcagcagggagctgtgtgcgcattccatcaggaagctgcaggcccatgtcctgttgatcaaagcagtccacggatattttgattcaagacagaattactctgagaaggagtccctgtcgttcatgatagacacgatgaaatccaccctcaaagagcagttccagtttgtggaagtcccaggcaatcactgtgtccacatgagcgaaccccagcacgtggccagtatcatcagctccttcttacagtgcacacacatgctcccagcccagctgtagctctgggcctggaactatgaagacctagtgctcccagactcaacactgggactctgagttcctgagccccacaacaaggccagggatggtggggacaggcctcactagtcttgaggcccagcctaggatggtagtcaggggaaggagcgagattccaacttcaacatctgtgacctcaagagggagacagagtctgggttcgagggctgctttctcctggctaataataaatatccagccagctggaggaaggaagggcaggctgggcccacctagcctttccctgctgcccaactggatggaaaataaaaggttcttgtattctca

SEQ ID NO: 401449 - DNA, 233 bp, Homo sapiens
tttggaacagagacaagatgtattacaaatcttaactcactcaaaaatcaggtagtaacttgtttgcctttgaggccctgatctcctggattcttctattaatataaaaggatctctgagatcatggcttgttgtagtagcactttccattttaacattatattctccaaccggtaagattagctagtaaggaaatgtgatatagggcaagttcttttctgcagggggagtgt

SEQ ID NO: 401450 - DNA, 430 bp, Homo sapiens
aaacggacctgtgccccctccagtggaaccgcaggctcaaggcggggattgtgcattcgctctccccaagtcagcctcccccactcctgaatggctcctttgtgttgcattttacacagttctgaccttgggccgtgagttggatatgaactagaaatgtctggtttgtctctttccttcttaaattaatggcctttacccccggtgaaactgctttttatttggcagtttcgcttaattttgcctttccgcgggtctttatttatgcaacatcgccgcccgatggttagaattgggaacagagtcaaagatggaagtactgtaataccaaagacgcaagtcagcagagatcaaactaacaaaggagaatgcagtcacactttacagacgtgagattagaaattaaagtaggcaatgaggtccaacttgt

SEQ ID NO: 401451 - DNA, 349 bp, Homo sapiens
atatacgaatcgagctcgtgtaccctccataaggtcaaaacagtggtttagagagacgaagtaacttcctcaaggttacagttagtaaatatcccagttaggattcaaagcaagctttttttgctttagaattcttccccaggtcactgcctcttccatcaacttcaactatttataaattctcccaagttccccaagggagttagatttgaatgatgtaaagagcagaaacataggactgactgaatgattctcatttggcccttatcgagtgaggcaccagcgtcgtggtgtagagtgggttctcatggcacgcgtaacctcaccaggggctccaattatcaaaatt

SEQ ID NO: 401452 - DNA, 369 bp, Homo sapiens
aagatttgattatttctttctagtggagcaagaataataactcccagaaaataacatctatatctttacacttgtatctatgtctctttggatctatatcaatatctcatttatatatggcacatatctcacatacacacatatacagagagagagagatgtgcagcctgtgctctaaacattcatttgtgagttggctttttaatctgtatacatccagttttgttattgatggctgatcccaggacagcttataagggctccttgataactactgttgtaagtatactataccgtatagggaaaaatgaagtcaacttccaattctggatcccagaacaatatcttccccttttccagcagcaggat

SEQ ID NO: 401453 - DNA, 189 bp, Homo sapiens
ccacctggactctgggcccctcccacctgggctccgggcagcaacagtcgcccgccccaggtttgggcttatgcctgtgccgtatctcctggtttaatttgcattttctcaagggctaatgacatggagcatttttaatacattgttggccatttgtctttggtgatatgtgtgttcaaatcttttgcc

SEQ ID NO: 401454 - DNA, 144 bp, Homo sapiens
cctcggcttcccaatcccctcggctgggattacaggtgtgagccaccacacccagcccctttattttctttatggcatttatcacagtttgaaatctttgccatttattgatgtccttgcctgtctctgcacagctgtctgcac

SEQ ID NO: 401455 - DNA, 477 bp, Homo sapiens
  misc_feature (1)..(1): n is a, c, g, or t
ncagaggacacggtcattagggtcatgtatatagtgtatatgtgtataattttctagtattattttatgttttaaaatattagtttagccccgtttaattctgtagttaggtatttgaaatgctcattatcttgttgaattagatttttctctttaggaaatgaactcaatgctgtatgttcattttggtagctattaaaataatgtgaactgctaacaggcacacttcttttgtatcaaggttaaatcagaggtactgatgcgctgttccttcccaggctgaagaattgagaatatttgatggtgatgaatgtttcttaatgaaaatgtaaactgagaaagggaatctaagctgactttatgttttacttatataatttttttgttttaaaggtcatattgactgtaaagcttttctcatgcggaaatatggatgatctgtatagaaaggttttggcattaagatatatgtacaga

SEQ ID NO: 401456 - DNA, 463 bp, Homo sapiens
agcgtgctgttgtccgtcctttcttctcttggtgccagtgacctgaggtgtaactggggtatctgagctgatgtctgccacctgcagttcatccggtgagccaggttgtgtccctgttttatagatgtgaacactgatgttctgagtggctcaggagctgcagacagagggggccaagcaccagcacgtggccttgcaccttggctcacagtccacctggctgttgttagaagtattgctagagaggccctagctggtaccatcccagcctcatagccccagactccctctccaactggaggaccacagctctgtcctaatccaggccccaggccctgcagctgtaccctcaagaagtctagggcagggcacatccagaggtccttggagggagggcctcaagctgcttttgcccatccaggtttccacatcctaatctttgcttttcttgtcctttatgcca

SEQ ID NO: 401457 - DNA, 1351 bp, Homo sapiens
  misc_feature (4)..(5): n is a, c, g, or t
  misc_feature (7)..(8): n is a, c, g, or t
ggcnngnngctccgcccgcggccgggatgcactaggcaaagccagctgggctcctgagtccggtgggtacttggagaacttactacgtctagctggaggattgtaaatgcaccaatcagcatgctgtgtctagctcaagattttctccatccccttattttgggccagtggctgtcattacatatgagaactcaagctccatgaggagatgtttcattgtcgagagcagtcatgatggcctgcactccacacaatgcaacagagtgaaagagcaggttctgcttctttggtgtagtcctgaagcttcctaagaaacttcacatcaggtgatggataggagcaaccctgtaaaaccagccttagactatttttcaaacaggctggtgaattaccagatctccgtcaagtgcagtaaccagttcaagttggaagtgtgtcttttgaatgcagaaaacaaagtcgtggacaaccaggctgggacccagggccagctgaaggtgctgggtgccaacctctggtggccgtacctgatgcacgaacaccccgcctacctgtactcgtgggaggatggtgattgctcacaccaaagccttggacccctcccagcctgtgacctttgtgaccaactccacctacgcagcagacaagggggctctgtatgtggatgtgatccgtgtgaacagctactactcttggtatcgcaactacgggcacctggagttgattcagctgcagctggccgcccagtttgagaattggtgtaagacatcacaatcccattattcagagcgcgtatggagtggaaacgcttgtagggtttcaccagtctttcccagggaactccgatgaagtgttccaacaaaatgagcgagtgaaccaagaagaggatgacattagatccaggagatacaacagaggagataatctccaggatgcctgtgaagaaagatccctggatcccaggatgattataggacaagttgttcataatccagcaggccagaagacttccagggaaactcattcaaggaggtgaaaatgatggatgactcctccaagatgaaaatggaccagccgcagtggctcacgcctgtaataccagcactttgggaggctgaggcaggcggatcacttgaggtcaggagtttgaaactagcctggccaacgtggcaaaactccatctctattaaaaatacaaaaattagccaagcatagtggtgcatgcctgtagtcccagctacttgggatgctgaggcaggaagaattgcttgaacctgggaggcagagtctacagtgagccgagatcatgccactgcactccagcctgggcaacacagtgagactccatctc

SEQ ID NO: 401458 - DNA, 638 bp, Homo sapiens
aggcgtgagccaccacacctagtctttaccaaattattaatctctccaagctgtaccctcctcatcttttaaaggagttgaaattaaacctttcttatgaagtagtgagagagaactaaatgagaaacaccatgttaaaatagtgcagttctgattttttgtagctcgtaatttcgtttgtattgatactgatttctgtatctgggaattaggttactgaacatgtattgctacttgagttgctttgtgctcgaattatatcagtagataagaaaataaataattaaaatttattgttttatgggatgggaaaaggaaagtcattattttaagcaagatatcaaatgcttaatctgtttgtgatatttgggggtttttagctattaaacacctttatttttgaaaattctgcagaaaaaaattattcaacagatactcggtttcagctgtgtatcagggaaacatgcagaatgacatggtttcctgcacagtcaaacttgcattcagttggggcaagaaaaaaataatgaaacattaaaaaaaaaaaaagataagtgatattaacacaaagggcttccctaaagaaaaaacagaaggctacctaggatgactaggcaatgccttttaaatatggaact

SEQ ID NO: 401459 - DNA, 747 bp, Homo sapiens
tcaataagattatctttactttttgagttccttttcaggatttagaataattttgttaaagggggacgtgaaataattataattttaatttatttgaaaagacatataattgtattttaggcactgtaattaagttcactattttaaagttaggctataaaaatgaactcaatatatttgcatataataaaatgtaagaagtatattagctcttgtttcttaaaatacaaatatatattggcttttgaaacatttagaatgtaatagctcatgctatccatttccttatattctgaatattttaaatcagaaatcaagtctcattgagttttccaattctcacacaaatacaagttctaaactttcctgtagaatttagaagtaaattatttgactacttttttcacgctcaaacatttctaaaattttaactaacctcattagtatttatatcttacccctcttaaaaaggaaatttcatgtaattattatttttatatagatttttaatgttttactataatacagacttatttttaagctctagctgaaaaatacctcttagctcagatatttatttttttacttggtacctcttagtttagatgttcatttttttacttagtagcttttatagtataaactattagtcaaagaatatggtcatgtttaaaataaggtatattatttattgaatacaagcaatagttcaatgatttaagttctatatttatcttctcagagtaa

SEQ ID NO: 401460 - DNA, 421 bp, Homo sapiens
gactctggacagaagttatagctccacggtctggacgcagccacctccccaccgggccacctgctccgatcctatgtggaagtcatgggccactaagagagcctagagtggcacagtcttgactctgaatctttaaaaacttcaggactccttgacttctcatttctagcattcagacttttaatttttaatgggatgaggcccaaaccaatttaataatataaatgacgactgattttaaagatctctgagcatttagaatttttgccattgggacatttttatggaaggaaggaacttaggcataggtctagtttcaggtcatgtaaaaatgctggcctattaagaagttaaagttaatttaaattaaaatattcacagtgacatttaattccagtggggctgttctgtctgctgaagg

SEQ ID NO: 401461 - DNA, 568 bp, Homo sapiens
caaatcaaaagaggtgcctttaccaaatccaaggaactctcaaagcaaggatactgttcaaggtatgattttgtttttttaaacagaacttaatacctcatttaggtcatgtgtattaaattttggtctaataaatgaaaattatacctatgctttgatttatagaaagtggataaatcattttaaaattctcttatattttaaatatacctggtgcttcatgttaaaaggcatcctatggtaaactgttttgtaaagcaggaatccttttttaaaatgaaccagtatatgtaaaatttttcagaaattctgtcctaatttcaataaatgatatagccccaatatagttacagacttataggggtacagataataatagtaacagtctcattgaattctttttaaaataatgcattagaggtaattttaaggcattgatattttttgagggagattgacaaactagagtacatctggaggaagattattaggtttgtgagagatctggaaatcaagtcatatgaagagtagttggaggaagtggaaatacttatcctggagaaggatg

SEQ ID NO: 401462 - DNA, 473 bp, Homo sapiens
caaatcaaaagaggtgcctttaccaaatccaaggaactctcaaagcaaggatactgttcaagatataaccacatcgtgggatgcactttctcaaaccaaggctgctctgagacacattgaaaataaattagaagtagcccctacaagtacagctgtgtgtgattctgtcatggataccaagaagtcttctacaagtgctactcgaaaaataagtagaaaagatggtagatacctggatgattcttgggttaatgctccaatctccaaatccactaaatcacgaaaagagaaatctcgtagtcctctcagggccaccaccctggagagtaatgtgaagaaaaataatcgtgtggaatttcgtgaacctttggtttcttatagggaaatccatggtgcaccttccaatttcagttccagccatctggaatcaaagcacgtatactgtgtagatgttaatgaagaaaagactgaga

SEQ ID NO: 401463 - DNA, 179 bp, Homo sapiens
ccacaccccccaacccccatccacacaccccacacctccacacctcctcacaccctacacctccatacaccccacacagctccacacaccccacacctccacacacctcacacctccacacaccacacacagctccacacacccacctccacacacctcacaccccacctcacacaccc

SEQ ID NO: 401464 - DNA, 471 bp, Homo sapiens
ccaagtgtgtcaacttgagtcctctgggaagcaaatgccaaaacgaagttagacatgcaagagacttattgggggtaagtcctgtgtaactggaggggagagagaacaggagtagtccagaaaagccttcagcccataacataagccttacacctatgaaaagagatggggaaggaaaggcggtgtggtaggaggatccatagactgcagtgccactctgagaaagccttggccaacccagtggggattctggggcaaagctgggccaatagaagtctgcattgggcagaaatggccagcccagtacctctactgtgttgtcattggctggagcagcctggagagaacacatcctcatctcaggtgctttgcaaatggccaggcacggcacaatgggaggcagaggtgagaggactacttgagcccaggggtttgagaccagcctgcacaacatagagagacccccatcta

SEQ ID NO: 401465 - DNA, 445 bp, Homo sapiens
tgttaacatgttattcagattagagacaagtcttgctggtctgagagctgtcagtcattctgaggcgactgtgtctttttaggttcgaattcaacatttcacttgaatgtaagctccaggagtgcgggaattttgactaagttcatagctatatcccaacatctggaaaggaacttggcacatagtagatatttcacaaatacctgctaattaaaaacatgaagtatatattgatcctagagcctaactggttactaggatcaagtatggagttcttatccaaggactgtgctatggaaccccgagttaaacagtaatcatggctgggtgcagtggctcacacctgtaatcccagcgctttggcaggccaaagcaggagggttagtacttcaatctgggagtctgagaccggcctgggcaacatagggagatttctgtctctcct

SEQ ID NO: 401466 - DNA, 613 bp, Homo sapiens
atatgagaggagaattagtgtccaggccacacggcaccagcctcgcctttgacaattgaggaaaccaagagggggagtcgctcttccaggcagggtaaccagtcatcctggtttgctggaaactgaggggactcaggctttactgggtatgttcaaagtctggttgccgagcctgtgtgtggcaccaaactattgccttcaattttttgtttgctgaattaataaatgcaaatgaatgaatgaatccttccctctcactgcccttctcagtcctccttgggcaccttggctcatgtgccttggtctgagtctagactgtgccagcagcatcctgtgggaggccagatggctggttccgctgctgagttccaagaaaccccttggcccctgcttggttcagcctcagccttcaggaaccccccagggtccacccaacaggcttgtaccgtgtgcctagggaggaggctgggttcccacctggtgagccactcagccccgtagtattagcggtttggcttcagacttgtcactttgcttcttggagctcagtttcctcacctataaaatcacagtactgggggctgggcgcggtggctgacacctgtaatcccag

SEQ ID NO: 401467 - DNA, 431 bp, Homo sapiens
gcggccgcctactactactaaattcgcggccgcgtcgacccgctgggaaggaagcagggaagcaggcattgttgagtgtcgattgtgttgtgattttcctccactttggtctcgaggtctctctggagggtggctgtgaactctggccctgccgtgacgaggctccagggagctgttgtgggcgtttacagcctgcctttcatgagacatttcatcctggcgcatagcctaatgcctgcgtgtccgccccgtgagcagctgtccctcccataggagtgtgtacctcttgcagacgccctgcggctcccgtctgacccacgtctagtttctccccaccaaagtctcccctcgctaggagagccctgaccaggaggagagtcgggcccaggcatgtcggtcagggaagcagagaggaggccccgcggcagaac

SEQ ID NO: 401468 - DNA, 1335 bp, Homo sapiens
agcgctcgccggctcctcgcgcccctacccgctgcgctctgcccagagcagaagcccggccggccggcccacgggcgggaggacgcgcctccgctcgggcggaggcggcgcggtggctgatcagagcgcgtagggcttcgccggggccgggagctgggcgcggtcctgctcagcccagctcaccgcgcgccggccctcggcgccctggttctgcggatcaggagaaaataatgaatgtcaaaggaaaagtaattctgtcaatgctggttgtctcaactgtgatcattgtgttttgggaatttatcaacagcacagaaggctctttcttgtggatatatcactcaaaaaacccagaagttgatgacagcagtgctcagaagggctggtggtttctgagctggtttaacaatgggatccacaattatcaacaaggggaagaagacatagacaaagaaaaaggaagagaggagaccaaaggaaggaaaatgacacaacagagcttcggctatgggactggtttaatccaaacttgaaggaatccgaataactaaactggactctggttttctgactcagtccttctagaagacctggactgagagatcatgcggttaaggagtgtgtaacaggcggaccacctgttgggactgcgagattctcaaggggaaggactgggtctcatttctcccatctcagcgcttagcaggatgacctggtatagagcagggaactgggaaatgtgggtcaggggatcagacactccagttgggtcttttatataaattaaatggcaaaaggctccatacccttctccttctttcctaccctccactttatctgcaaaatgggaatgatgataacacccacttcatagaatggtcatgaagatcaaatgagagaataaaagtcaagcacttagcctctggtgcacaataagtattaaataagtatacctattcctccttttccttttttaaaaataatattaccaaatgtccagcttatacacatttacaagacttagctagtgggctatgttagagctactaaaagatctttgacaagctaaaactaagatgcaatgaatgaggtgtaacgaacaagagagttttaagttcagaaatggttacagaagtataagacagctgtgtgggtgttttttggtttttggtttctggtttacaatctcgtcattcaacaaagatgggagttttatagaactaaaagcaccatgtaagctactaaaaacaacaacaaaaaaggctcatcatttctcagtctgaattgacaaaaatgccaatgcaaataaaaatgattactttttattttatattg

SEQ ID NO: 401469 - DNA, 409 bp, Homo sapiens
accatatatatatggtaaattagaataatctacactgtcttagagtctttaaagtatttcacgatctcacatatacctaaaatctaaaaaagtcaaacttatagatgcagagagtagaatggtagttaccaagggctgagggaggaggaagtgggggaaagacaagcttcgatcaaaggataaaaatttcagttagacaggagaaataagttcaagagatctattgtacaatatggtgactatagttaataatcatgtattatatacttgaaaattgctgagagagatcttaaatgttctcacaacaaaaaataagtatgagaggtgatgcatgttaattagcttcatttaagcatttcacaatgtgtacacatatcaaaacatcatattatgaaactaaatatgtaca

SEQ ID NO: 401470 - DNA, 552 bp, Homo sapiens
agtgacgcattttctcctctgcagtgttgttatattctaaactgtcagcagacattaattcggtcgctggtgaagtcccaccgcctagagatgaactctgcctccgatggatgttttccacttcagtgccactcgtctcgcaattactgggtcattaatatcattgcatgcaattagtgacagtagaaagagctagagggttgtgggatgtgcaccctccccaccatgaactttttactctgaccctttcccagctagaccttttcgtatcttggcaaggatattttaatgattgagactgtcagaatcttcagagcaggcactggattatgtgctggaaataattcactcaaacacctgcttctccatggttcagaatattttcattagatattatcactatcccttccctgggaagtttcatttttaaaaatctgatgcttaagtacagctaatatagacaatagggaattatgttttatctttagaactcttacattattcttttctttaaaaatgtgagctgagtcattgctattgcagtggtcatct

SEQ ID NO: 401471 - DNA, 416 bp, Homo sapiens
  misc_feature (199)..(199): n is a, c, g, or t
  misc_feature (397)..(399): n is a, c, g, or t
  misc_feature (401)..(404): n is a, c, g, or t
  misc_feature (406)..(408): n is a, c, g, or t
  misc_feature (413)..(413): n is a, c, g, or t
  misc_feature (415)..(416): n is a, c, g, or t
gttactgggaaaacctgctgaagatctgtgctttctgccacctctccttgctaactcctacacaccttgtaagactcgggccaagtgcctcctctgcagggaggtccccattgcccctccccacaaggcgcccaccaccgtgcccagctaattttctgtatttttagtacagacggggtttcaccgtgttagccagganggtctcaatctcctgacctcatgatccgcccgcctcggcctcccaaagtgctgagattacaggcatgagccaccgcgcccggccctcagcctcctctttttgaatcctttctccctgctccctccaagctgggctccttctcctgccagcagggcagaacagccatctgtcactctaatagaacctcactcccactcnnntnnnncnnnaacanann

SEQ ID NO: 401472 - DNA, 384 bp, Homo sapiens
acaatcaagaaagcttggatattaattgggtattagacggtactaaggaattattattaattgtattaggtatgataatggtggtgaggttatatatatttttaatgtctttagaggcatatgtcagagatgttgcaggttcggttccactccaccacaataaaacaaatatcacaataaagcgagtcacatgaaatttttgtttcccaatgcatataaaagttacgtttatactacactgttgtctattgtgtgcaatagcattatgtctaaaaaatgcacataccttaattttaaaattctgtattgctaaaaaatgctaacaatcaccagagctttcaccaagttgtaattttttgctagtggaaggtcttgcctcaactc

SEQ ID NO: 401473 - DNA, 179 bp, Homo sapiens
ccttggacaggctccaccataagaagtgggttgcatttaaaagtgtatttattaaaagtggttgaagctgagtgcttttctgtattgtaacactgttgcaaatggggagtattcattcctaatgtggctgccgaaagctttttaccctaccatgtagctgaaaatttagcaaaaaaaat

SEQ ID NO: 401474 - DNA, 343 bp, Homo sapiens
gggaagaagggcgtgtagatcttacttgaaatgcagaggaagccccgagagggttcgagcacagggtgacaccacctgacggccacgtcgaatattactctggctgctgtgtgcagctgggggcggctgggaggctggcgctggcctccggggtagacagtgaaaccaggggcaaggctggtgatggtgacgatgggtaccggtggaaatcggacgtgagctgcaggtggagccggcatcccccggggaggactggcagagggtggagctctgtcctgccaggagtgccgtgaaaatgcacagacgctcacacctagatcctgcagataccacgtgtccccag

SEQ ID NO: 401475 - DNA, 535 bp, Homo sapiens
gtttctgtgtgtattcgaagggggcttcctggtttgtgaaggacagtaagtattcagatccatacgtagatcagtagtatgttacagtagcatagaagccatttggaacatttagattgtagtgtgaacttctgaaccactgagtgttgtggatgaacagaatgagacagcaaaagtggtatttgttaaacacttttgacttctggttgaagatggagaattaaatctatgtattcacctaagctcccttatgtcaccatgctaaaattacagtgaaggggttttaaggtgttgttgtagttgttaagtttgtaagtctaaaaaaatgaatagaatgggataaaaggcaagagtaacccattttttgaaactggaaagtcgagggtcaaatggtaaagaacttagcagacccagtacaactgaatcccaagccagcaatgcggaaacctaagacccatccagagccccaggctttgtggcttcaggtacttctggaagtgagggagagaaatggttgaaaatctgtttaagaagc

SEQ ID NO: 401476 - DNA, 394 bp, Homo sapiens
tgcccactgaaaaataactgctctcccccgcctgcaggtaaccaccattctgctttctgtctccatgaatttcactattctaggtacctcctacaggtggaatcacacaatatttgtccttttgtatctggtttatttcacttaggaaatgttaaggtacatccatgttgtagcatgtatcagaattgcattattttaaagactgaatagttttccattgtatgtatataacacattttgttcaaccaatcatctgacaatggacattagggttgtttctaccttttggctgttgtgaataatattgttatgagcacaggtgtacaaacatctatttgaggctaggtgcagtggctcacacctgtaatcctagcactctgagaggctgaggggg

SEQ ID NO: 401477 - DNA, 546 bp, Homo sapiens
atgtgcctgttgttcccatttaaacaacaacaaaaaaaataaattgtgaatctttctctacatctagtatcttttctaccaggtctctggtagaatgtcaattccctgaaaacacagattgtgcttttgctttgttccagacaatatgtgtctttttagggtagaagtactaaaaaatgaaaaataaaatgctaagctaattgatggttatgatatattgtttcaatccccctaaggccaggctgtgaactatttcaaccagacatagtctccacaaagttgtagatctgagtgactctgccaagcatgattctatttgcaataagtcttttacagttatctactattttctcaatcactcccttgcatttaaggtttagcaactagttcactgtatacctctccacgactactccatgcactagctttagtaactccaatattccttatcctctttttctcctgtgttcacctaacaaactgaaactctgttaaaacccaactttctatctgctccctacttgcacctcagcagctggaagtagt

SEQ ID NO: 401478 - DNA, 279 bp, Homo sapiens
ggacctccctgatcccttacaatttctactcatggcttcattatctctccaccgttgcaagcactgaatgagattatggacgtaagagttctggtgccaggtaagttatcagtaaacaaatgttagttccttcaatttttttgttctcatactcccctctccttctgtattcttacctactcaggatccttcaatagaaattaaactttgcagacaaactccccagggccttctagatgacatattctttctgtgaaaaagtgaatttattgacttttc

SEQ ID NO: 401479 - DNA, 420 bp, Homo sapiens
actttcataatattttgcatatgttttctctttactttgtattctctccttcctgatctctatcctcttctgacttttttgatcccttactcttctggttctcctgtctttatcgttttatttcaggttattcttatctgccccttaaattacctatctgcaagatctcagctcactgcaacctccacctcctggggtacgagaatcgcttgaacctgggaggcagaggatgcagtgagccgagatcacgccattgcactccagcctgggggacaagagtgaatctgtgtctcaccaaaaaaaaaaagaaaaagaaagatgcttaacaaaggttaccataagccacaaattcatgaccacttatccttccagtttcaagtagaatatattcataacctcaataaagttctccctgctccc

SEQ ID NO: 401480 - DNA, 334 bp, Homo sapiens
tttctttatagtttgcttttttttttaagaggagggaaatggggaaaaaggaaagacaagctgaataagctcaaagacaaaaaaacatgaactttcccataatatgtcacatgaaacagaatgtagagccacagaaaaaagatactgcctctaaaaaccaaattacatttaaattttaccaagataggtgataaatgtttaccctcagatacacgtggcttttgggagcagaaaatgtctctttaatctgaattatgtacatgattatgatcctctattacatgttaaatctgaatacagggtagtttattaatgaatagaaagagactgtcat

SEQ ID NO: 401481 - DNA, 666 bp, Homo sapiens
aatcaggagatgagaattctggctgcactgctgatgctaagtgattaactctagatttaactcttcattggtttaaaatgtgatattttggccaaagatgggggaacttggaaagaaaaaactgcaaaaatacatacatcatatcttatttgctactcgcatgctataatcagatataatcccaaatttgttctcttttgttggaaataaacaggatgtgatttgtttcggagattcactaaggagaaatgctacaggcaacatgccctcttacaaaccagcctgcccctgcatctagcttatctgtataatacagcacctatgagattacactctgggtttgaaccctagctttgctgcttactctctgctctcaagcaacttaacttctctaggcatcaatattcttctctgaaaaacagaaaaataggatgggcagtggtggatcgcttgagtccaggagttcaagaccagcctgggcaacataatgagaccccgtctctacaaaacataaaatgttagccgggcatggtggcatgcacctgtagtcccagctacttgggagtctgaggtggaaggattgcttgagcctgggagttccaggttgcagtgacctatgatcacaccactacacgcatcttgggcgacagagtgagaccctgtctc

SEQ ID NO: 401482 - DNA, 551 bp, Homo sapiens
acttcactgcaattctgtttccctcatttgaaaaatagaaatagaaaagcctgctgtatatttaggtccacatctgttggggaggtcaaagaagaaagaatatgaaaagttgtttgtaaatataaagaaccatgtaaatataagacattgttttattaatgctccagatcaattaactttcagtgaatgataaaatgtgacatcttttcaacagagacagttttacttaagaaaaactaggcaatggcttctgtccttacaaatgaaaaacttcataataaatgggggctctcaagaccacctggccaaaactgaactaaatactcacttcattcaaccaagaatgaggaactgaaatacatgattattatatatgcatatgcttctgtttcatctacttgggcatgcttgtgatgagatatgaaaaattagccatctttagaaggaaagaaatattgtatttgggggtatttcttctgtacagacaattggcctggttattgtctaaaggtatttaaaattaataaaatgcaattttatgctacataaaa

SEQ ID NO: 401483 - DNA, 3619 bp, Homo sapiens
ttgacccgggccccgcccctccagccggggcaccgagccccggccctagctgctcgcccctactcgccggcactcgcccggctcgcccgctttcgcacccagttcacgcgccacagctatgtgtccccgagccgcgcgggcgcccgcgacgctactcctcgccctgggcgcggtgctgtggcctgcggctggcgcctgggagcttacgattttgcacaccaacgacgtgcacagccggctggagcagaccagcgaggactccagcaagtgcgtcaacgccagccgctgcatgggtggcgtggctcggctcttcaccaaggttcagcagatccgccgcgccgaacccaacgtgctgctgctggacgccggcgaccagtaccagggcactatctggttcaccgtgtacaagggcgccgaggtggcgcacttcatgaacgccctgcgctacgatgccatggcactgggaaatcatgaatttgataatggtgtggaaggactgatcgagccactcctcaaagaggccaaatttccaattctgagtgcaaacattaaagcaaaggggccactagcatctcaaatatcaggactttatttgccatataaagttcttcctgttggtgatgaagttgtgggaatcgttggatacacttccaaagaaaccccttttctctcaaatccagggacaaatttagtgtttgaagatgaaatcactgcattacaacctgaagtagataagttaaaaactctaaatgtgaacaaaattattgcactgggacattcgggttttgaaatggataaactcatcgctcagaaagtgaggggtgtggacgtcgtggtgggaggacactccaacacatttctttacacaggcaatccaccttccaaagaggtgcctgctgggaagtacccattcatagtcacttctgatgatgggcggaaggttcctgtagtccaggcctatgcttttggcaaatacctaggctatctgaagatcgagtttgatgaaagaggaaacgtcatctcttcccatggaaatcccattcttctaaacagcagcattcctgaagatccaagcataaaagcagacattaacaaatggaggataaaattggataattattctacccaggaattagggaaaacaattgtctatctggatggctcctctcaatcatgccgctttagagaatgcaacatgggcaacctgatttgtgatgcaatgattaacaacaacctgagacacacggatgaaatgttctggaaccacgtatccatgtgcattttaaatggaggtggtatccggtcgcccattgatgaacgcaacaatggcacaattacctgggagaacctggctgctgtattgccctttggaggcacatttgacctagtccagttaaaaggttccaccctgaagaaggcctttgagcatagcgtgcaccgctacggccagtccactggagagttcctgcaggtgggcggaatccatgtggtgtatgatctttcccgaaaacctggagacagagtagtcaaattagatgttctttgcaccaagtgtcgagtgcccagttatgaccctctcaaaatggacgaggtatataaggtgatcctcccaaacttcctggccaatggtggagatgggttccagatgataaaagatgaattattaagacatgactctggtgaccaagatatcaacgtggtttctacatatatctccaaaatgaaagtaatttatccagcagttgaaggtcggatcaagttttccacaggaagtcactgccatggaagcttttctttaatatttctttcactttgggcagtgatctttgttttataccaatagccaaaaattctccttgcctttaatgtgtgaaactgcattttttcaagtgagattcaaatctgccttttaggacctggctttgtgacagcaaaaaccatctttacaggctcctagaagctgaaggttagagcattataaaatgaagagacagacatgattactcagggtcagcaacctagtgagttagaaaaaaaattaacatagggccctataaggagaaagccaactatgttaagtttacgtgtccaaattttaatgaaattttactaacaattttaaaccatatttttcttcttcatatccatttctaatccatcaaacagcttatgtttacataaaattttatcattcacaaggaagttttaagcacactgtctcatttgatatccacaacttatttttggtaggaaagagagatgtttttcccacctgtcagatgaaaaaactgaagctcaaaaagggttgacttgaccatacagctaatgctgacagatccaagacctagacctaggtcttttgaactcaagtccagcattctcaactatatcaagttactgttcagaatacttaatatctcctctcttcataattatcaatagccccaagctcatggatgacaaatctctgctttatttcttgtctctattttttcactttatagctcctgttataatagcaagtttaatggtataaacacaggataccatcctctcttgcaacacccatgtgcctttgatgagtcaggtagcaagctgtagtagataatgagaaaggccagaggctgcaaaagacagtcaaaggacacgagagaaaggaaggggaagaacaggactccaggactgttttatattatagaaaagcaagagctaaagagcatttacacatgttaaacagatacttgttaagcatagtgcctgacacacggcattagctgttattttatgagattccatcagctctgcctctgtcctctttcttctaacatgaaggtatcatgagaagagaaccttctaacataagctgtaattctaaacctgcacttgtccctctccagcaagaggctagcactgaattcattctactcatactacacacccagttatggaatgtccagagttctcgaagaaaataaatgactttaggaagaggtatacattttttaagtcgctctgcctccaaatctgaacagtcactgtaaatcattcttaagcccagatatgagaacttctgctggaaagtgggaccctctgagtgggtggtcagaaaatacccatgctgatgaaatgacctatgcccaaagaacaaatacttaacgtgggagtggaaccacatgagcctgctcagctctgcataagtaattcaagaaatgggaggcttcaccttaaaaacagtgtgcaaatggcagctagaggttttgataggaagtatgtttgtttcttagtgtttacaaatattaagtactcttgatacaaaatatacttttaaacttcataacctttttataaaagttgttgcagcaaaataatagcctcggttctatgcatatatggattagctataaaaaatgtcaataagattgtacaaggaaaattagagaaagtcacatttagggtttattttttacacttggccagtaaaatagggtaaatcctattagaattttttaaagaactttttttaagtttcctaaatctgtgtgtgtattgtgaagtggtataagaaatgactttgaaccactttgcaattgtagattcccaacaataaaattgaagataa

SEQ ID NO: 401484 - DNA, 1042 bp, Homo sapiens
ttgacccgggccccgcccctccagccggggcaccgagccccggccctagctgctcgcccctactcgccggcactcgcccggctcgcccgctttcgcacccagttcacgcgccacagctatgtgtccccgagccgcgcgggcgcccgcgacgctactcctcgccctgggcgcggtgctgtggcctgcggctggcgcctgggagcttacgattttgcacaccaacgacgtgcacagccggctggagcagaccagcgaggactccagcaagtgcgtcaacgccagccgctgcatgggtggcgtggctcggctcttcaccaaggttcagcagatccgccgcgccgaacccaacgtgctgctgctggacgccggcgaccagtaccagggcactatctggttcaccgtgtacaagggcgccgaggtggcgcacttcatgaacgccctgcgctacgatgccatggcactgggaaatcatgaatttgataatggtgtggaaggactgatcgagccactcctcaaagaggccaaatttccaattctgagtgcaaacattaaagcaaaggggccactagcatctcaaatatcaggactttatttgccatataaagttcttcctgttggtgatgaagttgtgggaatcgttggatacacttccaaagaaaccccttttctctcaaatccagggacaaatttagtgtttgaagatgaaatcactgcattacaacctgaagtagataagttaaaaactctaaatgtgaacaaaattattgcactgggacattcgggttttgaaatggataaactcatcgctcagaaagtgaggggtgtggacgtcgtggtgggaggacactccaacacatttctttacacaggtaattgtttcaaaaggattgcatgggccaggatgtccagataagcactgtgtctcttttgcctttgtaactgttattactctttttactgctatttaatatgtaatgtatattatatgatctataatatatatgtaatatacattaaatgggaacatgtgcaaatcttaaaa

SEQ ID NO: 401485 - DNA, 399 bp, Homo sapiens
cccgttccccccaatttatcccttttcccctcccccccccaacatccttcagttctgcaaatttctgcaagtatggaaccaaaggagaagccggttcagttgctttttcaggctttgaaagaaagagaattattaactcagtaaaattcccacttgatttgacatacaaaatcaaaattcaatgcaatctgaagtgttttctaatatattcaatactcactggactgtcatctatgaagatgataagcaaatgattcacagtatcctagtggaaaataataaacataagtcaaaataattccactactgtattctccccagaattctcataacttgtatcatattatgtaagtttctagaaaaatgaaaaaataaatggagcagtagcaaaaaatctgc

SEQ ID NO: 401486 - DNA, 407 bp, Homo sapiens
tccctcctattctctttccgtccccccctttaaccattaaaaaaaaaagaaccctccaggttctgcaaatttctgcaagtatggaaccaaaggagaagccggttcagttgctttttcaggctttgaaagaaagagaattattaactcagtaaaattcccacttgatttgacatacaaaatcaaaattcaatgcaatctgaagtgttttctaatatattcaatactcactggactgtcatctatgaagatgataagcaaatgattcacagtatcctagtggaaaataataaacataagtcaaaataattccactactgtattctccccagaattctcataacttgtatcatattatgtaagtttctagaaaaatgaaaaaataaatggagcagtagcaaaaaatctgc

SEQ ID NO: 401487 - DNA, 516 bp, Homo sapiens
  misc_feature (43)..(43): n is a, c, g, or t
  misc_feature (45)..(46): n is a, c, g, or t
atatataaaaaaaaaaaaaaaaaaaaaaaaaaaaaaaaaaaantnnttaaaataaaaataaaattcggttctgcaaatttctgcaagtatggaaccaaaggagaagccggttcagttgctttttcaggctttgaaagaaagagaattattaactcagtaaaattcccacttgatttgacatacaaaatcaaaattcaatgcaatctgaagtgttttctaatatattcaatactcactggactgtcatctatgaagatgataagcaaatgattcacagtatcctagtggaaaataataaacataagtcaaaataattccactactgtattctccccagaattctcataacttgtatcatattatgtaagtttctagaaaaatgaaaaaataaatggagcagtagcaaaaaatctgcacatatgtattacagcaggagtttttttacatctacaaaacaggttcttaacctttgtgaaaatgggcaaataaaagctattctgattttggcatttaaaa

SEQ ID NO: 401488 - DNA, 502 bp, Homo sapiens
tcacccaacgatacacgagttcatacaaatacacaacaaacacaaaagccttagttctgcaaatttctgcaagtatggaaccaaaggagaagccggttcagttgctttttcaggctttgaaagaaagagaattattaactcagtaaaattcccacttgatttgacatacaaaatcaaaattcaatgcaatctgaagtgttttctaatatattcaatactcactggactgtcatctatgaagatgataagcaaatgattcacagtatcctagtggaaaataataaacataagtcaaaataattccactactgtattctccccagaattctcataacttgtatcatattatgtaagtttctagaaaaatgaaaaaataaatggagcagtagcaaaaaatctgcacatatgtattacagcaggagtttttttacatctacaaaacaggttcttaacctttgtgaaaatgggcaaataaaagctattctgattttggcatttaaaa

SEQ ID NO: 401489 - DNA, 1704 bp, Homo sapiens
ggatcgatgttcgtgaggatcacgatgttcgtgaggatcatcgatgttcgtgaggatcacgatgttcgtgaggatcacgatgttcgtactcagggtcagcaacctagtgagttagaaaaaaaattaacatagggccctataaggagaaagccaactatgttaagtttacgtgtccaaattttaatgaaattttactaacaattttaaaccatatttttcttcttcatatccatttctaatccatcaaacagcttatgtttacataaaattttatcattcacaaggaagttttaagcacactgtctcatttgatatccacaacttatttttggtaggaaagagagatgtttttcccacctgtcagatgaaaaaactgaagctcaaaaagggttgacttgaccatacagctaatgctgacagatccaagacctagacctaggtcttttgaactcaagtccagcattctcaactatatcaagttactgttcagaatacttaatatctcctctcttcataattatcaatagccccaagctcatggatgacaaatctctgctttatttcttgtctctattttttcactttatagctcctgttataatagcaagtttaatggtataaacacaggataccatcctctcttgcaacacccatgtgcctttgatgagtcaggtagcaagctgtagtagataatgagaaaggccagaggctgcaaaagacagtcaaaggacacgagagaaaggaaggggaagaacaggactccaggactgttttatattatagaaaagcaagagctaaagagcatttacacatgttaaacagatacttgttaagcatagtgcctgacacacggcattagctgttattttatgagattccatcagctctgcctctgtcctctttcttctaacatgaaggtatcatgagaagagaaccttctaacataagctgtaattctaaacctgcacttgtccctctccagcaagaggctagcactgaattcattctactcatactacacacccagttatggaatgtccagagttctcgaagaaaataaatgactttaggaagaggtatacattttttaagtcgctctgcctccaaatctgaacagtcactgtaaatcattcttaagcccagatatgagaacttctgctggaaagtgggaccctctgagtgggtggtcagaaaatacccatgctgatgaaatgacctatgcccaaagaacaaatacttaacgtgggagtggaaccacatgagcctgctcagctctgcataagtaattcaagaaatgggaggcttcaccttaaaaacagtgtgcaaatggcagctagaggttttgataggaagtatgtttgtttcttagtgtttacaaatattaagtactcttgatacaaaatatacttttaaacttcataacctttttataaaagttgttgcagcaaaataatagcctcggttctatgcatatatggattagctataaaaaatgtcaataagattgtacaaggaaaattagagaaagtcacatttagggtttattttttacacttggccagtaaaatagggtaaatcctattagaattttttaaagaactttttttaagtttcctaaatctgtgtgtgtattgtgaagtggtataagaaatgactttgaaccactttgcaattgtagattcccaacaataaaattgaagataa

SEQ ID NO: 401490 - DNA, 4139 bp, Homo sapiens
ttgacccgggccccgcccctccagccggggcaccgagccccggccctagctgctcgcccctactcgccggcactcgcccggctcgcccgctttcgcacccagttcacgcgccacagctatgtgtccccgagccgcgcgggcgcccgcgacgctactcctcgccctgggcgcggtgctgtggcctgcggctggcgcctgggagcttacgattttgcacaccaacgacgtgcacagccggctggagcagaccagcgaggactccagcaagtgcgtcaacgccagccgctgcatgggtggcgtggctcggctcttcaccaaggttcagcagatccgccgcgccgaacccaacgtgctgctgctggacgccggcgaccagtaccagggcactatctggttcaccgtgtacaagggcgccgaggtggcgcacttcatgaacgccctgcgctacgatgccatggcactgggaaatcatgaatttgataatggtgtggaaggactgatcgagccactcctcaaagaggccaaatttccaattctgagtgcaaacattaaagcaaaggggccactagcatctcaaatatcaggactttatttgccatataaagttcttcctgttggtgatgaagttgtgggaatcgttggatacacttccaaagaaaccccttttctctcaaatccagggacaaatttagtgtttgaagatgaaatcactgcattacaacctgaagtagataagttaaaaactctaaatgtgaacaaaattattgcactgggacattcgggttttgaaatggataaactcatcgctcagaaagtgaggggtgtggacgtcgtggtgggaggacactccaacacatttctttacacaggcaatccaccttccaaagaggtgcctgctgggaagtacccattcatagtcacttctgatgatgggcggaaggttcctgtagtccaggcctatgcttttggcaaatacctaggctatctgaagatcgagtttgatgaaagaggaaacgtcatctcttcccatggaaatcccattcttctaaacagcagcattcctgaagatccaagcataaaagcagacattaacaaatggaggataaaattggataattattctacccaggaattagggaaaacaattgtctatctggatggctcctctcaatcatgccgctttagagaatgcaacatgggcaacctgatttgtgatgcaatgattaacaacaacctgagacacacggatgaaatgttctggaaccacgtatccatgtgcattttaaatggaggtggtatccggtcgcccattgatgaacgcaacaatggcacaattacctgggagaacctggctgctgtattgccctttggaggcacatttgacctagtccagttaaaaggttccaccctgaagaaggcctttgagcatagcgtgcaccgctacggccagtccactggagagttcctgcaggtgggcggaatccatgtggtgtatgatctttcccgaaaacctggagacagagtagtcaaattagatgttctttgcaccaagtgtcgagtgcccagttatgaccctctcaaaatggacgaggtatataaggtgatcctcccaaacttcctggccaatggtggagatgggttccagatgataaaagatgaattattaagacatgactctggtgaccaagatatcaacgtggtttctacatatatctccaaaatgaaagtaatttatccagcagttgaaggtcggatcaagttttccacaggaagtcactgccatggaagcttttctttaatatttctttcactttgggcagtgatctttgttttataccaatagccaaaaattctccttgcctttaatgtgtgaaactgcattttttcaagtgagattcaaatctgccttttaggacctggctttgtgacagcaaaaaccatctttacaggctcctagaagctgaaggttagagcattataaaatgaagagacagacatgattactcagggtcagcaacctagtgagttagaaaaaaaattaacatagggccctataaggagaaagccaactatgttaagtttacgtgtccaaattttaatgaaattttactaacaattttaaaccatatttttcttcttcatatccatttctaatccatcaaacagcttatgtttacataaaattttatcattcacaaggaagttttaagcacactgtctcatttgatatccacaacttatttttggtaggaaagagagatgtttttcccacctgtcagatgaaaaaactgaagctcaaaaagggttgacttgaccatacagctaatgctgacagatccaagacctagacctaggtcttttgaactcaagtccagcattctcaactatatcaagttactgttcagaatacttaatatctcctctcttcataattatcaatagccccaagctcatggatgacaaatctctgctttatttcttgtctctattttttcactttatagctcctgttataatagcaagtttaatggtataaacacaggataccatcctctcttgcaacacccatgtgcctttgatgagtcaggtagcaagctgtagtagataatgagaaaggccagaggctgcaaaagacagtcaaaggacacgagagaaaggaaggggaagaacaggactccaggactgttttatattatagaaaagcaagagctaaagagcatttacacatgttaaacagatacttgttaagcatagtgcctgacacacggcattagctgttattttatgagattccatcagctctgcctctgtcctctttcttctaacatgaaggtatcatgagaagagaaccttctaacataagctgtaattctaaacctgcacttgtccctctccagcaagaggctagcactgaattcattctactcatactacacacccagttatggaatgtccagagttctcgaagaaaataaatgactttaggaagaggtatacattttttaagtcgctctgcctccaaatctgaacagtcactgtaaatcattcttaagcccagatatgagaacttctgctggaaagtgggaccctctgagtgggtggtcagaaaatacccatgctgatgaaatgacctatgcccaaagaacaaatacttaacgtgggagtggaaccacatgagcctgctcagctctgcataagtaattcaagaaatgggaggcttcaccttaaaaacagtgtgcaaatggcagctagaggttttgataggaagtatgtttgtttcttagtgtttacaaatattaagtactcttgatacaaaatatacttttaaacttcataacctttttataaaagttgttgcagcaaaataatagcctcggttctatgcatatatggattagctataaaaaatgtcaataagattgtacaaggaaaattagagaaagtcacatttagggtttattttttacacttggccagtaaaatagggtaaatcctattagaattttttaaagaactttttttaagtttcctaaatctgtgtgtgtattgtgaagtggtataagaaatgactttgaaccactttgcaattgtagattcccaacaataaaattgaagataagctctttggtctttgatagttatttcttctctcattcaaacacctgccaactaaagacaatatgactgaaggaaaactctgacagattttcactggtatcatttctcttgatcataagccacttaccatctgataaccctccatagcccctcacacccctaaaatgagaagaaaaatgcatccaatttttaagtaggagagaaaagtgagtggtattttaaggaagactactaaatttggtggctttgatatacagaatctgatataaaaatggttttgaggccagtactgattcctacaaataaacacttccaagttaatgttgaggattttaatttgcctgtactggctgtgtgcctaagatcttcctcaagtacactaataacacaatgagttggtttcgttatacctcaatcagtcagacacgttaaaccacgttagctgtctttgtttgggctatgtattagtccgttctcatgctgctaataaagacatacccgagactgggtgatttataaag

SEQ ID NO: 401491 - DNA, 2435 bp, Homo sapiens
ttgacccgggccccgcccctccagccggggcaccgagccccggccctagctgctcgcccctactcgccggcactcgcccggctcgcccgctttcgcacccagttcacgcgccacagctatgtgtccccgagccgcgcgggcgcccgcgacgctactcctcgccctgggcgcggtgctgtggcctgcggctggcgcctgggagcttacgattttgcacaccaacgacgtgcacagccggctggagcagaccagcgaggactccagcaagtgcgtcaacgccagccgctgcatgggtggcgtggctcggctcttcaccaaggttcagcagatccgccgcgccgaacccaacgtgctgctgctggacgccggcgaccagtaccagggcactatctggttcaccgtgtacaagggcgccgaggtggcgcacttcatgaacgccctgcgctacgatgccatggtaagacccgagcccgcgcccgggatagtagtcccggactgagagaggagccgggctggaaaagcagcggatggcagagtgtggcaagcctaggtccagggcgcggagagatgtggggataaagtgagactccggccagtgtgccagctggatgcatagaagtcccttggacgattcgtcttaaacggacgttattgcgcccccactatgagatgggagtatttagaggagcaggacccagtcctgcctgcgaggggcttaaggtggggtgcgtagaagcactgacagttatccagagctagggactgaatcggatccctcacgcagctctcatttactgctagatctttcaaagaatgctttatctcaatctagatctttcgaaaaatgctttatctcaatcttattgaaagggaaaccgcgtcgaagaagctgaataaattaacaggcaccatccccgcaaaaagggagacgtgataagaatggacaccagatctctttgaccccggagcttgagagtaattaagctcacagctttggggtagattctctgttcaattaccttctatgtgaccttgagcaagttatttactctttcttgcctcagttctatcctgtataaaaataaggattataattgtacatagtgcacatagtgtggtctctatattattaccagacacatagtgtggtgtctatatatgttgttattaccagacactataatatagggttaagaaaaggaaagaaagaaagaaagagaaagaaagaaagaaacttcagagagagccaaaatgtggaaagacttgggtttcaaaggatttcaataaagtaggtttggcggcagagatttaggaagagtccaacttaagagataatgggctcttaaaacatgtgcaaaagtttagttcaaagtcccaaatgttaggttaaaggtaatgccttttctattgcactaaattctagaaagggagcagaggtggttgcacagtaataaataagtacaaccaagatgtatatatggtggttaaaaaaaaaataaaaccaccacccaaatttaaccctgtgtaaaagccttgagtaaagggattcagcaagactgtggagaaacttgggagaagaaaaaagagctttggaagaggaagaactgagaaatctccagagaaacgtccagagaaatctgtgaagtccacaagtgtggaagggaaagggaagtgtgattaggctgggatacagaaggctaacagtacactttatatgagaagagcttagaggtcaggagagcacaatgctgaggggtttgtttggttttattttcccctctggaaacttggagaaaggaggacaggaaaagatgataagagggcaccattgtttggttttaaaggtccctccccaaccccccacaacaagaaagctcattttaatgagatgagagaaggggagaaagctccctccgttctgatgcttttgagcttatcagggacaccctgcagcagaaattccagctgatccttcagccttcagagttgatgaggtggggctcacacacatctggatttgaagaagaatcgtgggtttcaagaactctgtggtctcttaagcattggtattccacagctacacttccctgatactttgcactcagtaatgacaaaataaatatttgtagaattgagttgttgctaccctgtgtctccacttcctcccagaagggtagaataaacttacatgtgtttgttttattttgcatataaaccacgactttgtaaactttactttttgtgacactcttttctccacaattgtgtgaaccctttttagtggaaaaataagaatgaagaattcctagttttccctaataatatttccctcttgtaagtctagttgagctcctggtgttaatcatggtatcaaatgtttatgacaggacatctaggtgaggcctgagtaaactgctgtaagttacagcctatct

SEQ ID NO: 401492 - DNA, 2135 bp, Homo sapiens
ttgacccgggccccgcccctccagccggggcaccgagccccggccctagctgctcgcccctactcgccggcactcgcccggctcgcccgctttcgcacccagttcacgcgccacagctatgtgtccccgagccgcgcgggcgcccgcgacgctactcctcgccctgggcgcggtgctgtggcctgcggctggcgcctgggagcttacgattttgcacaccaacgacgtgcacagccggctggagcagaccagcgaggactccagcaagtgcgtcaacgccagccgctgcatgggtggcgtggctcggctcttcaccaaggttcagcagatccgccgcgccgaacccaacgtgctgctgctggacgccggcgaccagtaccagggcactatctggttcaccgtgtacaagggcgccgaggtggcgcacttcatgaacgccctgcgctacgatgccatggtaagacccgagcccgcgcccgggatagtagtcccggactgagagaggagccgggctggaaaagcagcggatggcagagtgtggcaagcctaggtccagggcgcggagagatgtggggataaagtgagactccggccagtgtgccagctggatgcatagaagtcccttggacgattcgtcttaaacggacgttattgcgcccccactatgagatgggagtatttagaggagcaggacccagtcctgcctgcgaggggcttaaggtggggtgcgtagaagcactgacagttatccagagctagggactgaatcggatccctcacgcagctctcatttactgctagatctttcaaagaatgctttatctcaatctagatctttcgaaaaatgctttatctcaatcttattgaaagggaaaccgcgtcgaagaagctgaataaattaacaggcaccatccccgcaaaaagggagacgtgataagaatggacaccagatctctttgaccccggagcttgagagtaattaagctcacagctttggggtagattctctgttcaattaccttctatgtgaccttgagcaagttatttactctttcttgcctcagttctatcctgtataaaaataaggattataattgtacatagtgcacatagtgtggtctctatattattaccagacacatagtgtggtgtctatatatgttgttattaccagacactataatatagggttaagaaaaggaaagaaagaaagaaagagaaagaaagaaagaaacttcagagagagccaaaatgtggaaagacttgggtttcaaaggatttcaataaagtaggtttggcggcagagatttaggaagagtccaacttaagagataatgggctcttaaaacatgtgcaaaagtttagttcaaagtcccaaatgttaggttaaaggtaatgccttttctattgcactaaattctagaaagggagcagaggtggttgcacagtaataaataagtacaaccaagatgtatatatggtggttaaaaaaaaaataaaaccaccacccaaatttaaccctgtgtaaaagccttgagtaaagggattcagcaagactgtggagaaacttgggagaagaaaaaagagctttggaagaggaagaactgagaaatctccagagaaacgtccagagaaatctgtgaagtccacaagtgtggaagggaaagggaagtgtgattaggctgggatacagaaggctaacagtacactttatatgagaagagcttagaggtcaggagagcacaatgctgaggggtttgtttggttttattttcccctctggaaacttggagaaaggaggacaggaaaagatgataagagggcaccattgtttggttttaaaggtccctccccaaccccccacaacaagaaagctcattttaatgagatgagagaaggggagaaagctccctccgttctgatgcttttgagcttatcagggacaccctgcagcagaaattccagctgatccttcagccttcagagttgatgaggtggggctcacacacatctggatttgaagaagaatcgtgggtttcaagaactctgtggtctcttaagcattggtattccacagctacacttccctgatactttgcactcagtaatgacaaaataaatatttgtagaattga

SEQ ID NO: 401493 - DNA, 1767 bp, Homo sapiens
ttgacccgggccccgcccctccagccggggcaccgagccccggccctagctgctcgcccctactcgccggcactcgcccggctcgcccgctttcgcacccagttcacgcgccacagctatgtgtccccgagccgcgcgggcgcccgcgacgctactcctcgccctgggcgcggtgctgtggcctgcggctggcgcctgggagcttacgattttgcacaccaacgacgtgcacagccggctggagcagaccagcgaggactccagcaagtgcgtcaacgccagccgctgcatgggtggcgtggctcggctcttcaccaaggttcagcagatccgccgcgccgaacccaacgtgctgctgctggacgccggcgaccagtaccagggcactatctggttcaccgtgtacaagggcgccgaggtggcgcacttcatgaacgccctgcgctacgatgccatggcactgggaaatcatgaatttgataatggtgtggaaggactgatcgagccactcctcaaagaggccaaatttccaattctgagtgcaaacattaaagcaaaggggccactagcatctcaaatatcaggactttatttgccatataaagttcttcctgttggtgatgaagttgtgggaatcgttggatacacttccaaagaaaccccttttctctcaaatccagggacaaatttagtgtttgaagatgaaatcactgcattacaacctgaagtagataagttaaaaactctaaatgtgaacaaaattattgcactgggacattcgggttttgaaatggataaactcatcgctcagaaagtgaggggtgtggacgtcgtggtgggaggacactccaacacatttctttacacaggcaatccaccttccaaagaggtgcctgctgggaagtacccattcatagtcacttctgatgatgggcggaaggttcctgtagtccaggcctatgcttttggcaaatacctaggctatctgaagatcgagtttgatgaaagaggaaacgtcatctcttcccatggaaatcccattcttctaaacagcagcattcctgaagatccaagcataaaagcagacattaacaaatggaggataaaattggataattattctacccaggaattagggaaaacaattgtctatctggatggctcctctcaatcatgccgctttagagaatgcaacatgggcaacctgatttgtgatgcaatgattaacaacaacctgagacacacggatgaaatgttctggaaccacgtatccatgtgcattttaaatggaggtggtatccggtcgcccattgatgaacgcaacaatggcacaattacctgggagaacctggctgctgtattgccctttggaggcacatttgacctagtccagttaaaaggttccaccctgaagaaggcctttgagcatagcgtgcaccgctacggccagtccactggagagttcctgcaggtgggcgatttaaaggaatgctgtccaatctgtattaaccaggatgattcctggaaggagcagcctactgcacagacatacctgaacacctggttctagtcccactgtgacctggggcaagttctcaacccctctgggcacagggagaaaacctttcctgtttatctcatggactgcagtgaaagttgaatggaaataaatgcttcctaaattgccaagggcttctgaaacacttttgttaataattccacagtccagtgaattaatcctttaaaagcaatcttattttacctgga

SEQ ID NO: 401494 - DNA, 407 bp, Homo sapiens
  misc_feature (16)..(16): n is a, c, g, or t
  misc_feature (20)..(22): n is a, c, g, or t
  misc_feature (52)..(53): n is a, c, g, or t
attaaagttattaatnaaannnaattaagtatatataaattattatatattnntactaagttctgcaaatttctgcaagtatggaaccaaaggagaagccggttcagttgctttttcaggctttgaaagaaagagaattattaactcagtaaaattcccacttgatttgacatacaaaatcaaaattcaatgcaatctgaagtgttttctaatatattcaatactcactggactgtcatctatgaagatgataagcaaatgattcacagtatcctagtggaaaataataaacataagtcaaaataattccactactgtattctccccagaattctcataacttgtatcatattatgtaagtttctagaaaaatgaaaaaataaatggagcagtagcaaaaaatctgc

SEQ ID NO: 401495 - DNA, 3469 bp, Homo sapiens
ttgacccgggccccgcccctccagccggggcaccgagccccggccctagctgctcgcccctactcgccggcactcgcccggctcgcccgctttcgcacccagttcacgcgccacagctatgtgtccccgagccgcgcgggcgcccgcgacgctactcctcgccctgggcgcggtgctgtggcctgcggctggcgcctgggagcttacgattttgcacaccaacgacgtgcacagccggctggagcagaccagcgaggactccagcaagtgcgtcaacgccagccgctgcatgggtggcgtggctcggctcttcaccaaggttcagcagatccgccgcgccgaacccaacgtgctgctgctggacgccggcgaccagtaccagggcactatctggttcaccgtgtacaagggcgccgaggtggcgcacttcatgaacgccctgcgctacgatgccatggcactgggaaatcatgaatttgataatggtgtggaaggactgatcgagccactcctcaaagaggccaaatttccaattctgagtgcaaacattaaagcaaaggggccactagcatctcaaatatcaggactttatttgccatataaagttcttcctgttggtgatgaagttgtgggaatcgttggatacacttccaaagaaaccccttttctctcaaatccagggacaaatttagtgtttgaagatgaaatcactgcattacaacctgaagtagataagttaaaaactctaaatgtgaacaaaattattgcactgggacattcgggttttgaaatggataaactcatcgctcagaaagtgaggggtgtggacgtcgtggtgggaggacactccaacacatttctttacacaggcaatccaccttccaaagaggtgcctgctgggaagtacccattcatagtcacttctgatgatgggcggaaggttcctgtagtccaggcctatgcttttggcaaatacctaggctatctgaagatcgagtttgatgaaagaggaaacgtcatctcttcccatggaaatcccattcttctaaacagcagcattcctgaagatccaagcataaaagcagacattaacaaatggaggataaaattggataattattctacccaggaattagggaaaacaattgtctatctggatggctcctctcaatcatgccgctttagagaatgcaacatgggcaacctgatttgtgatgcaatgattaacaacaacctgagacacacggatgaaatgttctggaaccacgtatccatgtgcattttaaatggaggtggtatccggtcgcccattgatgaacgcaacaatggaatccatgtggtgtatgatctttcccgaaaacctggagacagagtagtcaaattagatgttctttgcaccaagtgtcgagtgcccagttatgaccctctcaaaatggacgaggtatataaggtgatcctcccaaacttcctggccaatggtggagatgggttccagatgataaaagatgaattattaagacatgactctggtgaccaagatatcaacgtggtttctacatatatctccaaaatgaaagtaatttatccagcagttgaaggtcggatcaagttttccacaggaagtcactgccatggaagcttttctttaatatttctttcactttgggcagtgatctttgttttataccaatagccaaaaattctccttgcctttaatgtgtgaaactgcattttttcaagtgagattcaaatctgccttttaggacctggctttgtgacagcaaaaaccatctttacaggctcctagaagctgaaggttagagcattataaaatgaagagacagacatgattactcagggtcagcaacctagtgagttagaaaaaaaattaacatagggccctataaggagaaagccaactatgttaagtttacgtgtccaaattttaatgaaattttactaacaattttaaaccatatttttcttcttcatatccatttctaatccatcaaacagcttatgtttacataaaattttatcattcacaaggaagttttaagcacactgtctcatttgatatccacaacttatttttggtaggaaagagagatgtttttcccacctgtcagatgaaaaaactgaagctcaaaaagggttgacttgaccatacagctaatgctgacagatccaagacctagacctaggtcttttgaactcaagtccagcattctcaactatatcaagttactgttcagaatacttaatatctcctctcttcataattatcaatagccccaagctcatggatgacaaatctctgctttatttcttgtctctattttttcactttatagctcctgttataatagcaagtttaatggtataaacacaggataccatcctctcttgcaacacccatgtgcctttgatgagtcaggtagcaagctgtagtagataatgagaaaggccagaggctgcaaaagacagtcaaaggacacgagagaaaggaaggggaagaacaggactccaggactgttttatattatagaaaagcaagagctaaagagcatttacacatgttaaacagatacttgttaagcatagtgcctgacacacggcattagctgttattttatgagattccatcagctctgcctctgtcctctttcttctaacatgaaggtatcatgagaagagaaccttctaacataagctgtaattctaaacctgcacttgtccctctccagcaagaggctagcactgaattcattctactcatactacacacccagttatggaatgtccagagttctcgaagaaaataaatgactttaggaagaggtatacattttttaagtcgctctgcctccaaatctgaacagtcactgtaaatcattcttaagcccagatatgagaacttctgctggaaagtgggaccctctgagtgggtggtcagaaaatacccatgctgatgaaatgacctatgcccaaagaacaaatacttaacgtgggagtggaaccacatgagcctgctcagctctgcataagtaattcaagaaatgggaggcttcaccttaaaaacagtgtgcaaatggcagctagaggttttgataggaagtatgtttgtttcttagtgtttacaaatattaagtactcttgatacaaaatatacttttaaacttcataacctttttataaaagttgttgcagcaaaataatagcctcggttctatgcatatatggattagctataaaaaatgtcaataagattgtacaaggaaaattagagaaagtcacatttagggtttattttttacacttggccagtaaaatagggtaaatcctattagaattttttaaagaactttttttaagtttcctaaatctgtgtgtgtattgtgaagtggtataagaaatgactttgaaccactttgcaattgtagattcccaacaataaaattgaagataa

SEQ ID NO: 401496 - DNA, 2197 bp, Homo sapiens
ttgacccgggccccgcccctccagccggggcaccgagccccggccctagctgctcgcccctactcgccggcactcgcccggctcgcccgctttcgcacccagttcacgcgccacagctatgtgtccccgagccgcgcgggcgcccgcgacgctactcctcgccctgggcgcggtgctgtggcctgcggctggcgcctgggagcttacgattttgcacaccaacgacgtgcacagccggctggagcagaccagcgaggactccagcaagtgcgtcaacgccagccgctgcatgggtggcgtggctcggctcttcaccaaggttcagcagatccgccgcgccgaacccaacgtgctgctgctggacgccggcgaccagtaccagggcactatctggttcaccgtgtacaagggcgccgaggtggcgcacttcatgaacgccctgcgctacgatgccatggcactgggaaatcatgaatttgataatggtgtggaaggactgatcgagccactcctcaaagaggccaaatttccaattctgagtgcaaacattaaagcaaaggggccactagcatctcaaatatcaggactttatttgccatataaagttcttcctgttggtgatgaagttgtgggaatcgttggatacacttccaaagaaaccccttttctctcaaatccagggacaaatttagtgtttgaagatgaaatcactgcattacaacctgaagtagataagttaaaaactctaaatgtgaacaaaattattgcactgggacattcgggttttgaaatggataaactcatcgctcagaaagtgaggggtgtggacgtcgtggtgggaggacactccaacacatttctttacacaggcaatccaccttccaaagaggtgcctgctgggaagtacccattcatagtcacttctgatgatgggcggaaggttcctgtagtccaggcctatgcttttggcaaatacctaggctatctgaagatcgagtttgatgaaagaggaaacgtcatctcttcccatggaaatcccattcttctaaacagcagcattcctgaagatccaagcataaaagcagacattaacaaatggaggataaaattggataattattctacccaggaattagggaaaacaattgtctatctggatggctcctctcaatcatgccgctttagagaatgcaacatgggcaacctgatttgtgatgcaatgattaacaacaacctgagacacacggatgaaatgttctggaaccacgtatccatgtgcattttaaatggaggtggtatccggtcgcccattgatgaacgcaacaatggcacaattacctgggagaacctggctgctgtattgccctttggaggcacatttgacctagtccagttaaaaggttccaccctgaagaaggcctttgagcatagcgtgcaccgctacggccagtccactggagagttcctgcaggtgggcggaatccatgtggtgtatgatctttcccgaaaacctggagacagagtagtcaaattagatgttctttgcaccaagtgtcgagtgcccagttatgaccctctcaaaatggacgaggtatataaggtgatcctcccaaacttcctggccaatggtggagatgggttccagatgataaaagatgaattattaagacatgactctggtgaccaagatatcaacgtggtttctacatatatctccaaaatgaaagtaatttatccagcagttgaaggttctgcaaatttctgcaagtatggaaccaaaggagaagccggttcagttgctttttcaggctttgaaagaaagagaattattaactcagtaaaattcccacttgatttgacatacaaaatcaaaattcaatgcaatctgaagtgttttctaatatattcaatactcactggactgtcatctatgaagatgataagcaaatgattcacagtatcctagtggaaaataataaacataagtcaaaataattccactactgtattctccccagaattctcataacttgtatcatattatgtaagtttctagaaaaatgaaaaaataaatggagcagtagcaaaaaatctgcacatatgtattacagcaggagtttttttacatctacaaaacaggttcttaacctttgtgaaaatgggcaaataaaagctattctgattttggcatttaaaa

SEQ ID NO: 401497 - DNA, 2096 bp, Homo sapiens
ttgacccgggccccgcccctccagccggggcaccgagccccggccctagctgctcgcccctactcgccggcactcgcccggctcgcccgctttcgcacccagttcacgcgccacagctatgtgtccccgagccgcgcgggcgcccgcgacgctactcctcgccctgggcgcggtgctgtggcctgcggctggcgcctgggagcttacgattttgcacaccaacgacgtgcacagccggctggagcagaccagcgaggactccagcaagtgcgtcaacgccagccgctgcatgggtggcgtggctcggctcttcaccaaggttcagcagatccgccgcgccgaacccaacgtgctgctgctggacgccggcgaccagtaccagggcactatctggttcaccgtgtacaagggcgccgaggtggcgcacttcatgaacgccctgcgctacgatgccatggcactgggaaatcatgaatttgataatggtgtggaaggactgatcgagccactcctcaaagaggccaaatttccaattctgagtgcaaacattaaagcaaaggggccactagcatctcaaatatcaggactttatttgccatataaagttcttcctgttggtgatgaagttgtgggaatcgttggatacacttccaaagaaaccccttttctctcaaatccagggacaaatttagtgtttgaagatgaaatcactgcattacaacctgaagtagataagttaaaaactctaaatgtgaacaaaattattgcactgggacattcgggttttgaaatggataaactcatcgctcagaaagtgaggggtgtggacgtcgtggtgggaggacactccaacacatttctttacacaggcaatccaccttccaaagaggtgcctgctgggaagtacccattcatagtcacttctgatgatgggcggaaggttcctgtagtccaggcctatgcttttggcaaatacctaggctatctgaagatcgagtttgatgaaagaggaaacgtcatctcttcccatggaaatcccattcttctaaacagcagcattcctgaagatccaagcataaaagcagacattaacaaatggaggataaaattggataattattctacccaggaattagggaaaacaattgtctatctggatggctcctctcaatcatgccgctttagagaatgcaacatgggcaacctgatttgtgatgcaatgattaacaacaacctgagacacacggatgaaatgttctggaaccacgtatccatgtgcattttaaatggaggtggtatccggtcgcccattgatgaacgcaacaatggcacaattacctgggagaacctggctgctgtattgccctttggaggcacatttgacctagtccagttaaaaggttccaccctgaagaaggcctttgagcatagcgtgcaccgctacggccagtccactggagagttcctgcaggtgggcggaatccatgtggtgtatgatctttcccgaaaacctggagacagagtagtcaaattagatgttctttgcaccaagtgtcgagtgcccagttatgaccctctcaaaatggacgaggtatataaggtgatcctcccaaacttcctggccaatggtggagatgggttccagatgataaaagatgaattattaagacatgactctggtgaccaagatatcaacgtggtttctacatatatctccaaaatgaaagtaatttatccagcagttgaaggttctgcaaatttctgcaagtatggaaccaaaggagaagccggttcagttgctttttcaggctttgaaagaaagagaattattaactcagtaaaattcccacttgatttgacatacaaaatcaaaattcaatgcaatctgaagtgttttctaatatattcaatactcactggactgtcatctatgaagatgataagcaaatgattcacagtatcctagtggaaaataataaacataagtcaaaataattccactactgtattctccccagaattctcataacttgtatcatattatgtaagtttctagaaaaatgaaaaaataaatggagcagtagcaaaaaatctgc

SEQ ID NO: 401498 - DNA, 747 bp, Homo sapiens
gcgcatctagagtagtgcttcacccagcaggccctcagttaacaggcatatggattcgactggtgtttgtgtttttctgtaagaaaggttatgccatgtctcaaaaaatgaatggctaatgtttctaggtagatacaattacaaagacgtaccaaataaaataatgagacaaaaagaaataggtagattgggattggctgtgtagaggttttaaggtaaaagtgggcaagttaaaaaggtttcgtatcagagaagttagttgcaatttattgaatgtaggagtactcacacagtttatttgaatatgaaatagatccagatttcttatgtatggtctccggttttccataccgattgatagttcagggctgctttgacataaatactgtgcttctactgccacctacagatgattagtgggtcttggagctcttcacctttaccccttctaaagtctctttgaaattgaaataattttttttaaaagctattaattggtagaatattataaaatattttaatgttactttatgaatatttctatattatattacataatactatataatatgtagctttatataatagatatgaatgtattcctctaaaacaaggtggccaatcttctggcttcccttggccacattgggagaactgtcttgggccacacataaaatacactaacactaatgatagctgatgatcaaaaaaaaaatcatggaaaaaactcataatattttaagaaag

SEQ ID NO: 401499 - DNA, 183 bp, Homo sapiens
acatgagggcctgaagctttggcagcattgcaatgggtgtgatgcagaaccagaggctttcaggtggcactggggagctgggatggaggttaagggagaaaggaagacccaacaaaaggaacgagtaggagaaactttgcctattccactgttttgtttaggccaaccttaatccctgggatt

SEQ ID NO: 401500 - DNA, 290 bp, Homo sapiens
tcagcacacagccaggaagtgacgagggtatttcaagaggctccttatcgattagcccaaggtgtctggcccagtcctcaccctcctcagggccatgggctgggagccctctcatctctcctttgctagtggaggctggggagactgcgaatggctatcaggacttgagaaggtgtggctgggagattggctacgaatgcatggagattacaaaacagggagatgggtctccatgtgtggtctctgtgattcatctgagggtccgaagttcgagctcacctcctggggag

SEQ ID NO: 401501 - DNA, 431 bp, Homo sapiens
tgaaattagaaggtatcttttaaactgaaaagtaacttgaagattttttggagctcccttaaatgatagctatttacagcaaaattttatgttgatcttttaagtctttcaatatgtattagcatacaaaaggcacaaaataataataatgttacaataatttcataaatattttgtgattatggagaaactgaattttggtacaatctgtcctgcatgtgtttgctttcatttatttagtatacctctgcttcacctttctctaaaatctccctccaaaatgctgcttccttggaaagtgttacaagtaaaccatgttcttacaattgcatttttggagaagcatgtgggtgttgttggattcacttgagtagaattttaattagatccagtgcattcacttttattaaaagaaagtatactgattcctt

SEQ ID NO: 401502 - DNA, 472 bp, Homo sapiens
gtgcaaataactggttatccctcaggtcctgctaccccatctttcctgatccccgatccctccaaatacgaagcacctcgcatttgggtcagcagctgtttcccctgcctggtgacaaggccggtgtgcagagggcagaggagggagcttcttccgccacacggtggcgcgcgcgagcctcccaaagaccgggcggccacagctcctcaccttctccccattccagccccacccgcgcccgggcgcagaaagagccgcgcccccagccctcccgggcaggacagccgggagcgcacctcgagggcccgggcagcggtcgagtggcagctgcgtccagcccatgcgggagctgctgcgggttacgggtggccccagctccaggctcctcctccagccggtcccccaccctccaccccttctcgactccgctctgcaaatcgaaggcttcccggagcagcctaggagcggccgc

SEQ ID NO: 401503 - DNA, 230 bp, Homo sapiens
ggctctatccccagagacttggattcaataggattagggtgagagagatcagcaatggaaatccttgatatagtggtttgtcctgggtggggttttaagaatttatacatgataaatcatgtaggaattatttttaaagtagaaaaaaaagcttttatcatgcaaatatagggctgaccaaagtgctatgtacttagctgaggcataggagcacctacctaacctagaaa

SEQ ID NO: 401504 - DNA, 555 bp, Homo sapiens
aaattaaaaaaggtaaaaggaggtttcagcttcacgtgttcggatagattaactctttgtgctcaaaaaaaagattgttgaagctcccttaaggataactaatgaggagcacccaggcatctgaaagaacgagaagtctgtttttcgttcttgcctaattgccgttaagcaaagatactcttccctaaaagggaaaaatggctccttacgtgttattcctctttgttagtaatgatcactgtgttttgacctcttttcaggatgttttttaaaccatgttttctggttcttctgtagtcttaagtatgtttgatattgttaggtgatctgcataatgtttaatcatttttttctttatataaaccagttggtataattatacctcttttcctatttaagtttgtatgtgtatatgtgattctatagagtagaaaaatgccatcagtttgaaatgatggcacaatcttagtcacttggtttaaataaatagaaaattctaaagccttaaaattaagataatgctctttggcaaactcaaaataaaagcaaaaaaaa

SEQ ID NO: 401505 - DNA, 323 bp, Homo sapiens
tcaggtgcttcaaatttatgctgcagctttgatatcacagacacacggtctcctgagggtttagacccatcattttggaaggcatggccataggcagtgtgagaggcaggggtcactcatggagtattgtaggaggctcagacggctgcaacggctgctcgtgcatagaccaaatggatggtgtagggagagaccgggagaggagaccatggatcaggctctcacagtggtttagggatgaggggataatggcctgatttaggatgggggagtgacatgggagcaagagaacgatatgaaagttccaacactggtgacgaggg

SEQ ID NO: 401506 - DNA, 158 bp, Homo sapiens
ttttttattatgtaagcaatacatgttcattattttaaaaaatagaaaatatagataaccataaagaaaataataaaaattgcctagcattttatgacccagaaataatattttggggtccattcttcaagatattgaagaacgcatatacagtttta

SEQ ID NO: 401507 - DNA, 651 bp, Homo sapiens
gaacaagggtctagggaaggaagtgaatcccaggcagaggagatgaatgaggcagggcctccccttgaggctaacacggagacaaggccagagaaggaaggaccccagccccaggagaagccagtaggagccctggaggaggaaggagtgaagccccaaaccgctgctgagggccaaggccccttgggggatgccacacctcttctggcagagaccccagccccagagcagcccgccgaatgccagccactgcttcagggggaggggcccagcgccaaccccagtgcccaccctgtgcccacctacgcgcctgcccggcagcctgagccatctgcccccaccgagggtgaagaggcaagtggccctaagcaaaagacgtgccagtgttgtgcggtcatgtgaacccatgcccctccaccccatgtccagctcctctcacagctacctcggcctcttggcacccagaagagggtcccaggcacagacagggaccacaggactggccatggcacctgggagccagctagcctgcacgtccacctaaacctgggcttccagaccccttgcccactgcctgtaaccctggcctccttctgcgatgaagcctttatacttgaaaataaaatgtgaaagcactcaagacggcttgaa

SEQ ID NO: 401508 - DNA, 2096 bp, Homo sapiens
tgaactctgaactttttattggcctcctgctccccaaagggtaccctgcttctgctggcttaatgcctcagaactttggtgtcattggtctcagacaccactttgccatccactatccggcgggtggtggtcttttggatggtttgcatggagttgctgctgtccaaggcatcaccaagattaaagtcctcgccatcttccagcaggcggcggtaggtggcgatctcagcctccagcttgaccttgatgttcagcagggcctcatactcctgggcctggcgctgtccctctgcccgggtctgtgccagctctgactcaaggtgcagcaggatcccgttgagctgctccatctgtagggcgtagcgggcctccacctccctcaggctgttctccaagctggccttcagatttctcatggagtccaggtcgatctccaaggactggactgtacgtctcagctctgtgagcgtcgtctcagcagctccaacctcagcagactgtgtggtgaccactgtggtgctctcctcaatctgctgagaccagtacttgtctagctcctctcggttcttccgagccagctcgtcatattgggcccggatgtctgccatgatcttggcgaggtcctgagatttgggggcatctacctccacggtcaacccagagctggcaatctgggcttgtaggccttttacttcctcttcgtggttcttcttcatgaagagcagctcctccttgagagcctcgatctctgtctccagctgcagtcgtgtgatattggtgtcatcaatgaccttgcggagcccatggatgtcgttctccacagactggcgcatggccagctctgtctcatacttgactctaaagtcatcagcagcaagacgggcattgtcaatctgcagaacgatgcgggcattgtccacagtatttgcgaagatctgagccctcaggtcctcgatgatcttgaagtaatggctccagtctctgacctggggtcccttcttctccaagtgctcccggattttgctctccagcctccggttctcggtctccaggctcctcactctgtccaggtaagaggccaggcggtcgttcaggctttgcatggtctccttctcgttctggatgcctcccattcctgccagacccccggctatcccggtggccaggcccccggaccccatgccgcccctgaagctggtggagcgggacacggagatccgggaaccagagcccccagcgcctgcatagacgctggccgcgctgctgaccggccgggcgccgtagctgggcgcctggacagagcccagggaccggtagttggtggagaaggtggagcgagtggtgaagctcatgctgtccggggagagagaaaggacaggactcaggctttgcgagtgtggtgtgggaagggctgagggccacagaggactgtgccacaggggccacgggccccgagctggaggctaaggtggaggaagtggtgctggaagccatcggagacaggaagggagctggtagcctggagctcccggcctgggtgaaggaggacaggggcatcgtggaggtggtctgggagggggtgggtggcagtgatgcagaggccatgggggagataggcagggtccctgaggtcgtgcagactagctcgcctaggctccaggagagattagaggcagcagcttccatagaaggggaagatgtgccccagggcagccctgagggtgatgggcagggaggctctggaggagaggagggatccttcatttgggtggagagagtgaccctcagtgaagagtgggaggagctgctggtggaggggttggaagggcccgaggtggcagggagggagagaggagatgaaagcccatgtccagctcctctcacagctacctcggcctcttggcacccagaagagggtcccaggcacagacagggaccacaggactggccatggcacctgggagccagctagcctgcacgtccacctaaacctgggcttccagaccccttgcccactgcctgtaaccctggcctccttctgcgatgaagcctttatacttgaaaataaaatgtgaaagcactcaagacggcttgaa

SEQ ID NO: 401509 - DNA, 204 bp, Homo sapiens
gtgggaccacctctgctctgaaggcccccagggtcagtacttaagagctctgatgctaggagcagcaagaacaagggggccgcccttttgcactcatctcccgggcggagagcggagatgagaaggagaacagacaggaaacacggagcctctgcctgcagtctctgccattctgccctggacagaagcatgactaatccagca

SEQ ID NO: 401510 - DNA, 331 bp, Homo sapiens
ccctggacattctggtatgattgggaggcatcctgagtcctcccagattcagaagccactgtgtttccttacagcctgcagaatcatgagccaattaaacctcttttctttatgatcatagagaaaattagtagtgcaaagtggaactattaaatgtcattgtcgtggcaatcagcactcagcttcttttcattcaagtatgtgaaggcttcatgaattttccccctgaaaatggacttgttttcctttaccacattgtcaggctgtggcaaagatagtgataatgtagaagcaggttcagaagggagtagcagacagaggtcggaagagt

SEQ ID NO: 401511 - DNA, 343 bp, Homo sapiens
caggtactataattatcaatgttttataattgaggaaactaaaccacatagaagttgaattacttgtccaaaactacctaattaataaatgatagagctgaaattgaaatccagaaatctgagtctcagactctacattcttgaaagctatgccatactaccttatatttatcacttcaaaaaaaaatcttttagtttcaggagtacatatgcaggtttgttatatataaactcgtgtcatggaggtttgttgtatagattattttgtcacccaagtactaagcctagtagtcattagttatttttcctgatcccttctgtcctcccaccctgcaccctccaa

SEQ ID NO: 401512 - DNA, 685 bp, Homo sapiens
gaggaactagtgactagcgtcctatttgacgcataaggagctggcagggttgaaagtggagcccaggactgcaagcatggccatctaccctcggggccggcaccagcctcggggcagctgaccttccccacctcagaagctctcattcctctgggctttccacaaaccacccttcttgaccacaaaaaggtggccatcctgactggtctctaccttcaggaaaacaaatggggacctgagggcgctcaaccaccccagaccacccagaagtcacaggagcacggaacaggaagcagggagacagcacacagtaagcacatggcaagcacacagtaaacacacggcaagtacatggcaaatacacagcaggtacacagcgagcacacagtaagcacacggtaaacactcagcaagtacatggcaaatgcacagcaggtacacagcgagcacacagtaagcacatggcaagcacacagtaaatacacagcaagcacacagcaagtacacagtgagcacgcggcaaacacacgacatgcacacggttagcacactgcccggctccctccaaagccacttcccccacagagaaaggagaaagcggccctggcctggcagtcactcacagtccctctggacctggagccagcggctatggcggacgaagaggcacctgttcccaggcact

SEQ ID NO: 401513 - DNA, 367 bp, Homo sapiens
gttgactatcactgacctatgacgagagcacgtggatgacacgtaaaatcaagatcaaacggtgatgctaccgccagtcgtcttcaccgcgtggtctccatgagatacaagccaccgaaactacacgcgtcggcctgacctatcactccacagataaagtacacgctcgaagtgcaacagcaagtacacagtgagcacgcggcaaacacacgacatgcacacggttagcacactgcccggctccctccaaagccacttcccccacagagaaaggagaaagcggccctggcctggcagtcactcacagtccctctggacctggagccagcggctatggcggacgaagaggcacctgttcccaggcact

SEQ ID NO: 401514 - DNA, 166 bp, Homo sapiens
agatgtgagaggtgaaataacttgcctgaggaaacacagctcaaactggaactgactcctaagtctatgattttaacctcttgtgaagatggttctatgaaaagtccgtaacaacatacaacccattaatttagtaccagatgtaaaatgtgatttaactgcctta

SEQ ID NO: 401515 - DNA, 114 bp, Homo sapiens
aaaattatccaaacttctccagaatcatctaacaaatgtaaacacttttaacatgaaaaagtttgcttacagaactaaaatattctccaaagactaaagtttgaaacccactta

SEQ ID NO: 401516 - DNA, 377 bp, Homo sapiens
ttgcactagcattatgtacaaacctcttcttcaccatacccttgtccaatttcttgtcatgttctcctgcccaaggattctccgtggtgatgaattttgaggtagccaaaagcaacagtggctttgcaagggcttgctcctcccacaataaaaactctataaacccttgtcctccaggtggtggatgtgcatgcaccctggcggcatctgctgctccctttgcataagacgggagggtatacgtttcctgagctgatctgactctgagagccagggagcttcggctggggcatctccctgagaagcagcatggagcagcctaacagtaaaggctatagcctgggaaggacccctcagggcccagagtgcagcagtgc

SEQ ID NO: 401517 - DNA, 664 bp, Homo sapiens
ggtatggggggaggtcgagtgggcaaacacaggggaggcagggcatggtccagcgctcacaggtgctagggaggctcatgcaccacactgggaaaaggtagggaagtctagcagggatgggctgggggtgccagggctgctactggctgaaagtcattttagggaaatttattgggtgagcaagctctgggcctccctccccatctcctgctactgagaagtcaggccttgctctataaaatgggggagaggggtggacaagtgcagtcgcatgcatgggttgggggcatctgcagtgtttcccctcactcagcccttaactctgggtgggctcatttctcacatgcagtgtccagggcaggccccaccccatctcctggtgggactcggggtactgtatgcctgtccagattaggaggagaccactccctccttcttgctcttctgttacccatgggtcatgggctggggcttgtggcaggcaggcaatctaggcatccatgtgtctcggggctaagacagaggctggcaagggctgactgacgctgggttcttctcctaggagcttcggctggggcatctccctgagaagcagcatggagcagcctaacagtaaaggctatagcctgggaaggacccctcagggcccagagtgcagcagtgc

SEQ ID NO: 401518 - DNA, 164 bp, Homo sapiens
caatggtctgggcaatgattttttggatatgattccaaaagcccgggcaacaaaagcaaaaatagacaaatgggattacaacaaactaactgcacagcaaaagtaaatcagcaaagcaaagagataacctacagaatatgaggaactattttacatctcataag

SEQ ID NO: 401519 - DNA, 221 bp, Homo sapiens
agcattcctaacaaggtttatgcaagcagtattggccctataatggagtcataggttgtcatgatttcataggttccctgtctctcagtgaaactcagaatcccctttgtcccaggtcctaagtctatctatattttagtgtttgagctatcggaagaatgatccaatagaaaactggtagtttccattcatagttctgagatttaaaatagcaaaaaaag

SEQ ID NO: 401520 - DNA, 452 bp, Homo sapiens
aaaatggtttttacataggttcttacggtacgcttggagtacacttacaggccactgctgcagtctacattttattgtgctgaatctgcattctatcagatacccatggaaagacctcagtatatgctttgcactctgctttgctccccttttccaatttcctattgcaaatcattttgatgtaatacagaaaaaacagcatttaaatatctacatgaagagttgacccactaatgtcagccgacctctactttgtcagctcatagttaaatcttttatcatttcaaaaataaagtgcattttctttttctttttcttctttttttagtgatggagtctaactttgtcacccaggttggagtgcagtgagctgagatcgtgccattgtgatatgaatatgccttatatgctgatatgaatatgccttaaaataaagtgttccccacccctga

SEQ ID NO: 401521 - DNA, 843 bp, Homo sapiens
tggaaagatacacacaaaattcaggatggtaaaagaagaaaggagattcctcttgcaaaagaagccaagtataaacatggaagaacaactgcctaagcaagtagaaaagtgttccataatagtgcgcaatgaatgaagagttctggattaatctctggaactcaacctgcaccctgatctttattttgaatgggatctagaacgggatcttgaagtagctctttttggcggaggggacacagaatgaccctttgagggtggagcaggtaggggtgaattggaacgagactggctccttgatctgtattttgacttcatatcaccttttccattttctttggaagatcgggacagagacctgcttggagatttctcatactcatccttagatctgctttgagaacaagaacaggagcccagatcagatttgggcatagatttgctccttgagctagatttcctgccttttgaacgagaacgtgatcgacctttgctccgcaacctgatcaggagtgactttttgagatacttcgagatctactgtggctgctcctgcgactcctacttcgtgaccatcttctagatctatacctggatctgcttccagaatcagatcgcctatggcttgtgcctggcttaccttcaataagcctaatatttctgcaccatccagtttgtccaaagcaagcttcatgtcaaaataggagtgaaactcaacgccctcacttgtgcattccttgtgagcatcaacataggttacttcatctgcttgttgcataaaatcctttaaatcttgccaactgtaacaactagaaagactttctataataagctcgtattctg

SEQ ID NO: 401522 - DNA, 541 bp, Homo sapiens
tggaaagatacacacaaaattcaggatggtaaaagaagaaagatcgggacagagacctgcttggagatttctcatactcatccttagatctgctttgagaacaagaacaggagcccagatcagatttgggcatagatttgctccttgagctagatttcctgccttttgaacgagaacgtgatcgacctttgctccgcaacctgatcaggagtgactttttgagatacttcgagatctactgtggctgctcctgcgactcctacttcgtgaccatcttctagatctatacctggatctgcttccagaatcagatcgcctatggcttgtgcctggcttaccttcaataagcctaatatttctgcaccatccagtttgtccaaagcaagcttcatgtcaaaataggagtgaaactcaacgccctcacttgtgcattccttgtgagcatcaacataggttacttcatctgcttgttgcataaaatcctttaaatcttgccaactgtaacaactagaaagactttctataataagctcgtattctg

SEQ ID NO: 401523 - DNA, 519 bp, Homo sapiens
tgtgggcaaagcgcttcgtgggttgctactagatgaggagaaggaaatgattagcatgcacaaaaaattccgcccagctgccaatatggcaccgttcggtgactaacatcccaaaactctcagtaaaggtcaaccttccaggaagttctgagaaatgcagcttttcatgctaatttcctgggctgactccgtgactaatcagcccgtctcacacccagggagaaatcctgcagcacagatagcctcctcctctgcccccatcaatctctgtagaaggaagacattcagcaaatcatgctgctcagcatctaagctcattctccaaagaagggtcgcccacccatccttctattgctctcgccctccttctctccatccaacaagtaccaagtgtccaccatgcatccgtcagaagacattcagcaaatcatgctgctcagcatctaagctcattctccaaagaagtgtcgcccacccatctttctattgcaccctccttttttccctccatccaacaaa

SEQ ID NO: 401524 - DNA, 351 bp, Homo sapiens
atccctccttaatgacgtgccgatcattagatacctgcgtgtcaataacgtgctctgatgctatgtaccactgacagtcacaccgtgcccctccatctgcttttgttttgaccctatctttgaactttatcttggttgccggccagtagttttccctttaattacaagaaggaaactgtcaataaaatctgttaaatgggatgcaatgagtggcttgaatgggcggacggctatttgttcaaattctgcagcattcaaggtattgacagtttgttttctggggccatatgtgacgatcaatctcaggctgggctcagccgcgctgaaaaatgaaaaaccagattgcttttg

SEQ ID NO: 401525 - DNA, 534 bp, Homo sapiens
ctttagtgtttaatcaagaagcattatattaatagttgggatgactgatgtacctgttagaattttctttttgctcgtaggagcatatctggatttagcaggctttaaaatttcaaagcagttaaaatgtgcatgatattcatatgttagggaggagttaaattctctcaattgggagaaactaaagaaggactttccgtgttactagaactagatattggactgctgaaaattgaaagaccaattgatataccaatgggaggtttgtgtacagtcagtgaaattgaagaacatttatgtcattaatggacttacatagctattggaagccagaaagttatggtagatgtggttcttacagagttgataggcaagacttattgggagcactatcgtgatagctgatggtttggtaacattaataatagtaaaagcatgttatagtgggtattttttatgttggcacgaattggagacctgagccagtaaaagcagacgctgggctctaagagatacagatgtgaaggatatatt

SEQ ID NO: 401526 - DNA, 377 bp, Homo sapiens
agtcagaggaaaagctggaaatcaggctcagatggtcagacacccaggcccacacactgagcgaccccaccacactgcccccacccaggctactctagaccacagggaggtcagcccaggaagctagagcagctggattgccaaggctactctagaccacagggaggtcagcccaggaagctagagtggctggattgccaaggctactctagaccacagggaggccagcccaggaagctagagcggctggattgccaaggctactctagaccacagggaggtcagcccaggaagctagagcggctggattgccaaggctactctagaccacagggaggtcagcccaggaagctagagcggctggattgccaaggcta

SEQ ID NO: 401527 - DNA, 417 bp, Homo sapiens
cacacagccctggttctccagctgttctgctgctgtttctgtgctctccctgattaagagcattcagttcctgggctctccctttgagcaggaaatggtgaaagcatgtggctatggtatagcccacagggctgagatttgctgggattacaggcgtgagccaccacgcccggcccacttgcacattttcaaagtagtccacaaagctgtagtttctaatagcttcatagttcacatgtaataggggttctctgtgtgtttatagagcaggctactacagtggaactgttcctgtttcatctgacatccggatagatgccagccacccccacattccaaagtgagatttctgactagcagtgacttttctagggccacgtggaaaagttgataagtatccttttctgcaggacagag

SEQ ID NO: 401528 - DNA, 206 bp, Homo sapiens
ccctcttcaaaacctgcctccactgcttcctccgccctttcagctcccattctctcaccagccccctcagtccaggcttttattccctccccacagccctggttttccttctatctcactcacactcctttttagttcctcctcctctgccagatctctaaaagctgggaataccccagaattctgtcatcaggccccctcctcta

SEQ ID NO: 401529 - DNA, 472 bp, Homo sapiens
ctaattttggtatttttgttgagatgaggtttcgccatgttacctagacaagtctcaaactcctgggctcaagtgatctgtccatctcagcctcccaaagtgctgggattacaggtgtgagccaccggcctcagagatctaaaacaagatattgtattttaattgcacaggatgcaattaaaaaagaaaacattcagaaaacaagaagagctcttagaactgaaaaataagttagtgtaaaggttggaagataaaattgatactaacctgaaaagtattagaaagagaaagaaataaaaactaagagtaaataagaaaattagaagattagtcctagagaatcagtatccaactaagaggttcccagtgggtgatacagagaaaatgaatgggaggaaatctcaaggaaatgtatttcctagaactgaatgattggaatttccagtttagaaagaaggaatctagtgccagc

SEQ ID NO: 401530 - DNA, 368 bp, Homo sapiens
ccttggtgagtactggctctagagctagtttgctttgttaggactccagctatgacacttggtgagtgtaggcccttcaattaacctctcgtaaccccaattacctcctctacaaaatagggtaatagaagtacttcccccactgggtcacagtaagatgaaaatacttagaatatgctctggtacacagtaggtgcataaatgttagcttattattatcattatcatctaaatgcattattgcgtacacaaaaataacaggtgaaacttaaggaatgaatgagtgaattgcattcattcacttaatcattcaataaacatccattaagcatcaactatgtgccaggcccagggccagagacttagga

SEQ ID NO: 401531 - DNA, 435 bp, Homo sapiens
cgcctctcgcttatgaagccatgagaagaaagagaaaaagagagcctggtgtggaacatgagctagctaatgcttctggcaaccatcatggatgaagaggtgaccttgaggatggaagccacatgccaggagagtgaagcagaaagacagaagaagcatggggcctggggcctggggcctgccaatcagtctggactcactcatatggaatggactgcagtcacttgagagagaaaaaaacttccactgtgtttaaacctctgtttggcttttctgtcacatgtagacatcaggattaccaaaagacacatcagattttgcctttctttaaaaagaaaactcaatctaagttcgtgtttttttcctttagtgatttgagagtgttaatttctatttcagttatattagtagttactataaaatgtctaacaaacg

SEQ ID NO: 401532 - DNA, 523 bp, Homo sapiens
cgcctctcgcttatgaagccatgagaagaaagagaaaaagagagcctggtgtggaacatgagctagctaatgcttctggcaaccatcatggatgaagaggtgaccttgaggatggaagccacatgccaggagagtgaagcagaaagacagaagaagcatggggcctggggcctggggcctgccaatcagtctggactcactcatatggaatggactgcagtcacttgagagagaaaaaaacttccactgtgtttaaacctctgtttggcttttctgtcacatgtagacatcaggattaccaaaagacacatcagattttgcctttctttaaaaagaaaactcaatctaagttcgtgtttttttcctttagtgatttgagagtgttaatttctatttcagttatattagtagttactataaaatgtctaacaaacgaaaaaaaaatggcctcaataggcctaaagggtggagctctgaggtcagttccctttaaaaaaaaaaaattggcctccttggcctaagg

SEQ ID NO: 401533 - DNA, 768 bp, Homo sapiens
cgcctctcgcttatgaagccatgagaagaaagagaaaaagagagcctggtgtggaacatgagctagctaatgcttctggcaaccatcatggatgaagaggtgaccttgaggatggaagccacatgccaggagagtgaagcagaaagacagaagaagcatggggcctggggcctggggcctgccaatcagtctggactcactcatatggaatggactgcagtcacttgagagagaaaaaaacttccactgtgtttaaacctctgtttggcttttctgtcacatgtagacatcaggattaccaaaagacacatcagattttgcctttctttaaaaagaaaactcaatctaagttcgtgtttttttcctttagtgatttgagagtgttaatttctatttcagttatattagtagttactataaaatgtctaacaaacgtatttgtacatttatttttgaagaacattaggaccttgctactccaagtatgatcccctgatcagctgtgtcagcatcactggggagtttttacgaaatgtagaatctcatgccttacctaggcccacagaaacagaatctcattttgacaagatcctcaggtgatctgtgtacatattgcagtgtgaaaaccactgctcttgagactggcgtcccctctacttccatgagaccattatcatctccacagcatccaattgtgtcagagttaagaaattgtctcatgaattctaaaaatgtagatgcagctctcctgtgtccttactactgtcc

SEQ ID NO: 401534 - DNA, 718 bp, Homo sapiens
cgcctctcgcttatgaagccatgagaagaaagagaaaaagagagcctggtgtggaacatgagctagctaatgcttctggcaaccatcatggatgaagaggtgaccttgaggatgagagtgaagcagaaagacagaagaagcatggggcctggggcctggggcctgccaatcagtctggactcactcatatggaatggaagaaaaaaacttccactgtgtttaaacctctgtttggcttttctgtcacatgtagacatcaggattaccaaaagacactttaaaaagaaaactcaatctaagttcgtgtttttttcctttagtgatttgagagtgttaatttctatttcagttatattagtagttactataaaatgtctaacaaacgtatttgtacatttatttttgaagaacattaggaccttgctactccaagtatgatcccctgatcagctgtgtcagcatcactggggagtttttacgaaatgtagaatctcatgccttacctaggcccacagaaacagaatctcattttgacaagatcctcaggtgatctgtgtacatattgcagtgtgaaaaccactgctcttgagactggcgtcccctctacttccatgagaccattatcatctccacagcatccaattgtgtcagagttaagaaattgtctcatgaattctaaaaatgtagatgcagctctcctgtgtccttactactgtcc

SEQ ID NO: 401535 - DNA, 385 bp, Homo sapiens
cgcctctcgcttatgaagccatgagaagaaagagaaaaagagagcctggtgtggaacatgagctagctaatgcttctggcaaccatcatggatgaagaggtgaccttgaggatgagagtgaagcagaaagacagaagaagcatggggcctggggcctggggcctgccaatcagtctggactcactcatatggaatggaagaaaaaaacttccactgtgtttaaacctctgtttggcttttctgtcacatgtagacatcaggattaccaaaagacactttaaaaagaaaactcaatctaagttcgtgtttttttcctttagtgatttgagagtgttaatttctatttcagttatattagtagttactataaaatgtctaacaaacg

SEQ ID NO: 401536 - DNA, 416 bp, Homo sapiens
atctttgtttctgtgcagttccacccttcacattcccaaacagtcatttactaaccgttttctgagcactgggcctattaattccccaattttcctcttcactgtgtcacacagacttcctatcacactgtttaggatggaatgtcaaatacactcttttaattggaaagaaaatgtaaacaagctgtaaagaaaagaaaacaggctgtacagaaaacacattgtaactcattaaattggtatagttcataagccagccttatttagagaatgttataatcccactaaatttctttgtgttctgcctatataagcaagatcgtaacttgagagcattgaccccatttctctggagtctgtgtttcctggatggtaacttccagcgttttactcaaataaactcattaaaactgaat

SEQ ID NO: 401537 - DNA, 384 bp, Homo sapiens
aggatatttacgattggggaaggaagcatagcgtggtacacctgaatcaggaggactgtgaagggcggcagtgaggagtgaaaccagagcctgaaattgccacacttcctccgtgtctgactcggtgcttctcaaactgagcattttcaacatctttgacaaaacaattcagccacggaggggagtcttgcgcattgtaggatgtttaagccagaattcctggcctccacccactacatgccagaagtaacttaccccaaccaagatgagattagccactggcatgaaggaaataaaatattagaacttctatgtatttttatttgattacaaaacatagaatttaagttttattaacattgatgatgcccagacataatccaa

SEQ ID NO: 401538 - DNA, 339 bp, Homo sapiens
tcattgtccagcccctgctgtgaaatgtgaagtcctaagacacaggctttttttgtttgttacgttcattgctttagaaggaattaaggacaagctaccccaaatgacgtcactttggtatatggattattttgagctgcaggcactggagaaacagcaggtgcaggcagggccttcggacctccccttttctaaccaagaacaggccatgacatttcccacgagatacacactccctttgtaccaggaagagaacatccttatcaccaaacactgggagtggatgccgaggtgcatctgcacaaacacacttaataaaataaccctttgcttccacca

SEQ ID NO: 401539 - DNA, 1127 bp, Homo sapiens
tcaggccaccgagggcccagaggcgaagtagtgcagccaaggtcaccagcaagggactaggagatgggcagtgaacgcacccctcagcggcccgactggaccaggcaggcgtagctgcggagacgagggccgttggaaaaatcccagaggacccagagagaactcaggctgggactgtatccactccaggagtcctccctgttagtctctggtgcctgaagcccagatggaaagagatctgtgcacataggtttccacccggcttccctaacccggagggtttggtagggcttagggctgctgcgccagcaggacctgcccgcagggcactccgaggctggacaaggagatcggaggccggtgcagcctgcttgagctgaccagacacggagaagggaggcccgaggcgacagtcagacagctcctcttacctggacccttcaggaaagcgttgctggtggggggtggggggcagggccaaggccaaatcgattttctttaggattttcagtgagttaatgagagagtggtatgggcaaagaggaacctgaaagccaaggagcagcagaagcctctggggccacgataaaaataggatatttgcccaggaactcagcatcatcaataagtgccataaagcatccctccccttcaaacaaggcaaacgtatttcaactgaaaatggcaccattgggtggaaagtaggaagggagatggttttccctgggtgggttatgctgtggctggtttaggtgaggtttggggagctctttctgatgtaagccccccaccccaaggacggacctctgtaatatggggaagcttgggcttctgtgggccgactcatcttgaaatgagctttgatactcatgtttccacacacgtagaactgggattcagaagtagagggatcccaaattttaggaggagagagacttctgttagtgctgggtcccatctggcctgcttggtgctatgactgaatgtgtcattccggcatacttccagagttctctctggagtcagtattgggtgatgggactgaattgtgaagtgaatggagaaataccacctaactaggtttgtttgaaaaccagaggtaaatggattttttcttttcttttttc

SEQ ID NO: 401540 - DNA, 333 bp, Homo sapiens
tagtgaatttctgtgaattctggtacctttgtcagtcatcacctttgtcaactctagacacactgactaaattgagtttataaaactacaaattgaggcctgataggatcagggtgggaaaggctctcttggagccactcgcacatataaatggatactccacctgcccagggagggttctgccaaactatccttcagatccctggacagtctcagaatgcaggttccttaaactgttcatcacccagctgaatgcagtttaaatatgctgatccctcccacataaactttctgtttctatgtagctattaaacgcttatctattgagtaaca

SEQ ID NO: 401541 - DNA, 336 bp, Homo sapiens
tcatggacccagaaatgggtctcaggcaaggccactgttgtgccctcctaagcatgagctgtagcaacgtcagcatccagtccaactgggctaaactcgggtccagctgggaacttctgtgcccctaggggcccagatctggtgaattatttttctacaaagatttttattaataagagactggagatactacatagatgcgtctttctcttcttccctcaaggaactgatctgctatctgtggttctgagtaaactcatagacatatcacacgacagagaaatcctatttgttttctttgaaactatgctcagtttaataaaaccctacctttta

SEQ ID NO: 401542 - DNA, 546 bp, Homo sapiens
agtgcatttcacacagctctcacccgaaagagataggtgtcttctccattatggggtggatatcttctcttactgctgattattacagaatttcttcttaacattttataagttataacattttataagttattacagaatttcttcttaacattttataagttataacattttataagttattacagaatttcttctaacattttataagttaattttgcttttgagtaatgttttcttgggaactggaaaatactttcttaatctttaatttgaatgtttatcaccatctaatccaccgaaagtgtttctgcaatggaaaataagaacactattgtattgccccactggcacatacccatagtccatctgagcctaatactctgttctgggccctgaaggatattttgagagaatatctgattgtttgcccaggtttcaatctcagaagagaactgggatgccttccaacacttgtgaagctattggcattttcagtcaatcccactcttgggataatgacttattaataaataatgatcactc

SEQ ID NO: 401543 - DNA, 357 bp, Homo sapiens
catcctgatcatgctcaaggtccttggcgtcatctactttgcctgaagcagctgggctggggccgtccaggaggaggcagagctgctgcttctccaggatcatcatgaacagggacaaagcgtttcctactgggagacccatgggcctgggaccaaggattacattaataaaaatgttcccttggtgtcatgcatcaagggctaccagcagcagcacacacatgccgtgtggcaggacagagcaaagtccattcgccattacagaaagtatgcaaatgagaacatctgttcctttacaaaatgagtcattttctccaaatggctgcactgcataaacactttcactttaaatttaat

SEQ ID NO: 401544 - DNA, 292 bp, Homo sapiens
cagctggggagggcggggttggatcagcgcctgctcctccgccttcgtttttcccctccccctaaggattcagttcccccttctgaaattcaccaccttgtatgtgacttaatccagccccatgaaactgtctgagagcatgagtgagggtcaacaaacttgcttcccccaagaaaaagggtggaatcagagaggtggtgggaagggtttgccttgctttgtcatcgcttatataaccataaaaggttgtcaaggacgcctgcaggttagaggcctggcaaacaggaagtaa

SEQ ID NO: 401545 - DNA, 1876 bp, Homo sapiens
acttgtgctataacagtgtcaaaaccaggtgtacgtcgattccggatctgcctgttcctcctgggtgtcactggcagccctgtccttcctagagggactggaacctaattctcctgaggctgagggagggtggagggtctcaaggcaacgctggccccacgacggagtgccaggagcactaacagtacccttagcttgctttcctcctccctcctttttattttcaagttcctttttatttctccttgcgtaacaaccttcttcccttctgcaccactgcccgtacccttacccgccccgccacctccttgctaccccactcttgaaaccacagctgttggcagggtccccagctcatgccagcctcatctcctttcttgctagcccccaaagggcctccaggcaacatggggggcccagtcagagagccggcactctcagttgccctctggttgagttggggggcagctctgggggccgtggcttgtgccatggctctgctgacccaacaaacagagctgcagagcctcaggagagaggtgagccggctgcaggggacaggaggcccctcccagaatggggaagggtatccctggcagagtctcccggagcagagttccgatgccctggaagcctgggagagtggggagagatcccggaaaaggagagcagtgctcacccaaaaacagaagaagcagcactctgtcctgcacctggttcccattaacgccacctccaaggatgactccgatgtgacagaggtgatgtggcaaccagctcttaggcgtgggagaggcctacaggcccaaggatatggtgtccgaatccaggatgctggagtttatctgctgtatagccaggtcctgtttcaagacgtgactttcaccatgggtcaggtggtgtctcgagaaggccaaggaaggcaggagactctattccgatgtataagaagtatgccctcccacccggaccgggcctacaacagctgctatagcgcaggtgtcttccatttacaccaaggggatattctgagtgtcataattccccgggcaagggcgaaacttaacctctctccacatggaaccttcctggggtttgtgaaactgtgattgtgttataaaaagtggctcccagcttggaagaccagggtgggtacatactggagacagccaagagctgagtatataaaggagagggaatgtgcaggaacagaggcgtcttcctgggtttggctccccgttcctcacttttcccttttcattcccaccccctagactttgattttacggatatcttgcttctgttccccatggagctccgaattcttgcgtgtgtgtagatgaggggcgggggacgggcgccaggcattgtccagacctggtcggggcccactggaagcatccagaacagcaccaccatctagcggccgctcgagggaagcacccgccggttggccgaagtccacgaagccgccctctgctagggaaaacccctggttctccatgccacacctctctccaggtgccctctgcctcttcaccccacaagaagccttatcctacgtccttctctccatctatcggaccccagtttccatcactatctccagagatgtagctattatgcgcccgtctacagggggtgcccgacgatgacggtgccttcgcagtcaaattactcttcgggtcccaaggtttggctttcacgcgctccattgccccggcgtggcaggccattccaagcccttccgggctggaactggtgtcggaggagcctcgggtgtatcgtacgccctggtgttggtgttgcctcactcctctgagctcttctttctgatcaagccctgcttaaagttaaataaaatagaatgaatgat

SEQ ID NO: 401546 - DNA, 2269 bp, Homo sapiens
ctcggacattcagcaggtgctggcacaggccctggctgggaggtggggcgggcaggagccagcctggaggaggggctgagagtcagcaggcacacgggaacccggaaccctgtgtgctggggaggaatcccgcagtggccggggggcttgaggccgctgctttgtctcttcgtccagagccttatgtaagagcttttctcgggaaacaggaagtcctgcttgccaatttcagcacagggagtagtgcaggccttattccaacacacccggcccagccttaaccccagaactcagccagtttcttgcttccgtgcccctggttctcctccccatcgagcccacccctcctttcccaccttcagtcacccctagtgaactgccccagcgatctctgctgtgcttgaccccgagggtcttccaccctcgccctgaccctggacactgcccagcttggccccccatcctgctcctggcacaatgccctctagccagccaaccttccctcccccaaccctggggccgccccagggttcctgcgcactgcctgttcctcctgggtgtcactggcagccctgtccttcctagagggactggaacctaattctcctttttattttcaagttcctttttatttctccttgcgtaacaaccttcttcccttctgcaccactgcccgtacccttacccgccccgccacctccttgctaccccactcttgaaaccacagctgttggcagggtccccagctcatgccagcctcatctcctttcttgctagcccccaaagggcctccaggcaacatggggggcccagtcagagagccggcactctcagttgccctctggttgagttggggggcagctctgggggccgtggcttgtgccatggctctgctgacccaacaaacagagctgcagagcctcaggagagaggtgagccggctgcaggggacaggaggcccctcccagaatggggaagggtatccctggcagagtctcccggagcagagttccgatgccctggaagcctgggagagtggggagagatcccggaaaaggagagcagtgctcacccaaaaacagaagaagcagcactctgtcctgcacctggttcccattaacgccacctccaaggatgactccgatgtgacagaggtgatgtggcaaccagctcttaggcgtgggagaggcctacaggcccaaggatatggtgtccgaatccaggatgctggagtttatctgctgtatagccaggtcctgtttcaagacgtgactttcaccatgggtcaggtggtgtctcgagaaggccaaggaaggcaggagactctattccgatgtataagaagtatgccctcccacccggaccgggcctacaacagctgctatagcgcaggtgtcttccatttacaccaaggggatattctgagtgtcataattccccgggcaagggcgaaacttaacctctctccacatggaaccttcctggggtttgtgaaactgtgattgtgttataaaaagtggctcccagcttggaagaccagggtgggtacatactggagacagccaagagctgagtatataaaggagagggaatgtgcaggaacagaggcgtcttcctgggtttggctccccgttcctcacttttcccttttcattcccaccccctagactttgattttacggatatcttgcttctgttccccatggagctccgaattcttgcgtgtgtgtagatgaggggcgggggacgggcgccaggcattgtccagacctggtcggggcccactggaagcatccagaacagcaccaccatctagcggccgctcgagggaagcacccgccggttggccgaagtccacgaagccgccctctgctagggaaaacccctggttctccatgccacacctctctccaggtgccctctgcctcttcaccccacaagaagccttatcctacgtccttctctccatctatcggaccccagtttccatcactatctccagagatgtagctattatgcgcccgtctacagggggtgcccgacgatgacggtgccttcgcagtcaaattactcttcgggtcccaaggtttggctttcacgcgctccattgccccggcgtggcaggccattccaagcccttccgggctggaactggtgtcggaggagcctcgggtgtatcgtacgccctggtgttggtgttgcctcactcctctgagctcttctttctgatcaagccctgcttaaagttaaataaaatagaatgaatgat

SEQ ID NO: 401547 - DNA, 2321 bp, Homo sapiens
ctcggacattcagcaggtgctggcacaggccctggctgggaggtggggcgggcaggagccagcctggaggaggggctgagagtcagcaggcacacgggaacccggaaccctgtgtgctggggaggaatcccgcagtggccggggggcttgaggccgctgctttgtctcttcgtccagagccttatgtaagagcttttctcgggaaacaggaagtcctgcttgccaatttcagcacagggagtagtgcaggccttattccaacacacccggcccagccttaaccccagaactcagccagtttcttgcttccgtgcccctggttctcctccccatcgagcccacccctcctttcccaccttcagtcacccctagtgaactgccccagcgatctctgctgtgcttgaccccgagggtcttccaccctcgccctgaccctggacactgcccagcttggccccccatcctgctcctggcacaatgccctctagccagccaaccttccctcccccaaccctggggccgccccagggttcctgcgcactgcctgttcctcctgggtgtcactggcagccctgtccttcctagagggactggaacctaattctcctgaggctgagggagggtggagggtctcaaggcaacgctggccccacgacggagtgccaggagcactaacagtacccttagcttgctttcctcctccctcctttttattttcaagttcctttttatttctccttgcgtaacaaccttcttcccttctgcaccactgcccgtacccttacccgccccgccacctccttgctaccccactcttgaaaccacagctgttggcagggtccccagctcatgccagcctcatctcctttcttgctagcccccaaagggcctccaggcaacatggggggcccagtcagagagccggcactctcagttgccctctggttgagttggggggcagctctgggggccgtggcttgtgccatggctctgctgacccaacaaacagagctgcagagcctcaggagagaggtgagccggctgcaggggacaggaggcccctcccagaatggggaagggtatccctggcagagtctcccggagcagagttccgatgccctggaagcctgggagagtggggagagatcccggaaaaggagagcagtgctcacccaaaaacagaagaatgactccgatgtgacagaggtgatgtggcaaccagctcttaggcgtgggagaggcctacaggcccaaggatatggtgtccgaatccaggatgctggagtttatctgctgtatagccaggtcctgtttcaagacgtgactttcaccatgggtcaggtggtgtctcgagaaggccaaggaaggcaggagactctattccgatgtataagaagtatgccctcccacccggaccgggcctacaacagctgctatagcgcaggtgtcttccatttacaccaaggggatattctgagtgtcataattccccgggcaagggcgaaacttaacctctctccacatggaaccttcctggggtttgtgaaactgtgattgtgttataaaaagtggctcccagcttggaagaccagggtgggtacatactggagacagccaagagctgagtatataaaggagagggaatgtgcaggaacagaggcgtcttcctgggtttggctccccgttcctcacttttcccttttcattcccaccccctagactttgattttacggatatcttgcttctgttccccatggagctccgaattcttgcgtgtgtgtagatgaggggcgggggacgggcgccaggcattgtccagacctggtcggggcccactggaagcatccagaacagcaccaccatctagcggccgctcgagggaagcacccgccggttggccgaagtccacgaagccgccctctgctagggaaaacccctggttctccatgccacacctctctccaggtgccctctgcctcttcaccccacaagaagccttatcctacgtccttctctccatctatcggaccccagtttccatcactatctccagagatgtagctattatgcgcccgtctacagggggtgcccgacgatgacggtgccttcgcagtcaaattactcttcgggtcccaaggtttggctttcacgcgctccattgccccggcgtggcaggccattccaagcccttccgggctggaactggtgtcggaggagcctcgggtgtatcgtacgccctggtgttggtgttgcctcactcctctgagctcttctttctgatcaagccctgcttaaagttaaataaaatagaatgaatgat

SEQ ID NO: 401548 - DNA, 1592 bp, Homo sapiens
tgcgaggctgtctggtccgaagtcgtttgatcccactcttgaaaccacagctgttggcagggtccccagctcatgccagcctcatctcctttcttgctagcccccaaagggcctccaggcaacatggggggcccagtcagagagccggcactctcagttgccctctggttgagttggggggcagctctgggggccgtggcttgtgccatggctctgctgacccaacaaacagagctgcagagcctcaggagagaggtgagccggctgcaggggacaggaggcccctcccagaatggggaagggtatccctggcagagtctcccggagcagagttccgatgccctggaagcctgggagagtggggagagatcccggaaaaggagagcagtgctcacccaaaaacagaagaagcagcactctgtcctgcacctggttcccattaacgccacctccaaggatgactccgatgtgacagaggtgatgtggcaaccagctcttaggcgtgggagaggcctacaggcccaaggatatggtgtccgaatccaggatgctggagtttatctgctgtatagccaggtcctgtttcaagacgtgactttcaccatgggtcaggtggtgtctcgagaaggccaaggaaggcaggagactctattccgatgtataagaagtatgccctcccacccggaccgggcctacaacagctgctatagcgcaggtgtcttccatttacaccaaggggatattctgagtgtcataattccccgggcaagggcgaaacttaacctctctccacatggaaccttcctggggtttgtgaaactgtgattgtgttataaaaagtggctcccagcttggaagaccagggtgggtacatactggagacagccaagagctgagtatataaaggagagggaatgtgcaggaacagaggcgtcttcctgggtttggctccccgttcctcacttttcccttttcattcccaccccctagactttgattttacggatatcttgcttctgttccccatggagctccgaattcttgcgtgtgtgtagatgaggggcgggggacgggcgccaggcattgtccagacctggtcggggcccactggaagcatccagaacagcaccaccatctagcggccgctcgagggaagcacccgccggttggccgaagtccacgaagccgccctctgctagggaaaacccctggttctccatgccacacctctctccaggtgccctctgcctcttcaccccacaagaagccttatcctacgtccttctctccatctatcggaccccagtttccatcactatctccagagatgtagctattatgcgcccgtctacagggggtgcccgacgatgacggtgccttcgcagtcaaattactcttcgggtcccaaggtttggctttcacgcgctccattgccccggcgtggcaggccattccaagcccttccgggctggaactggtgtcggaggagcctcgggtgtatcgtacgccctggtgttggtgttgcctcactcctctgagctcttctttctgatcaagccctgcttaaagttaaataaaatagaatgaatgat

SEQ ID NO: 401549 - DNA, 1368 bp, Homo sapiens
ctcggacattcagcaggtgctggcacaggccctggctgggaggtggggcgggcaggagccagcctggaggaggggctgagagtcagcaggcacacgggaacccggaaccctgtgtgctggggaggaatcccgcagtggccggggggcttgaggccgctgctttgtctcttcgtccagagccttatagcagcactctgtcctgcacctggttcccattaacgccacctccaaggatgactccgatgtgacagaggtgatgtggcaaccagctcttaggcgtgggagaggcctacaggcccaaggatatggtgtccgaatccaggatgctggagtttatctgctgtatagccaggtcctgtttcaagacgtgactttcaccatgggtcaggtggtgtctcgagaaggccaaggaaggcaggagactctattccgatgtataagaagtatgccctcccacccggaccgggcctacaacagctgctatagcgcaggtgtcttccatttacaccaaggggatattctgagtgtcataattccccgggcaagggcgaaacttaacctctctccacatggaaccttcctggggtttgtgaaactgtgattgtgttataaaaagtggctcccagcttggaagaccagggtgggtacatactggagacagccaagagctgagtatataaaggagagggaatgtgcaggaacagaggcgtcttcctgggtttggctccccgttcctcacttttcccttttcattcccaccccctagactttgattttacggatatcttgcttctgttccccatggagctccgaattcttgcgtgtgtgtagatgaggggcgggggacgggcgccaggcattgtccagacctggtcggggcccactggaagcatccagaacagcaccaccatctagcggccgctcgagggaagcacccgccggttggccgaagtccacgaagccgccctctgctagggaaaacccctggttctccatgccacacctctctccaggtgccctctgcctcttcaccccacaagaagccttatcctacgtccttctctccatctatcggaccccagtttccatcactatctccagagatgtagctattatgcgcccgtctacagggggtgcccgacgatgacggtgccttcgcagtcaaattactcttcgggtcccaaggtttggctttcacgcgctccattgccccggcgtggcaggccattccaagcccttccgggctggaactggtgtcggaggagcctcgggtgtatcgtacgccctggtgttggtgttgcctcactcctctgagctcttctttctgatcaagccctgcttaaagttaaataaaatagaatgaatgat

SEQ ID NO: 401550 - DNA, 1000 bp, Homo sapiens
ctgactcctagaggtatcccgggagtgagagagaaagccaaggaaggcaggagactctattccgatgtataagaagtatgccctcccacccggaccgggcctacaacagctgctatagcgcaggtgtcttccatttacaccaaggggatattctgagtgtcataattccccgggcaagggcgaaacttaacctctctccacatggaaccttcctggggtttgtgaaactgtgattgtgttataaaaagtggctcccagcttggaagaccagggtgggtacatactggagacagccaagagctgagtatataaaggagagggaatgtgcaggaacagaggcgtcttcctgggtttggctccccgttcctcacttttcccttttcattcccaccccctagactttgattttacggatatcttgcttctgttccccatggagctccgaattcttgcgtgtgtgtagatgaggggcgggggacgggcgccaggcattgtccagacctggtcggggcccactggaagcatccagaacagcaccaccatctagcggccgctcgagggaagcacccgccggttggccgaagtccacgaagccgccctctgctagggaaaacccctggttctccatgccacacctctctccaggtgccctctgcctcttcaccccacaagaagccttatcctacgtccttctctccatctatcggaccccagtttccatcactatctccagagatgtagctattatgcgcccgtctacagggggtgcccgacgatgacggtgccttcgcagtcaaattactcttcgggtcccaaggtttggctttcacgcgctccattgccccggcgtggcaggccattccaagcccttccgggctggaactggtgtcggaggagcctcgggtgtatcgtacgccctggtgttggtgttgcctcactcctctgagctcttctttctgatcaagccctgcttaaagttaaataaaatagaatgaatgat

SEQ ID NO: 401551 - DNA, 1911 bp, Homo sapiens
ctcggacattcagcaggtgctggcacaggccctggctgggaggtggggcgggcaggagccagcctggaggaggggctgagagtcagcaggcacacgggaacccggaaccctgtgtgctggggaggaatcccgcagtggccggggggcttgaggccgctgctttgtctcttcgtccagagccttatgtaagagcttttctcgggaaacaggaagtcctgcttgccaatttcagcacagggagtagtgcaggccttattccaacacacccggcccagccttaaccccagaactcagccagtttcttgcttccgtgcccctggttctcctccccatcgagcccacccctcctttcccaccttcagtcacccctagtgaactgccccagcgatctctgctgtgcttgaccccgagggtcttccaccctcgccctgaccctggacactgcccagcttggccccccatcctgctcctggcacaatgccctctagccagccaaccttccctcccccaaccctggggccgccccagggttcctgcgcactgcctgttcctcctgggtgtcactggcagccctgtccttcctagagggactggaacctaattctcctgaggctgagggagggtggagggtctcaaggcaacgctggccccacgacggagtgccaggagcactaacagtacccttagcttgctttcctcctccctcctttttattttcaagttcctttttatttctccttgcgtaacaaccttcttcccttctgcaccactgcccgtacccttacccgccccgccacctccttgctaccccactcttgaaaccacagctgttggcagggtccccagctcatgccagcctcatctcctttcttgctagcccccaaagggcctccaggcaacatggggggcccagtcagagagccggcactctcagttgccctctggttgagttggggggcagctctgggggccgtggcttgtgccatggctctgctgacccaacaaacagagctgcagagcctcaggagagaggtgagccggctgcaggggacaggaggcccctcccagaatggggaagggtatccctggcagagtctcccggagcagagttccgatgccctggaagcctgggagagtggggagagatcccggaaaaggagagcagtgctcacccaaaaacagaagaagcagcactctgtcctgcacctggttcccattaacgccacctccaaggatgactccgatgtgacagaggtgatgtggcaaccagctcttaggcgtgggagaggcctacaggcccaaggatatggtgtccgaatccaggatgctggagtttatctgctgtatagccaggtcctgtttcaagacgtgactttcaccatgggtcaggtggtgtctcgagaaggccaaggaaggcaggagactctattccgatgtataagaagtatgccctcccacccggaccgggcctacaacagctgctatagcgcaggtgtcttccatttacaccaaggggatattctgagtgtcataattccccgggcaagggcgaaacttaacctctctccacatggaaccttcctggggtttgtgaaactgtgattgtgttataaaaagtggctcccagcttggaagaccagggtgggtgaaataagaaaaacaatatatgaatatctcaaattcacgattatcgagaaatgacaagatatggcactataaaagataaatctataaaagtctctcttcttaaaaggtattaattgataaacatggatccagatgggtgagatcatgattatggcctctattatattaggagttccagccagtagccgatatagatcaatgaacagcataaaaactgcgaacaaaaaagctcagttcccctagttcacatacacagcagagtct

SEQ ID NO: 401552 - DNA, 435 bp, Homo sapiens
  misc_feature (12)..(12): n is a, c, g, or t
ggtgcacccaantgtgatctgcgatggctgcaatgggcctgtggtaggaacccgctacaagtgcagcgtctgcccagactacgacttgtgtaggcagcccccacaagaagccttatcctacgtccttctctccatctatcggaccccagtttccatcactatctccagagatgtagctattatgcgcccgtctacagggggtgcccgacgatgacggtgccttcgcagtcaaattactcttcgggtcccaaggtttggctttcacgcgctccattgccccggcgtggcaggccattccaagcccttccgggctggaactggtgtcggaggagcctcgggtgtatcgtacgccctggtgttggtgttgcctcactcctctgagctcttctttctgatcaagccctgcttaaagttaaataaaatagaatgaatgat

SEQ ID NO: 401553 - DNA, 480 bp, Homo sapiens
gcaaagtttcaagggggtgcaagagagggtctccggtttggaagtcaggggcgcggccattccaggaaaggaaactgttaaaggttaatgcttctcatacctaacaaatcctggagggcagccagcaccaacactcagggtgctgggaaaaggtgcgtgagagatctgaggcatctcgggggcaggggagggctgggaaggcaggctggctgggaccctcgcatcttaacctaaccttgaccctctttccatgagcagagttccgatgccctggaagcctgggagagtggggagagatcccggaaaaggagagcagtgctcacccaaaaacagaagagtgaggcttccagggtgcagcaggggtgggaggtgatcaagcagcgtggggattgtaagcccgagtcagggtgagggtggaggctgccaacagcacaacgggggaaagtggatgcggctgagattccctccttctctcctcag

SEQ ID NO: 401554 - DNA, 516 bp, Homo sapiens
ccaggcattgtccagacctggtcggggcccactggaagcatccagaacagcaccaccatctagcggccgctcgagggaagcacccgccggttggccgaagtccacgaagccgccctctgctagggaaaacccctggttctccatgccacacctctctccaggtgccctctgcctcttcaccccacaagaagccttatcctacgtccttctctccatctatcggaccccagtttccatcactatctccagagatgtagctattatgcgcccgtctacagggggtgcccgacgatgacggtgccttcgcagtcaaattactcttcgggtcccaaggtttggctttcacgcgctccattgccccggcgtggcaggccattccaagcccttccgggctggaactggtgtcggaggagcctcgggtgtatcgtacgccctggtgttggtgttgcctcactcctctgagctcttctttctgatcaagccctgcttaaagttaaataaaatagaatgaatgat

SEQ ID NO: 401555 - DNA, 2369 bp, Homo sapiens
ctcggacattcagcaggtgctggcacaggccctggctgggaggtggggcgggcaggagccagcctggaggaggggctgagagtcagcaggcacacgggaacccggaaccctgtgtgctggggaggaatcccgcagtggccggggggcttgaggccgctgctttgtctcttcgtccagagccttatgtaagagcttttctcgggaaacaggaagtcctgcttgccaatttcagcacagggagtagtgcaggccttattccaacacacccggcccagccttaaccccagaactcagccagtttcttgcttccgtgcccctggttctcctccccatcgagcccacccctcctttcccaccttcagtcacccctagtgaactgccccagcgatctctgctgtgcttgaccccgagggtcttccaccctcgccctgaccctggacactgcccagcttggccccccatcctgctcctggcacaatgccctctagccagccaaccttccctcccccaaccctggggccgccccagggttcctgcgcactgcctgttcctcctgggtgtcactggcagccctgtccttcctagagggactggaacctaattctcctgaggctgagggagggtggagggtctcaaggcaacgctggccccacgacggagtgccaggagcactaacagtacccttagcttgctttcctcctccctcctttttattttcaagttcctttttatttctccttgcgtaacaaccttcttcccttctgcaccactgcccgtacccttacccgccccgccacctccttgctaccccactcttgaaaccacagctgttggcagggtccccagctcatgccagcctcatctcctttcttgctagcccccaaagggcctccaggcaacatggggggcccagtcagagagccggcactctcagttgccctctggttgagttggggggcagctctgggggccgtggcttgtgccatggctctgctgacccaacaaacagagctgcagagcctcaggagagaggtgagccggctgcaggggacaggaggcccctcccagaatggggaagggtatccctggcagagtctcccggagcagagttccgatgccctggaagcctgggagagtggggagagatcccggaaaaggagagcagtgctcacccaaaaacagaagaagcagcactctgtcctgcacctggttcccattaacgccacctccaaggatgactccgatgtgacagaggtgatgtggcaaccagctcttaggcgtgggagaggcctacaggcccaaggatatggtgtccgaatccaggatgctggagtttatctgctgtatagccaggtcctgtttcaagacgtgactttcaccatgggtcaggtggtgtctcgagaaggccaaggaaggcaggagactctattccgatgtataagaagtatgccctcccacccggaccgggcctacaacagctgctatagcgcaggtgtcttccatttacaccaaggggatattctgagtgtcataattccccgggcaagggcgaaacttaacctctctccacatggaaccttcctggggtttgtgaaactgtgattgtgttataaaaagtggctcccagcttggaagaccagggtgggtacatactggagacagccaagagctgagtatataaaggagagggaatgtgcaggaacagaggcgtcttcctgggtttggctccccgttcctcacttttcccttttcattcccaccccctagactttgattttacggatatcttgcttctgttccccatggagctccgaattcttgcgtgtgtgtagatgaggggcgggggacgggcgccaggcattgtccagacctggtcggggcccactggaagcatccagaacagcaccaccatctagcggccgctcgagggaagcacccgccggttggccgaagtccacgaagccgccctctgctagggaaaacccctggttctccatgccacacctctctccaggtgccctctgcctcttcaccccacaagaagccttatcctacgtccttctctccatctatcggaccccagtttccatcactatctccagagatgtagctattatgcgcccgtctacagggggtgcccgacgatgacggtgccttcgcagtcaaattactcttcgggtcccaaggtttggctttcacgcgctccattgccccggcgtggcaggccattccaagcccttccgggctggaactggtgtcggaggagcctcgggtgtatcgtacgccctggtgttggtgttgcctcactcctctgagctcttctttctgatcaagccctgcttaaagttaaataaaatagaatgaatgat

SEQ ID NO: 401556 - DNA, 2214 bp, Homo sapiens
ctcggacattcagcaggtgctggcacaggccctggctgggaggtggggcgggcaggagccagcctggaggaggggctgagagtcagcaggcacacgggaacccggaaccctgtgtgctggggaggaatcccgcagtggccggggggcttgaggccgctgctttgtctcttcgtccagagccttatgtaagagcttttctcgggaaacaggaagtcctgcttgccaatttcagcacagggagtagtgcaggccttattccaacacacccggcccagccttaaccccagaactcagccagtttcttgcttccgtgcccctggttctcctccccatcgagcccacccctcctttcccaccttcagtcacccctagtgaactgccccagcgatctctgctgtgcttgaccccgagggtcttccaccctcgccctgaccctggacactgcccagcttggccccccatcctgctcctggcacaatgccctctagccagccaaccttccctcccccaaccctggggccgccccagggttcctgcgcactgcctgttcctcctgggtgtcactggcagccctgtccttcctagagggactggaacctaattctcctgaggctgagggagggtggagggtctcaaggcaacgctggccccacgacggagtgccaggagcactaacagtacccttagcttgctttcctcctccctcctttttattttcaagttcctttttatttctccttgcgtaacaaccttcttcccttctgcaccactgcccgtacccttacccgccccgccacctccttgctaccccactcttgaaaccacagctgttggcagggtccccagctcatgccagcctcatctcctttcttgctagcccccaaagggcctccaggcaacatggggggcccagtcagagagccggcactctcagttgccctctggttgagttggggggcagctctgggggccgtggcttgtgccatggctctgctgacccaacaaacagagctgcagagcctcaggagagaggtgagccggctgcaggggacaggaggcccctcccagaatggggaagggtatccctggcagagtctcccggagcagagttccgatgccctggaagcctgggagagtggggagagatcccggaaaaggagagcagtgctcacccaaaaacagaagaagcagcactctgtcctgcacctggttcccattaacgccacctccaaggatgactccgatgtgacagaggtgatgtggcaaccagctcttaggcgtgggagaggcctacaggcccaaggatatggtgtccgaatccaggatgctggagtttatctgctgtatagccaggtcctgtttcaagacgtgactttcaccatgggtcaggtggtgtctcgagaaggccaaggaaggcaggagactctattccgatgtataagaagtatgccctcccacccggaccgggcctacaacagctgctatagcgcaggtgtcttccatttacaccaaggggatattctgagtgtcataattccccgggcaagggcgaaacttaacctctctccacatggaaccttcctggggtttgtgaaactgtgattgtgttataaaaagtggctcccagcttggaagaccagggtgggtacatactggagacagccaagagctgagtatataaaggagagggaatgtgcaggaacagaggcgtcttcctgggtttggctccccgttcctcacttttcccttttcattcccaccccctagactttgattttacggatatcttgcttctgttccccatggagctccgaattcttgcgtgtgtgtagatgaggggcgggggacgggcgccaggcattgtccagacctggtcggggcccactggaagcatccagaacagcaccaccatctagcggccgctcgagggaagcacccgccggttggccgaagtccacgaagccgccctctgctagggaaaacccctggttctccatgccttcgcagtcaaattactcttcgggtcccaaggtttggctttcacgcgctccattgccccggcgtggcaggccattccaagcccttccgggctggaactggtgtcggaggagcctcgggtgtatcgtacgccctggtgttggtgttgcctcactcctctgagctcttctttctgatcaagccctgcttaaagttaaataaaatagaatgaatgat

SEQ ID NO: 401557 - DNA, 1650 bp, Homo sapiens
ggagaggcgggtgtcgaatcggccgaggcaacttcttcccttctgcaccactgcccgtacccttacccgccccgccacctccttgctaccccactcttgaaaccacagctgttggcagggtccccagctcatgccagcctcatctcctttcttgctagcccccaaagggcctccaggcaacatggggggcccagtcagagagccggcactctcagttgccctctggttgagttggggggcagctctgggggccgtggcttgtgccatggctctgctgacccaacaaacagagctgcagagcctcaggagagaggtgagccggctgcaggggacaggaggcccctcccagaatggggaagggtatccctggcagagtctcccggagcagagttccgatgccctggaagcctgggagagtggggagagatcccggaaaaggagagcagtgctcacccaaaaacagaagaagcagcactctgtcctgcacctggttcccattaacgccacctccaaggatgactccgatgtgacagaggtgatgtggcaaccagctcttaggcgtgggagaggcctacaggcccaaggatatggtgtccgaatccaggatgctggagtttatctgctgtatagccaggtcctgtttcaagacgtgactttcaccatgggtcaggtggtgtctcgagaaggccaaggaaggcaggagactctattccgatgtataagaagtatgccctcccacccggaccgggcctacaacagctgctatagcgcaggtgtcttccatttacaccaaggggatattctgagtgtcataattccccgggcaagggcgaaacttaacctctctccacatggaaccttcctggggtttgtgaaactgtgattgtgttataaaaagtggctcccagcttggaagaccagggtgggtacatactggagacagccaagagctgagtatataaaggagagggaatgtgcaggaacagaggcgtcttcctgggtttggctccccgttcctcacttttcccttttcattcccaccccctagactttgattttacggatatcttgcttctgttccccatggagctccgaattcttgcgtgtgtgtagatgaggggcgggggacgggcgccaggcattgtccagacctggtcggggcccactggaagcatccagaacagcaccaccatctagcggccgctcgagggaagcacccgccggttggccgaagtccacgaagccgccctctgctagggaaaacccctggttctccatgccacacctctctccaggtgccctctgcctcttcaccccacaagaagccttatcctacgtccttctctccatctatcggaccccagtttccatcactatctccagagatgtagctattatgcgcccgtctacagggggtgcccgacgatgacggtgccttcgcagtcaaattactcttcgggtcccaaggtttggctttcacgcgctccattgccccggcgtggcaggccattccaagcccttccgggctggaactggtgtcggaggagcctcgggtgtatcgtacgccctggtgttggtgttgcctcactcctctgagctcttctttctgatcaagccctgcttaaagttaaataaaatagaatgaatgat

SEQ ID NO: 401558 - DNA, 1561 bp, Homo sapiens
gggctggtacggtccggagtttatggatgggtccccagctcatgccagcctcatctcctttcttgctagcccccaaagggcctccaggcaacatggggggcccagtcagagagccggcactctcagttgccctctggttgagttggggggcagctctgggggccgtggcttgtgccatggctctgctgacccaacaaacagagctgcagagcctcaggagagaggtgagccggctgcaggggacaggaggcccctcccagaatggggaagggtatccctggcagagtctcccggagcagagttccgatgccctggaagcctgggagagtggggagagatcccggaaaaggagagcagtgctcacccaaaaacagaagaagcagcactctgtcctgcacctggttcccattaacgccacctccaaggatgactccgatgtgacagaggtgatgtggcaaccagctcttaggcgtgggagaggcctacaggcccaaggatatggtgtccgaatccaggatgctggagtttatctgctgtatagccaggtcctgtttcaagacgtgactttcaccatgggtcaggtggtgtctcgagaaggccaaggaaggcaggagactctattccgatgtataagaagtatgccctcccacccggaccgggcctacaacagctgctatagcgcaggtgtcttccatttacaccaaggggatattctgagtgtcataattccccgggcaagggcgaaacttaacctctctccacatggaaccttcctggggtttgtgaaactgtgattgtgttataaaaagtggctcccagcttggaagaccagggtgggtacatactggagacagccaagagctgagtatataaaggagagggaatgtgcaggaacagaggcgtcttcctgggtttggctccccgttcctcacttttcccttttcattcccaccccctagactttgattttacggatatcttgcttctgttccccatggagctccgaattcttgcgtgtgtgtagatgaggggcgggggacgggcgccaggcattgtccagacctggtcggggcccactggaagcatccagaacagcaccaccatctagcggccgctcgagggaagcacccgccggttggccgaagtccacgaagccgccctctgctagggaaaacccctggttctccatgccacacctctctccaggtgccctctgcctcttcaccccacaagaagccttatcctacgtccttctctccatctatcggaccccagtttccatcactatctccagagatgtagctattatgcgcccgtctacagggggtgcccgacgatgacggtgccttcgcagtcaaattactcttcgggtcccaaggtttggctttcacgcgctccattgccccggcgtggcaggccattccaagcccttccgggctggaactggtgtcggaggagcctcgggtgtatcgtacgccctggtgttggtgttgcctcactcctctgagctcttctttctgatcaagccctgcttaaagttaaataaaatagaatgaatgat

SEQ ID NO: 401559 - DNA, 1598 bp, Homo sapiens
ctcggacattcagcaggtgctggcacaggccctggctgggaggtggggcgggcaggagccagcctggaggaggggctgagagtcagcaggcacacgggaacccggaaccctgtgtgctggggaggaatcccgcagtggccggggggcttgaggccgctgctttgtctcttcgtccagagccttatcccccaaagggcctccaggcaacatggggggcccagtcagagagccggcactctcagttgccctctggttgagttggggggcagctctgggggccgtggcttgtgccatggctctgctgacccaacaaacagagctgcagagcctcaggagagaggtgagccggctgcaggggacaggaggcccctcccagaatggggaagggtatccctggcagagtctcccggagcagagcagcactctgtcctgcacctggttcccattaacgccacctccaaggatgactccgatgtgacagaggtgatgtggcaaccagctcttaggcgtgggagaggcctacaggcccaaggatatggtgtccgaatccaggatgctggagtttatctgctgtatagccaggtcctgtttcaagacgtgactttcaccatgggtcaggtggtgtctcgagaaggccaaggaaggcaggagactctattccgatgtataagaagtatgccctcccacccggaccgggcctacaacagctgctatagcgcaggtgtcttccatttacaccaaggggatattctgagtgtcataattccccgggcaagggcgaaacttaacctctctccacatggaaccttcctggggtttgtgaaactgtgattgtgttataaaaagtggctcccagcttggaagaccagggtgggtacatactggagacagccaagagctgagtatataaaggagagggaatgtgcaggaacagaggcgtcttcctgggtttggctccccgttcctcacttttcccttttcattcccaccccctagactttgattttacggatatcttgcttctgttccccatggagctccgaattcttgcgtgtgtgtagatgaggggcgggggacgggcgccaggcattgtccagacctggtcggggcccactggaagcatccagaacagcaccaccatctagcggccgctcgagggaagcacccgccggttggccgaagtccacgaagccgccctctgctagggaaaacccctggttctccatgccacacctctctccaggtgccctctgcctcttcaccccacaagaagccttatcctacgtccttctctccatctatcggaccccagtttccatcactatctccagagatgtagctattatgcgcccgtctacagggggtgcccgacgatgacggtgccttcgcagtcaaattactcttcgggtcccaaggtttggctttcacgcgctccattgccccggcgtggcaggccattccaagcccttccgggctggaactggtgtcggaggagcctcgggtgtatcgtacgccctggtgttggtgttgcctcactcctctgagctcttctttctgatcaagccctgcttaaagttaaataaaatagaatgaatgat

SEQ ID NO: 401560 - DNA, 2188 bp, Homo sapiens
ctcggacattcagcaggtgctggcacaggccctggctgggaggtggggcgggcaggagccagcctggaggaggggctgagagtcagcaggcacacgggaacccggaaccctgtgtgctggggaggaatcccgcagtggccggggggcttgaggccgctgctttgtctcttcgtccagagccttatgtaagagcttttctcgggaaacaggaagtcctgcttgccaatttcagcacagggagtagtgcaggccttattccaacacacccggcccagccttaaccccagaactcagccagtttcttgcttccgtgcccctggttctcctccccatcgagcccacccctcctttcccaccttcagtcacccctagtgaactgccccagcgatctctgctgtgcttgaccccgagggtcttccaccctcgccctgaccctggacactgcccagcttggccccccatcctgctcctggcacaatgccctctagccagccaaccttccctcccccaaccctggggccgccccagggttcctgcgcactgcctgttcctcctgggtgtcactggcagccctgtccttcctagagggactggaacctaattctcctgaggctgagggagggtggagggtctcaaggcaacgctggccccacgacggagtgccaggagcactaacagtacccttagcttgctttcctcctccctcctttttattttcaagttcctttttatttctccttgcgtaacaaccttcttcccttctgcaccactgcccgtacccttacccgccccgccacctccttgctaccccactcttgaaaccacagctgttggcagggtccccagctcatgccagcctcatctcctttcttgctagcccccaaagggcctccaggcaacatggggggcccagtcagagagccggcactctcagttgccctctggttgagttggggggcagctctgggggccgtggcttgtgccatggctctgctgacccaacaaacagagctgcagagcctcaggagagaggtgagccggctgcaggggacaggaggcccctcccagaatggggaagggtatccctggcagagtctcccggagcagagttccgatgccctggaagcctgggagagtggggagagatcccggaaaaggagagcagtgctcacccaaaaacagaagaagcagcactctgtcctgcacctggttcccattaacgccacctccaaggatgactccgatgtgacagaggtgatgtggcaaccagctcttaggcgtgggagaggcctacaggcccaaggatatggtgtccgaatccaggatgctggagtttatctgctgtatagccaggtcctgtttcaagacgtgactttcaccatgggtcaggtggtgtctcgagaaggccaaggaaggcaggagactctattccgatgtataagaagtatgccctcccacccggaccgggcctacaacagctgctatagcgcaggtgtcttccatttacaccaaggggatattctgagtgtcataattccccgggcaagggcgaaacttaacctctctccacatggaaccttcctgggactttgattttacggatatcttgcttctgttccccatggagctccgaattcttgcgtgtgtgtagatgaggggcgggggacgggcgccaggcattgtccagacctggtcggggcccactggaagcatccagaacagcaccaccatctagcggccgctcgagggaagcacccgccggttggccgaagtccacgaagccgccctctgctagggaaaacccctggttctccatgccacacctctctccaggtgccctctgcctcttcaccccacaagaagccttatcctacgtccttctctccatctatcggaccccagtttccatcactatctccagagatgtagctattatgcgcccgtctacagggggtgcccgacgatgacggtgccttcgcagtcaaattactcttcgggtcccaaggtttggctttcacgcgctccattgccccggcgtggcaggccattccaagcccttccgggctggaactggtgtcggaggagcctcgggtgtatcgtacgccctggtgttggtgttgcctcactcctctgagctcttctttctgatcaagccctgcttaaagttaaataaaatagaatgaatgat

SEQ ID NO: 401561 - DNA, 2249 bp, Homo sapiens
ctcggacattcagcaggtgctggcacaggccctggctgggaggtggggcgggcaggagccagcctggaggaggggctgagagtcagcaggcacacgggaacccggaaccctgtgtgctggggaggaatcccgcagtggccggggggcttgaggccgctgctttgtctcttcgtccagagccttatgtaagagcttttctcgggaaacaggaagtcctgcttgccaatttcagcacagggagtagtgcaggccttattccaacacacccggcccagccttaaccccagaactcagccagtttcttgcttccgtgcccctggttctcctccccatcgagcccacccctcctttcccaccttcagtcacccctagtgaactgccccagcgatctctgctgtgcttgaccccgagggtcttccaccctcgccctgaccctggacactgcccagcttggccccccatcctgctcctggcacaatgccctctagccagccaaccttccctcccccaaccctggggccgccccagggttcctgcgcactgcctgttcctcctgggtgtcactggcagccctgtccttcctagagggactggaacctaattctcctgaggctgagggagggtggagggtctcaaggcaacgctggccccacgacggagtgccaggagcactaacagtacccttagcttgctttcctcctccctcctttttattttcaagttcctttttatttctccttgcgtaacaaccttcttcccttctgcaccactgcccgtacccttacccgccccgccacctccttgctaccccactcttgaaaccacagctgttggcagggtccccagctcatgccagcctcatctcctttcttgctagcccccaaagggcctccaggcaacatggggggcccagtcagagagccggcactctcagttgccctctggttgagttggggggcagctctgggggccgtggcttgtgccatggctctgctgacccaacaaacagagctgcagagcctcaggagagaggtgagccggctgcaggggacaggaggcccctcccagaatggggaagggtatccctggcagagtctcccggagcagagttccgatgccctggaagcctgggagagtggggagagatcccggaaaaggagagcagtgctcacccaaaaacagaagaagcagcactctgtcctgcacctggttcccattaacgccacctccaaggatgactccgatgtgacagaggtgatgtggcaaccagctcttaggcgtgggagaggcctacaggcccaaggatatggtgtccgaatccaggatgctggagtttatctgctgtatagccaggtcctgtttcaagacgtgactttcaccatgggtcaggtggtgtctcgagaaggccaaggaaggcaggagactctattccgatgtataagaagtatgccctcccacccggaccgggcctacaacagctgctatagcgcaggtgtcttccatttacaccaaggggatattctgagtgtcataattccccgggcaagggcgaaacttaacctctctccacatggaaccttcctggggtttgtgaaactgtgattgtgttataaaaagtggctcccagcttggaagaccagggtgggtactttgattttacggatatcttgcttctgttccccatggagctccgaattcttgcgtgtgtgtagatgaggggcgggggacgggcgccaggcattgtccagacctggtcggggcccactggaagcatccagaacagcaccaccatctagcggccgctcgagggaagcacccgccggttggccgaagtccacgaagccgccctctgctagggaaaacccctggttctccatgccacacctctctccaggtgccctctgcctcttcaccccacaagaagccttatcctacgtccttctctccatctatcggaccccagtttccatcactatctccagagatgtagctattatgcgcccgtctacagggggtgcccgacgatgacggtgccttcgcagtcaaattactcttcgggtcccaaggtttggctttcacgcgctccattgccccggcgtggcaggccattccaagcccttccgggctggaactggtgtcggaggagcctcgggtgtatcgtacgccctggtgttggtgttgcctcactcctctgagctcttctttctgatcaagccctgcttaaagttaaataaaatagaatgaatgat

SEQ ID NO: 401562 - DNA, 1531 bp, Homo sapiens
ctcggacattcagcaggtgctggcacaggccctggctgggaggtggggcgggcaggagccagcctggaggaggggctgagagtcagcaggcacacgggaacccggaaccctgtgtgctggggaggaatcccgcagtggccggggggcttgaggccgctgctttgtctcttcgtccagagccttatgtaagagcttttctcgggaaacaggaagtcctgcttgccaatttcagcacagggagtagtgcaggccttattccaacacacccggcccagccttaaccccagaactcagccagtttcttgcttccgtgcccctggttctcctccccatcgagcccacccctcctttcccaccttcagtcacccctagtgaactgccccagcgatctctgctgtgcttgaccccgagggtcttccaccctcgccctgaccctggacactgcccagcttggccccccatcctgctcctggcacaatgccctctagccagccaaccttccctcccccaaccctggggccgccccagggttcctgcgcactgcctgttcctcctgggtgtcactggcagccctgtccttcctagagggactggaacctaattctcctgaggctgagggagggtggagggtctcaaggcaacgctggccccacgacggagtgccaggagcactaacagtacccttagcttgctttcctcctccctcctttttattttcaagttcctttttatttctccttgcgtaacaaccttcttcccttctgcaccactgcccgtacccttacccgccccgccacctccttgctaccccactcttgaaaccacagctgttggcagggtccccagctcatgccagcctcatctcctttcttgctagcccccaaagggcctccaggcaacatggggggcccagtcagagagccggcactctcagttgccctctggttgagttggggggcagctctgggggccgtggcttgtgccatggctctgctgacccaacaaacagagctgcagagcctcaggagagaggtgagccggctgcaggggacaggaggcccctcccagaatggggaagggtatccctggcagagtctcccggagcagagttccgatgccctggaagcctgggagagtggggagagatcccggaaaaggagagcagtgctcacccaaaaacagaagaagcagcactctgtcctgcacctggttcccattaacgccacctccaaggatgactccgatgtgacagaggtgatgtggcaaccagctcttaggcgtgggagaggcctacaggcccaaggatatggtgtccgaatccaggatgctggagtttatctgctgtatagccaggtcctgtttcaagacgtgactttcaccatgggtcaggtggtgtctcgagaaggccaaggaaggcaggagactctattccgatgtataagaagtatgccctcccacccggaccgggcctacaacagctgctatagcgcaggtgtcttccatttacacctcggggcccactggaagcatc

SEQ ID NO: 401563 - DNA, 174 bp, Homo sapiens
atgtctggctggcaagaactctacctttagtggcaaaatgggggatggaaggattgtagaattgagctctaaggatagaacaaaaactgctctgaatattcacatttcctttcttttgtctctcaaatgttgttgtaaatgaaattatgtcagagtaaaacactaataaaccaa

SEQ ID NO: 401564 - DNA, 502 bp, Homo sapiens
tcagcacttcgggaggccgaggaagaatcagtagagcccaggagttggagaccagcctgagcaacatagcaagaccccatctttacaaacagaaacaaaacagataaaggtcgggtattccttatggtacatattgtataatgtggagactgctaactgaaaaaagaaaaaaatgtataaaaaatatgtatttacacccatgttcattgatgcataattcacaatagtcaaaaggtgaaagcaatccagatgtcctctgtggaatgactggataaacaaaatgaagtatagacctacaatggaatattattcagccttaaaaagaaagaaaattctgacccatgccacaacgcggaggaagcttgaagacattatgctaagtgaaatacaccagacacaaaaagacaaatactgtgtgattccacttagatcagatatctaaagtagtcgaattcatagaaattgaaagtacaatggtgattgccaggggctgagaaaagga

SEQ ID NO: 401565 - DNA, 505 bp, Homo sapiens
tcaattttcactcttgtataccaaagtgatattattgggccttttaggtaatattgtattcatcttagcgtatgtctgtcatgtaaaagcaaatctgttttcatgtatgtatctaagttgttcatgtttttatatctatacataaaaccaaaacaaattccataactattttctttgatacaaaaagcacttaccaagtatgagaaatttctgtttggttgtaggcatttagtggaggaaaactgttttgtggaccaaaacatgttatttctttaacattaatgttttagggagtggtatttttagtgattctttccccttgtagctttccatgtcttccacttttcctgtttgggaaagtactgctgttataatggaggaggtcctactttatgttaaaacaaagaaaagtggtccttttggtaagctttctgtcaagtccagatctaacagttctccaataaaatagttctcattccagagagcagatgaatatatttatgga

SEQ ID NO: 401566 - DNA, 432 bp, Homo sapiens
  misc_feature (418)..(418): n is a, c, g, or t
gattttagtagttgggaaggagatttaagcttcaaaacctcagtttcttgctcaacatctactcactatattattctatattattctcttgcttttattccaccatgtctctctgggcttgtgtcttctactcacattattggtttgtttcctaaagtttaaaatgcgatctcaagagatttcataaatatataaaagggggaaaaaaagaaggaaaacaaaaaaggaaaatgagaaaaaagggccttagaagagtctcatttaagatattatgactatattttagcttaaagttccaattaattcttttttttgtttttttcagatggagtttcgctcttgtcacccaggccggagtgcaatggtgtgatcttggctcactgcaacctccactgtactccagcctgggagacacagntagacaccatctca

SEQ ID NO: 401567 - DNA, 314 bp, Homo sapiens
tcagtaatgaaaaataaaacagttccaaaatagcactatgtggacaacttgaaagccatccatatttacaatatcagaaggttgcagttttacctaacactactgatttattcaaggttaggagcttgggcttttaaatcagagagacatgggttgaaattctgcttttgtgcattacaagttgtgggatttttggcaaattattagaaattaacctccaaaagcacagtttccttatatgttgaatagggataatcatacctattgtgaggttgagaggattaaatgaaatcatgagtgtaaaatgcctggaa

SEQ ID NO: 401568 - DNA, 373 bp, Homo sapiens
tgcagcctccacctcccaagttcaagctattctcccacctcagcctcctgagtagctgggactacagccacgcgcctccacgcccagctaatttttgtatttttggtagagacggggtttcttcacgttggctaggctgatcttgaactcctgacctcaagtggtctgcctgcctcatcctcccaaagtgctgggattacaggcgtgagccactgcacccacccatgctctagtacatcctaaagaatgcctttagttcctctttcctgacattactctgcttaaattccccagattcaagctttttgagaatcctatctcagcattttgggcatcaggccatgttatatataggtcacaaactcctagcctt

SEQ ID NO: 401569 - DNA, 445 bp, Homo sapiens
cagtggcttcgtgaccgaaaggccctgaacccaccccgaggccccacagctttttctccagctcagacactttctggggctcagtcttgctgcggcccttgtggcatttggcaggcagtgggtggaccatgagtgagttaggaggccgaactgcccacctctacaatgggttcccaggagagcgaacacgggacccgctcctccaggcctcagccccactctggaatgagttcaacagcaaggtacggtgagagctggcggcttcatttttggaaccagggggagagagagagagagagaggtttatgagagacctcatgagacagctcatgatggaagtgagcctgagctgcagtgaaccctgtcactgaagagacagccttcacactgtgtcttgcaggggaaaatacaactctttattaaaatttattgccctgaaaaaagg

SEQ ID NO: 401570 - DNA, 643 bp, Homo sapiens
aggaacgtgtctttgtgcaaagggaaggcagaggaaaggggggccggctactgccactcaagtggcttcatccacagctccagggcctgctcccgaccaggaccacagaacaagggaacctgagcgaatagaaagccactgagacctgctactactatacagatccttagcccatctccaaccttgccccactgagagagtgcagcagtcaggggcccatcagagaccaggtgtgtaggagctgagagatggtaactgttccttcttcatggatgctcacagtagcacctttggatagccctgcttttgcttctttcaggtacaattatttccttagcaaagacccaggcttgctttatctttccccacagtggacaagtaaggatggcactcaacctctcactcaatggcaggtgaccatcattcagttacactacatcagttacactacatctagaaagatggctgcaacctaccacaatggcaaaagttaaaaatgagcaaaggaaaaatctctgcttcataccacagagcactgtgtataggcagcatggtttggagggccacaagagggccatttagtggagccaaggatatacagatgtgttcatggtttagcctgaggttatggagggcccggggg

SEQ ID NO: 401571 - DNA, 217 bp, Homo sapiens
gagtgtccgcacggcaccaccccgttagcagacttggcttcccctgcagaggataggtcagcaagagaaacatgaacgggggctgccatgatggtagcgtctcacagacactgagcttcatagagaccaggtctttgcgcctaggagactgaagcagagctcagaagtttcagcaaagtccaggtcttactctcctgaagatccacagttttctgtt

SEQ ID NO: 401572 - DNA, 520 bp, Homo sapiens
cagacgctgcccttcagccctgccatttcagccagcctcagcgtcgctgtagaggcaggccgccctttctgccactgtctggctgggctgggccgtgggagtgctggccaacgtgccaggcagggaggacctgaattcctgaaggtggtggtggcagctgttagggtccacaggttaatgatctccaacgtcacacagaagagaatgtgctgaggtgtgacctccctcaccctgccttggctgcgtggggcaccgtctctccaggactcaccctgccccccaatagactgaagtctgaagatcagcccagtcttccttcaggcctcaatgccctctcacttccccagcccgagggactcctggctcttctcggaggctgctctgtggggtccctcccttgggcctttgctaatgctgtgccctctgcctgtgccagaggtgggcctgggcccgtttctcagggagctcctgaacaccaagaaattgaattgctttgtaaataaacaaaaagtgccaaaca

SEQ ID NO: 401573 - DNA, 764 bp, Homo sapiens
cagacgctgcccttcagccctgccatttcagccagcctcagcgtcgctgtagaggcaggccgccctttctgccactgtctggctgggctgggccgtgggagtgctggccaacgtgccaggcagggaggacctgaattcctgaaggtggtggtggcagctgttagggtccacaggttaatgatctccaacgtcacacagaagagaatgtgctgaggtgtgacctccctcaccctgccttggctgcgtggggcaccgtctctccaggactcaccctgccccccaatagactgaagtctgaagatcagcccagtcttccttcaggcctcaatgccctctcacttccccagcccgagggactcctggctcttctcggaggctgctctgtggggtccctcccttgggcctttgctaatgctgtgccctctgcctgtgccagaggtgggcctgggcccgtttctcagggagctcctgaacaccaagaaattgaattgctttgtaaataaacaaaaagtgccaaacaagcctgcctgtcacttgggagatggcccgtctctgccccaccaaatttgctaatcaaacaaataacctaaaatagaatagaaagaactcatctagacttttcttgtacctctgctccccaaacagcttctcttttcaggtctccggagcagccctgttctctctagcccaggcctctgtcaaaaattcagcctgaccttaattaattaattattattatttttaattaaaaaatttttaaatat

SEQ ID NO: 401574 - DNA, 468 bp, Homo sapiens
gtagctgactgactctcttattaccccgctcagggctgggccgtgggagtgctggccaacgtgccaggcagggaggacctgaattcctgaaggtggtggtggcagctgttagggtccacaggttaatgatctccaacgtcacacagaagagaatgtgctgaggtgtgacctccctcaccctgccttggctgcgtggggcaccgtctctccaggactcaccctgccccccaatagactgaagtctgaagatcagcccagtcttccttcaggcctcaatgccctctcacttccccagcccgagggactcctggctcttctcggaggctgctctgtggggtccctcccttgggcctttgctaatgctgtgccctctgcctgtgccagaggtgggcctgggcccgtttctcagggagctcctgaacaccaagaaattgaattgctttgtaaataaacaaaaagtgccaaaca

SEQ ID NO: 401575 - DNA, 474 bp, Homo sapiens
tttctcccctccccccccccccaccaaatcctcctcagcggctgggccgtgggagtgctggccaacgtgccaggcagggaggacctgaattcctgaaggtggtggtggcagctgttagggtccacaggttaatgatctccaacgtcacacagaagagaatgtgctgaggtgtgacctccctcaccctgccttggctgcgtggggcaccgtctctccaggactcaccctgccccccaatagactgaagtctgaagatcagcccagtcttccttcaggcctcaatgccctctcacttccccagcccgagggactcctggctcttctcggaggctgctctgtggggtccctcccttgggcctttgctaatgctgtgccctctgcctgtgccagaggtgggcctgggcccgtttctcagggagctcctgaacaccaagaaattgaattgctttgtaaataaacaaaaagtgccaaaca

SEQ ID NO: 401576 - DNA, 540 bp, Homo sapiens
tctcactctgctacccaggctggagtgcagtggcacaatctcagcttcaccgcaaccttcgcctcccaggttcaagagattctcctgccttagcctcccaagtagctgggattacaggtgccttccatcacacccggctaacttttttatttttactacagacaaggtttcaccatgttgatcaggctggtctcatctcctgacctcaggcgatccacacccccttggcctcccaaagtgctgggattatgggcgtgagctgccacgcccagcctctgtcctgcttttaagcaaacagagagaaagcagagaactctcctgcatcttaattgtctttagctcaaccatcttttatattttggagagttatatcctggtctctcacaccataaacaaccctaatgtccatcagtaaatggatcaacaaactgtggtacatccatacaatggaatactgctatgcagtgaagaggaatgaattcctgatacacacaacagcatggaggaatttcaaaataattatgccaagcaaaataatct

SEQ ID NO: 401577 - DNA, 550 bp, Homo sapiens
ctgacacggacacccactcgggagcgcaggctcacgacctttgttacatgctcacttcaccgcaaccttcgcctcccaggttcaagagattctcctgccttagcctcccaagtagctgggattacaggtgccttccatcacacccggctaacttttttatttttactacagacaaggtttcaccatgttgatcaggctggtctcatctcctgacctcaggcgatccacacccccttggcctcccaaagtgctgggattatgggcgtgagctgccacgcccagcctctgtcctgcttttaagcaaacagagagaaagcagagaactctcctgcatcttaattgtctttagctcaaccatcttttatattttggagagttatatcctggtctctcacaccataaacaaccctaatgtccatcagtaaatggatcaacaaactgtggtacatccatacaatggaatactgctatgcagtgaagaggaatgaattcctgatacacacaacagcatggaggaatttcaaaataattatgccaagcaaaataatct

SEQ ID NO: 401578 - DNA, 363 bp, Homo sapiens
tgtgcatgctcacttgctcattgtaaatggttagagagaaattgactgggctcatcagtgaagtttgatagcccttgctctatcccaggctgtttgggaggtggaacatagcagagtatcagagaatgaaaaccagtggctgcagggacagatgcaactaattgtatcatgaatgtgaatggaagggcacactctccaaacccccagctctgatatttaacattaagattcttcttgcaaagttttgtggttgttgagtgtggaacaaaaatatacttgcctttaacaactaatgtatttatttatttattattaattttgagatggagtttcactgtttttgcccaggctggagagcaatgg

SEQ ID NO: 401579 - DNA, 495 bp, Homo sapiens
tctggtaacccagtccatctggtcagctgaactctactcctatactgctttctattcactttccctgtccctcttccatactcttgactattaccatctacccagtcccctacaccaaatgttcactatttacacagcaaggaggcaaggaggcaaccaaaaaggaatcctaaatcttccctactccatatcacttaacttctacaaatcctgttttaagagaactgtaaaaataaaataaaattataaataatgccctagagaatattgagtgtgattcattttatctggagatgaatgggtaaatggtgactatgaggataaacttacagcagtggaagaatgaaagaggaaaaattaatgaagaaacaagatccaggctgggcacactggctcatgcctataatcccagcactttgggaggccaaggtgggtggatcatctgaggccagtagttcaagaccagtctggctaacatggtgaaacctcatctct

SEQ ID NO: 401580 - DNA, 728 bp, Homo sapiens
aaatctaattagaatgaagatacatagggatgattgtggcagctactctggaaggctggaagattccgaagtagacttacgcttttatgaaatgtaaagtgtatgatacatccttcaccacaaaaggcttcataaccttgaaataaataaaaggaatggaagctgggggcgggaggaggtggtagagtgtgtgtatttatgcgcccacacacagatgaaaagagagagaggcaataacagtgcttatgctacttacttgagagctaaagatcagaaggattaaagcaactaaatcaaaccaaaatttcataaatacacttcccaaactgaagaagattcaaaagacaaaaattaattttgtacgccaagtatgtagaaataatagatcaagagaatataaatgccactgaactgtacattttaaaattgttaattgagccaggcatggtggctcacacctgtaatcccaacactttgggaggccaaggcaggtggatcacctgagttagggagttcaagaccaccctgaccaacatggagaaacaccctctctactaaaaatacaaaattagctgggcatggtggtgcatgtctgtaatcccaactactctggaaggctgaggcagaagaatcacttgaacccaggagatggagggtgcagtgagccaagatcatgccattgaactccagcctgggcaacaagagtgaaactccgtctcaaaaaaata

SEQ ID NO: 401581 - DNA, 6545 bp, Homo sapiens
cccgagccagcaaccctgaggggcggccgggcagcgccgccaccatgttcctgggcaccggggagccggccttggacacgagtcaccttatctctctaagccgagcgtccctgaccccgcagaagctgtggctgggaaccgcaaagccaggaagtctgacccaggccctgaactcacccctcacctgggagcatgcgtggactggcgtccccggcggcactcctgactgtctgacagacaccttcagagtgaagaggccacatctcaggcgctctgccagcaacggtcatgtccctgggactcctgtctacagagaaaaagaagatatgtatgacgagattattgagttaaagaagtcattgcacgtgcagaagagcgacgtggacctgatgagaacgaagctccggcgcctggaggaggaaaacagcaggaaggaccggcagatagagcagctcctggatcccagccgcggcacggattttgttcggactctggcagagaaaaggcccgatgccagttgggtcattaacgggctgaagcagaggatcctgaagctggaacagcagtgcaaggagaaggacggcaccatcagcaaactccagaccgatatgaagactaccaacctggaagagatgcggatcgccatggagacatactacgaggaggtgcatcgtctccagaccctcttggcaagttctgaaaccaccggaaagaagcccctgggggagaagaagacgggcgccaaaaggcagaagaagatgggcagtgccctcctgagcttgtcccggagtgtccaggagctcacggaagagaaccagagcctgaaggaggacctggaccgcgtgctgagcacctccccaaccatctccaagacacagggttatgtggagtggagcaagccccggctgctgaggcgcattgtggagctggagaagaaactaagtgtgatggagagctcaaaatcacacgccgcagagccagtcagatcacacccgccagcctgccttgcatccagctctgcgctgcacagacagccacgaggggaccgcaacaaggaccacgagcgtctccgaggggctgtgagagacctgaaggaagagcggaccgcgctgcaggagcagctgctgcagagagatttggaggtgaagcagctcctgcaggcgaaggccgacctggagaaggagctggagtgcgcgagggagggcgaggaggagaggagagagcgagaggaggttttgagagaggagattcagacacttaccagcaagctccaagaattgcaagaaatgaagaaagaagagaaagaggattgcccggaagttcctcataaggcccaagagctcccagctcccactcccagcagcaggcactgcgagcaagactggccgccggattccagcgaggaggggctcccgcggccccgctccccctgctctgatgggagaagagacgccgcggccagagtcctgcaggcccagtggaaggtgtacaagcacaagaaaaaaaaggctgttctggatgaggcggctgtggtgcttcaggcagctttcaggggacatctcacgcggacaaagctcttagcaagcaaagcacatggctcagagccacccagcgtgccaggcctcccagaccagagctctcctgtgccccgcgttccgagccccatcgcccaggccacgggcagccctgtgcaggaggaggccatcgtcatcatccagtccgctctgcgggcacacctggcccgggccaggcacagtgctaccggtaaaagaaccaccaccgcagcttctaccaggaggagatcggcttcagccacacacggggacgcctcctccccacccttcctcgcagctcttcctgacccctctccctcagggccacaggccttggcacctctacctggggatgacgtcaactccgatgattccgacgatattgtcattgcaccgtctctgcccacgaagaactttccagtttaggtccccgtcactgtctccacgccgtgatggcagcgctgccgaggacataggaaccacgactggaaagataatttatcgtgttaggagaagaacgatgatacctacttaacacctcagcatctgcgtcgtgtctctttgtgcttttgtttgtggaaggagacccaaatgcctttactttattctctggggagggccagcggctcgcatccccctcatctccagctgcagctcggatggtggattttcagtgccaacagacacatctgccgtgaactcgcagatgccagggagccctgtagtgacacgttctctgacagcaccttgccgcctgcccacgaccttgaccgtgaggagctgctatccgcaaccagcgccgacaccatgccccctcttcctggtgacaccctcaacaaccaggatttgctcgatctcagcccagcaggccaggcagacacaccccgctgtgccttaggaaggtgtgagaccggcttcccccatccccacagcaaaacacggcctgtcccaagccagtgaggagctaaagacacccaggtccccaaatgatcttactccatgccccacccgctcacaccgtcctttcccgtcacccttgctatcccctggagcactgccctccagagctgcccttcccaggaaggaatttggttggattctgtcactgtggagaccaagattttttaaaattcccaattacaaaagcagcatcacacttgcttctgagaacagcagggtgatgtctgttcccaagctggtggcgggagccttagcctgtgtggggccacccggggaagaggaggagaggagggtgaggaggcaggctcgccgttccaagggacagcataggctcgtggtggggcgtgttgcatctggtgtctgggacagtccccgtcaccccatgtgtgcggcctctgcactcccaagctccatggctgggctgggctgggctgggctgggctgggccgggcgtgcggagcctgtggagccagcagctgcagaggcctaggagggagttcctgggggaagcgcacagtgtccagtgcccatctcttgcttgtgtgtgagattagcccttgctggggcgtcaagaggaagagccttagacctgggcgggccttcaggggcatctagacccctgcacagcccaggcctggtgtctgcatttccacagcacccctgtggggactcctgccggggctggccgctgtctcaggagagacccaatggttagaaagcccctttttacacagctgacagcttctcccaaggcttccgtccacggggacaggcttaacccctgggcgccttttctgcagcatggcggccttctgagtcacctaagctgagcctgggtcattctctgtggcggtcagaaggccgatggccccaacacagtggcttgtgaaagggagagaggaggctctgcatgtccacctgctctatgggaggaggacacaggtgtccccagcccagcctgttctctcccagtcactcagggatggggccacccaaagtgcaggacccgccccaccctgcggttcgaagcctggcccctgtctccacttagcttctgtttctgcagtgggtggaagcgagtcagcggggggcctggcttgtgtacgtgttttccttatttggtctgtgggttgccaagtccatttttttttccactgaactggctggtaacttgatggactgtgtaactgacacaggccctctttagacccctgccttcaccccacccgcccgggtccactccctggggcgctgtcccaagccatccctgcttgccagctcaaagcttcaggtcctaggagccagtccacctcgaaagccctgagaaagtgagacacctgcacattcgctgggggagaccctccgttctcttgtggcagctgctcccacttgttaaaccaagctgtttctgcgggacgtgctcactcttgggaaccagtggcctagagctttgggttacaggcatggagagggctttcctgcctcaggcttggaggccaatgttccatacataaaccgccatgtcctctggtgcagctgggctgctcttttaaaagccagcatccatcttgaagctcgctgggtaaatggcaatgcattctcaagccagtgtcttcagctgatgcccagtgtccagtgctggtcaccagtcccctttgctgggtacagcctgcctggctgttctgtggtcctggaacgctgcagtgtggttttgttccatggagacagtaccaagcggagaggcctccttgcccacggccccagggcctgggggccaggggttctggccctgcggggacttaggcaggaggggaagagaagcccatggagccatgggaggggtgagctgtgggcggggcctagtcatgggaggggtgagctgtgggcggggcgagctgtgggtggggcctagccatgggagaggtgagctgtgaatggggctagctatgggtggggtgagctgtggacagggcctagccatgggaaaggtgagctgtgggcggggcctagtcacgggagaggtgagctgtgggcggggcctagtcatgggaggggtgagctgtggatggggcctagccatgggaggggtgagctgtgagtggggctgagccatgggagcagcaagctggtggagtgggctgggcggagctgtgggggctgctggcagggcctaggaaagtagacaactcccgggggagacgaagtagagagtgagtccccaagaaagggactcctgccccagcgtcaagtgccaaagcaggccccatctaccacttcagggtcgacgttggtggcaggtgttgttcacggtgtactgattgtcactgcaacacctccacatcaccttgaacttcaagaacagcagcaaagctgtatctgctatcagaggctgttaggtagtccagctttaaaataacacactctttctctatcccatgccctttaaacaagcagccacaggagatgtcagtctccagggcctggccccactgtgttgacagcagtcacgtctgttgagctgacactgctgaggctgaagctggccccgtgcaggtggctggtgagccacaggtgcagtacccggaggtgtgctctcccctagaggcctgtccccaactcctcccctagaggcctattcccgctgctcacagacctcagcagaggcaccagctggagggctccagggacatccttggagatacaggaggctttcctggcacagggcacagctcttaggaggcctttgtaggacgctgtctccccagcgtgtcctgctcatccaggatggggagaaagaggaggaggccccaggctcagaagccagggacagactgccgacgattaccaaactgaatccaggcagtgccatgaccctgggtgtcccttggttcacatcacccaccagacagctgcggagagagtgcagggaggggctgggaccaaacaggccagaaaccagcagaaaagaggcagaagtgaggtgggtgtgcctggggcacgaagccagcgccggggggatttcagtggagccttacagccaggctccgtgcggactgtgatgccagagaggcgtgcagcctctgggcaagtcgggagagggcttgggtggtccccacaaggcagaagaggtggaagggccagagaagaccaccaagaccaccgttcccgcaggcctggggtgagtgacctgactgagactagcgggcagagccaagcagggctaaactccaacccagggcccggtgttggacaaagtagctttttctttgctcgtttgtctgtgtattaagaagagactaaaatagccaaacgacgctggtcgcatgcgctggctgtggtctgtctgctgaatgtctatttttgtctcctgacgagacgtgaggaccatgcccttgatccctccgatggaccagaaacccccttccttgcaaaaaaaaggcaattgaattaggaaaagatagcccaacctagctcagatccaccaagataagcacagcaaagcttggctgcatttttgaggaataaaaacctgcagaaagcaccgataaccttcaagatctgaatgagattctattataacccgtctaaacgattgcaaaattcctcctttggttttggaagcagcgtttgctctcccgtggctcggattctctgaggaccagggagttgacacacaaaccccgccatgggtccgagccagctatttctcaaggctcccacctcgccaagctcccaagggcctgctggcagtgcctacgctgtgccaactaccctgtctggtacagaccacggctgggtaagcacccttaaaagcaacagaaatgacgtctggaagctgaaatgtgaaactgtcaagatggcttaggagaggaaggagtggacccgctggtctttggcattttgtatttagaattattctaactttatacataatgtataggccgatcttttggaagggataaggttttcattcttgtgcaactcattattctcattattggccttttaaataaaaagttgttttgcagtgtg

SEQ ID NO: 401582 - DNA, 5942 bp, Homo sapiens
ggcagttccaggggacaggagggaagatgtgcagagtcgtttgagtcccctcccctcgtgccctcctctctgttttaatgacttctgcctgcgccctggcttggcgggggtctgcgcgtgcctcacttctgattaaagagactgagcagggatcatgctcttccagtagcttgtgcccggcagcttctctgggtaactcgggtcccctcaaagctttctcatggccctgctggagactcagtttgccctggttcagtgtctcttttctgggtttggtaaatagaaagtagaaatgagaactagtatctaacacatgtctgtgttgcctccagaaactaagtgtgatggagagctcaaaatcacacgccgcagagccagtcagatcacacccgccagcctgccttgcatccagctctgcgctgcacagacagccacgaggggaccgcaacaaggaccacgagcgtctccgaggggctgtgagagacctgaaggaagagcggaccgcgctgcaggagcagctgctgcagagagatttggaggtgaagcagctcctgcaggcgaaggccgacctggagaaggagctggagtgcgcgagggagggcgaggaggagaggagagagcgagaggaggttttgagagaggagattcagacacttaccagcaagctccaagaattgcaagaaatgaagaaagaagagaaagaggattgcccggaagttcctcataaggcccaagagctcccagctcccactcccagcagcaggcactgcgagcaagactggccgccggattccagcgaggaggggctcccgcggccccgctccccctgctctgatgggagaagagacgccgcggccagagtcctgcaggcccagtggaaggtgtacaagcacaagaaaaaaaaggctgttctggatgaggcggctgtggtgcttcaggcagctttcaggggacatctcacgcggacaaagctcttagcaagcaaagcacatggctcagagccacccagcgtgccaggcctcccagaccagagctctcctgtgccccgcgttccgagccccatcgcccaggccacgggcagccctgtgcaggaggaggccatcgtcatcatccagtccgctctgcgggcacacctggcccgggccaggcacagtgctaccggtaaaagaaccaccaccgcagcttctaccaggaggagatcggcttcagccacacacggggacgcctcctccccacccttcctcgcagctcttcctgacccctctccctcagggccacaggccttggcacctctacctggggatgacgtcaactccgatgattccgacgatattgtcattgcaccgtctctgcccacgaagaactttccagtttaggtccccgtcactgtctccacgccgtgatggcagcgctgccgaggacataggaaccacgactggaaagataatttatcgtgttaggagaagaacgatgatacctacttaacacctcagcatctgcgtcgtgtctctttgtgcttttgtttgtggaaggagacccaaatgcctttactttattctctggggagggccagcggctcgcatccccctcatctccagctgcagctcggatggtggattttcagtgccaacagacacatctgccgtgaactcgcagatgccagggagccctgtagtgacacgttctctgacagcaccttgccgcctgcccacgaccttgaccgtgaggagctgctatccgcaaccagcgccgacaccatgccccctcttcctggtgacaccctcaacaaccaggatttgctcgatctcagcccagcaggccaggcagacacaccccgctgtgccttaggaaggtgtgagaccggcttcccccatccccacagcaaaacacggcctgtcccaagccagtgaggagctaaagacacccaggtccccaaatgatcttactccatgccccacccgctcacaccgtcctttcccgtcacccttgctatcccctggagcactgccctccagagctgcccttcccaggaaggaatttggttggattctgtcactgtggagaccaagattttttaaaattcccaattacaaaagcagcatcacacttgcttctgagaacagcagggtgatgtctgttcccaagctggtggcgggagccttagcctgtgtggggccacccggggaagaggaggagaggagggtgaggaggcaggctcgccgttccaagggacagcataggctcgtggtggggcgtgttgcatctggtgtctgggacagtccccgtcaccccatgtgtgcggcctctgcactcccaagctccatggctgggctgggctgggctgggctgggctgggccgggcgtgcggagcctgtggagccagcagctgcagaggcctaggagggagttcctgggggaagcgcacagtgtccagtgcccatctcttgcttgtgtgtgagattagcccttgctggggcgtcaagaggaagagccttagacctgggcgggccttcaggggcatctagacccctgcacagcccaggcctggtgtctgcatttccacagcacccctgtggggactcctgccggggctggccgctgtctcaggagagacccaatggttagaaagcccctttttacacagctgacagcttctcccaaggcttccgtccacggggacaggcttaacccctgggcgccttttctgcagcatggcggccttctgagtcacctaagctgagcctgggtcattctctgtggcggtcagaaggccgatggccccaacacagtggcttgtgaaagggagagaggaggctctgcatgtccacctgctctatgggaggaggacacaggtgtccccagcccagcctgttctctcccagtcactcagggatggggccacccaaagtgcaggacccgccccaccctgcggttcgaagcctggcccctgtctccacttagcttctgtttctgcagtgggtggaagcgagtcagcggggggcctggcttgtgtacgtgttttccttatttggtctgtgggttgccaagtccatttttttttccactgaactggctggtaacttgatggactgtgtaactgacacaggccctctttagacccctgccttcaccccacccgcccgggtccactccctggggcgctgtcccaagccatccctgcttgccagctcaaagcttcaggtcctaggagccagtccacctcgaaagccctgagaaagtgagacacctgcacattcgctgggggagaccctccgttctcttgtggcagctgctcccacttgttaaaccaagctgtttctgcgggacgtgctcactcttgggaaccagtggcctagagctttgggttacaggcatggagagggctttcctgcctcaggcttggaggccaatgttccatacataaaccgccatgtcctctggtgcagctgggctgctcttttaaaagccagcatccatcttgaagctcgctgggtaaatggcaatgcattctcaagccagtgtcttcagctgatgcccagtgtccagtgctggtcaccagtcccctttgctgggtacagcctgcctggctgttctgtggtcctggaacgctgcagtgtggttttgttccatggagacagtaccaagcggagaggcctccttgcccacggccccagggcctgggggccaggggttctggccctgcggggacttaggcaggaggggaagagaagcccatggagccatgggaggggtgagctgtgggcggggcctagtcatgggaggggtgagctgtgggcggggcgagctgtgggtggggcctagccatgggagaggtgagctgtgaatggggctagctatgggtggggtgagctgtggacagggcctagccatgggaaaggtgagctgtgggcggggcctagtcacgggagaggtgagctgtgggcggggcctagtcatgggaggggtgagctgtggatggggcctagccatgggaggggtgagctgtgagtggggctgagccatgggagcagcaagctggtggagtgggctgggcggagctgtgggggctgctggcagggcctaggaaagtagacaactcccgggggagacgaagtagagagtgagtccccaagaaagggactcctgccccagcgtcaagtgccaaagcaggccccatctaccacttcagggtcgacgttggtggcaggtgttgttcacggtgtactgattgtcactgcaacacctccacatcaccttgaacttcaagaacagcagcaaagctgtatctgctatcagaggctgttaggtagtccagctttaaaataacacactctttctctatcccatgccctttaaacaagcagccacaggagatgtcagtctccagggcctggccccactgtgttgacagcagtcacgtctgttgagctgacactgctgaggctgaagctggccccgtgcaggtggctggtgagccacaggtgcagtacccggaggtgtgctctcccctagaggcctgtccccaactcctcccctagaggcctattcccgctgctcacagacctcagcagaggcaccagctggagggctccagggacatccttggagatacaggaggctttcctggcacagggcacagctcttaggaggcctttgtaggacgctgtctccccagcgtgtcctgctcatccaggatggggagaaagaggaggaggccccaggctcagaagccagggacagactgccgacgattaccaaactgaatccaggcagtgccatgaccctgggtgtcccttggttcacatcacccaccagacagctgcggagagagtgcagggaggggctgggaccaaacaggccagaaaccagcagaaaagaggcagaagtgaggtgggtgtgcctggggcacgaagccagcgccggggggatttcagtggagccttacagccaggctccgtgcggactgtgatgccagagaggcgtgcagcctctgggcaagtcgggagagggcttgggtggtccccacaaggcagaagaggtggaagggccagagaagaccaccaagaccaccgttcccgcaggcctggggtgagtgacctgactgagactagcgggcagagccaagcagggctaaactccaacccagggcccggtgttggacaaagtagctttttctttgctcgtttgtctgtgtattaagaagagactaaaatagccaaacgacgctggtcgcatgcgctggctgtggtctgtctgctgaatgtctatttttgtctcctgacgagacgtgaggaccatgcccttgatccctccgatggaccagaaacccccttccttgcaaaaaaaaggcaattgaattaggaaaagatagcccaacctagctcagatccaccaagataagcacagcaaagcttggctgcatttttgaggaataaaaacctgcagaaagcaccgataaccttcaagatctgaatgagattctattataacccgtctaaacgattgcaaaattcctcctttggttttggaagcagcgtttgctctcccgtggctcggattctctgaggaccagggagttgacacacaaaccccgccatgggtccgagccagctatttctcaaggctcccacctcgccaagctcccaagggcctgctggcagtgcctacgctgtgccaactaccctgtctggtacagaccacggctgggtaagcacccttaaaagcaacagaaatgacgtctggaagctgaaatgtgaaactgtcaagatggcttaggagaggaaggagtggacccgctggtctttggcattttgtatttagaattattctaactttatacataatgtataggccgatcttttggaagggataaggttttcattcttgtgcaactcattattctcattattggccttttaaataaaaagttgttttgcagtgtg

SEQ ID NO: 401583 - DNA, 6351 bp, Homo sapiens
cccgagccagcaaccctgaggggcggccgggcagcgccgccaccatgttcctgggcaccggggagccggccttggacacgagtcaccttatctctctaagccgagcgtccctgaccccgcagaagctgtggctgggaaccgcaaagccaggaagtctgacccaggccctgaactcacccctcacctgggagcatgcgtggactggcgtccccggcggcactcctgactgtctgacagacaccttcagagtgaagaggccacatctcaggcgctctgccagcaacggtcatgtccctgggactcctgtctacagagaaaaagaagatatgtatgacgagattattgagttaaagaagtcattgcacgtgcagaagagcgacgtggacctgatgagaacgaagctccggcgcctggaggaggaaaacagcaggaaggaccggcagatagagcagctcctggatcccagccgcggcacggattttgttcggactctggcagagaaaaggcccgatgccagttgggtcattaacgggctgaagcagaggatcctgaagctggaacagcagtgcaaggagaaggacggcaccatcagcaaactccagaccgatatgaagactaccaacctggaagagatgcggatcgccatggagacatactacgaggaggtgcatcgtctccagaccctcttggcaagttctgaaaccaccggaaagaagcccctgggggagaagaagacgggcgccaaaaggcagaagaagatgggcagtgccctcctgagcttgtcccggagtgtccaggagctcacggaagagaaccagagcctgaaggaggacctggaccgcgtgctgagcacctccccaaccatctccaagacacagggttatgtggagtggagcaagccccggctgctgaggcgcattgtggagctggagaagaaactaagtgtgatggagagctcaaaatcacacgccgcagagccagtcagatcacacccgccagcctgccttgcatccagctctgcgctgcacagacagccacgaggggaccgcaacaaggaccacgagcgtctccgaggggctgtgagagacctgaaggaagagcggaccgcgctgcaggagcagctgctgcagagagatttggaggtgaagcagctcctgcaggcgaaggccgacctggagaaggagctggagtgcgcgagggagggcgaggaggagaggagagagcgagaggaggttttgagagaggagattcagacacttaccagcaagctccaagaattgcaagaaatgaagaaagaagagaaagaggattgcccggaagttcctcataaggcccaagagctcccagctcccactcccagcagcaggcactgcgagcaagactggccgccggattccagcgaggaggggctcccgcggccccgctccccctgctctgatgggagaagagacgccgcggccagagtcctgcaggcccagtggaaggtgtacaagcacaagaaaaaaaaggctgttctggatgaggcggctgtggtgcttcaggcagctttcaggggacatctcacgcggacaaagctcttagcaagcaaagcacatggctcagagccacccagcgtgccaggcctcccagaccagagctctcctgtgccccgcgttccgagccccatcgcccaggccacgggcagccctgtgcaggaggaggccatcgtcatcatccagtccgctctgcgggcacacctggcccgggccaggcacagtgctaccggtaaaagaaccaccaccgcagcttctaccaggaggagatcggcttcagccacacacggggacgcctcctccccacccttcctcgcagctcttcctgacccctctccctcagggccacaggccttggcacctctacctggggatgacgtcaactccgatgattccgacgatattgtcattgcaccgtctctgcccacgaagaactttccagtttaggtccccgtcactgtctccacgccgtgatggcagcgctgccgaggacataggaaccacgactggaaagataatttatcgtgttaggagaagaacgatgatacctacttaacacctcagcatctgcgtcgtgtctctttgtgcttttgtttgtggaaggagacccaaatgcctttactttattctctggggagggccagcggctcgcatccccctcatctccagctgcagctcggatggtggattttcagtgccaacagacacatctgccgtgaactcgcagatgccagggagccctgtagtgacacgttctctgacagcaccttgccgcctgcccacgaccttgaccgtgaggagctgctatccgcaaccagcgccgacaccatgccccctcttcctggtgacaccctcaacaaccaggatttgctcgatctcagcccagcaggccaggcagacacaccccgctgtgccttaggaaggtgtgagaccggcttcccccatccccacagcaaaacacggcctgtcccaagccagtgaggagctaaagacacccaggtccccaaatgatcttactccatgccccacccgctcacaccgtcctttcccgtcacccttgctatcccctggagcactgccctccagagctgcccttcccaggaaggaatttggttggattctgtcactgtggagaccaagattttttaaaattcccaattacaaaagcagcatcacacttgcttctgagaacagcagggtgatgtctgttcccaagctggtggcgggagccttagcctgtgtggggccacccggggaagaggaggagaggagggtgaggaggcaggctcgccgttccaagggacagcataggctcgtggtggggcgtgttgcatctggtgtctgggacagtccccgtcaccccatgtgtgcggcctctgcactcccaagctccatggctgggctgggctgggctgggctgggctgggccgggcgtgcggagcctgtggagccagcagctgcagaggcctaggagggagttcctgggggaagcgcacagtgtccagtgcccatctcttgcttgtgtgtgagattagcccttgctggggcgtcaagaggaagagccttagacctgggcgggccttcaggggcatctagacccctgcacagcccaggcctggtgtctgcatttccacagcacccctgtggggactcctgccggggctggccgctgtctcaggagagacccaatggttagaaagcccctttttacacagctgacagcttctcccaaggcttccgtccacggggacaggcttaacccctgggcgccttttctgcagcatggcggccttctgagtcacctaagctgagcctgggtcattctctgtggcggtcagaaggccgatggccccaacacagtggcttgtgaaagggagagaggaggctctgcatgtccacctgctctatgggaggaggacacaggtgtccccagcccagcctgttctctcccagtcactcagggatggggccacccaaagtgcaggacccgccccaccctgcggttcgaagcctggcccctgtctccacttagcttctgtttctgcagtgggtggaagcgagtcagcggggggcctggcttgtgtacgtgttttccttatttggtctgtgggttgccaagtccatttttttttccactgaactggctggtaacttgatggactgtgtaactgacacaggccctctttagacccctgccttcaccccacccgcccgggtccactccctggggcgctgtcccaagccatccctgcttgccagctcaaagcttcaggtcctaggagccagtccacctcgaaagccctgagaaagtgagacacctgcacattcgctgggggagaccctccgttctcttgtggcagctgctcccacttgttaaaccaagctgtttctgcgggacgtgctcactcttgggaaccagtggcctagagctttgggttacaggcatggagagggctttcctgcctcaggcttggaggccaatgttccatacataaaccgccatgtcctctggtgcagctgggctgctcttttaaaagccagcatccatcttgaagctcgctgggtaaatggcaatgcattctcaagccagtgtcttcagctgatgcccagtgtccagtgctggtcaccagtcccctttgctgggtacagcctgcctggctgttctgtggtcctggaacgctgcagtgtggttttgttccatggagacagtaccaagcggagaggcctccttgcccacggccccagggcctgggggccaggggttctggccctgcggggacttaggcaggaggggaagagaagcccatggagccatgggaggggtgagctgtgggcggggcctagtcatgggaggggtgagctgtgggcggggcgagctgtgggtggggcctagccatgggagaggtgagctgtgaatggggctagctatgggtggggtgagctgtggacagggcctagccatgggaaaggtgagctgtgggcggggcctagtcacgggagaggtgagctgtgggcggggcctagtcatgggaggggtgagctgtggatggggcctagccatgggaggggtgagctgtgagtggggctgagccatgggagcagcaagctggtggagtgggctgggcggagctgtgggggctgctggcagggcctaggaaagtagacaactcccgggggagacgaagtagagagtgagtccccaagaaagggactcctgccccagcgtcaagtgccaaagcaggccccatctaccacttcagggtcgacgttggtggcaggtgttgttcacggtgtactgattgtcactgcaacacctccacatcaccttgaacttcaagaacagcagcaaagctgtatctgctatcagaggctgttaggtagtccagctttaaaataacacactctttctctatcccatgccctttaaacaagcagccacaggagatgtcagtctccagggcctggccccactgtgttgacagcagtcacgtctgttgagctgacactgctgaggctgaagctggccccgtgcaggtggctggtgagccacaggtgcagtacccggaggtgtgctctcccctagaggcctgtccccaactcctcccctagaggcctattcccgctgctcacagacctcagcagaggcaccagctggagggctccagggacatccttggagatacaggaggctttcctggcacagggcacagctcttaggaggcctttgtaggacgctgtctccccagcgtgtcctgctcatccaggatggggagaaagaggaggaggccccaggctcagaagccagggacagactgccgacgattaccaaactgaatccaggcagtgccatgaccctgggtgtcccttggttcacatcacccaccagacagctgcggagagagtgcagggaggggctgggaccaaacaggccagaaaccagcagaaaagaggcagaagtgaggtgggtgtgcctggggcacgaagccagcgccggggggatttcagtggagccttacagccaggctccgtgcggactgtgatgccagagaggcgtgcagcctctgggcaagtcgggagagggcttgggtggtccccacaaggcagaagaggtggaagggccagagaagaccaccaagaccaccgttcccgcaggcctggggtgagtgacctgactgagactagcgggcagagccaagcagggctaaactccaacccagggcccggtgttggacaaagtagctttttctttgctcgtttgtctgtgtattaagaagagactaaaatagccaaacgacgctggtcgcatgcgctggctgtggtctgtctgctgaatgtctatttttgtctcctgacgagacgtgaggaccatgcccttgatccctccgatggaccagaaacccccttccttgcaaaaaaaaggcaattgaattaggaaaagatagcccaacctagctcagatccaccaagataagcacagcaaagcttggctgcatttttgaggaataaaaacctgcagaaagcaagggcctgctggcagtgcctacgctgtgccaactaccctgtctggtacagaccacggctgggtaagcacccttaaaagcaacagaaatgacgtctggaagctgaaatgtgaaactgtcaagatggcttaggagaggaaggagtggacccgctggtctttggcattttgtatttagaattattctaactttatacataatgtataggccgatcttttggaagggataaggttttcattcttgtgcaactcattattctcattattggccttttaaataaaaagttgttttgcagtgtg

SEQ ID NO: 401584 - DNA, 6276 bp, Homo sapiens
cccgagccagcaaccctgaggggcggccgggcagcgccgccaccatgttcctgggcaccggggagccggccttggacacgagtcaccttatctctctaagccgagcgtccctgaccccgcagaagctgtggctgggaaccgcaaagccaggaagtctgacccaggccctgaactcacccctcacctgggagcatgcgtggactggcgtccccggcggcactcctgactgtctgacagacaccttcagagtgaagaggccacatctcaggcgctctgccagcaacggtcatgtccctgggactcctgtctacagagaaaaagaagatatgtatgacgagattattgagttaaagaagtcattgcacgtgcagaagagcgacgtggacctgatgagaacgaagctccggcgcctggaggaggaaaacagcaggaaggaccggcagatagagcagctcctggatcccagccgcggcacggattttgttcggactctggcagagaaaaggcccgatgccagttgggtcattaacgggctgaagcagaggatcctgaagctggaacagcagtgcaaggagaaggacggcaccatcagcaaactccagaccgatatgaagactaccaacctggaagagatgcggatcgccatggagacatactacgaggaggtgcatcgtctccagaccctcttggcaagttctgaaaccaccggaaagaagcccctgggggagaagaagacgggcgccaaaaggcagaagaagatgggcagtgccctcctgagcttgtcccggagtgtccaggagctcacggaagagaaccagagcctgaaggaggacctggaccgcgtgctgagcacctccccaaccatctccaagacacagggttatgtggagtggagcaagccccggctgctgaggcgcattgtggagctggagaagaaactaagtgtgatggagagctcaaaatcacacgccgcagagccagtcagatcacacccgccagcctgccttgcatccagctctgcgctgcacagacagccacgaggggaccgcaacaaggaccacgagcgtctccgaggggctgtgagagacctgaaggaagagcggaccgcgctgcaggagcagctgctgcagagagatttggaggtgaagcagctcctgcaggcgaaggccgacctggagaaggagctggagtgcgcgagggagggcgaggaggagaggagagagcgagaggaggttttgagagaggagattcagacacttaccagcaagctccaagaattgcaagaaatgaagaaagaagagaaagaggattgcccggaagttcctcataaggcccaagagctcccagctcccactcccagcagcaggcactgcgagcaagactggccgccggattccagcgaggaggggctcccgcggccccgctccccctgctctgatgggagaagagacgccgcggccagagtcctgcaggcccagtggaaggtgtacaagcacaagaaaaaaaaggctgttctggatgaggcggctgtggtgcttcaggcagctttcaggggacatctcacgcggacaaagctcttagcaagcaaagcacatggctcagagccacccagcgtgccaggcctcccagaccagagctctcctgtgccccgcgttccgagccccatcgcccaggccacgggcagccctgtgcaggaggaggccatcgtcatcatccagtccgctctgcgggcacacctggcccgggccaggcacagtgctaccggtaaaagaaccaccaccgcagcttctaccaggaggagatcggcttcagccacacacggggacgcctcctccccacccttcctcgcagctcttcctgacccctctccctcagggccacaggccttggcacctctacctggggatgacgtcaactccgatgattccgacgatattgtcattgcaccgtctctgcccacgaagaactttccagtttaggtccccgtcactgtctccacgccgtgatggcagcgctgccgaggacataggaaccacgactggaaagataatttatcgtgttaggagaagaacgatgatacctacttaacacctcagcatctgcgtcgtgtctctttgtgcttttgtttgtggaaggagacccaaatgcctttactttattctctggggagggccagcggctcgcatccccctcatctccagctgcagctcggatggtggattttcagtgccaacagacacatctgccgtgaactcgcagatgccagggagccctgtagtgacacgttctctgacagcaccttgccgcctgcccacgaccttgaccgtgaggagctgctatccgcaaccagcgccgacaccatgccccctcttcctggtgacaccctcaacaaccaggatttgctcgatctcagcccagcaggccaggcagacacaccccgctgtgccttaggaaggtgtgagaccggcttcccccatccccacagcaaaacacggcctgtcccaagccagtgaggagctaaagacacccaggtccccaaatgatcttactccatgccccacccgctcacaccgtcctttcccgtcacccttgctatcccctggagcactgccctccagagctgcccttcccaggaaggaatttggttggattctgtcactgtggagaccaagattttttaaaattcccaattacaaaagcagcatcacacttgcttctgagaacagcagggtgatgtctgttcccaagctggtggcgggagccttagcctgtgtggggccacccggggaagaggaggagaggagggtgaggaggcaggctcgccgttccaagggacagcataggctcgtggtggggcgtgttgcatctggtgtctgggacagtccccgtcaccccatgtgtgcggcctctgcactcccaagctccatggctgggctgggctgggctgggctgggctgggccgggcgtgcggagcctgtggagccagcagctgcagaggcctaggagggagttcctgggggaagcgcacagtgtccagtgcccatctcttgcttgtgtgtgagattagcccttgctggggcgtcaagaggaagagccttagacctgggcgggccttcaggggcatctagacccctgcacagcccaggcctggtgtctgcatttccacagcacccctgtggggactcctgccggggctggccgctgtctcaggagagacccaatggttagaaagcccctttttacacagctgacagcttctcccaaggcttccgtccacggggacaggcttaacccctgggcgccttttctgcagcatggcggccttctgagtcacctaagctgagcctgggtcattctctgtggcggtcagaaggccgatggccccaacacagtggcttgtgaaagggagagaggaggctctgcatgtccacctgctctatgggaggaggacacaggtgtccccagcccagcctgttctctcccagtcactcagggatggggccacccaaagtgcaggacccgccccaccctgcggttcgaagcctggcccctgtctccacttagcttctgtttctgcagtgggtggaagcgagtcagcggggggcctggcttgtgtacgtgttttccttatttggtctgtgggttgccaagtccatttttttttccactgaactggctggtaacttgatggactgtgtaactgacacaggccctctttagacccctgccttcaccccacccgcccgggtccactccctggggcgctgtcccaagccatccctgcttgccagctcaaagcttcaggtcctaggagccagtccacctcgaaagccctgagaaagtgagacacctgcacattcgctgggggagaccctccgttctcttgtggcagctgctcccacttgttaaaccaagctgtttctgcgggacgtgctcactcttgggaaccagtggcctagagctttgggttacaggcatggagagggctttcctgcctcaggcttggaggccaatgttccatacataaaccgccatgtcctctggtgcagctgggctgctcttttaaaagccagcatccatcttgaagctcgctgggtaaatggcaatgcattctcaagccagtgtcttcagctgatgcccagtgtccagtgctggtcaccagtcccctttgctgggtacagcctgcctggctgttctgtggtcctggaacgctgcagtgtggttttgttccatggagacagtaccaagcggagaggcctccttgcccacggccccagggcctgggggccaggggttctggccctgcggggacttaggcaggaggggaagagaagcccatggagccatgggaggggtgagctgtgggcggggcctagtcatgggaggggtgagctgtgggcggggcgagctgtgggtggggcctagccatgggagaggtgagctgtgaatggggctagctatgggtggggtgagctgtggacagggcctagccatgggaaaggtgagctgtgggcggggcctagtcacgggagaggtgagctgtgggcggggcctagtcatgggaggggtgagctgtggatggggcctagccatgggaggggtgagctgtgagtggggctgagccatgggagcagcaagctggtggagtgggctgggcggagctgtgggggctgctggcagggcctaggaaagtagacaactcccgggggagacgaagtagagagtgagtccccaagaaagggactcctgccccagcgtcaagtgccaaagcaggccccatctaccacttcagggtcgacgttggtggcaggtgttgttcacggtgtactgattgtcactgcaacacctccacatcaccttgaacttcaagaacagcagcaaagctgtatctgctatcagaggctgttaggtagtccagctttaaaataacacactctttctctatcccatgccctttaaacaagcagccacaggagatgtcagtctccagggcctggccccactgtgttgacagcagtcacgtctgttgagctgacactgctgaggctgaagctggccccgtgcaggtggctggtgagccacaggtgcagtacccggaggtgtgctctcccctagaggcctgtccccaactcctcccctagaggcctattcccgctgctcacagacctcagcagaggcaccagctggagggctccagggacatccttggagatacaggaggctttcctggcacagggcacagctcttaggaggcctttgtaggacgctgtctccccagcgtgtcctgctcatccaggatggggagaaagaggaggaggccccaggctcagaagccagggacagactgccgacgattaccaaactgaatccaggcagtgccatgaccctgggtgtcccttggttcacatcacccaccagacagctgcggagagagtgcagggaggggctgggaccaaacaggccagaaaccagcagaaaagaggcagaagtgaggtgggtgtgcctggggcacgaagccagcgccggggggatttcagtggagccttacagccaggctccgtgcggactgtgatgccagagaggcgtgcagcctctgggcaagtcgggagagggcttgggtggtccccacaaggcagaagaggtggaagggccagagaagaccaccaagaccaccgttcccgcaggcctggggtgagtgacctgactgagactagcgggcagagccaagcagggctaaactccaacccagggcccggtgttggacaaagtagctttttctttgctcgtttgtctgtgtattaagaagagactaaaatagccaaacgacgctggtcgcatgcgctggctgtggtctgtctgctgaatgtctatttttgtctcctgacgagacgtgaggaccatgcccttgatccctccgatggaccagaaacccccttccttgcaaaaaaaaggcaattgaattaggaaaagatagccccaagggcctgctggcagtgcctacgctgtgccaactaccctgtctggtacagaccacggctgggtaagcacccttaaaagcaacagaaatgacgtctggaagctgaaatgtgaaactgtcaagatggcttaggagaggaaggagtggacccgctggtctttggcattttgtatttagaattattctaactttatacataatgtataggccgatcttttggaagggataaggttttcattcttgtgcaactcattattctcattattggccttttaaataaaaagttgttttgcagtgtg

SEQ ID NO: 401585 - DNA, 1627 bp, Homo sapiens
ggcagttccaggggacaggagggaagatgtgcagagtcgtttgagtcccctcccctcgtgccctcctctctgttttaatgacttctgcctgcgccctggcttggcgggggtctgcgcgtgcctcacttctgattaaagagactgagcagggatcatgctcttccagtagcttgtgcccggcagcttctctgggtaactcgggtcccctcaaagctttctcatggccctgctggagactcagtttgccctggttcagtgtctcttttctgggtttggtaaatagaaagtagaaatgagaactagtatctaacacatgtctgtgttgcctccagaaactaagtgtgatggagagctcaaaatcacacgccgcagagccagtcagatcacacccgccagcctgccttgcatccagctctgcgctgcacagacagccacgaggggaccgcaacaaggaccacgagcgtctccgaggggctgtgagagacctgaaggaagagcggaccgcgctgcaggagcagctgctgcagagagatttggaggtgaagcagctcctgcaggcgaaggccgacctggagaaggagctggagtgcgcgagggagggcgaggaggagaggagagagcgagaggaggttttgagagaggagattcagacacttaccagcaagctccaagaattgcaagaaatgaagaaagaagagaaagaggattgcccggaagttcctcataaggcccaagagctcccagctcccactcccagcagcaggcactgcgagcaagactggccgccggattccagcgaggaggggctcccgcggccccgctccccctgctctgatgggagaagagacgccgcggccagagtcctgcaggcccagtggaaggtgtacaagcacaagaaaaaaaaggctgttctggatgaggcggctgtggtgcttcaggcagctttcaggggacatctcacgcggacaaagctcttagcaagcaaagcacatggctcagagccacccagcgtgccaggcctcccagaccagagctctcctgtgccccgcgttccgagccccatcgcccaggccacgggcagccctgtgcaggaggaggccatcgtcatcatccagtccgctctgcgggcacacctggcccgggccaggcacagtgctaccggtaaaagaaccaccaccgcagcttctaccaggaggagatcggcttcagccacacacggggacgcctcctccccacccttcctcgcagctcttcctggtaatttcattcatttggattctggcaccagggcagctggtctgctgaggtctcagccaaagagtggccacctccaggaagcccgggctgtgtcgggacggaagggaggagtgtcccatctggagctgcctctgaactaagcgtcgccttatgccaggaaggcccacaacagggccccgccttggcccagcttgtcctttgtgcctggaattgccgaggtccttgctgtctttattttttgctctcagctccaacaggaccgaggtggcttcctccttcaggccagcatttctcctgtttgtttgttgagtaaaaccgtgttattgtttccttttctactttgttaaagtccaaaaacagtcagtgaaga

SEQ ID NO: 401586 - DNA, 2701 bp, Homo sapiens
cccgagccagcaaccctgaggggcggccgggcagcgccgccaccatgttcctgggcaccggggagccggccttggacacgagtcaccttatctctctaagccgagcgtccctgaccccgcagaagctgtggctgggaaccgcaaagccaggaagtctgacccaggccctgaactcacccctcacctgggagcatgcgtggactggcgtccccggcggcactcctgactgtctgacagacaccttcagagtgaagaggccacatctcaggcgctctgccagcaacggtcatgtccctgggactcctgtctacagagaaaaagaagatatgtatgacgagattattgagttaaagaagtcattgcacgtgcagaagagcgacgtggacctgatgagaacgaagctccggcgcctggaggaggaaaacagcaggaaggaccggcagatagagcagctcctggatcccagccgcggcacggattttgttcggactctggcagagaaaaggcccgatgccagttgggtcattaacgggctgaagcagaggatcctgaagctggaacagcagtgcaaggagaaggacggcaccatcagcaaactccagaccgatatgaagactaccaacctggaagagatgcggatcgccatggagacatactacgaggaggtgcatcgtctccagaccctcttggcaagttctgaaaccaccggaaagaagcccctgggggagaagaagacgggcgccaaaaggcagaagaagatgggcagtgccctcctgagcttgtcccggagtgtccaggagctcacggaagagaaccagagcctgaaggaggacctggaccgcgtgctgagcacctccccaaccatctccaagacacagggttatgtggagtggagcaagccccggctgctgaggcgcattgtggagctggagaagaaactaagtgtgatggagagctcaaaatcacacgccgcagagccagtcagatcacacccgccagcctgccttgcatccagctctgcgctgcacagacagccacgaggggaccgcaacaaggaccacgagcgtctccgaggggctgtgagagacctgaaggaagagcggaccgcgctgcaggagcagctgctgcagagagatttggaggtgaagcagctcctgcaggcgaaggccgacctggagaaggagctggagtgcgcgagggagggcgaggaggagaggagagagcgagaggaggttttgagagaggagattcagacacttaccagcaagctccaagaattgcaagaaatgaagaaagaagagaaagaggattgcccggaagttcctcataaggcccaagagctcccagctcccactcccagcagcaggcactgcgagcaagactggccgccggattccagcgaggaggggctcccgcggccccgctccccctgctctgatgggagaagagacgccgcggccagagtcctgcaggcccagtggaaggtgtacaagcacaagaaaaaaaaggctgttctggatgaggcggctgtggtgcttcaggcagctttcaggggacatctcacgcggacaaagctcttagcaagcaaagcacatggctcagagccacccagcgtgccaggcctcccagaccagagctctcctgtgccccgcgttccgagccccatcgcccaggccacgggcagccctgtgcaggaggaggccatcgtcatcatccagtccgctctgcgggcacacctggcccgggccaggcacagtgctaccggtaaaagaaccaccaccgcagcttctaccaggaggagatcggcttcagccacacacggggacgcctcctccccacccttcctcgcagctcttcctgacccctctccctcagggccacaggccttggcacctctacctggggatgacgtcaactccgatgattccgacgatattgtcattgcaccgtctctgcccacgaagaactttccagtttaggtccccgtcactgtctccacgccgtgatggcagcgctgccgaggacataggaaccacgactggaaagataatttatcgtgttaggagaagaacgatgatacctacttaacacctcagcatctgcgtcgtgtctctttgtgcttttgtttgtggaaggagacccaaatgcctttactttattctctggggagggccagcggctcgcatccccctcatctccagctgcagctcggatggtggattttcagtgccaacagacacatctgccgtgaactcgcagatgccagggagccctgtagtgacacgttctctgacagcaccttgccgcctgcccacgaccttgaccgtgaggagctgctatccgcaaccagcgccgacaccatgccccctcttcctggtgacaccctcaacaaccaggatttgcaagggcctgctggcagtgcctacgctgtgccaactaccctgtctggtacagaccacggctgggtaagcacccttaaaagcaacagaaatgacgtctggaagctgaaatgtgaaactgtcaagatggcttaggagaggaaggagtggacccgctggtctttggcattttgtatttagaattattctaactttatacataatgtataggccgatcttttggaagggataaggttttcattcttgtgcaactcattattctcattattggccttttaaataaaaagttgttttgcagtgtg

SEQ ID NO: 401587 - DNA, 708 bp, Homo sapiens
tggagcaagcaggaagtgaactgagggccaccctgggaggaagccgactaggcgaattcacttactgaccggcctgggctgctctgagacatggaggaagccagtgaaggtggaggaaatgatcgtgtgcggaacctgcaaagtgaggtggagggagttaagaatattatgacccagaatgtggagcggatcctggcccggggggaaaacttggaacatctccgcaacaagacagaggatctggaagccacatctgagcacttcaagacgacatcgcagaaggtggctcgaaaattctggtggaagaacgtgaagatgattgtccttatctgcgtgattgtttttatcatcatcctcttcattgtgctctttgccactggtgccttctcttaagtaacagggaacctctcccacctgcccttctcttcagggacaaccctccataaatgtgtgccaagagggtctcctttcctgtcttcctctacagagaatgctgctcggtcctcctacccctcttcccgaggccctgctgccatgttgtatgccccagaaggtaccttggtcccccggaaggagagaaaaaagagagatggactgtggctgcatttcttgggtccttagagtgggctggagagacctagagggcccagcatgtggctgggaaactgttggtggccagtgggtaataaagacctttcagtatcccta

SEQ ID NO: 401588 - DNA, 697 bp, Homo sapiens
aaaggccaggctggtaccggcctgagagtgtatggatgaggcgaattcacttactgaccggcctgggctgctctgagacatggaggaagccagtgaaggtggaggaaatgatcgtgtgcggaacctgcaaagtgaggtggagggagttaagaatattatgacccagaatgtggagcggatcctggcccggggggaaaacttggaacatctccgcaacaagacagaggatctggaagccacatctgagcacttcaagacgacatcgcagaaggtggctcgaaaattctggtggaagaacgtgaagatgattgtccttatctgcgtgattgtttttatcatcatcctcttcattgtgctctttgccactggtgccttctcttaagtaacagggaacctctcccacctgcccttctcttcagggacaaccctccataaatgtgtgccaagagggtctcctttcctgtcttcctctacagagaatgctgctcggtcctcctacccctcttcccgaggccctgctgccatgttgtatgccccagaaggtaccttggtcccccggaaggagagaaaaaagagagatggactgtggctgcatttcttgggtccttagagtgggctggagagacctagagggcccagcatgtggctgggaaactgttggtggccagtgggtaataaagacctttcagtatcccta

SEQ ID NO: 401589 - DNA, 351 bp, Homo sapiens
ctactactactaaattcgcggcgctcgacctcttaagtaacagggaacctctcccacctgcccttctcttcagggacaaccctccataaatgtgtgccaagagggtctcctttcctgtcttcctctacagagaatgctgctcggtcctcctacccctcttcccgaggccctgctgccatgttgtatgccccagaaggtaccttggtcccccggaaggagagaaaaaagagagatggactgtggctgcatttcttgggtccttagagtgggctggagagacctagagggcccagcatgtggctgggaaactgttggtggccagtgggtaataaagacctttcagtatcccta

SEQ ID NO: 401590 - DNA, 473 bp, Homo sapiens
tggagcaagcaggaagtgaactgagggccaccctgggaggaagccgactaggcgaattcacttactgaccggcctgggctgctctgagacatggaggaagccagtgaaggtggaggaaatgatcgtgtgcggaacctgcaaagtgaggtggagggagttaagaatattatgacccagaatgtggagcggatcctggcccggggggaaaacttggaacatctccgcaacaagacagaggatctggaagccacaagaatgctgctcggtcctcctacccctcttcccgaggccctgctgccatgttgtatgccccagaaggtaccttggtcccccggaaggagagaaaaaagagagatggactgtggctgcatttcttgggtccttagagtgggctggagagacctagagggcccagcatgtggctgggaaactgttggtggccagtgggtaataaagacctttcagtatcccta

SEQ ID NO: 401591 - DNA, 985 bp, Homo sapiens
  misc_feature (743)..(743): n is a, c, g, or t
  misc_feature (745)..(745): n is a, c, g, or t
  misc_feature (748)..(748): n is a, c, g, or t
tggagcaagcaggaagtgaactgagggccaccctgggaggaagccgactaggcgaattcacttactgaccggcctgggctgctctgagacatggaggaagccagtgaaggtggaggaaatgatcgtgtgcggaacctgcaaagtgaggtggagggagttaagaatattatgacccagaatgtggagcggatcctggcccggggggaaaacttggaacatctccgcaacaagacagaggatctggaagccacatctgagcacttcaagacgacatcgcagaaggtggctcgaaaattctggtggaagaacgtgaagatgattgtccttatctgcgtgattgtttttatcatcatcctcttcattgtgctctttgccactggtgccttctcttaagtaacagggaacctctcccacctgcccttctcttcagggacaaccctccataaatgtgtgccaagagggtctcctttcctgtcttcctctacagagaatgctgctcggtcctcctacccctcttcccgaggccctgctgccatgttgtatgccccagaaggtaccttggtcccccggaaggagagaaaaaagagagatggactgtggctgcatttcttgggtccttagagtgggctggagagacctagagggcccagcatgtggctgggaaactgttggtggccagtgggtaataaagacctttcagtatccctaaaaaaaaaaaaaaaaaaaaaaaaaaaaaaaaaaananaanaaaaaaaaaaaaaaaaaaaaaaaaaaaaaaaaaaaaaaaaaaaaaaaaaaaaaaaaaaaaccttgtggcccgcttggcccaattgaattttaaactggacaaagtttatcctggcggcccaatttaggcttaatttgccacaatccccctatggggagcgttttaacattcaacggcccgggttttaaaacctgcggaactggaaccctggggtgtacccactttcccctttggctc

SEQ ID NO: 401592 - DNA, 665 bp, Homo sapiens
ctctctccacactgggacttactgaccggcctgggctgctctgagacatggaggaagccagtgaaggtggaggaaatgatcgtgtgcggaacctgcaaagtgaggtggagggagttaagaatattatgacccagaatgtggagcggatcctggcccggggggaaaacttggaacatctccgcaacaagacagaggatctggaagccacatctgagcacttcaagacgacatcgcagaaggtggctcgaaaattctggtggaagaacgtgaagatgattgtccttatctgcgtgattgtttttatcatcatcctcttcattgtgctctttgccactggtgccttctcttaagtaacagggaacctctcccacctgcccttctcttcagggacaaccctccataaatgtgtgccaagagggtctcctttcctgtcttcctctacagagaatgctgctcggtcctcctacccctcttcccgaggccctgctgccatgttgtatgccccagaaggtaccttggtcccccggaaggagagaaaaaagagagatggactgtggctgcatttcttgggtccttagagtgggctggagagacctagagggcccagcatgtggctgggaaactgttggtggccagtgggtaataaagacctttcagtatcccta

SEQ ID NO: 401593 - DNA, 869 bp, Homo sapiens
tggagcaagcaggaagtgaactgagggccaccctgggaggaagccgactaggcgaattcacttactgaccggcctgggctgctctgagacatggaggaagccagtgaaggtggaggaaatgatcgtgtgcggaacctgcaaagtgaggtggagggagttaagaatattatgacccagaatgtggagcggatcctggcccggggggaaaacttggaacatctccgcaacaagacagaggatctggaagccacatctgagcacttcaagacgacatcgcagaaggtggctcgaaaattctggtggaagaacgtgaagatgattgtccttatctgcgtgattgtttttatcatcatcctcttcattgtgctctttgccactggtgccttctcttaagtaacagggaacctctcccacctgcccttctcttcagggacaaccctccataaatgtgtgccaagagggtctcctttcctgtcttcctctacagagaatgctgctcggtcctcctacccctcttcccgaggccctgctgccatgttgtatgccccagaaggtaccttggtcccgcaggaatagagttggagcggtgccagcagcaggcgaacgaggtgacggaaattatgcgtaacaacttcggcaaggtcctggagcgtggtgtgaagctggccgaactgcagcagcgttcagaccaactcctggatatgagctcaaccttcaacaagactacacagaacctggcccagaagaagtgctgggagaacatccgttaccggatctgcgtggggctggtggtggttggtgtcctgctcatcatcctgattgtgctgctggtcgtctttctccctcagagcagtgacagcagtagtgcc

SEQ ID NO: 401594 - DNA, 596 bp, Homo sapiens
tggagcaagcaggaagtgaactgagggccaccctgggaggaagccgactaggcgaattcacttactgaccggcctgggctgctctgagacatggaggaagccagtgaaggtggaggaaatgatcgtgtgcggaacctgcaaagtgaggtggagggagttaagaatattatgacccagaatgtggagcggatcctggcccggggggaaaacttggaacatctccgcaacaagacagaggatctggaagccacatctgagcacttcaagacgacatcgcagaaggtggctcgaaaattctggtggaagaacgtgaagatgattgtccttatctgcgtgattgtttttatcatcatcctcttcattgtgctctttgccactggtgccttctcttaagtaacagggaacctctcccacctgcccttctcttcagggacaaccctccataaatgtgtgccaagagggtctcctttcctgtcttcctctacagagaatgctgctcggtcctcctacccctcttcccgaggccctgctgccatgttgtatgccccagaaggtaccttggtcccagagggctgtctggggtacgagctcgaatt

SEQ ID NO: 401595 - DNA, 841 bp, Homo sapiens
tggagcaagcaggaagtgaactgagggccaccctgggaggaagccgactaggcgaattcacttactgaccggcctgggctgctctgagacatggaggaagccagtgaaggtggaggaaatgatcgtgtgcggaacctgcaaagtgaggtggagggagttaagaatattatgacccagaatgtggagcggatcctggcccggggggaaaacttggaacatctccgcaacaagacagaggatctggaagccacaccaggggctgaggccagctgtttcagggaggaagtaactccaaagttgagcaaagtctggagcctcaagttctgtgttcagcggggaggctggctctggctttctgagtcctgtgtgaactcttggctcttggtctgagcacttcaagacgacatcgcagaaggtggctcgaaaattctggtggaagaacgtgaagatgattgtccttatctgcgtgattgtttttatcatcatcctcttcattgtgctctttgccactggtgccttctcttaagtaacagggaacctctcccacctgcccttctcttcagggacaaccctccataaatgtgtgccaagagggtctcctttcctgtcttcctctacagagaatgctgctcggtcctcctacccctcttcccgaggccctgctgccatgttgtatgccccagaaggtaccttggtcccccggaaggagagaaaaaagagagatggactgtggctgcatttcttgggtccttagagtgggctggagagacctagagggcccagcatgtggctgggaaactgttggtggccagtgggtaataaagacctttcagtatcccta

SEQ ID NO: 401596 - DNA, 538 bp, Homo sapiens
aaaggccaggctggtaccggcctgagagtgtatggatgaggcgaattcacttactgaccggcctgggctgctctgagacatgtctgagcacttcaagacgacatcgcagaaggtggctcgaaaattctggtggaagaacgtgaagatgattgtccttatctgcgtgattgtttttatcatcatcctcttcattgtgctctttgccactggtgccttctcttaagtaacagggaacctctcccacctgcccttctcttcagggacaaccctccataaatgtgtgccaagagggtctcctttcctgtcttcctctacagagaatgctgctcggtcctcctacccctcttcccgaggccctgctgccatgttgtatgccccagaaggtaccttggtcccccggaaggagagaaaaaagagagatggactgtggctgcatttcttgggtccttagagtgggctggagagacctagagggcccagcatgtggctgggaaactgttggtggccagtgggtaataaagacctttcagtatcccta

SEQ ID NO: 401597 - DNA, 480 bp, Homo sapiens
tcggtacccggtgtttatcgatgctctgagcacttcaagacgacatcgcagaaggtggctcgaaaattctggtggaagaacgtgaagatgattgtccttatctgcgtgattgtttttatcatcatcctcttcattgtgctctttgccactggtgccttctcttaagtaacagggaacctctcccacctgcccttctcttcagggacaaccctccataaatgtgtgccaagagggtctcctttcctgtcttcctctacagagaatgctgctcggtcctcctacccctcttcccgaggccctgctgccatgttgtatgccccagaaggtaccttggtcccccggaaggagagaaaaaagagagatggactgtggctgcatttcttgggtccttagagtgggctggagagacctagagggcccagcatgtggctgggaaactgttggtggccagtgggtaataaagacctttcagtatcccta

SEQ ID NO: 401598 - DNA, 792 bp, Homo sapiens
  misc_feature (496)..(496): n is a, c, g, or t
  misc_feature (498)..(498): n is a, c, g, or t
  misc_feature (501)..(501): n is a, c, g, or t
tggagcaagcaggaagtgaactgagggccaccctgggaggaagccgactaggcgaattcacttactgaccggcctgggctgctctgagacatggaggaagccagtgaaggtggaggaaatgatcgtgtgcggaacctgcaaagtgaggtggagggagttaagaatattatgacccagaatgtggagcggatcctggcccggggggaaaacttggaacatctccgcaacaagacagaggatctggaagccacatctgagcacttcaagacgacatcgcagaaggtggctcgaaaattctggtggaagaacgtgaagatgattgtccttatctgcgtgattgtttttatcatcatcctcttcattgtgctctttgccactggtgccttctcttaagtaacagggaacctctcccacctgcccttctcttcagggacaaccctccataaatgtgtgccaagaggaaaaaaaaaaaaaaaaaaaaaaaaaaaaaaaaaananaanaaaaaaaaaaaaaaaaaaaagagggggggggcggcccaaaggattacccccccgggggcgccccaggaaaggcggggccccccatgtatgcggtgggacacaagtgggcccccctaagaggaggggggccgtagaattataaccagagacggggggcgcccgggagcaaaaccgacgcccgtggagacgatggaaaaaaagcgggcaacccgagggagcactggtgggtgggaagaccccatcttgaccaagtggtggcggaacaacaattgtgggacagccctacggtaa

SEQ ID NO: 401599 - DNA, 654 bp, Homo sapiens
tggagcaagcaggaagtgaactgagggccaccctgggaggaagccgactaggcgaattcacttactgaccggcctgggctgctctgagacatggaggaagccagtgaaggtggaggaaatgatcgtgtgcggaacctgcaaagtgaggtggagggagttaagaatattatgacccagaatgtggagcggatcctggcccggggggaaaacttggaacatctccgcaacaagacagaggatctggaagccacatctgagcacttcaagacgacatcgcagaaggtggctcgtatcatcatcctcttcattgtgctctttgccactggtgccttctcttaagtaacagggaacctctcccacctgcccttctcttcagggacaaccctccataaatgtgtgccaagagggtctcctttcctgtcttcctctacagagaatgctgctcggtcctcctacccctcttcccgaggccctgctgccatgttgtatgccccagaaggtaccttggtcccccggaaggagagaaaaaagagagatggactgtggctgcatttcttgggtccttagagtgggctggagagacctagagggcccagcatgtggctgggaaactgttggtggccagtgggtaataaagacctttcagtatcccta

SEQ ID NO: 401600 - DNA, 1118 bp, Homo sapiens
  misc_feature (876)..(876): n is a, c, g, or t
  misc_feature (878)..(878): n is a, c, g, or t
  misc_feature (881)..(881): n is a, c, g, or t
tggagcaagcaggaagtgaactgagggccaccctgggaggaagccgactaggcgaattcacttactgaccggcctgggctgctctgagacatggaggaagccagtgaaggtggaggaaatgatcgtgtgcggaacctgcaaagtgaggtggagggagttaagaatattatgacccagaatgtggagcggatcctggcccggggggaaaacttggaacatctccgcaacaagacagaggatctggaagccacaccaggggctgaggccagctgtttcagggaggaagtaactccaaagttgagcaaagtctggagcctcaagttctgtgttcagcggggaggctggctctggctttctgagtcctgtgtgaactcttggctcttggtctgagcacttcaagacgacatcgcagaaggtggctcgaaaattctggtggaagaacgtgaagatgattgtccttatctgcgtgattgtttttatcatcatcctcttcattgtgctctttgccactggtgccttctcttaagtaacagggaacctctcccacctgcccttctcttcagggacaaccctccataaatgtgtgccaagagggtctcctttcctgtcttcctctacagagaatgctgctcggtcctcctacccctcttcccgaggccctgctgccatgttgtatgccccagaaggtaccttggtcccccggaaggagagaaaaaagagagatggactgtggctgcatttcttgggtccttagagtgggctggagagacctagagggcccagcatgtggctgggaaactgttggtggccagtgggtaataaagacctttcagtatccctaaaaaaaaaaaaaaaaaaaaaaaaaaaaaaaaaaananaanaaaaaaaaaaaaaaaaaaaaaaaaaaaaaaaaaaaaaaaaaaaaaaaaaaaaaaaaaaaaccttgtggcccgcttggcccaattgaattttaaactggacaaagtttatcctggcggcccaatttaggcttaatttgccacaatccccctatggggagcgttttaacattcaacggcccgggttttaaaacctgcggaactggaaccctggggtgtacccactttcccctttggctc

SEQ ID NO: 401601 - DNA, 825 bp, Homo sapiens
tggagcaagcaggaagtgaactgagggccaccctgggaggaagccgactaggcgaattcacttactgaccggcctgggctgctctgagacatggaggaagccagtgaaggtggaggaaatgatcgtgtgcggaacctgcaaagtgaggtggagggagttaagaatattatgacccagaatgtggagcggatcctggcccggggggaaaacttggaacatctccgcaacaagacagaggatctggaagccacagtgagacagggagcccactgggggctggaggaaaacagggagggagggaatttctttttggtggggcaaaatggacaggagggccagaagtttgacatttctgttgcctttcacctggtttgggagctgatgtgagctgagtctccacttctgaatctgctctgctccacagattgttatggatcccagggaatggatcccatgactggggcttgaggtggcagctcgcccatagaggcatgttctgagaccgaaagctcagtcagcccatgcattctcaggcttctctcccgggaaacttgttttccctttgaagcctgcccatgacaatcatctgggtctgaccttcccagggcagaaatattggctctgaggaaacccccgctgtggcctctagccttctctaggagctgttagacaaggggtgggaaattgctggcgtcttgctgagtaggctttaaaaacaagggggaaagagcagtgaaatgctttgatcccagggtcccctgctagatgaaggctaaaataatatctcccacacatcttgctagacctcattcttctctctctcca

SEQ ID NO: 401602 - DNA, 300 bp, Homo sapiens
cccccggaaggagagaaaaaagagagatggactgtggctgcatttcttgggtccttagagtgggctggagagacctagagggcccagcatgtggctgggaaactgttggtggccagtgggtaataaagacctttcagtatccctaatatgtgtgaggcactttctctcttcccattttgcctttggcttttctatttcttttcttcctgaggataccttctggctaaaattctctcatctgaggtccaagttgttggaagggcaaagagtatatgtttggagaagaaagttggagccccc

SEQ ID NO: 401603 - DNA, 667 bp, Homo sapiens
cctcctaactaatgagacacttctgtgtacctttaacttattgtcagcgagagaggaagccagtgaaggtggaggaaatgatcgtgtgcggaacctgcaaagtgaggtggagggagttaagaatattatgacccagaatgtggagcggatcctggcccggggggaaaacttggaacatctccgcaacaagacagaggatctggaagccacatctgagcacttcaagacgacatcgcagaaggtggctcgaaaattctggtggaagaacgtgaagatgattgtccttatctgcgtgattgtttttatcatcatcctcttcattgtgctctttgccactggtgccttctcttaagtaacagggaacctctcccacctgcccttctcttcagggacaaccctccataaatgtgtgccaagagggtctcctttcctgtcttcctctacagagaatgctgctcggtcctcctacccctcttcccgaggccctgctgccatgttgtatgccccagaaggtaccttggtcccccggaaggagagaaaaaagagagatggactgtggctgcatttcttgggtccttagagtgggctggagagacctagagggcccagcatgtggctgggaaactgttggtggccagtgggtaataaagacctttcagtatcccta

SEQ ID NO: 401604 - DNA, 696 bp, Homo sapiens
tggagcaagcaggaagtgaactgagggccaccctgggaggaagccgactaggcgaattcacttactgaccggcctgggctgctctgagacatggaggaagccagtgaaggtggaggaaatgatcgtgtgcggaacctgcaaagtgaggtggagggagttaagaatattatgacccagaatgtggagcggatcctggcccggggggaaaacttggaacatctccgcaacaagacagaggatctggaagccacatctgagcacttcaagacgacatcgcagaaggtggctcgaaaattctggtggaagaacgtgaagatgattgtccttatctgcgtgattgtttttatcatcatcctcttcattgtgctctttgccactggtgccttctcttaagtaacagggaacctctcccacctgcccttctcttcagggacaaccctccataaatgtgtgccaagagggtctcctttcctgtcttcctctacagagaatgctgctcggtcctcctacccctcttcccgaggccctgctgccatgttgtatgccccagaaggtaccttggtcccagacctagagggcccagcatgtggctgggaaactgttggtggccagtgggtaataaagacctttcagtatccctaaaaaaaaaaaacagagagcaaaactccatatcaatttggctcctttttggcctca

SEQ ID NO: 401605 - DNA, 687 bp, Homo sapiens
aacttaggctaggtacgaggctgggtgtaggcgaattcacttactgaccggcctgggctgctctgagacatggaggaagccagtgaaggtggaggaaatgatcgtgtgcggaacctgcaaagtgaggtggagggagttaagaatattatgacccagaatgtggagcggatcctggcccggggggaaaacttggaacatctccgcaacaagacagaggatctggaagccacatctgagcacttcaagacgacatcgcagaaggtggctcgaaaattctggtggaagaacgtgaagatgattgtccttatctgcgtgattgtttttatcatcatcctcttcattgtgctctttgccactggtgccttctcttaagtaacagggaacctctcccacctgcccttctcttcagggacaaccctccataaatgtgtgccaagagggtctcctttcctgtcttcctctacagagaatgctgctcggtcctcctacccctcttcccgaggccctgctgccatgttgtatgccccagaaggtaccttggtcccccggaaggagagaaaaaagagagatggactgtggctgcatttcttgggtccttagagtgggctggagagacctagagggcccagcatgtggctgggaaactgttggtggccagtgggtaataaagacctttcagtatcccta

SEQ ID NO: 401606 - DNA, 763 bp, Homo sapiens
tggagcaagcaggaagtgaactgagggccaccctgggaggaagccgactaggcgaattcacttactgaccggcctgggctgctctgagacatggaggaagccagtgaaggtggaggaaatgatcgtgtgcggaacctgcaaagtgaggtggagggagttaagaatattatgacccagaatgtggagcggatcctggcccggggggaaaacttggaacatctccgcaacaagacagaggatctggaagccacatctgagcacttcaagacgacatcgcagaaggtggctcgaaaattctggtggaagaacgtgaagatgattgtccttatctgcgtgattgtttttatcatcatcctcttcattgtgctctttgccactggtgccttctcttaagtaacagggaacctctcccacctgcccttctcttcagggacaaccctccataaatgtgtgccaagagggtctcctttcctgtcttcctctacagagaatgctgctcggtcctcctacccctcttcccgaggccctgctgccatgttgtatgccccagaaggtaccttggtcccccggaaggagagaaaaaagagagatggactgtggctgcatttcttgggtccttagagtgggctggagagacctagagggcccagcatgtggctgggaaactgttggtggccagtgggtaataaagacctttcagtatccctaaaaaaaaaaaacagagagcaaaactccatatcaatttggctcctttttggcctca

SEQ ID NO: 401607 - DNA, 531 bp, Homo sapiens
tcacgcagagcattcgcctctcccctaacccaggccacctttccccataagagccctgcacttggcaaacagccatcaaataactgactccactccaaacagcccacccaatccatctacatctttccaggcatgggacatggacagtttttggctatttcaagtcttctctttccccctggatgtcagtaacagcagcagctaatacttctcaaatgcttcctctgtaccaggcactgtgcttagtgctttgcacaagtttctgttgtcctcatgctggactacagtcaggtattattagcatctctattttgcaggtgaagaaacaagcccagagaggttaagtaccttgtccaaggtctcacagctctagctggcagcccaggaactgaaccccagcagtccaactctacagagatgctcttaactataggtacatatgacctctggggtgtgggcttcctgatcacctactgtatgctcagtaggtgcccttagggactggactccagctctgtacttagggaccct

SEQ ID NO: 401608 - DNA, 253 bp, Homo sapiens
cccctcttggctacaggtactttaattactacaggagatcatagtagctacctcactggtcataagggttaaataagataatgtataagacagttagcacagggaatgagggaattgtcagggaataagtacctggtaattagtagcttttactattatctaataatagttcttgatatttacttagtgctttctaatgtgaaccatacactcctgtgtgcttatctccttgacaattgggtggaaatggcat

SEQ ID NO: 401609 - DNA, 372 bp, Homo sapiens
tgaaggttaaggaaaaacaactggatgagggaggtggggcagtgggagagctgaaaagtcaccagatctgttaagctgcggtcagacctaagggaggatgtggctgagaagctgacttttgatgaactcctgtctttactctgatgaaataaacaaggaagcctagaatgaagggcaggcagcccaagtgaattaaaagcattttgaggcatcttgccaagttctatttactcttatttcattaaaaatacagaaagagtagtaaatacaagattcagccttgctcggtttcaggatgtgggaggagaaatcatgcagctgtcttacatgaatctgctagaaagaagcaggtcacaggtgtgatctgtgtgg

SEQ ID NO: 401610 - DNA, 354 bp, Homo sapiens
ttgccgtgtagcaaatcaccacatattttacagcttgaaacaggtttatgagctcaaagttttgtaggtcaaaagtcagggcaggctcaactggggtctgtactctgggtctctgggtcaggctcaactggagtctgcactcccggtctccaggcctagcattaaggagtcagcggccaggctcttcttagaggctctgggagggaacccactccccagctcacccagttgccagtagaattcagctctgtagactgtagaatgggcccacttcccccatccttgctagtggtggcaggagtcactctcaggtcccaggggccactctctggacatgcacatggtcccctctgt

SEQ ID NO: 401611 - DNA, 634 bp, Homo sapiens
ccaaaagttgccaaatgcccccaggggcagaatcggccccaagtgagccccctactctgcacggaataacctgtggattttgatgtttccctgaccctgggttcaggccagtctctacccagggcagaccccacttgtgctgtccatatggcattttacagagtcccatttaaaaaaagaaatccccaggccgggcgcagtggctcacatctgtaatcccagcactttgagaggcgaaggcgggcaggtctcgagaccaggagttcgagaccggcctggcaaacatggcgaaacccccaactccaccaaaagtacaaaaattagctgggcacattggctcatgcctgtgatcccagcactttaggaggccgaggcgggcagatcacttgatgtcaggagttggagagcagcctggccaacatggtgaaacctcatctctactaaaaatacaaaaattggctgggcatggtggcgcgtgcctatagtctccgctacttgagaggctgaggcaggagaatcacttgaacccaggaggcagaggttgcagtgagccaagatcttataggagcaagactccctctctcaaaaaaaaaaaaaaagaggtcgctgaaagtgggagaactgccgccaacct

SEQ ID NO: 401612 - DNA, 106 bp, Homo sapiens
ggtaggtggggtgtctgtacttagagaacagaggagccctgtggttctttgctgggacagtcaccccaggagaggagactcaggcctcaggcacgccgagcccctg

SEQ ID NO: 401613 - DNA, 480 bp, Homo sapiens
gcgatcctctaacttgtgggggatttccataaaacagctgaatctctcttgggtcatctgtggcaaaagccagacacgtgctcacccgcctgggagccaatagtaacttttgcaaacgctgcctccggaaaccccacggtttgagggctgctgctttaggaacaacacagaaataacgtcttttaacagaataaaacaaaacatacggacgggatagtgagaaagcctttgtccttcgcagtggggagaggtgttaaaggtgaaccgaaaagagtatgggaaactcatgtaaaatacctttacagttccccgggaagaagggggcggagatgggctcgggagcgtctctggccctttaaggaggagggacagacataagagtctgtacctttaagagtctctttgtctggaaaccttcttatttaccctcctgtgcttcaaccaaacttcgaccagctattcacaacgtccccctacgcc

SEQ ID NO: 401614 - DNA, 462 bp, Homo sapiens
ggaacagatagaaagggagtcgcagcagctctgctgtggggggatggggaagggaactccagcagcatatcatgggtgagggaaacagactacagaaaccgccaccttccagggtcagaccaatgagagccaagcaacctgcttaaaaactctgctccttaggaatcttccccagtgactaggatttaattgtttccttttctgctaacccctgttcacacatacatagtttgcattccatcatattttgtttatgcctctattacagccagtgattatttctgacaaaaagaaatgtttaaaggtgtcttcatgatgtccattgtctccacttctattcaacgttgtactggtcctggccagtgcaatacgaaaataaaaggaagcaaaagccacacagataggaaagaaagaagtaatattgtcggccaggcatggtggctcaggcctgtaatcccagca

SEQ ID NO: 401615 - DNA, 380 bp, Homo sapiens
cagagaatgtgtgctccataactggagtgctgcttggcattagaaggggcacacacgcacaatgacgcggacagagctcaagtcatcaagctgacatccatgtatcggtgcaagaagccggcacaaaaaagtatattccctactaccccatttacataaaactgcagaagatgccagctggtcttaatgatgggttccataagccggttgccaggggatgggggaggggaggagagactgtccaaggggcaaagtgaacttttgggaggaatggaaatgccctaccttgattatggtggtggtttcatgttttcatatgtcaaaattcatgaaagtgtacacttaaaaccttgattaaaaagagtaactttggccaggca

SEQ ID NO: 401616 - DNA, 395 bp, Homo sapiens
ctggcacttggtaggtgttcaataaatagtaccgattgcggtggctgaaggcagcccccaaggtgggaaggcacatgggatgtgtggggagcagtaagtccatcagctcaatagcaagggagtgcttgaaaggtttgggatagacatcagattgtggtgggcagcctcaagataaactgcttaaactttatcaataaaacaaaaagtttctgggctcaggagtcacatgtgttgttgtataaaaaccactctaacaacagtgtgtggtagttaggaaagagacaacaggagcagaagaccagttaggaaacttcttatgaggaagaggagatttattaagccccttcttttaggctaggaggtttcctaatacagaattatctctttaatctgca

SEQ ID NO: 401617 - DNA, 365 bp, Homo sapiens
ctcctgagttgctgggactgcaggcttgtgccaccatgcctggcttctgcagggctttttaatccagtggattccctgggaattagattcagtcccaaccggagacctgaacaccacatcacagtgtctaccacaaccagggtccacagtctggcttcagggatgaccagggatctctgaagaggaaagcagcatccagcatgtgtgtgcatttacatgtttttctgggagacagtgtccttgacccccaaaagattaagaatcattggtctatggaaagccagactcattcaaaaccgtgtgatcagagatgtacatggtagttgttcaacaaatataaaaggacggatggatggataatcgat

SEQ ID NO: 401618 - DNA, 785 bp, Homo sapiens
aagagtcaaggatgattccaagggttggagcccaagcaactagacggatggtgctacgtttaatggaaaaagaggagacaaaggaagagcagacctgggggcagaggaaatctggagttcagctttggatattctgagtttgagatgagactgtcaaacagagcgtaaagtaggaagcctgataggaaagtctagaggtcagggagaaggtgtgagctggagatccatatttgggagttatcagcatgagagcttttcggatgttcttgatcagctagtggaatttttctccacccagctgcatgactgtttactctggagcaaggattcctgggcgtaaacctaactcctccactcctcaaaggtctgatcttggacaggctactcaactgctctcagtgtctgtatccccaaaagtgcctacttcttttattatgaggaaaaaatgaggcaattcgtgttaattaccttgcacatagtaataagcactccctatataataaccattataatcccctcccttcctctctccacctcttactaccttgctaagcttggtatcttcaacttcccttttttctcacctcatattcaactcatccctcaccctgagtgcccctggatcactgtccacgccagtgcctcactgcccctagagcaatcctataaacagtgttgattccaactgaataggtcgcaagcttctattttctactctcagaatatttcttaaatctgcctccctctctttgttttctcattatttcccatctgagttcccaata

SEQ ID NO: 401619 - DNA, 709 bp, Homo sapiens
catcttctgagccagtggtgtgagcaggtgggagactgctatggattgtgtggttggaggtggtggagccatgcaggtgatggtctgggcatgcactcgggactctgtgtcaccgagagttgggtctaggggcgagtagagaaggtctggcattgccatgcaaaagatggagccagttgggagtgggtgcataggagttctggaaagaaactgagaaggacagggcagagtgggaaggacacccgggaaagagtggttcccagacaggagggtgaggagtcggatagggcgccaaggcagccaggtacactttgcagccagattcacagctttgtcattactgcttccaggcttcataaagcagcagagaccccctttatgggcagagtcatgcccagactcctcagggatatagtgggtgacagtgcagcctcctcccagtgcctggttcatcccttgcagcctcgatgatatctgaagcccatgagcacccccagggaggtggagtgacaggggaggactcagagcgagctcaggactggtatccggatgcttagcccagaacccgccacacggaatctgagtcctctcccaaaactggatctcagcaaacttcccttgaaccactgcctgagtattcttgagaattccagctcctgagttacagacaagcacggagcctttcctcaaatctgcatcccctcctcct

SEQ ID NO: 401620 - DNA, 2520 bp, Homo sapiens
gttggcaaggctggtttcaaactcctaacctcaagtgatctgcctgcctcggcctcccaaagtgctgggattacaggcatgagccacctcacccagctagttttttattattagtagagacagggtttcaccacgttggccaggctggtctcaaactcctgacgtcagatgatccgcccgcctcgacctcctgaagtgccggcattacagacgtgagccaccgcacccggcgccctgtagcctcttgatgtttgactcccctgagaagagcaacagaagaaagtcaaaatggctttttgctaggcttcctgccatctttaccaagttgagattatccgggttctggcattaacagagtttgaggaaagcgggtcaagtctaccgcgccctaaccttggaccccgcctgcaggctgactttcgagtcacacgccagagcacggcgacccctaaggtcgcagcccggcttcgcaaggcacctccttctaacgcgtcggtcgaactcgcgcgcccgcgagcagccggactacatctcccaggaagctgtgcgccgtccagctgtcctgcccttggtcgcgaaggactacattacccggtgatatcttgcgggaggcggttgccagacctcaagcgcacaaccattggtccagcgtctggcggggagctgcacggtgattggcccaggagcccgccagtttcgtccgagctcagtagagttttgctgttaagactgcgcgaggagctagagagagcggagagcgcggagccgggccgcacccgccgagccgtgaaaaaagtacatctcctggaagggatgctttttagctgagctctggtggatgagaggagctagccttgaaaaacttgatactgatggacattgtgtgggccagaggcagggatggttggctatgaccccaaaccagatggcaggaataacaccaagttccaggtggcagtggctgggtctgtgtctggacttgttactcgggcgctgatcagtcccttcgacgtcatcaagatccgtttccagcttcagcatgagcgcctgtctcgcagtgaccccagcgcaaagtaccatggcatcctccaggcctctaggcagattctgcaggaggagggtccgacagctttctggaaaggacacgtcccagctcagattctctccataggctatggagctgtccaattcttgtcatttgaaatgctgacggagctggtccacagaggcagcgtgtacgacgcccgggaattctcagtgcactttgtatgtggtggcctggctgcctgtatggccaccctcactgtgcaccccgtggatgttctgcgcacccgctttgcagctcagggtgagcccaaggtctataatacgctgcgccacgccgtggggaccatgtataggagcgaaggcccccaggttttctacaaaggcttggctcccaccttgatcgccatcttcccctacgccgggctgcagttctcttgctacagctccttgaagcacctgtacaagtgggccataccagccgaaggaaagaaaaatgagaacctccaaaacctgctttgtggcagtggagctggtgtcatcagcaagaccctgacatatccgctggacctcttcaagaagcggctacaggttggagggtttgagcatgccagagctgcctttggccaggtacggagatacaagggcctcatggactgtgccaagcaggtgctacaaaaggaaggcgccctgggcttcttcaagggcctgtcccccagcttgctgaaggctgccctctccacaggcttcatgttcttctcgtatgaattcttctgtaatgtcttccactgcatgaacaggacagccagccagcgctgagcgcaggaaggaccccaggtcttccctggaggcagcctcctgaaggaaggaagattcagtctccactgagaggtgccgtctggcccttccctgcaggccagctgccccaagcggggtagcagccttgaacccacccagctgggacaccaccagaaggtccagggctctccccatgagagaatcagagggaatgcaggacgtggtctatggtgagccaacgacacagtgagaaggagcaggaagttgctgtttctcctctgaccagcccacactgcaaaggaaacagacgccatcctacacctatcagccctgcctgccaggagaacagaacacactcctggtctggatggggctgctgcttgagtgcagagggctgcggtaggccctttgcaggagtcaggtccctacacttggcctgtttttccaacctatttaatagacattaaagctaaacacacattccttatcttactccatctcccctggcacatctgcctactcacaaagtatgagggaaaggactcctgccttcctcaaatcccatgttctccatagcggcagcccttggcagctctgcttctagtgctgggggagactccaggctgagccagtcactttctggcctgtgccgattctacccaagtcgtactagcctat

SEQ ID NO: 401621 - DNA, 2446 bp, Homo sapiens
gttggcaaggctggtttcaaactcctaacctcaagtgatctgcctgcctcggcctcccaaagtgctgggattacaggcatgagccacctcacccagctagttttttattattagtagagacagggtttcaccacgttggccaggctggtctcaaactcctgacgtcagatgatccgcccgcctcgacctcctgaagtgccggcattacagacgtgagccaccgcacccggcgccctgtagcctcttgatgtttgactcccctgagaagagcaacagaagaaagtcaaaatggctttttgctaggcttcctgccatctttaccaagttgagattatccgggttctggcattaacagagtttgaggaaagcgggtcaagtctaccgcgccctaaccttggaccccgcctgcaggctgactttcgagtcacacgccagagcacggcgacccctaaggtcgcagcccggcttcgcaaggcacctccttctaacgcgtcggtcgaactcgcgcgcccgcgagcagccggactacatctcccaggaagctgtgcgccgtccagctgtcctgcccttggtcgcgaaggactacattacccggtgatatcttgcgggaggcggttgccagacctcaagcgcacaaccattggtccagcgtctggcggggagctgcacggtgattggcccaggagcccgccagtttcgtccgagctcagtagagttttgctgttaagactgcgcgaggagctagagagagcggagagcgcggagccgggccgcacccgccgagccgtcttgatactgatggacattgtgtgggccagaggcagggatggttggctatgaccccaaaccagatggcaggaataacaccaagttccaggtggcagtggctgggtctgtgtctggacttgttactcgggcgctgatcagtcccttcgacgtcatcaagatccgtttccagcttcagcatgagcgcctgtctcgcagtgaccccagcgcaaagtaccatggcatcctccaggcctctaggcagattctgcaggaggagggtccgacagctttctggaaaggacacgtcccagctcagattctctccataggctatggagctgtccaattcttgtcatttgaaatgctgacggagctggtccacagaggcagcgtgtacgacgcccgggaattctcagtgcactttgtatgtggtggcctggctgcctgtatggccaccctcactgtgcaccccgtggatgttctgcgcacccgctttgcagctcagggtgagcccaaggtctataatacgctgcgccacgccgtggggaccatgtataggagcgaaggcccccaggttttctacaaaggcttggctcccaccttgatcgccatcttcccctacgccgggctgcagttctcttgctacagctccttgaagcacctgtacaagtgggccataccagccgaaggaaagaaaaatgagaacctccaaaacctgctttgtggcagtggagctggtgtcatcagcaagaccctgacatatccgctggacctcttcaagaagcggctacaggttggagggtttgagcatgccagagctgcctttggccaggtacggagatacaagggcctcatggactgtgccaagcaggtgctacaaaaggaaggcgccctgggcttcttcaagggcctgtcccccagcttgctgaaggctgccctctccacaggcttcatgttcttctcgtatgaattcttctgtaatgtcttccactgcatgaacaggacagccagccagcgctgagcgcaggaaggaccccaggtcttccctggaggcagcctcctgaaggaaggaagattcagtctccactgagaggtgccgtctggcccttccctgcaggccagctgccccaagcggggtagcagccttgaacccacccagctgggacaccaccagaaggtccagggctctccccatgagagaatcagagggaatgcaggacgtggtctatggtgagccaacgacacagtgagaaggagcaggaagttgctgtttctcctctgaccagcccacactgcaaaggaaacagacgccatcctacacctatcagccctgcctgccaggagaacagaacacactcctggtctggatggggctgctgcttgagtgcagagggctgcggtaggccctttgcaggagtcaggtccctacacttggcctgtttttccaacctatttaatagacattaaagctaaacacacattccttatcttactccatctcccctggcacatctgcctactcacaaagtatgagggaaaggactcctgccttcctcaaatcccatgttctccatagcggcagcccttggcagctctgcttctagtgctgggggagactccaggctgagccagtcactttctggcctgtgccgattctacccaagtcgtactagcctat

SEQ ID NO: 401622 - DNA, 2650 bp, Homo sapiens
gttggcaaggctggtttcaaactcctaacctcaagtgatctgcctgcctcggcctcccaaagtgctgggattacaggcatgagccacctcacccagctagttttttattattagtagagacagggtttcaccacgttggccaggctggtctcaaactcctgacgtcagatgatccgcccgcctcgacctcctgaagtgccggcattacagacgtgagccaccgcacccggcgccctgtagcctcttgatgtttgactcccctgagaagagcaacagaagaaagtcaaaatggctttttgctaggcttcctgccatctttaccaagttgagattatccgggttctggcattaacagagtttgaggaaagcgggtcaagtctaccgcgccctaaccttggaccccgcctgcaggctgactttcgagtcacacgccagagcacggcgacccctaaggtcgcagcccggcttcgcaaggcacctccttctaacgcgtcggtcgaactcgcgcgcccgcgagcagccggactacatctcccaggaagctgtgcgccgtccagctgtcctgcccttggtcgcgaaggactacattacccggtgatatcttgcgggaggcggttgccagacctcaagcgcacaaccattggtccagcgtctggcggggagctgcacggtgattggcccaggagcccgccagtttcgtccgagctcagtagagttttgctgttaagactgcgcgaggagctagagagagcggagagcgcggagccgggccgcacccgccgagccgtcccttctccctgtgatcagttaccaactacctgttgatgtgtgtggttacagacttctttctatgctttgtacaactctacagaccgtatgtaggtattactgtttttgttttttgtttttacaaaaaaggaaaaaagtacatctcctggaagggatgctttttagctgagctctggtggatgagaggagctagccttgaaaaacttgatactgatggacattgtgtgggccagaggcagggatggttggctatgaccccaaaccagatggcaggaataacaccaagttccaggtggcagtggctgggtctgtgtctggacttgttactcgggcgctgatcagtcccttcgacgtcatcaagatccgtttccagcttcagcatgagcgcctgtctcgcagtgaccccagcgcaaagtaccatggcatcctccaggcctctaggcagattctgcaggaggagggtccgacagctttctggaaaggacacgtcccagctcagattctctccataggctatggagctgtccaattcttgtcatttgaaatgctgacggagctggtccacagaggcagcgtgtacgacgcccgggaattctcagtgcactttgtatgtggtggcctggctgcctgtatggccaccctcactgtgcaccccgtggatgttctgcgcacccgctttgcagctcagggtgagcccaaggtctataatacgctgcgccacgccgtggggaccatgtataggagcgaaggcccccaggttttctacaaaggcttggctcccaccttgatcgccatcttcccctacgccgggctgcagttctcttgctacagctccttgaagcacctgtacaagtgggccataccagccgaaggaaagaaaaatgagaacctccaaaacctgctttgtggcagtggagctggtgtcatcagcaagaccctgacatatccgctggacctcttcaagaagcggctacaggttggagggtttgagcatgccagagctgcctttggccaggtacggagatacaagggcctcatggactgtgccaagcaggtgctacaaaaggaaggcgccctgggcttcttcaagggcctgtcccccagcttgctgaaggctgccctctccacaggcttcatgttcttctcgtatgaattcttctgtaatgtcttccactgcatgaacaggacagccagccagcgctgagcgcaggaaggaccccaggtcttccctggaggcagcctcctgaaggaaggaagattcagtctccactgagaggtgccgtctggcccttccctgcaggccagctgccccaagcggggtagcagccttgaacccacccagctgggacaccaccagaaggtccagggctctccccatgagagaatcagagggaatgcaggacgtggtctatggtgagccaacgacacagtgagaaggagcaggaagttgctgtttctcctctgaccagcccacactgcaaaggaaacagacgccatcctacacctatcagccctgcctgccaggagaacagaacacactcctggtctggatggggctgctgcttgagtgcagagggctgcggtaggccctttgcaggagtcaggtccctacacttggcctgtttttccaacctatttaatagacattaaagctaaacacacattccttatcttactccatctcccctggcacatctgcctactcacaaagtatgagggaaaggactcctgccttcctcaaatcccatgttctccatagcggcagcccttggcagctctgcttctagtgctgggggagactccaggctgagccagtcactttctggcctgtgccgattctacccaagtcgtactagcctat

SEQ ID NO: 401623 - DNA, 2785 bp, Homo sapiens
gttggcaaggctggtttcaaactcctaacctcaagtgatctgcctgcctcggcctcccaaagtgctgggattacaggcatgagccacctcacccagctagttttttattattagtagagacagggtttcaccacgttggccaggctggtctcaaactcctgacgtcagatgatccgcccgcctcgacctcctgaagtgccggcattacagacgtgagccaccgcacccggcgccctgtagcctcttgatgtttgactcccctgagaagagcaacagaagaaagtcaaaatggctttttgctaggcttcctgccatctttaccaagttgagattatccgggttctggcattaacagagtttgaggaaagcgggtcaagtctaccgcgccctaaccttggaccccgcctgcaggctgactttcgagtcacacgccagagcacggcgacccctaaggtcgcagcccggcttcgcaaggcacctccttctaacgcgtcggtcgaactcgcgcgcccgcgagcagccggactacatctcccaggaagctgtgcgccgtccagctgtcctgcccttggtcgcgaaggactacattacccggtgatatcttgcgggaggcggttgccagacctcaagcgcacaaccattggtccagcgtctggcggggagctgcacggtgattggcccaggagcccgccagtttcgtccgagctcagtagagttttgctgttaagactgcgcgaggagctagagagagcggagagcgcggagccgggccgcacccgccgagccgtgtgagtaacctctacctccgtccttctcgccgccctctcggggaccagcaccctcgctcctcagggtggtcgggagggagcacacgcacccgggcgctcacgagagggcggggactgtgtacacacgtgtcacaccagaccagagaagcatctccagggacaccggcggccgagccccgcgcacgcccttgagcacctgagctccagggcgtcccctcggactcaaggagaaaaaacacaccccgaggcacacgtggacacctaggaaaaaagtacatctcctggaagggatgctttttagctgagctctggtggatgagaggagctagccttgaaaaacttgatactgatggacattgtgtgggccagaggcagggatggttggctatgaccccaaaccagatggcaggaataacaccaagttccaggtggcagtggctgggtctgtgtctggacttgttactcgggcgctgatcagtcccttcgacgtcatcaagatccgtttccagcttcagcatgagcgcctgtctcgcagtgaccccagcgcaaagtaccatggcatcctccaggcctctaggcagattctgcaggaggagggtccgacagctttctggaaaggacacgtcccagctcagattctctccataggctatggagctgtccaattcttgtcatttgaaatgctgacggagctggtccacagaggcagcgtgtacgacgcccgggaattctcagtgcactttgtatgtggtggcctggctgcctgtatggccaccctcactgtgcaccccgtggatgttctgcgcacccgctttgcagctcagggtgagcccaaggtctataatacgctgcgccacgccgtggggaccatgtataggagcgaaggcccccaggttttctacaaaggcttggctcccaccttgatcgccatcttcccctacgccgggctgcagttctcttgctacagctccttgaagcacctgtacaagtgggccataccagccgaaggaaagaaaaatgagaacctccaaaacctgctttgtggcagtggagctggtgtcatcagcaagaccctgacatatccgctggacctcttcaagaagcggctacaggttggagggtttgagcatgccagagctgcctttggccaggtacggagatacaagggcctcatggactgtgccaagcaggtgctacaaaaggaaggcgccctgggcttcttcaagggcctgtcccccagcttgctgaaggctgccctctccacaggcttcatgttcttctcgtatgaattcttctgtaatgtcttccactgcatgaacaggacagccagccagcgctgagcgcaggaaggaccccaggtcttccctggaggcagcctcctgaaggaaggaagattcagtctccactgagaggtgccgtctggcccttccctgcaggccagctgccccaagcggggtagcagccttgaacccacccagctgggacaccaccagaaggtccagggctctccccatgagagaatcagagggaatgcaggacgtggtctatggtgagccaacgacacagtgagaaggagcaggaagttgctgtttctcctctgaccagcccacactgcaaaggaaacagacgccatcctacacctatcagccctgcctgccaggagaacagaacacactcctggtctggatggggctgctgcttgagtgcagagggctgcggtaggccctttgcaggagtcaggtccctacacttggcctgtttttccaacctatttaatagacattaaagctaaacacacattccttatcttactccatctcccctggcacatctgcctactcacaaagtatgagggaaaggactcctgccttcctcaaatcccatgttctccatagcggcagcccttggcagctctgcttctagtgctgggggagactccaggctgagccagtcactttctggcctgtgccgattctacccaagtcgtactagcctat

SEQ ID NO: 401624 - DNA, 2462 bp, Homo sapiens
gttggcaaggctggtttcaaactcctaacctcaagtgatctgcctgcctcggcctcccaaagtgctgggattacaggcatgagccacctcacccagctagttttttattattagtagagacagggtttcaccacgttggccaggctggtctcaaactcctgacgtcagatgatccgcccgcctcgacctcctgaagtgccggcattacagacgtgagccaccgcacccggcgccctgtagcctcttgatgtttgactcccctgagaagagcaacagaagaaagtcaaaatggctttttgctaggcttcctgccatctttaccaagttgagattatccgggttctggcattaacagagtttgaggaaagcgggtcaagtctaccgcgccctaaccttggaccccgcctgcaggctgactttcgagtcacacgccagagcacggcgacccctaaggtcgcagcccggcttcgcaaggcacctccttctaacgcgtcggtcgaactcgcgcgcccgcgagcagccggactacatctcccaggaagctgtgcgccgtccagctgtcctgcccttggtcgcgaaggactacattacccggtgatatcttgcgggaggcggttgccagacctcaagcgcacaaccattggtccagcgtctggcggggagctgcacggtgattggcccaggagcccgccagtttcgtccgagctcagtagagttttgctgttaagactgcgcgaggagctagagagagcggagagcgcggagccgggccgcacccgccgagccgtgaaaaaagtacatctcctggaagggatgctttttagctgagctctggtggatgagaggagctagccttgaaaaacttgatactgatggacattgtgtgggccagaggcagggatggttggctatgaccccaaaccagatggcaggaataacaccaagttccaggtggcagtggctgggtctgtgtctggacttgttactcgggcgctgatcagtcccttcgacgtcatcaagatccgtttccagcttcagcatgagcgcctgtctcgcagtgaccccagcgcaaagtaccatggcatcctccaggcctctaggcagattctgcaggaggagggtccgacagctttctggaaaggacacgtcccagctcagattctctccataggctatggagctgtccaattcttgtcatttgaaatgctgacggagctggtccacagaggcagcgtgtacgacgcccgggaattctcagtgcactttgtatgtggtggcctggctgcctgtatggccaccctcactgtgcaccccgtggatgttctgcgcacccgctttgcagctcagggtgagcccaaggtctataatacgctgcgccacgccgtggggaccatgtataggagcgaaggcccccaggttttctacaaaggcttggctcccaccttgatcgccatcttcccctacgccgggctgcagttctcttgctacagctccttgaagcacctgtacaagtgggccataccagccgaaggaaagaaaaatgatatccgctggacctcttcaagaagcggctacaggttggagggtttgagcatgccagagctgcctttggccaggtacggagatacaagggcctcatggactgtgccaagcaggtgctacaaaaggaaggcgccctgggcttcttcaagggcctgtcccccagcttgctgaaggctgccctctccacaggcttcatgttcttctcgtatgaattcttctgtaatgtcttccactgcatgaacaggacagccagccagcgctgagcgcaggaaggaccccaggtcttccctggaggcagcctcctgaaggaaggaagattcagtctccactgagaggtgccgtctggcccttccctgcaggccagctgccccaagcggggtagcagccttgaacccacccagctgggacaccaccagaaggtccagggctctccccatgagagaatcagagggaatgcaggacgtggtctatggtgagccaacgacacagtgagaaggagcaggaagttgctgtttctcctctgaccagcccacactgcaaaggaaacagacgccatcctacacctatcagccctgcctgccaggagaacagaacacactcctggtctggatggggctgctgcttgagtgcagagggctgcggtaggccctttgcaggagtcaggtccctacacttggcctgtttttccaacctatttaatagacattaaagctaaacacacattccttatcttactccatctcccctggcacatctgcctactcacaaagtatgagggaaaggactcctgccttcctcaaatcccatgttctccatagcggcagcccttggcagctctgcttctagtgctgggggagactccaggctgagccagtcactttctggcctgtgccgattctacccaagtcgtactagcctat

SEQ ID NO: 401625 - DNA, 1456 bp, Homo sapiens
acaattcggcacgaggccgggccgcacccgccgagccgtgaaaaaagtacatctcctggaagggatgctttttagctgagctctggtggatgagaggagctagccttgaaaaacttgatactgatggacattgtgtgggccagaggcagggatggttggctatgaccccaaaccagatggcaggaataacaccaagttccaggtggcagtggctgggtctgtgtctggacttgttactcgggcgctgatcagtcccttcgacgtcatcaagatccgtttccagcttcagcatgagcgcctgtctcgcagtgaccccagcgcaaagtaccatggcatcctccaggcctctaggcagattctgcaggaggagggtccgacagctttctggaaaggacacgtcccagctcagattctctccataggctatggagctgtccaattcttgtcatttgaaatgctgacggagctggtccacagaggcagcgtgtacgacgcccgggaattctcagtgcactttgtatgtggtggcctggctgcctgtatggccaccctcactgtgcaccccgtggatgttctgcgcacccgctttgcagctcagggtgagcccaaggtacggagatacaagggcctcatggactgtgccaagcaggtgctacaaaaggaaggcgccctgggcttcttcaagggcctgtcccccagcttgctgaaggctgccctctccacaggcttcatgttcttctcgtatgaattcttctgtaatgtcttccactgcatgaacaggacagccagccagcgctgagcgcaggaaggaccccaggtcttccctggaggcagcctcctgaaggaaggaagattcagtctccactgagaggtgccgtctggcccttccctgcaggccagctgccccaagcggggtagcagccttgaacccacccagctgggacaccaccagaaggtccagggctctccccatgagagaatcagagggaatgcaggacgtggtctatggtgagccaacgacacagtgagaaggagcaggaagttgctgtttctcctctgaccagcccacactgcaaaggaaacagacgccatcctacacctatcagccctgcctgccaggagaacagaacacactcctggtctggatggggctgctgcttgagtgcagagggctgcggtaggccctttgcaggagtcaggtccctacacttggcctgtttttccaacctatttaatagacattaaagctaaacacacattccttatcttactccatctcccctggcacatctgcctactcacaaagtatgagggaaaggactcctgccttcctcaaatcccatgttctccatagcggcagcccttggcagctctgcttctagtgctgggggagactccaggctgagccagtcactttctggcctgtgccgattctacccaagtcgtactagcctat

SEQ ID NO: 401626 - DNA, 1957 bp, Homo sapiens
ctggtctcgaactcctgggctcaagcgatcctcccctctcagcctcccaagtagctgggactgcaggcatgcaccactgcacccagcatgaagggacagtttgaatttggacagggagccgatggtgagagcccaggatggcagagggaggccttactgctaacaaagactagtgtaatccagtttggccagaggtgggaagggcacgtgggaggaccagtggaggtcagatcagggagggaaatcaaggccaaatggtgcagtgccttaaacggcagatcttggggtttggacttgatttctcatgatgtcgtcactaggagttactgcagcttttggagggaagccaggcttgaggagggttgtgcctggggatgaatgtctggcagcagtgtgtgaggtcagctggagagggtgaggctggaggcagggaggcccggctgagagctactgagggccaggttcagatctgctgcccaagggggatcaggtgggatgggatgaagggtcagagatgcctctgggaagaggttctggagccattgctggatcctttggagccacaggcagccgttcttcctgggcaggaaggagcgctgtccagcttctgatttctaggcctgtcatctgttcagtcttaacccaattacagtagaaagaatgaaattagtttatttgctattttgagctgggcatggttgtccatgcctgtaatcccagcacattgggaggctgaagcaggtggatcacctgaggtcaggagttcaagaccagcctggccaacatggcgaaactgcatctctactaaaaatacaaaaattagccaggcgtggtgttgtgtgcctgtaatcccagctactcaggaggctgaggcaggagaatcacttgaacctgggaggcagaggctgcagtgagccaagattgtgccactgcattccagcctgggcaacagagtgagactctgcctcaacgaaaaaataaaataaaataatttgctatttgcattcatttctttgtccagcaagtacttcttaagatctgtgatgtgccaggggctgtgttgatgggagcagagcgggcatccatattttcatccctttcctctccccaggtacggagatacaagggcctcatggactgtgccaagcaggtgctacaaaaggaaggcgccctgggcttcttcaagggcctgtcccccagcttgctgaaggctgccctctccacaggcttcatgttcttctcgtatgaattcttctgtaatgtcttccactgcatgaacaggacagccagccagcgctgagcgcaggaaggaccccaggtcttccctggaggcagcctcctgaaggaaggaagattcagtctccactgagaggtgccgtctggcccttccctgcaggccagctgccccaagcggggtagcagccttgaacccacccagctgggacaccaccagaaggtccagggctctccccatgagagaatcagagggaatgcaggacgtggtctatggtgagccaacgacacagtgagaaggagcaggaagttgctgtttctcctctgaccagcccacactgcaaaggaaacagacgccatcctacacctatcagccctgcctgccaggagaacagaacacactcctggtctggatggggctgctgcttgagtgcagagggctgcggtaggccctttgcaggagtcaggtccctacacttggcctgtttttccaacctatttaatagacattaaagctaaacacacattccttatcttactccatctcccctggcacatctgcctactcacaaagtatgagggaaaggactcctgccttcctcaaatcccatgttctccatagcggcagcccttggcagctctgcttctagtgctgggggagactccaggctgagccagtcactttctggcctgtgccgattctacccaagtcgtactagcctat

SEQ ID NO: 401627 - DNA, 1739 bp, Homo sapiens
  misc_feature (1635)..(1635): n is a, c, g, or t
  misc_feature (1638)..(1638): n is a, c, g, or t
gttggcaaggctggtttcaaactcctaacctcaagtgatctgcctgcctcggcctcccaaagtgctgggattacaggcatgagccacctcacccagctagttttttattattagtagagacagggtttcaccacgttggccaggctggtctcaaactcctgacgtcagatgatccgcccgcctcgacctcctgaagtgccggcattacagacgtgagccaccgcacccggcgccctgtagcctcttgatgtttgactcccctgagaagagcaacagaagaaagtcaaaatggctttttgctaggcttcctgccatctttaccaagttgagattatccgggttctggcattaacagagtttgaggaaagcgggtcaagtctaccgcgccctaaccttggaccccgcctgcaggctgactttcgagtcacacgccagagcacggcgacccctaaggtcgcagcccggcttcgcaaggcacctccttctaacgcgtcggtcgaactcgcgcgcccgcgagcagccggactacatctcccaggaagctgtgcgccgtccagctgtcctgcccttggtcgcgaaggactacattacccggtgatatcttgcgggaggcggttgccagacctcaagcgcacaaccattggtccagcgtctggcggggagctgcacggtgattggcccaggagcccgccagtttcgtccgagctcagtagagttttgctgttaagactgcgcgaggagctagagagagcggagagcgcggagccgggccgcacccgccgagccgtcttcagcatgagcgcctgtctcgcagtgaccccagcgcaaagtaccatggcatcctccaggcctctaggcagattctgcaggaggagggtccgacagctttctggaaaggacacgtcccagctcagattctctccataggctatggagctgtccaattcttgtcatttgaaatgctgacggagctggtccacagaggcagcgtgtacgacgcccgggaattctcagtgcactttgtatgtggtggcctggctgcctgtatggccaccctcactgtgcaccccgtggatgttctgcgcacccgctttgcagctcagggtgagcccaaggtctataatacgctgcgccacgccgtggggaccatgtataggagcgaaggcccccaggttttctacaaaggcttggctcccaccttgatcgccatcttcccctacgccgggctgcagttctcttgctacagctccttgaagcacctgtacaagtgggccataccagccgaaggaaagaaaaatgagaacctccaaaacctgctttgtggcagtggagctggtgtcatcagcaagaccctgacatatccgctggacctcttcaagaagcggctacaggttggagggtttgagcatgccagagctgcctttggccaggtacggagatacaagggcctcatggactgtgccaagcaggtgctacaaaaggaaggcgccctgggcttcttcaagggcctgtcccccagcttgctgaaggctgccctctccacaggcttcatgttcttctcgtatgaattcttctgtaatgtcttccactgcatgaacaggacagccagccagcgctgagcgcaggaaggacccngtntcctggggcggccgaaggaggaatagcccaggaagggggggccttcgggcgtgccgggggagctgtcccctggaccacaggcggtccagaaagagacggtg

SEQ ID NO: 401628 - DNA, 1520 bp, Homo sapiens
gttggcaaggctggtttcaaactcctaacctcaagtgatctgcctgcctcggcctcccaaagtgctgggattacaggcatgagccacctcacccagctagttttttattattagtagagacagggtttcaccacgttggccaggctggtctcaaactcctgacgtcagatgatccgcccgcctcgacctcctgaagtgccggcattacagacgtgagccaccgcacccggcgccctgtagcctcttgatgtttgactcccctgagaagagcaacagaagaaagtcaaaatggctttttgctaggcttcctgccatctttaccaagttgagattatccgggttctggcattaacagagtttgaggaaagcgggtcaagtctaccgcgccctaaccttggaccccgcctgcaggctgactttcgagtcacacgccagagcacggcgacccctaaggtcgcagcccggcttcgcaaggcacctccttctaacgcgtcggtcgaactcgcgcgcccgcgagcagccggactacatctcccaggaagctgtgcgccgtccagctgtcctgcccttggtcgcgaaggactacattacccggtgatatcttgcgggaggcggttgccagacctcaagcgcacaaccattggtccagcgtctggcggggagctgcacggtgattggcccaggagcccgccagtttcgtccgagctcagtagagttttgctgttaagactgcgcgaggagctagagagagcggagagcgcggagccgggccgcacccgccgagccgtcttgatactgatggacattgtgtgggccagaggcagggatggttggctatgaccccaaaccagatggcaggaataacaccaagttccaggtggcagtggctgggtctgtgtctggacttgttactcgggcgctgatcagtcccttcgacgtcatcaagatccgtttccagcttcagcatgagcgcctgtctcgcagtgaccccagcgcaaagtaccatggcatcctccaggcctctgggctctccccatgagagaatcagagggaatgcaggacgtggtctatggtgagccaacgacacagtgagaaggagcaggaagttgctgtttctcctctgaccagcccacactgcaaaggaaacagacgccatcctacacctatcagccctgcctgccaggagaacagaacacactcctggtctggatggggctgctgcttgagtgcagagggctgcggtaggccctttgcaggagtcaggtccctacacttggcctgtttttccaacctatttaatagacattaaagctaaacacacattccttatcttactccatctcccctggcacatctgcctactcacaaagtatgagggaaaggactcctgccttcctcaaatcccatgttctccatagcggcagcccttggcagctctgcttctagtgctgggggagactccaggctgagccagtcactttctggcctgtgccgattctacccaagtcgtactagcctat

SEQ ID NO: 401629 - DNA, 1451 bp, Homo sapiens
gttggcaaggctggtttcaaactcctaacctcaagtgatctgcctgcctcggcctcccaaagtgctgggattacaggcatgagccacctcacccagctagttttttattattagtagagacagggtttcaccacgttggccaggctggtctcaaactcctgacgtcagatgatccgcccgcctcgacctcctgaagtgccggcattacagacgtgagccaccgcacccggcgccctgtagcctcttgatgtttgactcccctgagaagagcaacagaagaaagtcaaaatggctttttgctaggcttcctgccatctttaccaagttgagattatccgggttctggcattaacagagtttgaggaaagcgggtcaagtctaccgcgccctaaccttggaccccgcctgcaggctgactttcgagtcacacgccagagcacggcgacccctaaggtcgcagcccggcttcgcaaggcacctccttctaacgcgtcggtcgaactcgcgcgcccgcgagcagccggactacatctcccaggaagctgtgcgccgtccagctgtcctgcccttggtcgcgaaggactacattacccggtgatatcttgcgggaggcggttgccagacctcaagcgcacaaccattggtccagcgtctggcggggagctgcacggtgattggcccaggagcccgccagtttcgtccgagctcagtagagttttgctgttaagactgcgcgaggagctagagagagcggagagcgcggagccgggccgcacccgccgagccgtgtgagtaacctctacctccgtccttctcgccgccctctcggggaccagcaccctcgctcctcagggtggtcgggagggagcacacgcacccgggcgctcacgagagggcggggactgtgtacacacgtgtcacaccagaccagagaagcatctccagggacaccggcggccgagccccgcgcacgcccttgagcacctgagctccagggcgtcccctcggactcaaggagaaaaaacacaccccgaggcacacgtggacacctaggaaaaaagtacatctcctggaagggatgctttttagctgagctctggtggatgagaggagctagccttgaaaaagtgagtaggggctgagagtggggctgtatttcagacgtagggaactggaggagtagaggcaaggcaattgataggagtgctccccgagttttccaggaactgggcagaagcagtcagaccactctggttaaatgagggaaggggaagagtggtccagagtgaggctgaagaggtcagtaggtctgagtcaggggagcccaggagcgtcattttcttttttgttttgttttgtttttttgtttttgagacggagtgttgcagtgagccaagatcacgccactgcactccagtctgggtgacaagagcaaaactctgtctcaaaaa

SEQ ID NO: 401630 - DNA, 2321 bp, Homo sapiens
gttggcaaggctggtttcaaactcctaacctcaagtgatctgcctgcctcggcctcccaaagtgctgggattacaggcatgagccacctcacccagctagttttttattattagtagagacagggtttcaccacgttggccaggctggtctcaaactcctgacgtcagatgatccgcccgcctcgacctcctgaagtgccggcattacagacgtgagccaccgcacccggcgccctgtagcctcttgatgtttgactcccctgagaagagcaacagaagaaagtcaaaatggctttttgctaggcttcctgccatctttaccaagttgagattatccgggttctggcattaacagagtttgaggaaagcgggtcaagtctaccgcgccctaaccttggaccccgcctgcaggctgactttcgagtcacacgccagagcacggcgacccctaaggtcgcagcccggcttcgcaaggcacctccttctaacgcgtcggtcgaactcgcgcgcccgcgagcagccggactacatctcccaggaagctgtgcgccgtccagctgtcctgcccttggtcgcgaaggactacattacccggtgatatcttgcgggaggcggttgccagacctcaagcgcacaaccattggtccagcgtctggcggggagctgcacggtgattggcccaggagcccgccagtttcgtccgagctcagtagagttttgctgttaagactgcgcgaggagctagagagagcggagagcgcggagccgggccgcacccgccgagccgtgaaaaaagtacatctcctggaagggatgctttttagctgagctctggtggatgagaggagctagccttgaaaaacttgatactgatggacattgtgtgggccagaggcagggatggttggctatgaccccaaaccagatggcaggaataacaccaagttccaggtggcagtggctgggtctgtgtctggacttgttactcgggcgctgatcagtcccttcgacgtcatcaagatccgtttccagcttcagcatgagcgcctgtctcgcagtgaccccagcgcaaagtaccatggcatcctccaggcctctaggcagattctgcaggaggagggtccgacagctttctggaaaggacacgtcccagctcagattctctccataggctatggagctgtccaattcttgtcatttgaaatgctgacggagctggtccacagaggcagcgtgtacgacgcccgggaattctcagtgcactttgtatgtggtggcctggctgcctgtatggccaccctcactgtgcaccccgtggatgttctgcgcacccgctttgcagctcagggtgagcccaaggtctataatacgctgcgccacgccgtggggaccatgtataggagcgaaggcccccaggttttctacaaaggcttggctcccaccttgatcgccatcttcccctacgccgggctgcagttctcttgctacagctccttgaagcacctgtacaagtgggccataccagccgaaggaaagaaaaatgagaacctccaaaacctgctttgtggcagtggagctggtgtcatcagcaagaccctgacatatccgctggacctcttcaagaagcggctacaggttggagggtttgagcatgccagagctgcctttggccaggtacggagatacaagggcctcatggactgtgccaagcaggtgctacaaaaggaaggcgccctgggcttcttcaagggcctgtcccccagcttgctgaaggctgccctctccacaggcttcatgttcttctcgtatgaattcttctgtaatgtcttccactgcatgaacaggacagccagccagcgctgagcgcaggaaggaccccaggtcttccctggaggcagcctcctgaaggaaggaagattcagtctccactgagaggtgccgtctggcccttccctgcaggccagctgccccaagcggggtagcagccttgaacccacccagctgggacaccaccagaaggtccagggctctccccatgagagaatcagagggaatgcaggacgtggtctatggtgagccaacgacacagtgagaaggagcaggaagttgctgtttctcctctgaccagcccacactgcaaaggaaacagacgccatcctacacctatcagccctgcctgccaggagaacagaacacactcctggtctggatggggctgctgcttgagtgcagagggctgcggtaggccctttgcaggagtcaggtccctacacttggcctgtttttccaacctatttaatagacattaaagctaaacacac

SEQ ID NO: 401631 - DNA, 2536 bp, Homo sapiens
gttggcaaggctggtttcaaactcctaacctcaagtgatctgcctgcctcggcctcccaaagtgctgggattacaggcatgagccacctcacccagctagttttttattattagtagagacagggtttcaccacgttggccaggctggtctcaaactcctgacgtcagatgatccgcccgcctcgacctcctgaagtgccggcattacagacgtgagccaccgcacccggcgccctgtagcctcttgatgtttgactcccctgagaagagcaacagaagaaagtcaaaatggctttttgctaggcttcctgccatctttaccaagttgagattatccgggttctggcattaacagagtttgaggaaagcgggtcaagtctaccgcgccctaaccttggaccccgcctgcaggctgactttcgagtcacacgccagagcacggcgacccctaaggtcgcagcccggcttcgcaaggcacctccttctaacgcgtcggtcgaactcgcgcgcccgcgagcagccggactacatctcccaggaagctgtgcgccgtccagctgtcctgcccttggtcgcgaaggactacattacccggtgatatcttgcgggaggcggttgccagacctcaagcgcacaaccattggtccagcgtctggcggggagctgcacggtgattggcccaggagcccgccagtttcgtccgagctcagtagagttttgctgttaagactgcgcgaggagctagagagagcggagagcgcggagccgggccgcacccgccgagccgtcccttctccctgtgatcagttaccaactacctgttgatgtgtgtggttacagacttctttctatgctttgtacaactctacagaccgtatcttgatactgatggacattgtgtgggccagaggcagggatggttggctatgaccccaaaccagatggcaggaataacaccaagttccaggtggcagtggctgggtctgtgtctggacttgttactcgggcgctgatcagtcccttcgacgtcatcaagatccgtttccagcttcagcatgagcgcctgtctcgcagtgaccccagcgcaaagtaccatggcatcctccaggcctctaggcagattctgcaggaggagggtccgacagctttctggaaaggacacgtcccagctcagattctctccataggctatggagctgtccaattcttgtcatttgaaatgctgacggagctggtccacagaggcagcgtgtacgacgcccgggaattctcagtgcactttgtatgtggtggcctggctgcctgtatggccaccctcactgtgcaccccgtggatgttctgcgcacccgctttgcagctcagggtgagcccaaggtctataatacgctgcgccacgccgtggggaccatgtataggagcgaaggcccccaggttttctacaaaggcttggctcccaccttgatcgccatcttcccctacgccgggctgcagttctcttgctacagctccttgaagcacctgtacaagtgggccataccagccgaaggaaagaaaaatgagaacctccaaaacctgctttgtggcagtggagctggtgtcatcagcaagaccctgacatatccgctggacctcttcaagaagcggctacaggttggagggtttgagcatgccagagctgcctttggccaggtacggagatacaagggcctcatggactgtgccaagcaggtgctacaaaaggaaggcgccctgggcttcttcaagggcctgtcccccagcttgctgaaggctgccctctccacaggcttcatgttcttctcgtatgaattcttctgtaatgtcttccactgcatgaacaggacagccagccagcgctgagcgcaggaaggaccccaggtcttccctggaggcagcctcctgaaggaaggaagattcagtctccactgagaggtgccgtctggcccttccctgcaggccagctgccccaagcggggtagcagccttgaacccacccagctgggacaccaccagaaggtccagggctctccccatgagagaatcagagggaatgcaggacgtggtctatggtgagccaacgacacagtgagaaggagcaggaagttgctgtttctcctctgaccagcccacactgcaaaggaaacagacgccatcctacacctatcagccctgcctgccaggagaacagaacacactcctggtctggatggggctgctgcttgagtgcagagggctgcggtaggccctttgcaggagtcaggtccctacacttggcctgtttttccaacctatttaatagacattaaagctaaacacacattccttatcttactccatctcccctggcacatctgcctactcacaaagtatgagggaaaggactcctgccttcctcaaatcccatgttctccatagcggcagcccttggcagctctgcttctagtgctgggggagactccaggctgagccagtcactttctggcctgtgccgattctacccaagtcgtactagcctat

SEQ ID NO: 401632 - DNA, 1771 bp, Homo sapiens
acaattcggcacgaggccgggccgcacccgccgagccgtgaaaaaagtacatctcctggaagggatgctttttagctgagctctggtggatgagaggagctagccttgaaaaacttgatactgatggacattgtgtgggccagaggcagggatggttggctatgaccccaaaccagatggcaggaataacaccaagttccaggtggcagtggctgggtctgtgtctggacttgttactcgggcgctgatcagtcccttcgacgtcatcaagatccgtttccagcttcagcatgagcgcctgtctcgcagtgaccccagcgcaaagtaccatggcatcctccaggcctctaggcagattctgcaggaggagggtccgacagctttctggaaaggacacgtcccagctcagattctctccataggctatggagctgtccaattcttgtcatttgaaatgctgacggagctggtccacagaggcagcgtgtacgacgcccgggaattctcagtgcactttgtatgtggtggcctggctgcctgtatggccaccctcactgtgcaccccgtggatgttctgcgcacccgctttgcagctcagggtgagcccaaggtctataatacgctgcgccacgccgtggggaccatgtataggagcgaaggcccccaggttttctacaaaggcttggctcccaccttgatcgccatcttcccctacgccgggctgcagttctcttgctacagctccttgaagcacctgtacaagtgggccataccagccgaaggaaagaaaaatgagaacctccaaaacctgctttgtggcagtggagctggtgtcatcagcaagaccctgacatatccgctggacctcttcaagaagcggctacaggttggagggtttgagcatgccagagctgcctttggccaggtacggagatacaagggcctcatggactgtgccaagcaggtgctacaaaaggaaggcgccctgggcttcttcaagggcctgtcccccagcttgctgaaggctgccctctccacaggcttcatgttcttctcgtatgaattcttctgtaatgtcttccactgcatgaacaggacagccagccagcgctgagcgcaggaaggaccccaggtcttccctggaggcagcctcctgaaggaaggaagattcagtctccactgagaggtgccgtctggcccttccctgcaggccagctgccccaagcggggtagcagccttgaacccacccagctgggacaccaccagaaggtccagggctctccccatgagagaatcagagggaatgcaggacgtggtctatggtgagccaacgacacagtgagaaggagcaggaagttgctgtttctcctctgaccagcccacactgcaaaggaaacagacgccatcctacacctatcagccctgcctgccaggagaacagaacacactcctggtctggatggggctgctgcttgagtgcagagggctgcggtaggccctttgcaggagtcaggtccctacacttggcctgtttttccaacctatttaatagacattaaagctaaacacacattccttatcttactccatctcccctggcacatctgcctactcacaaagtatgagggaaaggactcctgccttcctcaaatcccatgttctccatagcggcagcccttggcagctctgcttctagtgctgggggagactccaggctgagccagtcactttctggcctgtgccgattctacccaagtcgtactagcctat

SEQ ID NO: 401633 - DNA, 1616 bp, Homo sapiens
aacttcggcacgatggggcagcgaataacacctaagttccagggtggcagtgagctgggtctgtgtctgtacttggtactcgggcgcttgatcatcacgttttgactgtctgtgtgatgtgtaacgaactgtgctcgtcgcagtgtggctttagacagcgacaagtggttccatgttatggtaaaccaatgctgaggcagattctgcaggaggagggtccgacagctttctggaaaggacacgtcccagctcagattctctccataggctatggagctgtccaattcttgtcatttgaaatgctgacggagctggtccacagaggcagcgtgtacgacgcccgggaattctcagtgcactttgtatgtggtggcctggctgcctgtatggccaccctcactgtgcaccccgtggatgttctgcgcacccgctttgcagctcagggtgagcccaaggtctataatacgctgcgccacgccgtggggaccatgtataggagcgaaggcccccaggttttctacaaaggcttggctcccaccttgatcgccatcttcccctacgccgggctgcagttctcttgctacagctccttgaagcacctgtacaagtgggccataccagccgaaggaaagaaaaatgagaacctccaaaacctgctttgtggcagtggagctggtgtcatcagcaagaccctgacatatccgctggacctcttcaagaagcggctacaggttggagggtttgagcatgccagagctgcctttggccaggtacggagatacaagggcctcatggactgtgccaagcaggtgctacaaaaggaaggcgccctgggcttcttcaagggcctgtcccccagcttgctgaaggctgccctctccacaggcttcatgttcttctcgtatgaattcttctgtaatgtcttccactgcatgaacaggacagccagccagcgctgagcgcaggaaggaccccaggtcttccctggaggcagcctcctgaaggaaggaagattcagtctccactgagaggtgccgtctggcccttccctgcaggccagctgccccaagcggggtagcagccttgaacccacccagctgggacaccaccagaaggtccagggctctccccatgagagaatcagagggaatgcaggacgtggtctatggtgagccaacgacacagtgagaaggagcaggaagttgctgtttctcctctgaccagcccacactgcaaaggaaacagacgccatcctacacctatcagccctgcctgccaggagaacagaacacactcctggtctggatggggctgctgcttgagtgcagagggctgcggtaggccctttgcaggagtcaggtccctacacttggcctgtttttccaacctatttaatagacattaaagctaaacacacattccttatcttactccatctcccctggcacatctgcctactcacaaagtatgagggaaaggactcctgccttcctcaaatcccatgttctccatagcggcagcccttggcagctctgcttctagtgctgggggagactccaggctgagccagtcactttctggcctgtgccgattctacccaagtcgtactagcctat

SEQ ID NO: 401634 - DNA, 2388 bp, Homo sapiens
gttggcaaggctggtttcaaactcctaacctcaagtgatctgcctgcctcggcctcccaaagtgctgggattacaggcatgagccacctcacccagctagttttttattattagtagagacagggtttcaccacgttggccaggctggtctcaaactcctgacgtcagatgatccgcccgcctcgacctcctgaagtgccggcattacagacgtgagccaccgcacccggcgccctgtagcctcttgatgtttgactcccctgagaagagcaacagaagaaagtcaaaatggctttttgctaggcttcctgccatctttaccaagttgagattatccgggttctggcattaacagagtttgaggaaagcgggtcaagtctaccgcgccctaaccttggaccccgcctgcaggctgactttcgagtcacacgccagagcacggcgacccctaaggtcgcagcccggcttcgcaaggcacctccttctaacgcgtcggtcgaactcgcgcgcccgcgagcagccggactacatctcccaggaagctgtgcgccgtccagctgtcctgcccttggtcgcgaaggactacattacccggtgatatcttgcgggaggcggttgccagacctcaagcgcacaaccattggtccagcgtctggcggggagctgcacggtgattggcccaggagcccgccagtttcgtccgagctcagtagagttttgctgttaagactgcgcgaggagctagagagagcggagagcgcggagccgggccgcacccgccgagccgtcttgatactgatggacattgtgtgggccagaggcagggatggttggctatgaccccaaaccagatggcaggaataacaccaagttccaggtggcagtggctgggtctgtgtctggacttgttactcgggcgctgatcagtcccttcgacgtcatcaagatccgtttccagcttcagcatgagcgcctgtctcgcagtgaccccagcgcaaagtaccatggcatcctccaggcctctaggcagattctgcaggaggagggtccgacagctttctggaaaggacacgtcccagctcagattctctccataggctatggagctgtccaattcttgtcatttgaaatgctgacggagctggtccacagaggcagcgtgtacgacgcccgggaattctcagtgcactttgtatgtggtggcctggctgcctgtatggccaccctcactgtgcaccccgtggatgttctgcgcacccgctttgcagctcagggtgagcccaaggtctataatacgctgcgccacgccgtggggaccatgtataggagcgaaggcccccaggttttctacaaaggcttggctcccaccttgatcgccatcttcccctacgccgggctgcagttctcttgctacagctccttgaagcacctgtacaagtgggccataccagccgaaggaaagaaaaatgatatccgctggacctcttcaagaagcggctacaggttggagggtttgagcatgccagagctgcctttggccaggtacggagatacaagggcctcatggactgtgccaagcaggtgctacaaaaggaaggcgccctgggcttcttcaagggcctgtcccccagcttgctgaaggctgccctctccacaggcttcatgttcttctcgtatgaattcttctgtaatgtcttccactgcatgaacaggacagccagccagcgctgagcgcaggaaggaccccaggtcttccctggaggcagcctcctgaaggaaggaagattcagtctccactgagaggtgccgtctggcccttccctgcaggccagctgccccaagcggggtagcagccttgaacccacccagctgggacaccaccagaaggtccagggctctccccatgagagaatcagagggaatgcaggacgtggtctatggtgagccaacgacacagtgagaaggagcaggaagttgctgtttctcctctgaccagcccacactgcaaaggaaacagacgccatcctacacctatcagccctgcctgccaggagaacagaacacactcctggtctggatggggctgctgcttgagtgcagagggctgcggtaggccctttgcaggagtcaggtccctacacttggcctgtttttccaacctatttaatagacattaaagctaaacacacattccttatcttactccatctcccctggcacatctgcctactcacaaagtatgagggaaaggactcctgccttcctcaaatcccatgttctccatagcggcagcccttggcagctctgcttctagtgctgggggagactccaggctgagccagtcactttctggcctgtgccgattctacccaagtcgtactagcctat

SEQ ID NO: 401635 - DNA, 1874 bp, Homo sapiens
gttggcaaggctggtttcaaactcctaacctcaagtgatctgcctgcctcggcctcccaaagtgctgggattacaggcatgagccacctcacccagctagttttttattattagtagagacagggtttcaccacgttggccaggctggtctcaaactcctgacgtcagatgatccgcccgcctcgacctcctgaagtgccggcattacagacgtgagccaccgcacccggcgccctgtagcctcttgatgtttgactcccctgagaagagcaacagaagaaagtcaaaatggctttttgctaggcttcctgccatctttaccaagttgagattatccgggttctggcattaacagagtttgaggaaagcgggtcaagtctaccgcgccctaaccttggaccccgcctgcaggctgactttcgagtcacacgccagagcacggcgacccctaaggtcgcagcccggcttcgcaaggcacctccttctaacgcgtcggtcgaactcgcgcgcccgcgagcagccggactacatctcccaggaagctgtgcgccgtccagctgtcctgcccttggtcgcgaaggactacattacccggtgatatcttgcgggaggcggttgccagacctcaagcgcacaaccattggtccagcgtctggcggggagctgcacggtgattggcccaggagcccgccagtttcgtccgagctcagtagagttttgctgttaagactgcgcgaggagctagagagagcggagagcgcggagccgggccgcacccgccgagccgtgaaaaaagtacatctcctggaagggatgctttttagctgagctctggtggatgagaggagctagccttgaaaaacttgatactgatggacattgtgtgggccagaggcagggatggttggctatgaccccaaaccagatggcaggaataacaccaagttccaggtggcagtggctgggtctgtgtctggacttgttactcgggcgctgatcagtcccttcgacgtcatcaagatccgtttccagcttcagcatgagcgcctgtctcgcagtgaccccagcgcaaagtaccatggcatcctccaggcctctaggcagattctgcaggaggagggtccgacagctttctggaaaggacacgtcccagctcagattctctccataggctatggagctgtccaattcttgtcatttgaaatgctgacggagctggtccacagaggcagcgtgtacgacgcccgggaattctcagtgcactttgtatgtggtggcctggctgcctgtatggccaccctcactgtgcaccccgtggatgttctgcgcacccgctttgcagctcagggtgagcccaaggtctataatacgctgcgccacgccgtggggaccatgtataggagcgaaggcccccaggttttctacaaaggcttggctcccaccttgatcgccatcttcccctacgccgggctgcagttctcttgctacagctccttgaagcacctgtacaagtgggccataccagccgaaggaaagaaaaatgagaacctccaaaacctgctttgtggcagtggagctggtgtcatcagcaagaccctgacatatccgctggacctcttcaagaagcggctacaggttggagggtttgagcatgccagagctgcctttggccagacggagatacaggctcatggactgtgccagcagtgctgcaaggagggcctggctctcagggctgtcccagtgtggagtggctctcccgggtcagtctctcggtggatctccgggggctccctggttaggaccccgcgtgggaggcccgttccggggggcctaggaggagattccgagggggggcgcctgggccggcccgg

SEQ ID NO: 401636 - DNA, 321 bp, Homo sapiens
gaaaggactcctgccttcctcaaatcccatgttctccatagcggcagcccttggcagctctgcttctagtgctgggggagactccaggctgagccagtcactttctgggccccgtgcccagaccttcgtgtctgcagacacaccaccacccaggctgtcctctcccaggaccgggctggtcatggccgtggggctccatggaaagcagatcccagcgcccgtgcaggaagtggatgggccatgctgtgggcaggcgtgggtgaaggtgcagcctctccccagtctacctcactgactcctctttcacccagagctgggtca

SEQ ID NO: 401637 - DNA, 346 bp, Homo sapiens
gcataagcccgatttgttctactggacttgttggattaaatgaacacaatttaatgttctataggacaagggctcctttcatggctgaaagaaggagcaagggtgatttacagtttcacacatactcattcgctacattatctgccttgtgcctgtagttatgaatatcaactcatcatccggcagccatttctacccattcaggagaatttagctttttattaggaggggctctgccatcccgaaagaaacaaagaacaaaaaacaacaatagatttccgcaatgttcactgaaaaacaagcaccaatatttggacccttgtacctcacctttttttttttcttt

SEQ ID NO: 401638 - DNA, 547 bp, Homo sapiens
ctggggcagacatcagcataacgtggtcacattttgtactttaagagtttgtgaacaccagtcttaaacagtggtatctgaaatgaagtcgccacccactggcctaaaacaatgccagtgaaaaagaaatgaatttatgaagattggccaaaagaaatgatgaatccagtaaagatttacagaggaagtgtttgcaaagcgaaacttacatctagtcctcaaatctgctgcctgaggaagagggggagctgctttctgctttcttaagcctttaggatctagagctgggaggggcaggcaggaggagagcacagccatctgtggatctgttcagtggcgctctgtgaactctcaagcaactcaaagctctagagtctggttcttctcaattacctcaggacacagtcaacttagtacctgctgtctggagcacgcacaggagcccctgactccttttttttttttttttttttttttttgggagaaatgtgggtctcctcgctgggtggcggggggggggtgtgaggggggggatctccctcccctc

SEQ ID NO: 401639 - DNA, 638 bp, Homo sapiens
  misc_feature (13)..(13): n is a, c, g, or t
tcttccacatcgnccgaaagaaccatcacaccacccgtcctaatattttttatctgctgacaagacacgggttgcagcttgccagggctgcctactgaatcactcttctatcgtgctgttcttcaggatattattaaagattgttatggcatcaccaaatgtgatcggcatgttggtaaaatttattccaaatgttcttcttttctggattatgtcagacggtctctaaagaagcttggattagatgagtccaagctgccagaaaaaattataatgaactactacgagaagtataagcctcgaatgaatgagctggaagcttttaatatgttgaaagttgtactggctccctgtatagagactttgattcttctggatcgactttgttacctgaaagagcaggaagatattgcatggtctgctcttgtgaagttgtttgatcccgtgaaatctcccagatgttatgctgttattgccctgaagaagcagcagtgatttccattgaagcaaattattagatgtatttctctatgagacctgttgctgagattgcttttctaaacatatatgtcctgttatacaaaaatttttaaatgactgttatgtattttaaataataaaataatggctaacaacag

SEQ ID NO: 401640 - DNA, 503 bp, Homo sapiens
tttataattagacattaatgtaacagatgtttcatttttcaaagaagtttcccccttttccctatctttttttaatcttccttagagcaataaatagtaattactatatttgtggacaagctgccagaaaaaattataatgaactactacgagaagtataagcctcgaatgaatgagctggaagcttttaatatgttgaaagttgtactggctccctgtatagagactttgattcttctggatcgactttgttacctgaaagagcaggaagatattgcatggtctgctcttgtgaagttgtttgatcccgtgaaatctcccagatgttatgctgttattgccctgaagaagcagcagtgatttccattgaagcaaattattagatgtatttctctatgagacctgttgctgagattgcttttctaaacatatatgtcctgttatacaaaaatttttaaatgactgttatgtattttaaataataaaataatggctaacaacag

SEQ ID NO: 401641 - DNA, 1012 bp, Homo sapiens
tctgggacaatgcagctgtgagggttcctggaagccctccaaactgggctcaccatttatgaggactatgacattctcttgtagaaaggatggtaagtgtttgtggtagcaatgggggctggtagtgttcttctgcttactttttccctgtaacaggaagtttctgctgctttggggcagatctcatccaatcagagaagatggagttacagaggctaggtgtctccaagctgcccacctggacttctaatcaccacaggtgcatctgcacttccctgctgcactccagtgctctctgttcaacactccaatcaaatctcatctgtatattcattgccttgtctctttcttgtatgggggaactggcatcaggcatctgtagtcagtcatcttgctaatgtcactttgcgttgttattttttttttccaggtatttctggtctgcagatgattaagtctgtgggtacagaacctgcagttagagaaggccagctgtatacttcttatgcgcttgtaagaacaaggacatttttagtttgatttggtttggttttttttacacacaggtttgcatatggtttcactgtttggggttctcccttggcttttttgcatcaaacatacttacaatgcatagtctatgatatccagttttggatctcttaaaacaacaaactttttttttaattttacagtaaaaaggtgttctcaccttttctttccagaatatactcaaaagcaacaaacagaatgagaaagagaaacaaaactctctttgacaatatcagaaggaatttgaaatcttaaactatgtatattacaaagtataatgaaggtaaaagagggatgcagaaagatgccaagaggaaatgcccacggttacagatctcagacaaaatcaacagaacatagttctctaaagtgtcatatcctgaggaacaaaatcaacagtctctagtttgaaacaaatacaactggtgaccagcatggtgcttcccaatttggcacaaca

SEQ ID NO: 401642 - DNA, 896 bp, Homo sapiens
tctgggacaatgcagctgtgagggttcctggaagccctccaaactgggctcaccatttatgaggactatgacattctcttgtagaaaggatggtaagtgtttgtggtagcaatgggggctggtagtgttcttctgcttactttttccctgtaacaggaagtttctgctgctttggggcagatctcatccaatcagagaagatggagttacagaggctaggtgtctccaagctgcccacctggacttctaatcaccacaggtgcatctgcacttccctgctgcactccagtgctctctgttcaacactccaatcaaatctcatctgtatattcattgccttgtctctttcttgtatgggggaactggcatcaggcatctgtagtcagtcatcttgctaatgtcactttgcgttgttattttttttttccaggtatttctggtctgcagatgattaagtctgtgggtacagaacctgcagttagagaaggccagctgtatacttcttatgcgcttctgccagaaaaaattataatgaactactacgagaagtataagcctcgaatgaatgagctggaagcttttaatatgttgaaagttgtactggctccctgtatagagactttgattcttctggatcgactttgttacctgaaagagcaggaagatattgcatggtctgctcttgtgaagttgtttgatcccgtgaaatctcccagatgttatgctgttattgccctgaagaagcagcagtgatttccattgaagcaaattattagatgtatttctctatgagacctgttgctgagattgcttttctaaacatatatgtcctgttatacaaaaatttttaaatgactgttatgtattttaaataataaaataatggctaacaacag

SEQ ID NO: 401643 - DNA, 544 bp, Homo sapiens
  misc_feature (13)..(13): n is a, c, g, or t
tcttccacatcgnccgaaagaaccatcacaccacccgtcctaatattttttatctgctgacaagacacgggttgcagcttgccagggctgcctactgaatcactcttctatcgtgctgttcttcaggatattattaaagattgttatggcatcaccaaatgctgccagaaaaaattataatgaactactacgagaagtataagcctcgaatgaatgagctggaagcttttaatatgttgaaagttgtactggctccctgtatagagactttgattcttctggatcgactttgttacctgaaagagcaggaagatattgcatggtctgctcttgtgaagttgtttgatcccgtgaaatctcccagatgttatgctgttattgccctgaagaagcagcagtgatttccattgaagcaaattattagatgtatttctctatgagacctgttgctgagattgcttttctaaacatatatgtcctgttatacaaaaatttttaaatgactgttatgtattttaaataataaaataatggctaacaacag

SEQ ID NO: 401644 - DNA, 715 bp, Homo sapiens
  misc_feature (13)..(13): n is a, c, g, or t
tcttccacatcgnccgaaagaaccatcacaccacccgtcctaatattttttatctgctgacaagacacgggttgcagcttgccagggctgcctactgaatcactcttctatcgtgctgttcttcaggatattattaaagattgttatggcatcaccaaatgtgatcggcatgttggtaaaatttattccaaatgttcttcttttctggattatgtcagacggtctctaaagaagcttggattagatgagtccaagctgccagaaaaaattataatgaactactacgagaagtataagcctcgaatgaatgagctggaagcttttaatatgttgaaagttgtactggctccctgtatagagactttgattcttctggatcgactttgttacctgaaagagcaggaagatattgcatggtctgctcttgtgaagttgtttgatcccgtgaaatctcccagatgttatgctgttattgccctgaagaagcagcagtgatttccattgaagcaaattattagatgtatttctctatgagacctgttgctgagattgcttttctaaacatatatgtcctgttatacaaaaatttttaaatgactgttatgtattttaaataataaaataatggctaacaacagaaggttataatccatttttccattgtcaaagcatacattaataaaagaagaacctgtcataataatataaaacagtt

SEQ ID NO: 401645 - DNA, 580 bp, Homo sapiens
tttataattagacattaatgtaacagatgtttcatttttcaaagaagtttcccccttttccctatctttttttaatcttccttagagcaataaatagtaattactatatttgtggacaagctgccagaaaaaattataatgaactactacgagaagtataagcctcgaatgaatgagctggaagcttttaatatgttgaaagttgtactggctccctgtatagagactttgattcttctggatcgactttgttacctgaaagagcaggaagatattgcatggtctgctcttgtgaagttgtttgatcccgtgaaatctcccagatgttatgctgttattgccctgaagaagcagcagtgatttccattgaagcaaattattagatgtatttctctatgagacctgttgctgagattgcttttctaaacatatatgtcctgttatacaaaaatttttaaatgactgttatgtattttaaataataaaataatggctaacaacagaaggttataatccatttttccattgtcaaagcatacattaataaaagaagaacctgtcataataatataaaacagtt

SEQ ID NO: 401646 - DNA, 401 bp, Homo sapiens
tttttgaaggtgtaattgtgaatgttaattttgtttaacaaagcataagaattttctgtgaaacagctttgtttttatgtattttttatattacaatatataatccaactcgcgtctaatttttttcttcaacaaatggttgtatatctaaatcacttattaatttacaggaagatattgcatggtctgctcttgtgaagttgtttgatcccgtgaaatctcccagatgttatgctgttattgccctgaagaagcagcagtgatttccattgaagcaaattattagatgtatttctctatgagacctgttgctgagattgcttttctaaacatatatgtcctgttatacaaaaatttttaaatgactgttatgtattttaaataataaaataatggctaac

SEQ ID NO: 401647 - DNA, 447 bp, Homo sapiens
gaagacggggacatagttggagaaactagtggggaaggaacgagagaaggttagcgtagccacgctgccagaaaaaattataatgaactactacgagaagtataagcctcgaatgaatgagctggaagcttttaatatgttgaaagttgtactggctccctgtatagagactttgattcttctggatcgactttgttacctgaaagagcaggaagatattgcatggtctgctcttgtgaagttgtttgatcccgtgaaatctcccagatgttatgctgttattgccctgaagaagcagcagtgatttccattgaagcaaattattagatgtatttctctatgagacctgttgctgagattgcttttctaaacatatatgtcctgttatacaaaaatttttaaatgactgttatgtattttaaataataaaataatggctaacaacag

SEQ ID NO: 401648 - DNA, 292 bp, Homo sapiens
tccttgggactaggggtccgagcaagacctgaattataaactgagcagccacagagaagcactacagatgtagctgagttatctaggcctaacaccaaatattctagaaagacccaaagtactaaccagctctggcagcaagaccagcccatgtctacctctgcagaactttgagaatctttggctgatttttattacctaactccctgtccataagagaagggaaagagaccaagactgagtggttggatcagccaaagatgtcaaaattaaacttcagttaaattagcaa

SEQ ID NO: 401649 - DNA, 384 bp, Homo sapiens
tctggcagttccctgcttttatggtgtagtcatggtgaaacctgagtcatctgaagatggtgcagtgccagagagcaggagagaggagctgcaaagaagccagacagcgttgggcatcaataactcctgggcaccacccgccactggccttcattctgacaggagagccaacccaaccctaactgtgttcagagattgctccaagctttacagttctaccaaattctttctgtagcaaaaatataaaggcatcttcttaggtaattttttttcagggttccaagtagcaacacctaacgtctgcagtgcgagttctcttcttcttttttttttaaggtgataaatcataacattttcctggaaaggaaagcagtagacctcatt

SEQ ID NO: 401650 - DNA, 555 bp, Homo sapiens
caatccacattaagaatatagtcgtctctcttttgaactcttctattaagaatgctgttagctaattacagaaaacataatgggccaatacctttattatatgaagatccattcaaactaattttaaaaaaagatctagtagattaatagagacatgaacaggaaattcatgcaagaagaactaatatatgcacatggaaaatgttctattttcctattagtcaaggaaatgcaaattatgacaataatattgagccgttttccatctcctgttttatgtatgtatatatgtgtatttgtttttattaaataataccatgcctgaccagctagctgtcagcttcttgaagtcaagattcatatatgatacatctctgtgttcctgctatgatcttatacatatttggagctcaataaatacgtcttaaattgagtaaattaataaattattatactagtggtttatgatgccctgtaaattttatttttcatttttaactgttttaattacaatgtttaactttttatttgaaatgaaaataatgaaaaaaaaaa

SEQ ID NO: 401651 - DNA, 1014 bp, Homo sapiens
caatccacattaagaatatagtcgtctctcttttgaactcttctattaagaatgctgttagctaattacagaaaacataatgggccaatacctttattatatgaagatccattcaaactaattttaaaaaaagatctagtagattaatagagacatgaacaggaaattcatgcaagaagaactaatatatgcacatggaaaatgttctattttcctattagtcaaggaaatgcaaattatgacaataatattgagccgttttccatctcctgttttatgtatgtatatatgtgtatttgtttttattaaataataccagctattgcccgggcatggtggttcacacctgtaaccctagcactttgggaggccaaggcgagagaatgccttgagggaaggagtttgaggccaggatttcaagactagcctgggcaacatggtgagaccctgtctctacgaaaatatttgaaaattagccaggtgtggtggttcatgcctgtgggaggctgaggtaggaggatctcttgagcccaggagttggaggttacagtgagctatgattgcaccactgcactccagcctggatgacagagcaggaccctgtctcaaagaataataataacaatgataataataccaggtattgttgccaaactgatagctcatgtattggtgttgacaatataaactggtgagtaattttaggaagtaaatcaatgatatgaatcacaccataaaaatattcatactcttaaaaataatcccatttttgagaatatttccaaaaagaaggctatatgtttaaaggtattcattgtagcatagtcttcataattactttagaacacttaagacttttaccatgttaaataaccctgtagtttaaaatataggcttatgggggaaaaaatagcaattttcaaaattatatttactctgaatgtaactgtataaaaatatgtgtatggacaaagactggaaagaaaaaaatagatgtggttaagtagtagaatt

SEQ ID NO: 401652 - DNA, 446 bp, Homo sapiens
ccactttttcatgggcacctggcagcagcagaggcagaaacaatctgtttgtcagtctacttaaagaaaaaaaattctgctgggatctcttctcttctctttttttttcttttctttcgccacttcatttattttatttgcaggagttgaaacatgttttaagggtgatgtttatttccccccccaaacatgaatcatttaagtaaaaccaacttaactgtagaaatgtagcaaagtaaggggaaagtagcacaaaccacccaagaggcaaaggttgtggggaagaggtgggtgcagtgagcatttaacatatgcataaatgctttacgattcacctgctcagcactgcctccccagaaggcgagcatagggaactattttacgaggatgtttccccccaaacatctgagaatgcttcaaattatagtttaaggtttaaaagacca

SEQ ID NO: 401653 - DNA, 226 bp, Homo sapiens
ggtgaactaaattaagcccttgaagttacatcctggtgatgagacagaggaaaaaaacaactatatagcagaatgacaagtgttgaaaagaaaaatagagctaggcatggaactacaggtgcctatagttccagctactcaggaggctgaggcaggaagattgcttgaacccaagagttcctgtccaggctggacaacatagtgagaccctgtcaccttgtttcta

SEQ ID NO: 401654 - DNA, 299 bp, Homo sapiens
tactatcacgtattaccaaggaggacatggaggttcagacatcaagtccagaatcaaatccagggtaccatgctgcaattggatggatggacttttaaataaatgataccaagaaaactgggaagccatttggaaaaatatgaaattagatccctacataagaaggaactccaagaggattagggatcaaaatgtaaaaactaaaaccatacaaagactagaagaaaaacatgggaaattttctttttaatctcagtataggggaagtctttctaacttattcaaaatacagaaggaat

SEQ ID NO: 401655 - DNA, 188 bp, Homo sapiens
ctggctctgagtcagctacttaatgagctccctggagctgaccctgagcacagcaggaaggtgtgaacactccctcccaaaagagtgaaaaggtggagagagttttgtcacctgctgcaggctcccgctgctcccaggggtaatggcctgggcggcattcacacccccatgtagctgtgggcaggaaa

SEQ ID NO: 401656 - DNA, 334 bp, Homo sapiens
catattttttcccacgatataagtacagtctcaaccttttatttggcaccataaagagcacataaagatctacccaaaactgtactttaaagcactggtatggaataattgtattatgtgtgatcattggtgtttataagatttgggtgtgtattcgtgtgtgaaacattcatattttgttactttcctgtggctggaagggatcttataggacactgtctttcatctttgtctgtctttcatctttaataggaatttcttttccatgcctgaaggcctcattttgaacattttgtttgtttgtttttttattttttgagatacagtattgctc

SEQ ID NO: 401657 - DNA, 518 bp, Homo sapiens
gagataagaacttgtgtctgggctttgtaatgggaggtagattataggaagcagaagggaggggacaggccatgtgggacagggaaggaagaaaataaagagtatgttactgagctgagtattgtcatcagcaacgggggttcaatcctgctggagaccctctaagaaactgtggaatgcaccttggaattatctctcccgatgctgggaggctgggacatgtaatggatttccatcctctactagttgaaggtttcctctaggaatgttaactgcccccttcctgggctgcctagcacctttgataggtaggaatacttggtccctgatgtattattctctgcttttttagggcctcagccaaaacggagacacaaaatgcatcatgctaacattgttgtatgtatgtgtatgactacataatattctatcattttgttttatataatctatgaaccaacatcttatatttactgtagttctatttttattaaaacgtatatgaaaatttacatttt

SEQ ID NO: 401658 - DNA, 1947 bp, Homo sapiens
  misc_feature (1681)..(1681): n is a, c, g, or t
acatgcgaagaaaatgcccatgcatttctttaagcagaaatataagttagtgaatttgtttcttcttgataaaatggttagaatttgcttagaaattccttttatcataaaagtaaaaattatcagctttaaccttctcatttgtctcctactgcttcttttcttgttctttattctcatccatccccttctctgtctttgcctctactcttcctctattccttcataagaatctaaacaactcctttaaacatcaattcaaatgttcttcccttggatagagatcacttccatccccttcataactagctgggcctagtacctttgggttagcaattttgccagagatgttggagaaaaagggggtagcatttcctcttgaaaatccagcctgcaaggcatttacaatctcatgctggtttcgtaaggccctgctgtccctccagaatagaggcccacagcactcactaggtaccaggcatggtgaacttgcttgcccaagctctctagtaggtggcagatttacccaggtctgcctgactttagagcctattcttttaatcattgtaccttactgtctttatagacaaggtcaggctctctatgcttctgtgagataattttccctaggagtgtaaatagttactatagagacactagatgccacctgctatagccctcagaagtggcatcagactatgcctgggctttctgttttaaggacaaggaagaatgagtgtgacagtgaaaggttgtatttgtaaaggctggaagagcagaaatccccaagtgctagagaaaagaatgtggacaagtgtatggtatccaatcatagtatgttagagctgagttgggctttaaagatgatctcctctaacccctttatttgcagttgaagacgttgaggatctgagacattaagtgaattgtctgaggacacacagccagtttcttagatgcagagccaaggatgaatttttttcattcagactaagctgttttttgcagtccacctttactctacttggggttcatttctttttaagaagtctcaaagattagaaaattgagtcattttgagcaatataatgtcatattgtacaattctgctgaaagtaattttaatagcaatgccggcagatctcccaaatccatgggtttcaaaatatttccgccttttgctaagctaatatatagaatttcaaaaccatatttataccacatacaatttccaaagagctgggcaatttcctataaaaactcagctgtgcactgattgccaagttggaaaactcagggtttcctggcaacacccacttgggctctagggaatgcaagcttctcagcaaacaacctctcctgacttacgagctccatcggcagccacgacccgagtcacagcggccctttctgatgttcttgtctctgtcgcttatgtttctcaagaacctgtaatcttgccttaatccctcaccagctgaatacctcctacatgctaaactcctggaatgaaaggtccacatttctctcatgctaggagtttgggaccagaattcagatgaactcattgctagtactggttcaaaagctaatgagccctctagattcccaggtccttagtttcctcatgggtaaaatatagacaataactcctacctgttcatctttcagggcttttccnaagattttcaacatctgaaattcacaggatcatggagacgaactaaaccatcatggagactaactaaaccagatgcatctagcccctcatgttagagttgagaaaacagaaacccagggtttggggactcccttgaagtcatcaagttcctgttgatggcaaaatcaggaccaagcttctgatcctcccaaatattccttcacttctcagtgctgcctgtgatgagaaagatcaaagcatgcatacaattataaatcatgacacag

SEQ ID NO: 401659 - DNA, 7524 bp, Homo sapiens
  misc_feature (1681)..(1681): n is a, c, g, or t
acatgcgaagaaaatgcccatgcatttctttaagcagaaatataagttagtgaatttgtttcttcttgataaaatggttagaatttgcttagaaattccttttatcataaaagtaaaaattatcagctttaaccttctcatttgtctcctactgcttcttttcttgttctttattctcatccatccccttctctgtctttgcctctactcttcctctattccttcataagaatctaaacaactcctttaaacatcaattcaaatgttcttcccttggatagagatcacttccatccccttcataactagctgggcctagtacctttgggttagcaattttgccagagatgttggagaaaaagggggtagcatttcctcttgaaaatccagcctgcaaggcatttacaatctcatgctggtttcgtaaggccctgctgtccctccagaatagaggcccacagcactcactaggtaccaggcatggtgaacttgcttgcccaagctctctagtaggtggcagatttacccaggtctgcctgactttagagcctattcttttaatcattgtaccttactgtctttatagacaaggtcaggctctctatgcttctgtgagataattttccctaggagtgtaaatagttactatagagacactagatgccacctgctatagccctcagaagtggcatcagactatgcctgggctttctgttttaaggacaaggaagaatgagtgtgacagtgaaaggttgtatttgtaaaggctggaagagcagaaatccccaagtgctagagaaaagaatgtggacaagtgtatggtatccaatcatagtatgttagagctgagttgggctttaaagatgatctcctctaacccctttatttgcagttgaagacgttgaggatctgagacattaagtgaattgtctgaggacacacagccagtttcttagatgcagagccaaggatgaatttttttcattcagactaagctgttttttgcagtccacctttactctacttggggttcatttctttttaagaagtctcaaagattagaaaattgagtcattttgagcaatataatgtcatattgtacaattctgctgaaagtaattttaatagcaatgccggcagatctcccaaatccatgggtttcaaaatatttccgccttttgctaagctaatatatagaatttcaaaaccatatttataccacatacaatttccaaagagctgggcaatttcctataaaaactcagctgtgcactgattgccaagttggaaaactcagggtttcctggcaacacccacttgggctctagggaatgcaagcttctcagcaaacaacctctcctgacttacgagctccatcggcagccacgacccgagtcacagcggccctttctgatgttcttgtctctgtcgcttatgtttctcaagaacctgtaatcttgccttaatccctcaccagctgaatacctcctacatgctaaactcctggaatgaaaggtccacatttctctcatgctaggagtttgggaccagaattcagatgaactcattgctagtactggttcaaaagctaatgagccctctagattcccaggtccttagtttcctcatgggtaaaatatagacaataactcctacctgttcatctttcagggcttttccnaagattttcaacatctgaaattcacaggatcatggagacgaactaaaccatcatggagactaactaaaccagatgcatctagcccctcatgttagagttgagaaaacagaaacccagggtttggggactcccttgaagtcatcaagttcctgttgatggcaaaatcaggaccaagcttctgatcctcccaaatattccttcacttctcagtgctgccaggggcgctgtgaggcaaaccgctgccactacactggctttccgggaagcaagctcaagtcgcggagagggaagggaggtcgtgcgctcggggcggggcgcgctcccaagtcgagcgcagcggccggggcaggttgtaccgagcgtggttctggggacaccgtgcggcctcgattggaggtggctgtgatgaagcgcggttaccgcacaatggaaacgtgggcacctccgctcccatgaaagcctgctggtagagctccgaggccggccggtgcgcctggacgggagtccgggtcaaagcggcctggtgtgcggcgcgccccgccccccgcaggccccgccctgccaggtcgcgctgccctccttctacccagtccttaaaacccggaggagcgggatggcgcgctttgactctggagtgggagtgggagcgagcgcttctgcgactccagttgtgagagccgcaagggcatgggaattgacgccactcaccgacccccagtctcaatctcaacgctgtgaggaaacctcgactttgccaggtccccaagggcagcggggctcggcgagcgaggcacccttctccgtccccatcccaatccaagcgctcctggcactgacgacgccaagagactcgagtgggagttaaagcttccagtgagggcagcaggtgtccaggccgggcctgcgggttcctgttgacgtcttgccctaggcaaaggtcccagttccttctcggagccggctgtcccgcgccactggaaaccgcacctccccgcagcatgggcaccagcctcagcccgaacgacccttggccgctaaacccgctgtccatccagcagaccacgctcctgctactcctgtcggtgctggccactgtgcatgtgggccagcggctgctgaggcaacggaggcggcagctccggtccgcgcccccgggcccgtttgcgtggccactgatcggaaacgcggcggcggtgggccaggcggctcacctctcgttcgctcgcctggcgcggcgctacggcgacgttttccagatccgcctgggcagctgccccatagtggtgctgaatggcgagcgcgccatccaccaggccctggtgcagcagggctcggccttcgccgaccggccggccttcgcctccttccgtgtggtgtccggcggccgcagcatggctttcggccactactcggagcactggaaggtgcagcggcgcgcagcccacagcatgatgcgcaacttcttcacgcgccagccgcgcagccgccaagtcctcgagggccacgtgctgagcgaggcgcgcgagctggtggcgctgctggtgcgcggcagcgcggacggcgccttcctcgacccgaggccgctgaccgtcgtggccgtggccaacgtcatgagtgccgtgtgtttcggctgccgctacagccacgacgaccccgagttccgtgagctgctcagccacaacgaagagttcgggcgcacggtgggcgcgggcagcctggtggacgtgatgccctggctgcagtacttccccaacccggtgcgcaccgttttccgcgaattcgagcagctcaaccgcaacttcagcaacttcatcctggacaagttcttgaggcactgcgaaagccttcggcccggggccgccccccgcgacatgatggacgcctttatcctctctgcggaaaagaaggcggccggggactcgcacggtggtggcgcgcggctggatttggagaacgtaccggccactatcactgacatcttcggcgccagccaggacaccctgtccaccgcgctgcagtggctgctcctcctcttcaccaggtatcctgatgtgcagactcgagtgcaggcagaattggatcaggtcgtggggagggaccgtctgccttgtatgggtgaccagcccaacctgccctatgtcctggccttcctttatgaagccatgcgcttctccagctttgtgcctgtcactattcctcatgccaccactgccaacacctctgtcttgggctaccacattcccaaggacactgtggtttttgtcaaccagtggtctgtgaatcatgacccagtgaagtggcctaacccggagaactttgatccagctcgattcttggacaaggatggcctcatcaacaaggacctgaccagcagagtgatgattttttcagtgggcaaaaggcggtgcattggcgaagaactttctaagatgcagctttttctcttcatctccatcctggctcaccagtgcgatttcagggccaacccaaatgagcctgcgaaaatgaatttcagttatggtctaaccattaaacccaagtcatttaaagtcaatgtcactctcagagagtccatggagctccttgatagtgctgtccaaaatttacaagccaaggaaacttgccaataagaagcaagaggcaagctgaaattttagaaatattcacatcttcggagatgaggagtaaaattcagtttttttccagttcctcttttgtgctgcttctcaattagcgtttaaggtgagcataaatcaactgtccatcaggtgaggtgtgctccatacccagcggttcttcatgagtagtgggctatgcaggagcttctgggagatttttttgagtcaaagacttaaagggcccaatgaattattatatacatactgcatcttggttatttctgaaggtagcattctttggagttaaaatgcacatatagacacatacacccaaacacttacaccaaactactgaatgaagaagtattttggtaaccaggccatttttggtgggaatccaagattggtctcccatatgcagaaatagacaaaaagtatattaaacaaagtttcagagtatattgttgaagagacagagacaagtaatttcagtgtaaagtgtgtgattgaaggtgataagggaaaagataaagaccagaaattcccttttcaccttttcaggaaaataacttagactctagtatttatgggtggatttatccttttgccttctggtatacttccttacttttaaggataaatcataaagtcagttgctcaaaaagaaatcaatagttgaattagtgagtatagtggggttccatgatttatcatgaattttaaagtatgcattattaaattgtaaaactccaaggtgatgttgtacctcttttgcttgccaaagtacagaatttgaattatcagcaaagaaaaaaaaaaaagccagccaagctttaaattatgtgaccataatgtactgatttcagtaagtctcataggttaaaaaaaaaagtcaccaaatagtgtgaaatatattacttaactgtccgtaagcagtatattagtattatcttgttcaggaaaaggttgaataatatatgccttgtgtaatattgaaaattgaaaagtacaactaacgcaaccaagtgtgctaaaaatgagcttgattaaatcaaccacctatttttgacatggaaatgaagcagggtttcttttcttcactcaaattttggcgaatctcaaaattagatcctaagatgtgttcttatttttataacatctttattgaaattctatttataatacagaatcttgttttgaaaataacctaattaatatattaaaattccaaattcatggcatgcttaaattttaactaaattttaaagccattctgattattgagttccagttgaagttagtggaaatctgaacattctcctgtggaaggcagagaaatctaagctgtgtctgcccaatgaataatggaaaatgccatgaattacctggatgttctttttacgaggtgacaagagttggggacagaactcccattacaactgaccaagtttctcttctagatgattttttgaaagttaacattaatgcctgctttttggaaagtcagaatcagaagatagtcttggaagctgtttggaaaagacagtggagatgaggtcagttgtgttttttaagatggcaattactttggtagctgggaaagcataaagctcaaatgaaatgtatgcattcacatttagaaaagtgaattgaagtttcaagttttaaagttcattgcaattaaacttccaaagaaagttctacagtgtcctaagtgctaagtgcttattacattttattaagctttttggaatctttgtaccaaaattttaaaaaagggagtttttgatagttgtgtgtatgtgtgtgtggggtggggggatggtaagagaaaagagagaaacactgaaaagaaggaaagatggttaaacattttcccactcattctgaattaattaatttggagcacaaaattcaaagcatggacatttagaagaaagatgtttggcgtagcagagttaaatctcaaataggctattaaaaaagtctacaacatagcagatctgttttgtggtttggaatattaaaaaacttcatgtaattttattttaaaatttcatagctgtacttcttgaatataaaaaatcatgccagtatttttaaaggcattagagtcaactacacaaagcaggcttgcccagtacatttaaattttttggcacttgccattccaaaatattatgccccaccaaggctgagacagtgaatttgggctgctgtagcctatttttttagattgagaaatgtgtagctgcaaaaataatcatgaaccaatctggatgcctcattatgtcaaccaggtccagatgtgctataatctgtttttacgtatgtaggcccagtcgtcatcagatgcttgcggcaaaaggaaagctgtgtttatatggaagaaagtaaggtgcttggagtttacctggcttatttaatatgcttataacctagttaaagaaaggaaaagaaaacaaaaaacgaatgaaaataactgaatttggaggctggagtaatcagattactgctttaatcagaaaccctcattgtgtttctaccggagagagaatgtatttgctgacaaccattaaagtcagaagttttactccaggttattgcaataaagtataatgtttattaaatgcttcatttgtatgtcaaagctttgactctataagcaaattgcttttttccaaaacaaaaagatgtctcaggtttgttttgtgaattttctaaaagctttcatgtcccagaacttagcctttacctgtgaagtgttactacagccttaatattttcctagtagatctatattagatcaaatagttgcatagcagtatatgttaatttgtgtgtttttagctgtgacacaactgtgtgattaaaaggtatactttagtagacatttataactcaaggataccttcttatttaatcttttcttatttttgtactttatcatgaatgcttttagtgtgtgcataatagctacagtgcatagttgtagacaaagtacattctggggaaacaacatttatatgtagcctttactgtttgatataccaaattaaaaaaaaattgtatctcattacttatactgggacaccattaccaaaataataaaaatcactttcataatcttgttatgaagttttatgttgtagcaaatatagtctaatgtatcactttatttcaactattactatggattattcaattaaaatattgcactgtaaa

SEQ ID NO: 401660 - DNA, 7424 bp, Homo sapiens
  misc_feature (1681)..(1681): n is a, c, g, or t
acatgcgaagaaaatgcccatgcatttctttaagcagaaatataagttagtgaatttgtttcttcttgataaaatggttagaatttgcttagaaattccttttatcataaaagtaaaaattatcagctttaaccttctcatttgtctcctactgcttcttttcttgttctttattctcatccatccccttctctgtctttgcctctactcttcctctattccttcataagaatctaaacaactcctttaaacatcaattcaaatgttcttcccttggatagagatcacttccatccccttcataactagctgggcctagtacctttgggttagcaattttgccagagatgttggagaaaaagggggtagcatttcctcttgaaaatccagcctgcaaggcatttacaatctcatgctggtttcgtaaggccctgctgtccctccagaatagaggcccacagcactcactaggtaccaggcatggtgaacttgcttgcccaagctctctagtaggtggcagatttacccaggtctgcctgactttagagcctattcttttaatcattgtaccttactgtctttatagacaaggtcaggctctctatgcttctgtgagataattttccctaggagtgtaaatagttactatagagacactagatgccacctgctatagccctcagaagtggcatcagactatgcctgggctttctgttttaaggacaaggaagaatgagtgtgacagtgaaaggttgtatttgtaaaggctggaagagcagaaatccccaagtgctagagaaaagaatgtggacaagtgtatggtatccaatcatagtatgttagagctgagttgggctttaaagatgatctcctctaacccctttatttgcagttgaagacgttgaggatctgagacattaagtgaattgtctgaggacacacagccagtttcttagatgcagagccaaggatgaatttttttcattcagactaagctgttttttgcagtccacctttactctacttggggttcatttctttttaagaagtctcaaagattagaaaattgagtcattttgagcaatataatgtcatattgtacaattctgctgaaagtaattttaatagcaatgccggcagatctcccaaatccatgggtttcaaaatatttccgccttttgctaagctaatatatagaatttcaaaaccatatttataccacatacaatttccaaagagctgggcaatttcctataaaaactcagctgtgcactgattgccaagttggaaaactcagggtttcctggcaacacccacttgggctctagggaatgcaagcttctcagcaaacaacctctcctgacttacgagctccatcggcagccacgacccgagtcacagcggccctttctgatgttcttgtctctgtcgcttatgtttctcaagaacctgtaatcttgccttaatccctcaccagctgaatacctcctacatgctaaactcctggaatgaaaggtccacatttctctcatgctaggagtttgggaccagaattcagatgaactcattgctagtactggttcaaaagctaatgagccctctagattcccaggtccttagtttcctcatgggtaaaatatagacaataactcctacctgttcatctttcagggcttttccnaagattttcaacatctgaaattcacaggatcatggagacgaactaaaccatcatggagactaactaaaccagatgcatctagcccctcatgttagagttgagaaaacagaaacccagggtttggggactcccttgaagtcatcaagttcctgttgatggcaaaatcaggaccaagcttctgatcctcccaaatattccttcacttctcagtgctgccaggggcgctgtgaggcaaaccgctgccactacactggctttccgggaagcaagctcaagtcgcggagagggaagggaggtcgtgcgctcggggcggggcgcgctcccaagtcgagcgcagcggccggggcaggttgtaccgagcgtggttctggggacaccgtgcggcctcgattggaggtggctgtgatgaagcgcggttaccgcacaatggaaacgtgggcacctccgctcccatgaaagcctgctggtagagctccgaggccggccggtgcgcctggacgggagtccgggtcaaagcggcctggtgtgcggcgcgccccgccccccgcaggccccgccctgccaggtcgcgctgccctccttctacccagtccttaaaacccggaggagcgggatggcgcgctttgactctggagtgggagtgggagcgagcgcttctgcgactccagttgtgagagccgcaagggcatgggaattgacgccactcaccgacccccagtctcaatctcaacgctgtgaggaaacctcgactttgccaggtccccaagggcagcggggctcggcgagcgaggcacccttctccgtccccatcccaatccaagcgctcctggcactgacgacgccaagagactcgagtgggagttaaagcttccagtgagggcagcaggtgtccaggccgggcctgcgggttcctgttgacgtcttgccctaggcaaaggtcccagttccttctcggagccggctgtcccgcgccactggaaaccgcacctccccgcagcatgggcaccagcctcagcccgaacgacccttggccgctaaacccgctgtccatccagcagaccacgctcctgctactcctgtcggtgctggccactgtgcatgtgggccagcggctgctgaggcaacggaggcggcagctccggtccgcgcccccgggcccgtttgcgtggccactgatcggaaacgcggcggcggtgggccaggcggctcacctctcgttcgctcgcctggcgcggcgctacggcgacgttttccagatccgcctgggcagctgccccatagtggtgctgaatggcgagcgcgccatccaccaggccctggtgcagcagggctcggccttcgccgaccggccggccttcgcctccttccgtgtggtgtccggcggccgcagcatggctttcggccactactcggagcactggaaggtgcagcggcgcgcagcccacagcatgatgcgcaacttcttcacgcgccagccgcgcagccgccaagtcctcgagggccacgtgctgagcgaggcgcgcgagctggtggcgctgctggtgcgcggcagcgcggacggcgccttcctcgacccgaggccgctgaccgtcgtggccgtggccaacgtcatgagtgccgtgtgtttcggctgccgctacagccacgacgaccccgagttccgtgagctgctcagccacaacgaagagttcgggcgcacggtgggcgcgggcagcctggtggacgtgatgccctggctgcagtacttccccaacccggtgcgcaccgttttccgcgaattcgagcagctcaaccgcaacttcagcaacttcatcctggacaagttcttgaggcactgcgaaagccttcggcccggggccgccccccgcgacatgatggacgcctttatcctctctgcggaaaagaaggcggccggggactcgcacggtggtggcgcgcggctggatttggagaacgtaccggccactatcactgacatcttcggcgccagccaggacaccctgtccaccgcgctgcagtggctgctcctcctcttcaccaggtatcctgatgtgcagactcgagtgcaggcagaattggatcaggtcgtggggagggaccgtctgccttgtatgggtgaccagcccaacctgccctatgtcctggccttcctttatgaagccatgcgcttctccagctttgtgcctgtcactattcctcatgccaccactgccaacacctctgtcttgggctaccacattcccaaggacactgtggtttttgtcaaccagtggtctgtgaatcatgacccagtgaagtggcctaacccggagaactttgatccagctcgattcttggacaaggatggcctcatcaacaaggacctgaccagcagagtgatgattttttcagtgggcaaaaggcggtgcattggcgaagaactttctaagatgcagctttttctcttcatctccatcctggctcaccagtgcgatttcagggccaacccaaatgagcctgcgaaaatgaatttcagttatggtctaaccattaaacccaagtcatttaaagtcaatgtcactctcagagagtccatggagctccttgatagtgctgtccaaaatttacaagccaaggaaacttgccaataagaagcaagaggcaagctgaaattttagaaatattcacatcttcggagatgaggagtaaaattcagtttttttccagttcctcttttgtgctgcttctcaattagcgtttaaggtgagcataaatcaactgtccatcaggtgaggtgtgctccatacccagcggttcttcatgagtagtgggctatgcaggagcttctgggagatttttttgagtcaaagacttaaagggcccaatgaattattatatacatactgcatcttggttatttctgaaggtagcattctttggagttaaaatgcacatatagacacatacacccaaacacttacaccaaactactgaatgaagaagtattttggtaaccaggccatttttggtgggaatccaagattggtctcccatatgcagaaatagacaaaaagtatattaaacaaagtttcagagtatattgttgaagagacagagacaagtaatttcagtgtaaagtgtgtgattgaaggtgataagggaaaagataaagaccagaaattcccttttcaccttttcaggaaaataacttagactctagtatttatgggtggatttatccttttgccttctggtatacttccttacttttaaggataaatcataaagtcagttgctcaaaaagaaatcaatagttgaattagtgagtatagtggggttccatgatttatcatgaattttaaagtatgcattattaaattgtaaaactccaaggtgatgttgtacctcttttgcttgccaaagtacagaatttgaattatcagcaaagaaaaaaaaaaaagccagccaagctttaaattatgtgaccataatgtactgatttcagtaagtctcataggttaaaaaaaaaagtcaccaaatagtgtgaaatatattacttaactgtccgtaagcagtatattagtattatcttgttcaggaaaaggttgaataatatatgccttgtgtaatattgaaaattgaaaagtacaactaacgcaaccaagtgtgctaaaaatgagcttgattaaatcaaccacctatttttgacatggaaatgaagcagggtttcttttcttcactcaaattttggcgaatctcaaaattagatcctaagatgtgttcttatttttataacatctttattgaaattctatttataatacagaatcttgttttgaaaataacctaattaatatattaaaattccaaattcatggcatgcttaaattttaactaaattttaaagccattctgattattgagttccagttgaagttagtggaaatctgaacattctcctgtggaaggcagagaaatctaagctgtgtctgcccaatgaataatggaaaatgccatgaattacctggatgttctttttacgaggtgacaagagttggggacagaactcccattacaactgaccaagtttctcttctagatgattttttgaaagttaacattaatgcctgctttttggaaagtcagaatcagaagatagtcttggaagctgtttggaaaagacagtggagatgaggtcagttgtgttttttaagatggcaattactttggtagctgggaaagcataaagctcaaatgaaatgtatgcattcacatttagaaaagtgaattgaagtttcaagttttaaagttcattgcaattaaacttccaaagaaagttctacagtgtcctaagtgctaagtgcttattacattttattaagctttttggaatctttgtaccaaaattttaaaaaagggagtttttgatagttgtgtgtatgtgtgtgtggggtggggggatggtaagagaaaagagagaaacactgaaaagaaggaaagatggttaaacattttcccactcattctgaattaattaatttggagcacaaaattcaaagcatggacatttagaagaaagatgtttggcgtagcagagttaaatctcaaataggctattaaaaaagtctacaacatagcagatctgttttgtggtttggaatattaaaaaacttcatgtaattttattttaaaatttcatagctgtacttcttgaatataaaaaatcatgccagtatttttaaaggcattagagtcaactacacaaagcaggcttgcccagtacatttaaattttttggcacttgccattccaaaatattatgccccaccaaggctgagacagtgaatttgggctgctgtagcctatttttttagattgagaaatgtgtagctgcaaaaataatcatgaaccaatctggatgcctcattatgtcaaccaggtccagatgtgctataatctgtttttacgtatgtaggcccagtcgtcatcagatgcttgcggcaaaaggaaagctgtgtttatatggaagaaagtaaggtgcttggagtttacctggcttatttaatatgcttataacctagttaaagaaaggaaaagaaaacaaaaaacgaatgaaaataactgaatttggaggctggagtaatcagattactgctttaatcagaaaccctcattgtgtttctaccggagagagaatgtatttgctgacaaccattaaagtcagaagttttactccaggttattgcaataaagtataatgtttattaaatgcttcatttgtatgtcaaagctttgactctataagcaaattgcttttttccaaaacaaaaagatgtctcaggtttgttttgtgaattttctaaaagctttcatgtcccagaacttagcctttacctgtgaagtgttactacagccttaatattttcctagtagatctatattagatcaaatagttgcatagcagtatatgttaatttgtgtgtttttagctgtgacacaactgtgtgattaaaaggtatactttagtagacatttataactcaaggataccttcttatttaatcttttcttatttttgtactttatcatgaatgcttttagtgtgtgcataatagctacagtgcatagttgtagacaaagtacattctggggaaacaacatttatatgtagcctttactgtttgatataccaaattaaaaaaaaattgtatctcattacttatactgggacaccattaccaaaataataaaaatcactttcata

SEQ ID NO: 401661 - DNA, 4938 bp, Homo sapiens
agcggagtccccagaggctggggtaggggcgtggggcgcccgctcctgtctctgcacccctgagtgtcacgccttctcctctctgtccccagcatgggcaccagcctcagcccgaacgacccttggccgctaaacccgctgtccatccagcagaccacgctcctgctactcctgtcggtgctggccactgtgcatgtgggccagcggctgctgaggcaacggaggcggcagctccggtccgcgcccccgggcccgtttgcgtggccactgatcggaaacgcggcggcggtgggccaggcggctcacctctcgttcgctcgcctggcgcggcgctacggcgacgttttccagatccgcctgggcagctgccccatagtggtgctgaatggcgagcgcgccatccaccaggccctggtgcagcagggctcggccttcgccgaccggccggccttcgcctccttccgtgtggtgtccggcggccgcagcatggctttcggccactactcggagcactggaaggtgcagcggcgcgcagcccacagcatgatgcgcaacttcttcacgcgccagccgcgcagccgccaagtcctcgagggccacgtgctgagcgaggcgcgcgagctggtggcgctgctggtgcgcggcagcgcggacggcgccttcctcgacccgaggccgctgaccgtcgtggccgtggccaacgtcatgagtgccgtgtgtttcggctgccgctacagccacgacgaccccgagttccgtgagctgctcagccacaacgaagagttcgggcgcacggtgggcgcgggcagcctggtggacgtgatgccctggctgcagtacttccccaacccggtgcgcaccgttttccgcgaattcgagcagctcaaccgcaacttcagcaacttcatcctggacaagttcttgaggcactgcgaaagccttcggcccggggccgccccccgcgacatgatggacgcctttatcctctctgcggaaaagaaggcggccggggactcgcacggtggtggcgcgcggctggatttggagaacgtaccggccactatcactgacatcttcggcgccagccaggacaccctgtccaccgcgctgcagtggctgctcctcctcttcaccaggtatcctgatgtgcagactcgagtgcaggcagaattggatcaggtcgtggggagggaccgtctgccttgtatgggtgaccagcccaacctgccctatgtcctggccttcctttatgaagccatgcgcttctccagctttgtgcctgtcactattcctcatgccaccactgccaacacctctgtcttgggctaccacattcccaaggacactgtggtttttgtcaaccagtggtctgtgaatcatgacccagtgaagtggcctaacccggagaactttgatccagctcgattcttggacaaggatggcctcatcaacaaggacctgaccagcagagtgatgattttttcagtgggcaaaaggcggtgcattggcgaagaactttctaagatgcagctttttctcttcatctccatcctggctcaccagtgcgatttcagggccaacccaaatgagcctgcgaaaatgaatttcagttatggtctaaccattaaacccaagtcatttaaagtcaatgtcactctcagagagtccatggagctccttgatagtgctgtccaaaatttacaagccaaggaaacttgccaataagaagcaagaggcaagctgaaattttagaaatattcacatcttcggagatgaggagtaaaattcagtttttttccagttcctcttttgtgctgcttctcaattagcgtttaaggtgagcataaatcaactgtccatcaggtgaggtgtgctccatacccagcggttcttcatgagtagtgggctatgcaggagcttctgggagatttttttgagtcaaagacttaaagggcccaatgaattattatatacatactgcatcttggttatttctgaaggtagcattctttggagttaaaatgcacatatagacacatacacccaaacacttacaccaaactactgaatgaagaagtattttggtaaccaggccatttttggtgggaatccaagattggtctcccatatgcagaaatagacaaaaagtatattaaacaaagtttcagagtatattgttgaagagacagagacaagtaatttcagtgtaaagtgtgtgattgaaggtgataagggaaaagataaagaccagaaattcccttttcaccttttcaggaaaataacttagactctagtatttatgggtggatttatccttttgccttctggtatacttccttacttttaaggataaatcataaagtcagttgctcaaaaagaaatcaatagttgaattagtgagtatagtggggttccatgatttatcatgaattttaaagtatgcattattaaattgtaaaactccaaggtgatgttgtacctcttttgcttgccaaagtacagaatttgaattatcagcaaagaaaaaaaaaaaagccagccaagctttaaattatgtgaccataatgtactgatttcagtaagtctcataggttaaaaaaaaaagtcaccaaatagtgtgaaatatattacttaactgtccgtaagcagtatattagtattatcttgttcaggaaaaggttgaataatatatgccttgtgtaatattgaaaattgaaaagtacaactaacgcaaccaagtgtgctaaaaatgagcttgattaaatcaaccacctatttttgacatggaaatgaagcagggtttcttttcttcactcaaattttggcgaatctcaaaattagatcctaagatgtgttcttatttttataacatctttattgaaattctatttataatacagaatcttgttttgaaaataacctaattaatatattaaaattccaaattcatggcatgcttaaattttaactaaattttaaagccattctgattattgagttccagttgaagttagtggaaatctgaacattctcctgtggaaggcagagaaatctaagctgtgtctgcccaatgaataatggaaaatgccatgaattacctggatgttctttttacgaggtgacaagagttggggacagaactcccattacaactgaccaagtttctcttctagatgattttttgaaagttaacattaatgcctgctttttggaaagtcagaatcagaagatagtcttggaagctgtttggaaaagacagtggagatgaggtcagttgtgttttttaagatggcaattactttggtagctgggaaagcataaagctcaaatgaaatgtatgcattcacatttagaaaagtgaattgaagtttcaagttttaaagttcattgcaattaaacttccaaagaaagttctacagtgtcctaagtgctaagtgcttattacattttattaagctttttggaatctttgtaccaaaattttaaaaaagggagtttttgatagttgtgtgtatgtgtgtgtggggtggggggatggtaagagaaaagagagaaacactgaaaagaaggaaagatggttaaacattttcccactcattctgaattaattaatttggagcacaaaattcaaagcatggacatttagaagaaagatgtttggcgtagcagagttaaatctcaaataggctattaaaaaagtctacaacatagcagatctgttttgtggtttggaatattaaaaaacttcatgtaattttattttaaaatttcatagctgtacttcttgaatataaaaaatcatgccagtatttttaaaggcattagagtcaactacacaaagcaggcttgcccagtacatttaaattttttggcacttgccattccaaaatattatgccccaccaaggctgagacagtgaatttgggctgctgtagcctatttttttagattgagaaatgtgtagctgcaaaaataatcatgaaccaatctggatgcctcattatgtcaaccaggtccagatgtgctataatctgtttttacgtatgtaggcccagtcgtcatcagatgcttgcggcaaaaggaaagctgtgtttatatggaagaaagtaaggtgcttggagtttacctggcttatttaatatgcttataacctagttaaagaaaggaaaagaaaacaaaaaacgaatgaaaataactgaatttggaggctggagtaatcagattactgctttaatcagaaaccctcattgtgtttctaccggagagagaatgtatttgctgacaaccattaaagtcagaagttttactccaggttattgcaataaagtataatgtttattaaatgcttcatttgtatgtcaaagctttgactctataagcaaattgcttttttccaaaacaaaaagatgtctcaggtttgttttgtgaattttctaaaagctttcatgtcccagaacttagcctttacctgtgaagtgttactacagccttaatattttcctagtagatctatattagatcaaatagttgcatagcagtatatgttaatttgtgtgtttttagctgtgacacaactgtgtgattaaaaggtatactttagtagacatttataactcaaggataccttcttatttaatcttttcttatttttgtactttatcatgaatgcttttagtgtgtgcataatagctacagtgcatagttgtagacaaagtacattctggggaaacaacatttatatgtagcctttactgtttgatataccaaattaaaaaaaaattgtatctcattacttatactgggacaccattaccaaaataataaaaatcactttcataatcttgttatgaagttttatgttgtagcaaatatagtctaatgtatcactttatttcaactattactatggattattcaattaaaatattgcactgtaaa

SEQ ID NO: 401662 - DNA, 4897 bp, Homo sapiens
agcggagtccccagaggctggggtaggggcgtggggcgcccgctcctgtctctgcacccctgagtgtcacgccttctcctctctgtccccagcatgggcaccagcctcagcccgaacgacccttggccgctaaacccgctgtccatccagcagaccacgctcctgctactcctgtcggtgctggccactgtgcatgtgggccagcggctgctgaggcaacggaggcggcagctccggtccgcgcccccgggcccgtttgcgtggccactgatcggaaacgcggcggcggtgggccaggcggctcacctctcgttcgctcgcctggcgcggcgctacggcgacgttttccagatccgccatccaccaggccctggtgcagcagggctcggccttcgccgaccggccggccttcgcctccttccgtgtggtgtccggcggccgcagcatggctttcggccactactcggagcactggaaggtgcagcggcgcgcagcccacagcatgatgcgcaacttcttcacgcgccagccgcgcagccgccaagtcctcgagggccacgtgctgagcgaggcgcgcgagctggtggcgctgctggtgcgcggcagcgcggacggcgccttcctcgacccgaggccgctgaccgtcgtggccgtggccaacgtcatgagtgccgtgtgtttcggctgccgctacagccacgacgaccccgagttccgtgagctgctcagccacaacgaagagttcgggcgcacggtgggcgcgggcagcctggtggacgtgatgccctggctgcagtacttccccaacccggtgcgcaccgttttccgcgaattcgagcagctcaaccgcaacttcagcaacttcatcctggacaagttcttgaggcactgcgaaagccttcggcccggggccgccccccgcgacatgatggacgcctttatcctctctgcggaaaagaaggcggccggggactcgcacggtggtggcgcgcggctggatttggagaacgtaccggccactatcactgacatcttcggcgccagccaggacaccctgtccaccgcgctgcagtggctgctcctcctcttcaccaggtatcctgatgtgcagactcgagtgcaggcagaattggatcaggtcgtggggagggaccgtctgccttgtatgggtgaccagcccaacctgccctatgtcctggccttcctttatgaagccatgcgcttctccagctttgtgcctgtcactattcctcatgccaccactgccaacacctctgtcttgggctaccacattcccaaggacactgtggtttttgtcaaccagtggtctgtgaatcatgacccagtgaagtggcctaacccggagaactttgatccagctcgattcttggacaaggatggcctcatcaacaaggacctgaccagcagagtgatgattttttcagtgggcaaaaggcggtgcattggcgaagaactttctaagatgcagctttttctcttcatctccatcctggctcaccagtgcgatttcagggccaacccaaatgagcctgcgaaaatgaatttcagttatggtctaaccattaaacccaagtcatttaaagtcaatgtcactctcagagagtccatggagctccttgatagtgctgtccaaaatttacaagccaaggaaacttgccaataagaagcaagaggcaagctgaaattttagaaatattcacatcttcggagatgaggagtaaaattcagtttttttccagttcctcttttgtgctgcttctcaattagcgtttaaggtgagcataaatcaactgtccatcaggtgaggtgtgctccatacccagcggttcttcatgagtagtgggctatgcaggagcttctgggagatttttttgagtcaaagacttaaagggcccaatgaattattatatacatactgcatcttggttatttctgaaggtagcattctttggagttaaaatgcacatatagacacatacacccaaacacttacaccaaactactgaatgaagaagtattttggtaaccaggccatttttggtgggaatccaagattggtctcccatatgcagaaatagacaaaaagtatattaaacaaagtttcagagtatattgttgaagagacagagacaagtaatttcagtgtaaagtgtgtgattgaaggtgataagggaaaagataaagaccagaaattcccttttcaccttttcaggaaaataacttagactctagtatttatgggtggatttatccttttgccttctggtatacttccttacttttaaggataaatcataaagtcagttgctcaaaaagaaatcaatagttgaattagtgagtatagtggggttccatgatttatcatgaattttaaagtatgcattattaaattgtaaaactccaaggtgatgttgtacctcttttgcttgccaaagtacagaatttgaattatcagcaaagaaaaaaaaaaaagccagccaagctttaaattatgtgaccataatgtactgatttcagtaagtctcataggttaaaaaaaaaagtcaccaaatagtgtgaaatatattacttaactgtccgtaagcagtatattagtattatcttgttcaggaaaaggttgaataatatatgccttgtgtaatattgaaaattgaaaagtacaactaacgcaaccaagtgtgctaaaaatgagcttgattaaatcaaccacctatttttgacatggaaatgaagcagggtttcttttcttcactcaaattttggcgaatctcaaaattagatcctaagatgtgttcttatttttataacatctttattgaaattctatttataatacagaatcttgttttgaaaataacctaattaatatattaaaattccaaattcatggcatgcttaaattttaactaaattttaaagccattctgattattgagttccagttgaagttagtggaaatctgaacattctcctgtggaaggcagagaaatctaagctgtgtctgcccaatgaataatggaaaatgccatgaattacctggatgttctttttacgaggtgacaagagttggggacagaactcccattacaactgaccaagtttctcttctagatgattttttgaaagttaacattaatgcctgctttttggaaagtcagaatcagaagatagtcttggaagctgtttggaaaagacagtggagatgaggtcagttgtgttttttaagatggcaattactttggtagctgggaaagcataaagctcaaatgaaatgtatgcattcacatttagaaaagtgaattgaagtttcaagttttaaagttcattgcaattaaacttccaaagaaagttctacagtgtcctaagtgctaagtgcttattacattttattaagctttttggaatctttgtaccaaaattttaaaaaagggagtttttgatagttgtgtgtatgtgtgtgtggggtggggggatggtaagagaaaagagagaaacactgaaaagaaggaaagatggttaaacattttcccactcattctgaattaattaatttggagcacaaaattcaaagcatggacatttagaagaaagatgtttggcgtagcagagttaaatctcaaataggctattaaaaaagtctacaacatagcagatctgttttgtggtttggaatattaaaaaacttcatgtaattttattttaaaatttcatagctgtacttcttgaatataaaaaatcatgccagtatttttaaaggcattagagtcaactacacaaagcaggcttgcccagtacatttaaattttttggcacttgccattccaaaatattatgccccaccaaggctgagacagtgaatttgggctgctgtagcctatttttttagattgagaaatgtgtagctgcaaaaataatcatgaaccaatctggatgcctcattatgtcaaccaggtccagatgtgctataatctgtttttacgtatgtaggcccagtcgtcatcagatgcttgcggcaaaaggaaagctgtgtttatatggaagaaagtaaggtgcttggagtttacctggcttatttaatatgcttataacctagttaaagaaaggaaaagaaaacaaaaaacgaatgaaaataactgaatttggaggctggagtaatcagattactgctttaatcagaaaccctcattgtgtttctaccggagagagaatgtatttgctgacaaccattaaagtcagaagttttactccaggttattgcaataaagtataatgtttattaaatgcttcatttgtatgtcaaagctttgactctataagcaaattgcttttttccaaaacaaaaagatgtctcaggtttgttttgtgaattttctaaaagctttcatgtcccagaacttagcctttacctgtgaagtgttactacagccttaatattttcctagtagatctatattagatcaaatagttgcatagcagtatatgttaatttgtgtgtttttagctgtgacacaactgtgtgattaaaaggtatactttagtagacatttataactcaaggataccttcttatttaatcttttcttatttttgtactttatcatgaatgcttttagtgtgtgcataatagctacagtgcatagttgtagacaaagtacattctggggaaacaacatttatatgtagcctttactgtttgatataccaaattaaaaaaaaattgtatctcattacttatactgggacaccattaccaaaataataaaaatcactttcataatcttgttatgaagttttatgttgtagcaaatatagtctaatgtatcactttatttcaactattactatggattattcaattaaaatattgcactgtaaa

SEQ ID NO: 401663 - DNA, 1285 bp, Homo sapiens
ctcactcatgtgaaacctatcagggtgtgtagagtgtagaaattgacacacaacatagcagatctgttttgtggtttggaatattaaaaaacttcatgtaattttattttaaaatttcatagctgtacttcttgaatataaaaaatcatgccagtatttttaaaggcattagagtcaactacacaaagcaggcttgcccagtacatttaaattttttggcacttgccattccaaaatattatgccccaccaaggctgagacagtgaatttgggctgctgtagcctatttttttagattgagaaatgtgtagctgcaaaaataatcatgaaccaatctggatgcctcattatgtcaaccaggtccagatgtgctataatctgtttttacgtatgtaggcccagtcgtcatcagatgcttgcggcaaaaggaaagctgtgtttatatggaagaaagtaaggtgcttggagtttacctggcttatttaatatgcttataacctagttaaagaaaggaaaagaaaacaaaaaacgaatgaaaataactgaatttggaggctggagtaatcagattactgctttaatcagaaaccctcattgtgtttctaccggagagagaatgtatttgctgacaaccattaaagtcagaagttttactccaggttattgcaataaagtataatgtttattaaatgcttcatttgtatgtcaaagctttgactctataagcaaattgcttttttccaaaacaaaaagatgtctcaggtttgttttgtgaattttctaaaagctttcatgtcccagaacttagcctttacctgtgaagtgttactacagccttaatattttcctagtagatctatattagatcaaatagttgcatagcagtatatgttaatttgtgtgtttttagctgtgacacaactgtgtgattaaaaggtatactttagtagacatttataactcaaggataccttcttatttaatcttttcttatttttgtactttatcatgaatgcttttagtgtgtgcataatagctacagtgcatagttgtagacaaagtacattctggggaaacaacatttatatgtagcctttactgtttgatataccaaattaaaaaaaaattgtatctcattacttatactgggacaccattaccaaaataataaaaatcactttcataatcttgttatgaagttttatgttgtagcaaatatagtctaatgtatcactttatttcaactattactatggattattcaattaaaatattgcactgtaaa

SEQ ID NO: 401664 - DNA, 1249 bp, Homo sapiens
caaaaaacgaatgaaaataactgaatttggaggctggagtaatcagattactgctttaatcagaaaccctcattgtgtttctaccggagagagaatgtatttgctgacaaccattaaagtcagaagttttactccaggttattgcaataaagtataatgtttattaaatgcttcatttgtatgtcaaagctttgactctataagcaaattgcttttttccaaaacagtgaatttgggctgctgtagcctatttttttagattgagaaatgtgtagctgcaaaaataatcatgaaccaatctggatgcctcattatgtcaaccaggtccagatgtgctataatctgtttttacgtatgtaggcccagtcgtcatcagatgcttgcggcaaaaggaaagctgtgtttatatggaagaaagtaaggtgcttggagtttacctggcttatttaatatgcttataacctagttaaagaaaggaaaagaaaacaaaaaacgaatgaaaataactgaatttggaggctggagtaatcagattactgctttaatcagaaaccctcattgtgtttctaccggagagagaatgtatttgctgacaaccattaaagtcagaagttttactccaggttattgcaataaagtataatgtttattaaatgcttcatttgtatgtcaaagctttgactctataagcaaattgcttttttccaaaacaaaaagatgtctcaggtttgttttgtgaattttctaaaagctttcatgtcccagaacttagcctttacctgtgaagtgttactacagccttaatattttcctagtagatctatattagatcaaatagttgcatagcagtatatgttaatttgtgtgtttttagctgtgacacaactgtgtgattaaaaggtatactttagtagacatttataactcaaggataccttcttatttaatcttttcttatttttgtactttatcatgaatgcttttagtgtgtgcataatagctacagtgcatagttgtagacaaagtacattctggggaaacaacatttatatgtagcctttactgtttgatataccaaattaaaaaaaaattgtatctcattacttatactgggacaccattaccaaaataataaaaatcactttcataatcttgttatgaagttttatgttgtagcaaatatagtctaatgtatcactttatttcaactattactatggattattcaattaaaatattgcactgtaaa

SEQ ID NO: 401665 - DNA, 2879 bp, Homo sapiens
  misc_feature (1681)..(1681): n is a, c, g, or t
acatgcgaagaaaatgcccatgcatttctttaagcagaaatataagttagtgaatttgtttcttcttgataaaatggttagaatttgcttagaaattccttttatcataaaagtaaaaattatcagctttaaccttctcatttgtctcctactgcttcttttcttgttctttattctcatccatccccttctctgtctttgcctctactcttcctctattccttcataagaatctaaacaactcctttaaacatcaattcaaatgttcttcccttggatagagatcacttccatccccttcataactagctgggcctagtacctttgggttagcaattttgccagagatgttggagaaaaagggggtagcatttcctcttgaaaatccagcctgcaaggcatttacaatctcatgctggtttcgtaaggccctgctgtccctccagaatagaggcccacagcactcactaggtaccaggcatggtgaacttgcttgcccaagctctctagtaggtggcagatttacccaggtctgcctgactttagagcctattcttttaatcattgtaccttactgtctttatagacaaggtcaggctctctatgcttctgtgagataattttccctaggagtgtaaatagttactatagagacactagatgccacctgctatagccctcagaagtggcatcagactatgcctgggctttctgttttaaggacaaggaagaatgagtgtgacagtgaaaggttgtatttgtaaaggctggaagagcagaaatccccaagtgctagagaaaagaatgtggacaagtgtatggtatccaatcatagtatgttagagctgagttgggctttaaagatgatctcctctaacccctttatttgcagttgaagacgttgaggatctgagacattaagtgaattgtctgaggacacacagccagtttcttagatgcagagccaaggatgaatttttttcattcagactaagctgttttttgcagtccacctttactctacttggggttcatttctttttaagaagtctcaaagattagaaaattgagtcattttgagcaatataatgtcatattgtacaattctgctgaaagtaattttaatagcaatgccggcagatctcccaaatccatgggtttcaaaatatttccgccttttgctaagctaatatatagaatttcaaaaccatatttataccacatacaatttccaaagagctgggcaatttcctataaaaactcagctgtgcactgattgccaagttggaaaactcagggtttcctggcaacacccacttgggctctagggaatgcaagcttctcagcaaacaacctctcctgacttacgagctccatcggcagccacgacccgagtcacagcggccctttctgatgttcttgtctctgtcgcttatgtttctcaagaacctgtaatcttgccttaatccctcaccagctgaatacctcctacatgctaaactcctggaatgaaaggtccacatttctctcatgctaggagtttgggaccagaattcagatgaactcattgctagtactggttcaaaagctaatgagccctctagattcccaggtccttagtttcctcatgggtaaaatatagacaataactcctacctgttcatctttcagggcttttccnaagattttcaacatctgaaattcacaggatcatggagacgaactaaaccatcatggagactaactaaaccagatgcatctagcccctcatgttagagttgagaaaacagaaacccagggtttggggactcccttgaagtcatcaagttcctgttgatggcaaaatcaggaccaagcttctgatcctcccaaatattccttcacttctcagtgctgccaggggcgctgtgaggcaaaccgctgccactacactggctttccgggaagcaagctcaagtcgcggagagggaagggaggtcgtgcgctcggggcggggcgcgctcccaagtcgagcgcagcggccggggcaggttgtaccgagcgtggttctggggacaccgtgcggcctcgattggaggtggctgtgatgaagcgcggttaccgcacaatggaaacgtgggcacctccgctcccatgaaagcctgctggtagagctccgaggccggccggtgcgcctggacgggagtccgggtcaaagcggcctggtgtgcggcgcgccccgccccccgcaggccccgccctgccaggtcgcgctgccctccttctacccagtccttaaaacccggaggagcgggatggcgcgctttgactctggagtgggagtgggagcgagcgcttctgcgactccagttgtgagagccgcaagggcatgggaattgacgccactcaccgacccccagtctcaatctcaacgctgtgaggaaacctcgactttgccaggtccccaagggcagcggggctcggcgagcgaggcacccttctccgtccccatcccaatccaagcgctcctggcactgacgacgccaagagactcgagtgggagttaaagcttccagtgagggcagcaggtgtccaggccgggcctgcgggttcctgttgacgtcttgccctaggcaaaggtcccagttccttctcggagccggctgtcccgcgccactggaaaccgcacctccccgcagcatgggaccaacggacccatgcatttctaaatgatgccattatacactaatgatacatatagacatattttctaaaacatgtatctatattaaaaaaccactatattaatctttattcattgtcatgaatatgaagcttagagtactgatgttttattttacgttctgctcaccagttaatacatagggatgggcccaacg

SEQ ID NO: 401666 - DNA, 729 bp, Homo sapiens
gaaattaggaagctgttttagatttttttcccagaaatattaatttagtcactgagctagatagcctatttaagaaaaagtggaattaaaataaattataatgtgctttctagatgaaataagaattttgctcacttgcttttctctctccacattaaacaccaaacaggtatcctgatgtgcagactcgagtgcaggcagaattggatcaggtcgtggggagggaccgtctgccttgtatgggtgaccagcccaacctgccctatgtcctggccttcctttatgaagccatgcgcttctccagctttgtgcctgtcactattcctcatgccaccactgccaacacctctgtcttgggctaccacattcccaaggacactgtggtttttgtcaaccagtggtctgtgaatcatgacccagtgaagtggcctaacccggagaactttgatccagctcgattcttggacaaggatggcctcatcaacaaggacctgaccagcagagtgatgattttttcagtgggcaaaaggcggtgcattggcgaagaactttctaagatgcagctttttctcttcatctccatcctggctcaccagtgcgatttcagggccaacccaaatgagcctgcgaaaatgaatttcagttatggtctaaccattaaacccaagtcatttaaagtcaatgtcactctcagagagtccatggagctccttgatagtgctgtccaaa

SEQ ID NO: 401667 - DNA, 7888 bp, Homo sapiens
  misc_feature (1681)..(1681): n is a, c, g, or t
acatgcgaagaaaatgcccatgcatttctttaagcagaaatataagttagtgaatttgtttcttcttgataaaatggttagaatttgcttagaaattccttttatcataaaagtaaaaattatcagctttaaccttctcatttgtctcctactgcttcttttcttgttctttattctcatccatccccttctctgtctttgcctctactcttcctctattccttcataagaatctaaacaactcctttaaacatcaattcaaatgttcttcccttggatagagatcacttccatccccttcataactagctgggcctagtacctttgggttagcaattttgccagagatgttggagaaaaagggggtagcatttcctcttgaaaatccagcctgcaaggcatttacaatctcatgctggtttcgtaaggccctgctgtccctccagaatagaggcccacagcactcactaggtaccaggcatggtgaacttgcttgcccaagctctctagtaggtggcagatttacccaggtctgcctgactttagagcctattcttttaatcattgtaccttactgtctttatagacaaggtcaggctctctatgcttctgtgagataattttccctaggagtgtaaatagttactatagagacactagatgccacctgctatagccctcagaagtggcatcagactatgcctgggctttctgttttaaggacaaggaagaatgagtgtgacagtgaaaggttgtatttgtaaaggctggaagagcagaaatccccaagtgctagagaaaagaatgtggacaagtgtatggtatccaatcatagtatgttagagctgagttgggctttaaagatgatctcctctaacccctttatttgcagttgaagacgttgaggatctgagacattaagtgaattgtctgaggacacacagccagtttcttagatgcagagccaaggatgaatttttttcattcagactaagctgttttttgcagtccacctttactctacttggggttcatttctttttaagaagtctcaaagattagaaaattgagtcattttgagcaatataatgtcatattgtacaattctgctgaaagtaattttaatagcaatgccggcagatctcccaaatccatgggtttcaaaatatttccgccttttgctaagctaatatatagaatttcaaaaccatatttataccacatacaatttccaaagagctgggcaatttcctataaaaactcagctgtgcactgattgccaagttggaaaactcagggtttcctggcaacacccacttgggctctagggaatgcaagcttctcagcaaacaacctctcctgacttacgagctccatcggcagccacgacccgagtcacagcggccctttctgatgttcttgtctctgtcgcttatgtttctcaagaacctgtaatcttgccttaatccctcaccagctgaatacctcctacatgctaaactcctggaatgaaaggtccacatttctctcatgctaggagtttgggaccagaattcagatgaactcattgctagtactggttcaaaagctaatgagccctctagattcccaggtccttagtttcctcatgggtaaaatatagacaataactcctacctgttcatctttcagggcttttccnaagattttcaacatctgaaattcacaggatcatggagacgaactaaaccatcatggagactaactaaaccagatgcatctagcccctcatgttagagttgagaaaacagaaacccagggtttggggactcccttgaagtcatcaagttcctgttgatggcaaaatcaggaccaagcttctgatcctcccaaatattccttcacttctcagtgctgccaggggcgctgtgaggcaaaccgctgccactacactggctttccgggaagcaagctcaagtcgcggagagggaagggaggtcgtgcgctcggggcggggcgcgctcccaagtcgagcgcagcggccggggcaggttgtaccgagcgtggttctggggacaccgtgcggcctcgattggaggtggctgtgatgaagcgcggttaccgcacaatggaaacgtgggcacctccgctcccatgaaagcctgctggtagagctccgaggccggccggtgcgcctggacgggagtccgggtcaaagcggcctggtgtgcggcgcgccccgccccccgcaggccccgccctgccaggtcgcgctgccctccttctacccagtccttaaaacccggaggagcgggatggcgcgctttgactctggagtgggagtgggagcgagcgcttctgcgactccagttgtgagagccgcaagggcatgggaattgacgccactcaccgacccccagtctcaatctcaacgctgtgaggaaacctcgactttgccaggtccccaagggcagcggggctcggcgagcgaggcacccttctccgtccccatcccaatccaagcgctcctggcactgacgacgccaagagactcgagtgggagttaaagcttccagtgagggcagcaggtgtccaggccgggcctgcgggttcctgttgacgtcttgccctaggcaaaggtcccagttccttctcggagccggctgtcccgcgccactggaaaccgcacctccccgcagcatgggcaccagcctcagcccgaacgacccttggccgctaaacccgctgtccatccagcagaccacgctcctgctactcctgtcggtgctggccactgtgcatgtgggccagcggctgctgaggcaacggaggcggcagctccggtccgcgcccccgggcccgtttgcgtggccactgatcggaaacgcggcggcggtgggccaggcggctcacctctcgttcgctcgcctggcgcggcgctacggcgacgttttccagatccgcctgggcagctgccccatagtggtgctgaatggcgagcgcgccatccaccaggccctggtgcagcagggctcggccttcgccgaccggccggccttcgcctccttccgtgtggtgtccggcggccgcagcatggctttcggccactactcggagcactggaaggtgcagcggcgcgcagcccacagcatgatgcgcaacttcttcacgcgccagccgcgcagccgccaagtcctcgagggccacgtgctgagcgaggcgcgcgagctggtggcgctgctggtgcgcggcagcgcggacggcgccttcctcgacccgaggccgctgaccgtcgtggccgtggccaacgtcatgagtgccgtgtgtttcggctgccgctacagccacgacgaccccgagttccgtgagctgctcagccacaacgaagagttcgggcgcacggtgggcgcgggcagcctggtggacgtgatgccctggctgcagtacttccccaacccggtgcgcaccgttttccgcgaattcgagcagctcaaccgcaacttcagcaacttcatcctggacaagttcttgaggcactgcgaaagccttcggcccggggccgccccccgcgacatgatggacgcctttatcctctctgcggaaaagaaggcggccggggactcgcacggtggtggcgcgcggctggatttggagaacgtaccggccactatcactgacatcttcggcgccagccaggacaccctgtccaccgcgctgcagtggctgctcctcctcttcaccaggtatcctgatgtgcagactcgagtgcaggcagaattggatcaggtcgtggggagggaccgtctgccttgtatgggtgaccagcccaacctgccctatgtcctggccttcctttatgaagccatgcgcttctccagctttgtgcctgtcactattcctcatgccaccactgccaacacctctgtcttgggctaccacattcccaaggacactgtggtttttgtcaaccagtggtctgtgaatcatgacccagtgaagtggcctaacccggagaactttgatccagctcgattcttggacaaggatggcctcatcaacaaggacctgaccagcagagtgatgattttttcagtgggcaaaaggcggtgcattggcgaagaactttctaagatgcagctttttctcttcatctccatcctggctcaccagtgcgatttcagggccaacccaaatgagcctgcgaaaatgaatttcagttatggtctaaccattaaacccaagtcatttaaagtcaatgtcactctcagagagtccatggagctccttgatagtgctgtccaaaatttacaagccaaggaaacttgccaataagaagcaagaggcaagctgaaattttagaaatattcacatcttcggagatgaggagtaaaattcagtttttttccagttcctcttttgtgctgcttctcaattagcgtttaaggtgagcataaatcaactgtccatcaggtgaggtgtgctccatacccagcggttcttcatgagtagtgggctatgcaggagcttctgggagatttttttgagtcaaagacttaaagggcccaatgaattattatatacatactgcatcttggttatttctgaaggtagcattctttggagttaaaatgcacatatagacacatacacccaaacacttacaccaaactactgaatgaagaagtattttggtaaccaggccatttttggtgggaatccaagattggtctcccatatgcagaaatagacaaaaagtatattaaacaaagtttcagagtatattgttgaagagacagagacaagtaatttcagtgtaaagtgtgtgattgaaggtgataagggaaaagataaagaccagaaattcccttttcaccttttcaggaaaataacttagactctagtatttatgggtggatttatccttttgccttctggtatacttccttacttttaaggataaatcataaagtcagttgctcaaaaagaaatcaatagttgaattagtgagtatagtggggttccatgatttatcatgaattttaaagtatgcattattaaattgtaaaactccaaggtgatgttgtacctcttttgcttgccaaagtacagaatttgaattatcagcaaagaaaaaaaaaaaagccagccaagctttaaattatgtgaccataatgtactgatttcagtaagtctcataggttaaaaaaaaaagtcaccaaatagtgtgaaatatattacttaactgtccgtaagcagtatattagtattatcttgttcaggaaaaggttgaataatatatgccttgtgtaatattgaaaattgaaaagtacaactaacgcaaccaagtgtgctaaaaatgagcttgattaaatcaaccacctatttttgacatggaaatgaagcagggtttcttttcttcactcaaattttggcgaatctcaaaattagatcctaagatgtgttcttatttttataacatctttattgaaattctatttataatacagaatcttgttttgaaaataacctaattaatatattaaaattccaaattcatggcatgcttaaattttaactaaattttaaagccattctgattattgagttccagttgaagttagtggaaatctgaacattctcctgtggaaggcagagaaatctaagctgtgtctgcccaatgaataatggaaaatgccatgaattacctggatgttctttttacgaggtgacaagagttggggacagaactcccattacaactgaccaagtttctcttctagatgattttttgaaagttaacattaatgcctgctttttggaaagtcagaatcagaagatagtcttggaagctgtttggaaaagacagtggagatgaggtcagttgtgttttttaagatggcaattactttggtagctgggaaagcataaagctcaaatgaaatgtatgcattcacatttagaaaagtgaattgaagtttcaagttttaaagttcattgcaattaaacttccaaagaaagttctacagtgtcctaagtgctaagtgcttattacattttattaagctttttggaatctttgtaccaaaattttaaaaaagggagtttttgatagttgtgtgtatgtgtgtgtggggtggggggatggtaagagaaaagagagaaacactgaaaagaaggaaagatggttaaacattttcccactcattctgaattaattaatttggagcacaaaattcaaagcatggacatttagaagaaagatgtttggcgtagcagagttaaatctcaaataggctattaaaaaagtctacaacatagcagatctgttttgtggtttggaatattaaaaaacttcatgtaattttattttaaaatttcatagctgtacttcttgaatataaaaaatcatgccagtatttttaaaggcattagagtcaactacacaaagcaggcttgcccagtacatttaaattttttggcacttgccattccaaaatattatgccccaccaaggctgagacagtgaatttgggctgctgtagcctatttttttagattgagaaatgtgtagctgcaaaaataatcatgaaccaatctggatgcctcattatgtcaaccaggtccagatgtgctataatctgtttttacgtatgtaggcccagtcgtcatcagatgcttgcggcaaaaggaaagctgtgtttatatggaagaaagtaaggtgcttggagtttacctggcttatttaatatgcttataacctagttaaagaaaggaaaagaaaacaaaaaacgaatgaaaataactgaatttggaggctggagtaatcagattactgctttaatcagaaaccctcattgtgtttctaccggagagagaatgtatttgctgacaaccattaaagtcagaagttttactccaggttattgcaataaagtataatgtttattaaatgcttcatttgtatgtcaaagctttgactctataagcaaattgcttttttccaaaacaaaaagatgtctcaggtttgttttgtgaattttctaaaagctttcatgtcccagaacttagcctttacctgtgaagtgttactacagccttaatattttcctagtagatctatattagatcaaatagttgcatagcagtatatgttaatttgtgtgtttttagctgtgacacaactgtgtgattaaaaggtatactttagtagacatttataactcaaggataccttcttatttaatcttttcttatttttgtactttatcatgaatgcttttagtgtgtgcataatagctacagtgcatagttgtagacaaagtacattctggggaaacaacatttatatgtagcctttactgtttgatataccaaattaaaaaaaaattgtatctcattacttatactgggacaccattaccaaaataataaaaatcactttcataatcttgttatgaagttttatgttgtagcaaatatagtctaatgtatcactttatttcaactattactatggattattcaattaaaatattgcactgtaaacattttatttgtccattctacatttcaggccgaggccacatgcttttttttcccgtaggttttcatcaaccaaatttctaatctctatatttttgaatttctaagaaccaacacggaggttacatttcaatcaaacaatcaagccaaatgagaattaatttgcaatgttgaaagattgaatagattgcgactttaagttgctgatcgatttctgcttcatctaaagaatgcagtacacatttttcttcctcagcctcataccagtcctttctctgagtattttcttctttcatttttttaaaggtacatgtgcctcaattagtgcaattaatgtccaataaaataagatgggtacaagtattct

SEQ ID NO: 401668 - DNA, 7470 bp, Homo sapiens
  misc_feature (1681)..(1681): n is a, c, g, or t
acatgcgaagaaaatgcccatgcatttctttaagcagaaatataagttagtgaatttgtttcttcttgataaaatggttagaatttgcttagaaattccttttatcataaaagtaaaaattatcagctttaaccttctcatttgtctcctactgcttcttttcttgttctttattctcatccatccccttctctgtctttgcctctactcttcctctattccttcataagaatctaaacaactcctttaaacatcaattcaaatgttcttcccttggatagagatcacttccatccccttcataactagctgggcctagtacctttgggttagcaattttgccagagatgttggagaaaaagggggtagcatttcctcttgaaaatccagcctgcaaggcatttacaatctcatgctggtttcgtaaggccctgctgtccctccagaatagaggcccacagcactcactaggtaccaggcatggtgaacttgcttgcccaagctctctagtaggtggcagatttacccaggtctgcctgactttagagcctattcttttaatcattgtaccttactgtctttatagacaaggtcaggctctctatgcttctgtgagataattttccctaggagtgtaaatagttactatagagacactagatgccacctgctatagccctcagaagtggcatcagactatgcctgggctttctgttttaaggacaaggaagaatgagtgtgacagtgaaaggttgtatttgtaaaggctggaagagcagaaatccccaagtgctagagaaaagaatgtggacaagtgtatggtatccaatcatagtatgttagagctgagttgggctttaaagatgatctcctctaacccctttatttgcagttgaagacgttgaggatctgagacattaagtgaattgtctgaggacacacagccagtttcttagatgcagagccaaggatgaatttttttcattcagactaagctgttttttgcagtccacctttactctacttggggttcatttctttttaagaagtctcaaagattagaaaattgagtcattttgagcaatataatgtcatattgtacaattctgctgaaagtaattttaatagcaatgccggcagatctcccaaatccatgggtttcaaaatatttccgccttttgctaagctaatatatagaatttcaaaaccatatttataccacatacaatttccaaagagctgggcaatttcctataaaaactcagctgtgcactgattgccaagttggaaaactcagggtttcctggcaacacccacttgggctctagggaatgcaagcttctcagcaaacaacctctcctgacttacgagctccatcggcagccacgacccgagtcacagcggccctttctgatgttcttgtctctgtcgcttatgtttctcaagaacctgtaatcttgccttaatccctcaccagctgaatacctcctacatgctaaactcctggaatgaaaggtccacatttctctcatgctaggagtttgggaccagaattcagatgaactcattgctagtactggttcaaaagctaatgagccctctagattcccaggtccttagtttcctcatgggtaaaatatagacaataactcctacctgttcatctttcagggcttttccnaagattttcaacatctgaaattcacaggatcatggagacgaactaaaccatcatggagactaactaaaccagatgcatctagcccctcatgttagagttgagaaaacagaaacccagggtttggggactcccttgaagtcatcaagttcctgttgatggcaaaatcaggaccaagcttctgatcctcccaaatattccttcacttctcagtgctgccaggggcgctgtgaggcaaaccgctgccactacactggctttccgggaagcaagctcaagtcgcggagagggaagggaggtcgtgcgctcggggcggggcgcgctcccaagtcgagcgcagcggccggggcaggttgtaccgagcgtggttctggggacaccgtgcggcctcgattggaggtggctgtgatgaagcgcggttaccgcacaatggaaacgtgggcacctccgctcccatgaaagcctgctggtagagctccgaggccggccggtgcgcctggacgggagtccgggtcaaagcggcctggtgtgcggcgcgccccgccccccgcaggccccgccctgccaggtcgcgctgccctccttctacccagtccttaaaacccggaggagcgggatggcgcgctttgactctggagtgggagtgggagcgagcgcttctgcgactccagttgtgagagccgcaagggcatgggaattgacgccactcaccgacccccagtctcaatctcaacgctgtgaggaaacctcgactttgccaggtccccaagggcagcggggctcggcgagcgaggcacccttctccgtccccatcccaatccaagcgctcctggcactgacgacgccaagagactcgagtgggagttaaagcttccagtgagggcagcaggtgtccaggccgggcctgcgggttcctgttgacgtcttgccctaggcaaaggtcccagttccttctcggagccggctgtcccgcgccactggaaaccgcacctccccgcagcatgggcaccagcctcagcccgaacgacccttggccgctaaacccgctgtccatccagcagaccacgctcctgctactcctgtcggtgctggccactgtgcatgtgggccagcggctgctgaggcaacggaggcggcagctccggtccgcgcccccgggcccgtttgcgtggccactgatcggaaacgcggcggcggtgggccaggcggctcacctctcgttcgctcgcctggcgcggcgctacggcgacgttttccagatccgcctgggcagctgccccatagtggtgctgaatggcgagcgcgccatccaccaggccctggtgcagcagggctcggccttcgccgaccggccggccttcgcctccttccgtgtggtgtccggcggccgcagcatggctttcggccactactcggagcactggaaggtgcagcggcgcgcagcccacagcatgatgcgcaacttcttcacgcgccagccgcgcagccgccaagtcctcgagggccacgtgctgagcgaggcgcgcgagctggtggcgctgctggtgcgcggcagcgcggacggcgccttcctcgacccgaggccgctgaccgtcgtggccgtggccaacgtcatgagtgccgtgtgtttcggctgccgctacagccacgacgaccccgagttccgtgagctgctcagccacaacgaagagttcgggcgcacggtgggcgcgggcagcctggtggacgtgatgccctggctgcagtacttccccaacccggtgcgcaccgttttccgcgaattcgagcagctcaaccgcaacttcagcaacttcatcctggacaagttcttgaggcactgcgaaagccttcggcccggggccgccccccgcgacatgatggacgcctttatcctctctgcggaaaagaaggcggccggggactcgcacggtggtggcgcgcggctggatttggagaacgtaccggccactatcactgacatcttcggcgccagccaggacaccctgtccaccgcgctgcagtggctgctcctcctcttcaccaggtatcctgatgtgcagactcgagtgcaggcagaattggatcaggtcgtggggagggaccgtctgccttgtatgggtgaccagcccaacctgccctatgtcctggccttcctttatgaagccatgcgcttctccagctttgtgcctgtcactattcctcatgccaccactgccaacacctctgtcttgggctaccacattcccaaggacactgtggtttttgtcaaccagtggtctgtgaatcatgacccagtgaagtggcctaacccggagaactttgatccagctcgattcttggacaaggatggcctcatcaacaaggacctgaccagcagagtgatgattttttcagtgggcaaaaggcggtgcattggcgaagaactttctaagatgcagctttttctcttcatctccatcctggctcaccagtgcgatttcagggccaacccaaatgagcctgcgaaaatgaatttcagttatggtctaaccattaaacccaagtcatttaaagtcaatgtcactctcagagagtccatggagctccttgatagtgctgtccaaaatttacaagccaaggaaacttgccaataagaagcaagaggcaagctgaaattttagaaatattcacatcttcggagatgaggagtaaaattcagtttttttccagttcctcttttgtgctgcttctcaattagcgtttaaggtgagcataaatcaactgtccatcaggtgaggtgtgctccatacccagcggttcttcatgagtagtgggctatgcaggagcttctgggagatttttttgagtcaaagacttaaagggcccaatgaattattatatacatactgcatcttggttatttctgaaggtagcattctttggagttaaaatgcacatatagacacatacacccaaacacttacaccaaactactgaatgaagaagtattttggtaaccaggccatttttggtgggaatccaagattggtctcccatatgcagaaatagacaaaaagtatattaaacaaagtttcagagtatattgttgaagagacagagacaagtaatttcagtgtaaagtgtgtgattgaaggtgataagggaaaagataaagaccagaaattcccttttcaccttttcaggaaaataacttagactctagtatttatgggtggatttatccttttgccttctggtatacttccttacttttaaggataaatcataaagtcagttgctcaaaaagaaatcaatagttgaattagtgagtatagtggggttccatgatttatcatgaattttaaagtatgcattattaaattgtaaaactccaaggtgatgttgtacctcttttgcttgccaaagtacagaatttgaattatcagcaaagaaaaaaaaaaaagccagccaagctttaaattatgtgaccataatgtactgatttcagtaagtctcataggttaaaaaaaaaagtcaccaaatagtgtgaaatatattacttaactgtccgtaagcagtatattagtattatcttgttcaggaaaaggttgaataatatatgccttgtgtaatattgaaaattgaaaagtacaactaacgcaaccaagtgtgctaaaaatgagcttgattaaatcaaccacctatttttgacatggaaatgaagcagggtttcttttcttcactcaaattttggcgaatctcaaaattagatcctaagatgtgttcttatttttataacatctttattgaaattctatttataatacagaatcttgttttgaaaataacctaattaatatattaaaattccaaattcatggcatgcttaaattttaactaaattttaaagccattctgattattgagttccagttgaagttagtggaaatctgaacattctcctgtggaaggcagagaaatctaagctgtgtctgcccaatgaataatggaaaatgccatgaattacctggatgttctttttacgaggtgacaagagttggggacagaactcccattacaactgaccaagtttctcttctagatgattttttgaaagttaacattaatgcctgctttttggaaagtcagaatcagaagatagtcttggaagctgtttggaaaagacagtggagatgaggtcagttgtgttttttaagatggcaattactttggtagctgggaaagcataaagctcaaatgaaatgtatgcattcacatttagaaaagtgaattgaagtttcaagttttaaagttcattgcaattaaacttccaaagaaagttctacagtgtcctaagtgctaagtgcttattacattttattaagctttttggaatctttgtaccaaaattttaaaaaagggagtttttgatagttgtgtgtatgtgtgtgtggggtggggggatggtaagagaaaagagagaaacactgaaaagaaggaaagatggttaaacattttcccactcattctgaattaattaatttggagcacaaaattcaaagcatggacatttagaagaaagatgtttggcgtagcagagttaaatctcaaataggctattaaaaaagtctacaacatagcagatctgttttgtggtttggaatattaaaaaacttcatgtaattttattttaaaatttcatagctgtacttcttgaatataaaaaatcatgccagtatttttaaaggcattagagtcaactacacaaagcaggcttgcccagtacatttaaattttttggcacttgccattccaaaatattatgccccaccaaggctgagacagtgaatttgggctgctgtagcctatttttttagattgagaaatgtgtagctgcaaaaataatcatgaaccaatctggatgcctcattatgtcaaccaggtccagatgtgctataatctgtttttacgtatgtaggcccagtcgtcatcagatgcttgcggcaaaaggaaagctgtgtttatatggaagaaagtaaggtgcttggagtttacctggcttatttaatatgcttataacctagttaaagaaaggaaaagaaaacaaaaaacgaatgcctcattgtgtttctaccggagagagaatgtatttgctgacaaccattaaagtcagaagttttactccaggttattgcaataaagtataatgtttattaaatgcttcatttgtatgtcaaagctttgactctataagcaaattgcttttttccaaaacaaaaagatgtctcaggtttgttttgtgaattttctaaaagctttcatgtcccagaacttagcctttacctgtgaagtgttactacagccttaatattttcctagtagatctatattagatcaaatagttgcatagcagtatatgttaatttgtgtgtttttagctgtgacacaactgtgtgattaaaaggtatactttagtagacatttataactcaaggataccttcttatttaatcttttcttatttttgtactttatcatgaatgcttttagtgtgtgcataatagctacagtgcatagttgtagacaaagtacattctggggaaacaacatttatatgtagcctttactgtttgatataccaaattaaaaaaaaattgtatctcattacttatactgggacaccattaccaaaataataaaaatcactttcataatcttgttatgaagttttatgttgtagcaaatatagtctaatgtatcactttatttcaactattactatggattattcaattaaaatattgcactgtaaa

SEQ ID NO: 401669 - DNA, 4624 bp, Homo sapiens
  misc_feature (1681)..(1681): n is a, c, g, or t
acatgcgaagaaaatgcccatgcatttctttaagcagaaatataagttagtgaatttgtttcttcttgataaaatggttagaatttgcttagaaattccttttatcataaaagtaaaaattatcagctttaaccttctcatttgtctcctactgcttcttttcttgttctttattctcatccatccccttctctgtctttgcctctactcttcctctattccttcataagaatctaaacaactcctttaaacatcaattcaaatgttcttcccttggatagagatcacttccatccccttcataactagctgggcctagtacctttgggttagcaattttgccagagatgttggagaaaaagggggtagcatttcctcttgaaaatccagcctgcaaggcatttacaatctcatgctggtttcgtaaggccctgctgtccctccagaatagaggcccacagcactcactaggtaccaggcatggtgaacttgcttgcccaagctctctagtaggtggcagatttacccaggtctgcctgactttagagcctattcttttaatcattgtaccttactgtctttatagacaaggtcaggctctctatgcttctgtgagataattttccctaggagtgtaaatagttactatagagacactagatgccacctgctatagccctcagaagtggcatcagactatgcctgggctttctgttttaaggacaaggaagaatgagtgtgacagtgaaaggttgtatttgtaaaggctggaagagcagaaatccccaagtgctagagaaaagaatgtggacaagtgtatggtatccaatcatagtatgttagagctgagttgggctttaaagatgatctcctctaacccctttatttgcagttgaagacgttgaggatctgagacattaagtgaattgtctgaggacacacagccagtttcttagatgcagagccaaggatgaatttttttcattcagactaagctgttttttgcagtccacctttactctacttggggttcatttctttttaagaagtctcaaagattagaaaattgagtcattttgagcaatataatgtcatattgtacaattctgctgaaagtaattttaatagcaatgccggcagatctcccaaatccatgggtttcaaaatatttccgccttttgctaagctaatatatagaatttcaaaaccatatttataccacatacaatttccaaagagctgggcaatttcctataaaaactcagctgtgcactgattgccaagttggaaaactcagggtttcctggcaacacccacttgggctctagggaatgcaagcttctcagcaaacaacctctcctgacttacgagctccatcggcagccacgacccgagtcacagcggccctttctgatgttcttgtctctgtcgcttatgtttctcaagaacctgtaatcttgccttaatccctcaccagctgaatacctcctacatgctaaactcctggaatgaaaggtccacatttctctcatgctaggagtttgggaccagaattcagatgaactcattgctagtactggttcaaaagctaatgagccctctagattcccaggtccttagtttcctcatgggtaaaatatagacaataactcctacctgttcatctttcagggcttttccnaagattttcaacatctgaaattcacaggatcatggagacgaactaaaccatcatggagactaactaaaccagatgcatctagcccctcatgttagagttgagaaaacagaaacccagggtttggggactcccttgaagtcatcaagttcctgttgatggcaaaatcaggaccaagcttctgatcctcccaaatattccttcacttctcagtgctgccaggggcgctgtgaggcaaaccgctgccactacactggctttccgggaagcaagctcaagtcgcggagagggaagggaggtcgtgcgctcggggcggggcgcgctcccaagtcgagcgcagcggccggggcaggttgtaccgagcgtggttctggggacaccgtgcggcctcgattggaggtggctgtgatgaagcgcggttaccgcacaatggaaacgtgggcacctccgctcccatgaaagcctgctggtagagctccgaggccggccggtgcgcctggacgggagtccgggtcaaagcggcctggtgtgcggcgcgccccgccccccgcaggccccgccctgccaggtcgcgctgccctccttctacccagtccttaaaacccggaggagcgggatggcgcgctttgactctggagtgggagtgggagcgagcgcttctgcgactccagttgtgagagccgcaagggcatgggaattgacgccactcaccgacccccagtctcaatctcaacgctgtgaggaaacctcgactttgccaggtccccaagggcagcggggctcggcgagcgaggcacccttctccgtccccatcccaatccaagcgctcctggcactgacgacgccaagagactcgagtgggagttaaagcttccagtgagggcagcaggtgtccaggccgggcctgcgggttcctgttgacgtcttgccctaggcaaaggtcccagttccttctcggagccggctgtcccgcgccactggaaaccgcacctccccgcagcatgggcaccagcctcagcccgaacgacccttggccgctaaacccgctgtccatccagcagaccacgctcctgctactcctgtcggtgctggccactgtgcatgtgggccagcggctgctgaggcaacggaggcggcagctccggtccgcgcccccgggcccgtttgcgtggccactgatcggaaacgcggcggcggtgggccaggcggctcacctctcgttcgctcgcctggcgcggcgctacggcgacgttttccagatccgcctgggcagctgccccatagtggtgctgaatggcgagcgcgccatccaccaggccctggtgcagcagggctcggccttcgccgaccggccggccttcgcctccttccgtgtggtgtccggcggccgcagcatggctttcggccactactcggagcactggaaggtgcagcggcgcgcagcccacagcatgatgcgcaacttcttcacgcgccagccgcgcagccgccaagtcctcgagggccacgtgctgagcgaggcgcgcgagctggtggcgctgctggtgcgcggcagcgcggacggcgccttcctcgacccgaggccgctgaccgtcgtggccgtggccaacgtcatgagtgccgtgtgtttcggctgccgctacagccacgacgaccccgagttccgtgagctgctcagccacaacgaagagttcgggcgcacggtgggcgcgggcagcctggtggacgtgatgccctggctgcagtacttccccaacccggtgcgcaccgttttccgcgaattcgagcagctcaaccgcaacttcagcaacttcatcctggacaagttcttgaggcactgcgaaagccttcggcccggggccgccccccgcgacatgatggacgcctttatcctctctgcggaaaagaaggcggccggggactcgcacggtggtggcgcgcggctggatttggagaacgtaccggccactatcactgacatcttcggcgccagccaggacaccctgtccaccgcgctgcagtggctgctcctcctcttcaccaggtatcctgatgtgcagactcgagtgcaggcagaattggatcaggtcgtggggagggaccgtctgccttgtatgggtgaccagcccaacctgccctatgtcctggccttcctttatgaagccatgcgcttctccagctttgtgcctgtcactattcctcatgccaccactgccaacacctctgtcttgggctaccacattcccaaggacactgtggtttttgtcaaccagtggtctgtgaatcatgacccagtgaagtggcctaacccggagaactttgatccagctcgattcttggacaaggatggcctcatcaacaaggacctgaccagcagagtgatgattttttcagtgggcaaaaggcggtgcattggcgaagaactttctaagatgcagctttttctcttcatctccatcctggctcaccagtgcgatttcagggccaacccaaatgagcctgcgaaaatgaatttcagttatggtctaaccattaaacccaagtcatttaaagtcaatgtcactctcagagagtccatggagctccttgatagtgctgtccaaaatttacaagccaaggaaacttgccaataagaagcaagaggcaagctgaaattttagaaatattcacatcttcggagatgaggagtaaaattcagtttttttccagttcctcttttgtgctgcttctcaattagcgtttaagatgattttttgaaagttaacattaatgcctgctttttggaaagtcagaatcagaagatagtcttggaagctgtttggaaaagacagtggagatgagggcctaggtcatgactctccaggccttcactgtgccacactcacagatgacagggcttgcggtaccaaaggctctttatcttccagactacagctcctattaatg

SEQ ID NO: 401670 - DNA, 940 bp, Homo sapiens
  misc_feature (1)..(3): n is a, c, g, or t
  misc_feature (5)..(6): n is a, c, g, or t
nnnannatttcttccgccgtccgccggtggcgaggcccaggctgtcgccgggtgtgcagcggcgtcgcggccagtagagggattctgggtaacggcccggacccccggctgggcttctggctcggcgcagcaggttccattcacgccaagtctgttggcagtggcagttgtagggccaagggcggttgtaggacccggagcagccggacatggaacaaccgtggccgcctccgggaccctggagcctccctcgggccgagggtgaggctgaggaagagagtgacttcgacgtgttccccagttctccccgctgcccgcagctgccaggcggcggcgcccagatgtatagccatggaattgaattggcttgccaaaagcagaaagagtttgtgaagagctctgtggcgtgcaaatggaatcttgctgaagctcaacagaaacttggtagcttagcactgcataattctgagtccttggatcaggagcatgccaaagcacaaacagcagtatcagaactgaggcaacgggaagaagagtggcgacagaaagaagaagctctagtacaaagagagaagatgtgtctgtggagcacggatgccattagcaaggatgtttttaataaggtatgagcttttactgggccataatgaaagaagaaaaactgaagtgtttgtacaaaccagttgtgcgtatttggtagcaaagcagcagaatcccataaacagtgttcaattttgacagtttatgaaaggtgcttgaaaagtttatgaaagtcaaaaagtctcaaagctcttgctgtagagctgcagactccaggcagttaagtgaccagactgaaatacatatttatataaatgtactgctgaacaaatattacatatattaaaaaacattcacaagaatttgatataaggatgggaaaatatatcagttatgaaat

SEQ ID NO: 401671 - DNA, 1716 bp, Homo sapiens
  misc_feature (1)..(3): n is a, c, g, or t
  misc_feature (5)..(6): n is a, c, g, or t
nnnannatttcttccgccgtccgccggtggcgaggcccaggctgtcgccgggtgtgcagcggcgtcgcggccagtagagggattctgggtaacggcccggacccccggctgggcttctggctcggcgcagcaggttccattcacgccaagtctgttggcagtggcagttgtagggccaagggcggttgtaggacccggagcagccggacatggaacaaccgtggccgcctccgggaccctggagcctccctcgggccgagggtgaggctgaggaagagagtgacttcgacgtgttccccagttctccccgctgcccgcagctgccaggcggcggcgcccagatgtatagccatggaattgaattggcttgccaaaagcagaaagagtttgtgaagagctctgtggcgtgcaaatggaatcttgctgaagctcaacagaaacttggtagcttagcactgcataattctgagtccttggatcaggagcatgccaaagcacaaacagcagtatcagaactgaggcaacgggaagaagagtggcgacagaaagaagaagctctagtacaaagagagaagatgtgtctgtggagcacggatgccattagcaaggatgtttttaataagagttttattaatcaagataaaagaaaagacacagaagatgaagataaatcagaatcatttatgcaaaaatatgagcaaaaaatcagacattttggtatgttgagtcgatgggatgatagccagagatttttgtctgaccatccataccttgtatgtgaagaaactgctaaatatcttattttatggtgttttcacctggaagctgagaagaaaggggctttaatggaacaaatagcacatcaagctgttgtaatgcagtttattatggaaatggccaaaaactgtaatgtggatccaagagggtgttttcgtttatttttccagaaagccaaagcagaggaagaaggttattttgaagcattcaaaaatgaacttgaagctttcaagtcaagagtaagactttattctcaatcacaaagttttcaacctatgacagttcagaatcatgttccccattctggtgttggatctataggtttattagaatccttaccacagaatccagattatcttcagtattctatcagtacagctctctgcagcttaaactcggtggtacataaagaagatgatgaacccaaaatgatggacactgtataatttggttaagactgctgaggccaagtgctattttgttacaagaaaggaagaacttggctattttcttgacacttttatgggtgctgcactttatttttgtttggtttttgatgggagggaaagagtactgaaatgttttgtaaattttttttaatgtgctgctaggttttttgttttgttttgttctgaagagaagagtggtaccatatgttgcaggaagtcaaactggactttttgtggctactaaatttgcctttaatcttattgttctcaattttggaatcaagtatgaaaatctgcacaaatgcaatgtttacaagaactggttgattctgggaggcatctgctacagtctctttttatatggatatgtacatgtcctattctacaaaaatgattaaagataaaaacatacttgtatcccactgctactttagctgtcaaatttggtgtttcatcacattaaaagcaataaatcagtagttggtaatgt

SEQ ID NO: 401672 - DNA, 551 bp, Homo sapiens
gaatccagctcgttaccgaatcctggaggcacaagcctgtggctactccgggaccctggagcctccctcgggccgagggtgaggctgaggaagagagtgacttcgacgtgttccccagttctccccgctgcccgcagctgccaggcggcggcgcccaggtgagaaggggcctgcgttctgcggagggatggagtggtgctgtcgccaaacccctggaatgccgcgtctcccagaccctcttctacgcctttttctacgcccacctcactgccaggggccggggacctgggacctgacgcctgatgccatcccaccccttttatggcatcttcggagggcagacggggtggccatatattaccaacctccacctccacgcacatgttttctttcgccttggctgattcctgttcactcttggaataccttcctccatctccccttcctgacagcactcagatttggggcggctcatgctgtaacattgaccctttgtcctcttgtgagaggttttccccaagcactttattctgttaaaggctctagcatac

SEQ ID NO: 401673 - DNA, 177 bp, Homo sapiens
gtagatggcatttatgtatattgataatcctaaggtacttacaaaaaatctactggaattaataaatgaatttagttaagatcacaggtcaatttttaaaaccacattgctatatatagcaacaaaattcaaaaatgaaggaaaatatatcatttccaatagactcaaaaacataaa

SEQ ID NO: 401674 - DNA, 975 bp, Homo sapiens
gtctcaaactcctgacctaaagggatcctcccacctcagcctcccaaattgctgggatcacaggtgtgagccaccatgcccggctgagaatatgcattaagttctcagtaaatgctgatgctgctggtcccaggaccacactttgagagccactggtagagaggcagacgggagtaagagagaaagagtaggcattggctggaaacggtggctcatacctgtaatcccagcactttgggaggccaaggcgggtggatcatgaggtcaggagatccagactgtcctggccaacatggtgaaaccccgtctctacttaaatacaaaaaaaaattagccaggcatggtagtgggcgcctgtggtcccagctacttgggaggctgaggcaggagaatcgcttgaacccaggaggcagaggttgcagtgagccgagatcgtgccactgcactccacccaggcgacagagcaagactctgtctcaaaaaaaaaaaaaagaaaagaaaagaaaagcaggaattggcgagccagcagcctagagtcccgaccacacacactgacgttcggatggaggcaatgagccaccttccagaaaagggcacagagatggaaagagtattctacacagacacagagctcagcctcatccttggacccccttagggttctgtgaccccagcagggcttgctgtgctgtagtgtccagtgccagcccctgagtccacagccccacatcccttcctgaccatgcctggggtgggctagcctgagtccccgatagccatcagggctcagaacctggttggcgcagggatcttcctctcctgtggcgccctaaagccttttccagtcctcaaaccccagcctctctccacacaggacacccacactcaggcagccaactcagacttctgaccacagtccacagtagaattgtgtccatctatacagaaatatctatgttaaaaaaaaaaaaaggt

SEQ ID NO: 401675 - DNA, 346 bp, Homo sapiens
cttatagaacaatccaaactcttgggaatattaagtggagaggggtacgtgcaagacaccaacagcactagaaacagtccacatctttccatgcgtggaggagtttatgctctatgtgagttcactccatcattaattcttcaaacacaagagtgttaaaggaacaagagttaatgggtcctgtcattacacttgttcccaggatgacattcttcatcttcctcttctacaacctgttctatattcccctcatgtttatccagtgcttctgctagtctagttcacttccaaagacccatgattaccatggccctgtcaggctgtaattgctgcaatttccaattta

SEQ ID NO: 401676 - DNA, 616 bp, Homo sapiens
tctgcctcccaaagtgctgggatttcaggcatgagccaccgtgcctggctgtttctctttccatatggtttatgcttacagatccttgaggttaatatgtcactttcactgttagttcctacagaagaaaggtaattttgcaataaggttttggaggttaggaacatggttttggagtcatacagcccttgggtgtgggttcgagctccatcactaggtgactgtgcggcttttggccaaatgtttcaatgtctccaaaacttgagtgtcttagtcagttggggctgctataacaaagatgcggtggcttgtaaacaacagaaatttccttcttacagttctgtaggctgcaagtctgagatcagggtaccagcatggttgggttctgaggagggtcctttttcatgttgcggattgctgacttcttatagcttcacatgacagaaagaaggcgagagagctctcaggtactttttataaaggcatgagtggctgagtgcagtggcttatgcctgtaatctcaacacttttggaggctgaggcaggaggatcacttgatgccaggagttcatggccagcctgggtaacatagtgagaccctatctcaacaaaaact

SEQ ID NO: 401677 - DNA, 132 bp, Homo sapiens
agggctgttgggcaaattcagtcagatgatgcaggtgaagtattttgaagcctcaataactgttattatcattcttaagatgctgccagggcttagcacacagaagttgctcaataaatgggaatggttata

SEQ ID NO: 401678 - DNA, 407 bp, Homo sapiens
ggaaacacaagtttgtcctactgaaactaaaagtgctgtcactagtaatagaaaactgggaggcttgttgcaaaaatcaattattcccagtgggagtcagggcatggattctagcttgagacaaggccccaaggacgcaaatgaggactccaactcctaagggatctcaagtctgaagataattcaagtcttatcaggactaccaatctttatctgcttaaacacacacacgcacacacacacacacactctctctctctctactcaccctcacactctccaaaccattaaatggtcctagagatgggaactcaaaaacccaattaccatttatgatccacaggccgccttaccctccctgaggcttccctatactctttcaatgaatgccatttcacagaccaagg

SEQ ID NO: 401679 - DNA, 646 bp, Homo sapiens
ttttataggcagaacgttaccagagtctccttgaagaactgaaaatgaacaagatacaactgcagctttttcaactataccataatgagaaaaagattcatctcctgaacaccaagttagagcatgtgaatagggatttgagtgtcaaaagagagtctttgtctcatcatgaaaacatagttaaagccaggaaaaaggaacatggaatgctaactagacaactacaacaaacagaaaaagaattaaaatcggttgaaacccttttaaatcagaagaggcctcagtacattaaagccaaagaaaacacttctcaccaccttaagaaattagatgtggctaagaaatcaataaaggacagcgaaaaacaatgttctaaacaggaagatgatataaaagccctggagacagagctggctgatttagatgctgcatggagaagttttgaaaagcagattgaggaagaaattttacataaaaagcgagacattgaactggaagccagtcagctggatcgttataaagaacttaaggaacaagtaagaaagaaagtagctacaatgactcaacaactggaaaaactgcagtgggaacagaagacagatgaagaaagactggcatttgaaaagaggaggcatggagaagttca

SEQ ID NO: 401680 - DNA, 979 bp, Homo sapiens
tcagtggctcaatcatagatcactgcagtcttaactcagcctcccaagtagctcaaaccacaggtgcttgccaccatgcccagctaatttttaaaaattgtttttgatagagacggagtctttctgtgttgcccaggccagtctcaaactcctgggcctgagcagtcctcccaccttggcctcccaatgtactgggattacaggtgtgagccaccatgcccacgctaaaaattctttttaaagtgctttgtttcattctttcgaaggctcatctgaaagaaactagctgttgttaaaggataaaatagaagaatatgtagaagaagagaaagtagtaaccagaggggaacattgtatgagatcttagagtaactgagctggaagggacctcaagaaagtcctcttccattaagtgggtaaatatactaaatcatttaatcttttaattaagttttgttaagtgtcagtattattatgtgccaaatactggtaatacaaattaaatataattcagtctattggagtagacatataaatgactacaacaatattaatataacagaggtacggagaagggcctctgagcatataatgacacagattaactctgagtagagaggtcagagaagagtacagttgagcagaatccagtgggatgagttcaccaggtggctaagggaggacataacatttcaggccagccgattatcacacccaaagacaggttaaagagcatggtcctttaatttggaaagtggaagatcaggattctgttgtgtccagatgtggctggagagggacagactattatactgtattgaggagtttggattttagtttgaagacagcagggagccattgaaggatttcaaattgggcagaaatgtcagatttgtagctccatcactctactatactgtgggtaatagattgaagaagacaggaatggaggtggggacacatgtatttgagaaatgat

SEQ ID NO: 401681 - DNA, 673 bp, Homo sapiens
tgcacacaggagccggggcttcagcctctttttctgtttctttttttgagatggagtcttgctctgttgcccaggctgaagtgcagtggcgcgaccttggctcactgcaacctctgcctctcaggctcaaatgattctcttgcctcagcctcctgattagctgggactacaggaatgtgccaccacacccagctaatttttgtatttttagtagagacggggtttcaccatgttggccaggctggtctcgaactcctgacctcaagtgatctgcctgcctcagcctcccaaagtgctgggattatatttgtgagccaccacacctgtccctctttgctcagttttctgtaagcccagctctgctccctgggacaacttcctggcagggtccttggctgtaatcctcttcaggtttcttcctgggtgataggcaagaaggaaggagcaaaaggttttgaggaaaggagaactgcgctattcctagagtcaatgatacctcagaacctttattctgcacacttggacgctatttccagtttacaaagtgttttcatcagtattttctgtaaatcccaatgactttcacaagcagtccttgtttggtgcacatacaccgaaaccgcacgacttgcgccgcatagcacctgccctgcgctcatctccacagtcggcc

SEQ ID NO: 401682 - DNA, 287 bp, Homo sapiens
caccacatctagctaattttttgtagttttggtagaaacaagatttcaccatgttgcccaggctggttttgaacccctgagctcaagcaatccacccaccttggcctcccagagtgctgggattacaggcgtgagccaccgtgcctgaccaacttcagtttttttagacttgaaagaacctcgttcacctgccacatgctatcctagggaattaatagcttcccatgtggacactcactctatgtcccgctctgccctaagcctatttatttatttgtttatttata

SEQ ID NO: 401683 - DNA, 519 bp, Homo sapiens
agcctcattcaggaggtccgctaaaaagacagaagcttgtttcctgcttgcagctttcaagacactgcatctctgtggtagggagatttgtcaggctgatgccaagaatgtctgccagtgttatggagaaaagaatggagtccgttacttaccagaaattgtgactttttgaaaatgtcttccactcccataaaagaacacaagaaccgtggtgcctcaaacattccccagaagctcctataataagatgaatttgacaatttaacaggaaattgcctccaaatattaaaccattctaatttcacccttaacactcaactaaaatgcattcagaaacgtttcgtgtataatatgcatggcacataaagcatgaaccactcaattgaattcaaatttagttgacatccttatacttttgtttttaaaaatcaacagccagaagtctacactttaagggacttccaaagttacttgcttgtgttcctcttcaataaaatgtctgtgaaattcaacattatg

SEQ ID NO: 401684 - DNA, 348 bp, Homo sapiens
tgataatttgagtcttttttaaaaaaaactacttaaaaatttttgtttacatggtcttttgctaagtattatttggatccttcaaacattgtaaaggaatactttctttatgaaaatgttgaaatcaaagcctaaaagtcttctttagggatataaacatgggtagagaattgagatggtgttaattgaaaaacacctcacagttctcaataattttttagttctccttaaataaaggtataggttcttcttgaattaaacaaactgatcagtgattagtatacaattttcaaatgaataaactgaactaaactgatttttgttttatctctgtattggtaaaaggtt

SEQ ID NO: 401685 - DNA, 415 bp, Homo sapiens
tcgttctagaggctcccccaactatggtcctcagctactccggaggctgaggcaggagagttgcttgaacctgggaggcggagattgcagtgagctgagattgccccactgcactccagcgtgggcaacagactgagactctgcctcaaaaaaaaaaaaaaaatttagaaaatcaagttttagctccgctgggaacctttgtgtaaagtgccccagacaagatttgcaccaaaggctttctgtcctcagcggttcttgagcagctatttgaaacatgctctccttttccctgaagaaatcctcagggctgggcctggtggctcacacctgtaaagtgccccagacaagatttgcactgagggctttctgcctctgaggacagcctttctactgctcctcagctgcacctccccac

SEQ ID NO: 401686 - DNA, 381 bp, Homo sapiens
gtgtctcggcatgtcctcaggcctcgtgggggggctcccttgtcctggtctcatgcagaggaaggacgtggtgtgttcagagtcagcttagtggtggcacatagtgactgcccacccagtggaagctgctacctttgcctctttggaccatcgatcctctgttcaggacctcacttcctggaaactttttttattttttgagatggagtcttgctctgttgccaggctggagtacagtggcacgatcttggctcactgcaacctctgcctcctgggttcaagtgattctcctgcctcaggttcccgagtagctggaactacaggcgcgtgccatcacacctggctaatttttgtatttttagtagagacatggtttcatca

SEQ ID NO: 401687 - DNA, 209 bp, Homo sapiens
aattctgtctataaagtagtttaatatccatactgaagagaaaccaaaaagacttctgccaaaatgcttgccatctccttgtaaagagctattactattctggggacataaaccatctgggcacgacaatttgtgaagtgtttcagttcgttttgtagtgttcttgccacctactttacaaaagaatgttactgccaataataataaaa

SEQ ID NO: 401688 - DNA, 428 bp, Homo sapiens
ctgccaggttaaaaggtcggggttgagatgcctattgctgtctttattgcaagaacttctctatctcagtgcttcaaagtaattgattcatatgaaaaattcctttcccttatatttagggtgtataatcctcaaacatcattagagactcacataaacttccttgtttcactcatcatctatggtgcctgcctgttttaaagtcatcaatccttatgttccctgatccttaagtttgtcatttctagggtgtggaaaaggaactaagaggataatgaagaatctttgcaccagtatctcagaaagaatgctcagtgtcatgacataactgtggcaacaataaaagcacttaatattcctggaatcaacttggtctaaaggtttttccaggcagacctgaaagtcctaatctagagcaaagttcattt

SEQ ID NO: 401689 - DNA, 515 bp, Homo sapiens
catccaaccctcttgcccttactgggtcagcagaagccagttctttggtctgacctaaacaaaggaaattatattaatattaaaatggttgtcttaccttgggggatctttctcctgcatggacactgagaagtcttgctccctgccaccaggatcccaggcagtccaccccgtgccttgaggacttttccacattttatacctacacgaaatactattcttaaccaaaactcatttttaaaatgttattaaatagcttattctgaaataatttcagacttacagaaaaactgtcaggacagtataaacagcttaatcccttcaccccagtcattagcatgttgccccatctgcactccctgtctctccccatgttatacacatgcacatgcacacattgtcattaacctctttctaatccttttaacaatctcataattttaaagacttttaacaacacctgaagctttaaaatgcataaagccctttctccttcacaatcgcctctggtgccc

SEQ ID NO: 401690 - DNA, 328 bp, Homo sapiens
tacacaagttttcagattgaaggagcccaccaagcacccagtagaatgaatgaaaattgacctacacccaaggcaaatcatgaaatttcaggatactgggagaaaaaagattatacaagcctccaaagtcaggggaaacaagttagttacaaaaacatcagtcactaccagaagagttttcaacttcttaatagcatcaatgaaccaaaagatgatgaggtaataccttcaggtttttaagggaaaattatttccaatccagaatctatactcaggcaatccaatataaagatagaagacatatttcagacatgaaaagtcacaacaa

SEQ ID NO: 401691 - DNA, 307 bp, Homo sapiens
ggggaatggtggtacgcaaagcaaggattggttggatgctactgagatggctgtgaggatgctggagaacagtgtgtggggcttgacagtcagcagttaatctttcaggaaacggttttctgacacagtgtaggctgaagccagactcgggaagtttggggacatatggtaggtgcagactttgtaaaatagtttggaagtaaagagggggagaagtggattggtggctccaggccaaatggagttgaaagaaaaatggttttaggacaaacatctgaagagtggaaaaaaatctgagagaaaggat

SEQ ID NO: 401692 - DNA, 648 bp, Homo sapiens
ttacagtcgaaggtggtcatctgttgtcagcaggggagggggtcaccaggtgcatggtgggagaccatgagacccattgtccagaagaagaatgtcataaggtcgattgatcagttagggtagggcaggaacaagtcctaatggtggaatgtcttaaggttggttaatcagttaagggagaaactggctgtttcacttcttttgtgtttttttggctgctccagacttcttggctgctgcaggccatctggatgtatatgtgcagttcacaggggtcacaatggcttagctccggctcagaggcctgacactgacctcagatgatccacctgcctcggcctcccaaaatgctgggattacaggcgtgagccactgtgcctgcctgggatcatatgttacacgcatgtttgttcaataagcatggagtgcagccacccacatgaatattcatagctcctcctatagcctgttgaatatgtatgtttagccaaccccttcagcataaagctcctgccccaacccctcctgcttctaaatgtctgtctctggtgtttcccagaggctgctcttcccaggctgcgggatggctaccttgctgcctgtcacccttaacaagaaataaaatctcctttccaaatttatacattg

SEQ ID NO: 401693 - DNA, 1093 bp, Homo sapiens
agacatcactcctgggggtgccctatggtacactggctgctccccagggacctgggaatgctgaatctagccattagggaaattgatttgagatgtttgcatgtgaagcttccctaagcagcactgccaaagctttggaattgtcacccaaggcttcctagactccctagctagctcgagttcgaattgccaatagtccccatggtgccaaattttgggatggttttacagtcttttagaaatgaagacaggaatggccatgtgcttctgagaccccagcacgatgccaggcccaggtctccattaatgcagtgctctgctgctgctccactggcaatttgtactcttaacataggttgggggagggacagctagggaaattttttttaattaattgtatctaaaattctttcatcataggaataaacaacacatatagaaagctccaaagctgttcccaagacctgtattatttattttatatgaccaacttgccccaaggcaattaactctgaattgctgttctaatgtgacatatctgtgtacatatgtacatagtactggtaaccagtggctgcattttattccttgctgtggactgaggtattggcttcttgaatcttgtatatgtcataagaatattatacagagagtgttatagtgaaggatgtaagctggataatttaaaacagaccttatttcatacaagtgtaattattacatcattttgggtaaatggcaaacaggattgcatgagagtgatggcatcatcatttcaattgaatctgaagtgattctaggaaattgattccactgttggattctaggaaattgagtccactgttttcctttgcgtttaatttcctttgtgtttaatttgaccacagaaacttttttgagtagcacctagtaacattgcaaggaacttgtgtatcaaggtgtatcttgattatcctgattttttttgttctctaagttgttgccagatctctcttgcaactgtgtcaatgaaaggtctgtgtttagaaaaggcagcatatcattgtatatttgaaactataggaatatatactttgtataaaacttttccaat

SEQ ID NO: 401694 - DNA, 298 bp, Homo sapiens
cttacatgacctctgatagtcctttgactagtcgggactgtgctatactcttcattgatctgggtgggactctggagaactggctgccacattcttgttatatttcattttcctgagggacaaattgttacttagtataaatcagtatcattatataagccagaaagatgaagaaagtcaaccgctagacttaccctctgagacacacaagtacagaagggaaattgtcaatttgttgggctgaggaaatattttgggactctttcagagagacagttgcttgtggtggatagataaa

SEQ ID NO: 401695 - DNA, 456 bp, Homo sapiens
tatgtgactgtatttctgaggtagaacaaatagacatgtaatagggagtggtgtagataagttcctttttgaaggctgcttgtaagtaaggattttgatgtacctgatcccaacttttcagtgtcacatatgaatttctttacaatccggttcctcctgccctctgagcttcatcacctccaaacattcataaacccaaccatgttgcattcctctgggctcctcaatcatgccgtgtgctttctctctcccaccttttgtctgtgcttcctttgtacatcactgctcttttttttttttctttttctttgccaagttgtgatggaatatacatgactactcttgctttcttctttcttcttcctgtatttattctacaactctgacttccctggaagaattaggtgttactttccctgtgttttgtgacactttgcgtgtactacttcttttttt

SEQ ID NO: 401696 - DNA, 1650 bp, Homo sapiens
cggaagtgtcgccggcctcctcccggcgcagcctccgggcctcccgtgcaatcactacgccctggggcccggaaaccgttttccggtctttcgctttcggctggggcgtggaggccgcggtgctgcgtaggccgggccgggcgcaggaacagccccgtggcgccctctctggccgccgcccgggcgggaaacgttgttccggggaccgggcgaccccgcagcggggagcgcgccaggtccgcgcggggaagtgggcggtgtgcggccggcaccgcctcgcaccacgcccccgcgggcccgcactttcccggagtgcaccccgcggccgccagccggggcgatggcggggctctggctggggctcgtgtggcagaagctgctgctgtggggcgcggcgagtgccgtttccctggccggcgccagtctggtcctgagcctgctgcagagggtggcgagctacgcgcggaaatggcagcagatgcggcccatccccacggtggcccgcgcctacccactggtgggccacgcgctgctgatgaagccggacgggcgagcacaggatgcggtatttccaaacccctgccctcggtcttttcccacctcaccgctgctcagctctcaaagccctgccgtttcctcctgccttggcttgggaagccttaggaacagaagctccctgggagcacagagcggttttaaactggccaacaccttaacgcccagagccgccctcctctcgctgccactttggaaaataagagactagagattcactggacgcttcctcccggcatcacaagacttgactgctgcttcagttcccgcttgaccttcatactttagccctttaaaggatgttacataataacaattaagagacggcagggccttcaggcagacttctttggagggtgtcaaacgccttgtttattaaagagtgaattttttaattaaaatcatgttttaaaacagagatggacattttattgatggaaaaaaatcacgttaagttagaaagctctcaaaagtacctggtatttacaactccctgtcagggagggcgaactcgatctcagagttttattttcatcagggattacgttgaggtacccagaaatgagaagatttgcccaaaatggcatattttaaaattggcccagaccagaacccagtttcctctgggattatttgttagtaatcgttttacaggctgagcattaactaactccaaagcttgaaggactttttctcattttcacttgttttctctaataaaaataatgctgtaatttcaacttcacaagatgaggcctcatggaagagtgtttaccaaaatattaaaaatactttgacagaaaaaaatcaagcgaactctttgccaaccaaatatcatcatgactgatgtaacaagtaatccaacacagatatgaaaatcacactggtaaaaatcatctcagttaattctaaaagcagagctaaccaccccttttgtcctaaggctttatggtattaaaaaataaactgtacaaaaatatagattttcccctatcccctacccctggaaagtaatatactgaagtctcatcatactgttttggggattccagtaattaaaatctctagtgaataaagacctgtttcaaaacaacc

SEQ ID NO: 401697 - DNA, 340 bp, Homo sapiens
cttaaaaagaggccgatttcatctcaaaccctggtgcagaggtcctaggcagagtgggaaacttgccctggagaagcagaagcagagaccaaatggctatctagtaaggatgttttataatgaatccttcattcctttaaagagcccattattttctgaggcttcatgggatgcgtaatagcccatgccttcactgctaagcataaaacatggagctcttagtagcctctaagacaatcatcgtcattcccacgattgccttcatcaaggccaggtactaaagaagtgctcaagaaatacacatttctgatacaacagctgatgtatttttatcccattt

SEQ ID NO: 401698 - DNA, 525 bp, Homo sapiens
cttaaaaagaggccgatttcatctcaaaccctggtgcagaggtcctaggcagagtgggaaacttgccctggagaagcagaagcagagaccaaatggctatctagtaaggatgttttataatgaatccttcattcctttaaagagcccattattttctgaggcttcatgggatgcgtaatagcccatgccttcactgctaagcataaaacatggagctcttagtagcctctaagacaatcatcgtcattcccacgattgccttcatcaaggccaggtactaaagaagtgctcaagaaatacacatttctgatacaacagctgatgtatttttatcccatttatagaatgagtgagatgatatttcgaagaataaagatgccctggctttggcttgatctctggtaccttatgtttaaagaaggatgggaacacaaaaagagccttcagatcctacatacttttaccaacagtgtaagtccctgacttttacaattgtggtaaaatagacataacataaaatttccc

SEQ ID NO: 401699 - DNA, 405 bp, Homo sapiens
aagtatgtttttctcttcctaaggtaattttaactagttcaaagcaaattgacaaatcctctatgtacaagtttttagaaccatggcttggcctaggacttcttacaaggtatgccagtgtacctttgtaaagctgtctatagaaatggttacttctacgtgcaacttgttatttcaagaattaacacagggtagctttttctgtagcaggactgttctctcagaaaggaggagaaaggctggaaaggaaggtccagctggcagctggcctttgcccgtcaagaggccaagagtccaggtgaacagttatcttcagctgtggtattcaatagcgactgtcgccagtgttcaggaagactcaggaggtcctgatggacgggagtggacgggatggaggacacagta

SEQ ID NO: 401700 - DNA, 1864 bp, Homo sapiens
cggaagtgtcgccggcctcctcccggcgcagcctccgggcctcccgtgcaatcactacgccctggggcccggaaaccgttttccggtctttcgctttcggctggggcgtggaggccgcggtgctgcgtaggccgggccgggcgcaggaacagccccgtggcgccctctctggccgccgcccgggcgggaaacgttgttccggggaccgggcgaccccgcagcggggagcgcgccaggtccgcgcggggaagtgggcggtgtgcggccggcaccgcctcgcaccacgcccccgcgggcccgcactttcccggagtgcaccccgcggccgccagccggggcgatggcggggctctggctggggctcgtgtggcagaagctgctgctgtggggcgcggcgagtgccgtttccctggccggcgccagtctggtcctgagcctgctgcagagggtggcgagctacgcgcggaaatggcagcagatgcggcccatccccacggtggcccgcgcctacccactggtgggccacgcgctgctgatgaagccggacgggcgaggtaagggccggcgctcctcctggagcgcaacggggtccgcagccccgttcccaccctccgatcagccaggaacccgctgcttgtggcgctggccgcaggagagaggagcctgtcaccctgtggagaatgcactcccagttctagtcgttgccccttggcacccgccgacactgctagtgccccatcccaaagtgagcattttctttgtgtgtagcacaggatgcggtatttccaaacccctgccctcggtcttttcccacctcaccgctgctcagctctcaaagccctgccgtttcctcctgccttggcttgggaagccttaggaacagaagctccctgggagcacagagcggttttaaactggccaacaccttaacgcccagagccgccctcctctcgctgccactttggaaaataagagactagagattcactggacgcttcctcccggcatcacaagacttgactgctgcttcagttcccgcttgaccttcatactttagccctttaaaggatgttacataataacaattaagagacggcagggccttcaggcagacttctttggagggtgtcaaacgccttgtttattaaagagtgaattttttaattaaaatcatgttttaaaacagagatggacattttattgatggaaaaaaatcacgttaagttagaaagctctcaaaagtacctggtatttacaactccctgtcagggagggcgaactcgatctcagagttttattttcatcagggattacgttgaggtacccagaaatgagaagatttgcccaaaatggcatattttaaaattggcccagaccagaacccagtttcctctgggattatttgttagtaatcgttttacaggctgagcattaactaactccaaagcttgaaggactttttctcattttcacttgttttctctaataaaaataatgctgtaatttcaacttcacaagatgaggcctcatggaagagtgtttaccaaaatattaaaaatactttgacagaaaaaaatcaagcgaactctttgccaaccaaatatcatcatgactgatgtaacaagtaatccaacacagatatgaaaatcacactggtaaaaatcatctcagttaattctaaaagcagagctaaccaccccttttgtcctaaggctttatggtattaaaaaataaactgtacaaaaatatagattttcccctatcccctacccctggaaagtaatatactgaagtctcatcatactgttttggggattccagtaattaaaatctctagtgaataaagacctgtttcaaaacaacc

SEQ ID NO: 401701 - DNA, 1382 bp, Homo sapiens
cggaagtgtcgccggcctcctcccggcgcagcctccgggcctcccgtgcaatcactacgccctggggcccggaaaccgttttccggtctttcgctttcggctggggcgtggaggccgcggtgctgcgtaggccgggccgggcgcaggaacagccccgtggcgccctctctggccgccgcccgggcgggaaacgttgttccggggaccgggcgaccccgcagcggggagcgcgccaggtccgcgcggggaagtgggcggtgtgcggccggcaccgcctcgcaccacgcccccgcgggcccgcactttcccggagtgcaccccgcggccgccagccggggcgatggcggggctctggctggggctcgtgtggcagaagctgctgctgtggggcgcggcgagtgccgtttccctggccggcgccagtctggtcctgagcctgctgcagagggtggcgagctacgcgcggaaatggcagcagatgcggcccatccccacggtggcccgcgcctacccactggtgggccacgcgctgctgatgaagccggacgggcgagaattttttcagcagatcattgagtacacagaggaataccgccacatgccgctgctgaagctctgggtcgggccagtgcccatggtggccctttataatgcagaaaatgtggaggtaattttaactagttcaaagcaaattgacaaatcctctatgtacaagtttttagaaccatggcttggcctaggacttcttacaagtactggaaacaaatggcgctccaggagaaagatgttaacacccactttccattttaccattctggaagatttcttagatatcatgaatgaacaagcaaatatattggttaagaaacttgaaaaacacattaaccaagaagcatttaactgctttttttacatcactctttgtgccttagatatcatctgtgaaacagctatggggaagaatattggtgctcaaagtaatgatgattccgagtatgtccgtgcagtttatagaatgagtgagatgatatttcgaagaataaagatgccctggctttggcttgatctctggtaccttatgtttaaagaaggatgggaacacaaaaagagccttcagatcctacatacttttaccaacagtgtcatcgctgaacgggccaatgaaatgaacgccaatgaagactgtagaggtgatggcaggggctctgccccctccaaaaataaacgcagggcctttcttgacttgcttttaagtgtgactgatgacgaagggaacaggctaagtcatgaagatattcgagaagaagttgacaccttcatgtttgaggtattgtatattgttaggttcagatatcattaaacaaatttcagttattgttaga

SEQ ID NO: 401702 - DNA, 645 bp, Homo sapiens
ccataaaacagctgctgagtcctcctacagtgcacccccacttgaactcctggattttctggggtgccatgggaggcaagattgcccttaatacaaccacactaaaaaggagacagatctctatagctatctgctagtccttccaggttccacaggagatgggaatgccaaccctggttactagctggtcttatttttaatgtagaaaaaaaaaatttatttttcggtctttggctataagggagggatacgtgagtgctgtatgtgaatgcatgtgtgtgtgcacaggagggaagtgtttataggggatttagtcttatggaatcaaataggagaaggtcccaagcattagacctgccgaatctatccatgtgttctcattaatgctctgattagcatccaaagtgttaaacaagcagctcacatgggcaggacttcattttagttttagagtttagcccaagaggagggctttcctggaatgttctagagtggcacatttacaactcactacagaggacgccactggagggctggaaaggcaggtcatcgcggaggtgaatccaggctctccaagtgattaactgtgagtctatggtttgtcacatcgagctgttgtgtattagtgggtccacctgtaaaatg

SEQ ID NO: 401703 - DNA, 327 bp, Homo sapiens
tctcaggccactgagattttcagacacaaaccaagaggattgaaaagatctcattttaggggaaaaaaaaactaaagaggggatttcaaaggcatataccctgttctttattacagtgggaagtcccatggaccgaattcaattgtcctatgaagcggaactttcgtcctaaaaatcagaagtagctggtgttggactcaacatgatcccaaactcacctaatagctgcctctgagaatgcaattttcagtcaggagcacaagagaagtgctcattaaaagtgctcatggaacttcattaaaagttccatgtttggccaaaacccca

SEQ ID NO: 401704 - DNA, 187 bp, Homo sapiens
aagttatggaggaaagtcccaagaagaaggtggccaatgccactatatctaacaacagccaccataacagctctagtctgagaggtgcttaaccccaggcacaggatgtacaaggccaggtgtgcacccctcttaggcaaggtccccaggctataggtctcttggaagcctggaagcacaggaggat

SEQ ID NO: 401705 - DNA, 258 bp, Homo sapiens
tgggttcctgccattctcctgcctcagcctccggagtagctgggactacaggtgcccaccaccatgcccggctaattttttgtatttttagtagagacggggtttcaccgtgttagccaggatggtcttgatctcctgaccttgtgatctgcctgtctcagcctcccaaagtgctgggattacaggcgtgagccactgcgcctggccgaaaaaagaaaatttaaatttccttaaagaacgagcaaatcctcatcacat

SEQ ID NO: 401706 - DNA, 252 bp, Homo sapiens
tcaacccgagagcctctggccttctcataacctacaactccattctcccagaatactccatgtgaatggggccccctagagttgtgcagcaagaaggcttgctaagtgcatccttgcacacgccttctcccagcctggcccagtctcttataaagaaccatgggcctctgcttcatcgtgttccttggacctactgttccaaagagaatcaaagactttgatcctcaaggaaagccctgtgcattctcttcg

SEQ ID NO: 401707 - DNA, 1517 bp, Homo sapiens
ttttattttacatttataccactttgagttaattatagtacaaggtgtgaggtataggttgaggatccttttttttgcatgtggatggtcaattgttctggcaccacttgatgaaaatgctatcttttttctattcaactgattttgcacctttgtcaaaaatcaatggaccatatttgtgtggatctacttctgtgtgcttccctgtgtgttaacttttctcttgctctgtctccttttgtcttcctgtccctacttgtgtttttttttcagttttctattacttttctgattctctccctccttctcctgattttcccttcccccattcccttcctcaaaatgaagcatttagattgcattgttttatatatcatacttatttttagtttaaaaagcagatgtgaagcatttgtgtttttctttacaagtacaatatgctggaaacaaattaacttttaaattataatccctttttttttttttgagacggagtctcgctctgttgcccaggctggagtgcagtggtgtgatctcggctcatgccattctcctgcctcagcctcccaagtagctgggactacaggcgcccaccaccacgcccagctaattttttgtatttttagtagagatggggtttcaccgtgttaggcaggatagtctcgatctcctgacctcgtgatctggcctgccttggcctcccaaagggctgggatcacaggcggtgagccattggtgcctgaccaatttataacccttaattaatttttctcagtgaattagtgaccttaacgaaagatggcaatctctcttcccaaactgtgtgtttcagaacttctgcaaaaggcatcacttctccagtgttacagtttctttaaaaaagaaattagtggctggacatggtggctcatgcctctaattccagcacattgtgaagctgaggtgggaggatagctttaacccaggagttcgagaccggctgggcaatgtggcgagaccccatctctacagaaaatagaaaaattagctgggtgtggtggtggcatgcgcctgtggtcttagctacttgggaggctgaggcaggaggattgtttgagcccaggaggttgaggctgcagtcagctgtgttcacaccactgcacttgcacttcagcctgggtgacagagtgagacactttaaaaaaataaaaagaaattaaggtaatttcaaattggcatgcaaaggaagtcaagatttattccttttttaccatgtcaaacattatttcattcccaaattataaaatattgctgcttttcctagagggagcagtcatgattactactggatccacagatacaaaaaaaaaggaaaaaacaattttgaaagcagcttaatgttgtgccttctctaaagccagcttttgacctatttatttttaatacttaaaaaatgtaagaaaggaattggatttttgcatttaaataaaaataaaagacactagatagtatagataataggaacaaataaaacaagc

SEQ ID NO: 401708 - DNA, 1269 bp, Homo sapiens
ttttattttacatttataccactttgagttaattatagtacaaggtgtgaggtataggttgaggatccttttttttgcatgtggatggtcaattgttctggcaccacttgatgaaaatgctatcttttttctattcaactgattttgcacctttgtcaaaaatcaatggaccatatttgtgtggatctacttctgtgtgcttccctgtgtgttaacttttctcttgctctgtctccttttgtcttcctgtccctacttgtgtttttttttcagttttctattacttttctgattctctccctccttctcctgattttcccttcccccattcccttcctcaaaatgaagcatttagattgcattgttttatatatcatacttatttttagtttaaaaagcagatgtgaagcatttgtgtttttctttacaagtacaatatgctggaaacaaattaacttttaaattataatccctttttttttttttgagacggagtctcgctctgttgcccaggctggagtgcagtggtgtgatctcggctcatgccattctcctgcctcagcctcccaagtagctgggactacaggcgcccaccaccacgcccagctaattttttgtatttttagtagagatggggtttcaccgtgttaggcaggatagtctcgatctcctgacctcgtgatctggcctgccttggcctcccaaagggctgggatcacaggcggtgagccattggtgcctgaccaatttataacccttaattaatttttctcagtgaattagtgaccttaacgaaagatggcaatctctcttcccaaactgtgtgtttcagaacttctgcaaaaggcatcacttctccagtgttacagtttctttaaaaaagaaattagtggctggacatggtggctcatgcctctaattccagcacattgtgaagctgaggtgggaggatagctttaacccaggagttcgagaccggctgggcaatgtggcgagaccccatctctacagaaaatagaaaaattagctgggtgtggtggtggcatgcgcctgtggtcttagctacttgggaggctgaggcaggaggattgtttgagcccaggaggttgaggctgcagtcagctgtgttcacaccactgcacttgcactccagcctgtatgtcatttatatctcaaaactttttaaaaggaaaatttaaatgattttttaaaagtctagtgatatgtatccatggaactagaaataaatctattacagtccctgagttt

SEQ ID NO: 401709 - DNA, 411 bp, Homo sapiens
actaacacgagccctctattttggaaccaatcctgctgacacctggtattttggacttctagttccagaactgtgagagaataaatttctgtcatttaagccacccagtttgtggttctttgttacaacagccctaggaaactaatagttgataaagccatgagactctttgttcttttatgtgtatggatttttttgattatcaaacagtacttgttcattagatttctgaaataccacagaaatactacataaagaaaattagaaatatccataattccatattagcacagaatcactgctatgcaaatatgttcttaatagtacacagtcctagccatcaaactgtaaagtaaaacttcatattaacatcttttcactaacaatatagcacctcaaagatacactgag

SEQ ID NO: 401710 - DNA, 222 bp, Homo sapiens
gccgtccttgcgtggcccgggaggcaggagcccatagcatttcgaatggcttcaatgttgggattataggcgtggcataagtcaccatgctgggacttttttatttctttaatttttaattccagatctggtcacagaaggatttgttgagtagcctcagcacttcttgctttttcatttctttctgataagttacaccatggaccttccccatttttgtcc

SEQ ID NO: 401711 - DNA, 449 bp, Homo sapiens
tagctgggattacaggtgcctgccaccacacccaggtaatttttgtacttttagtagagatggggtttcactatgttggtcaaactgatcttgaactcctaacctcgtgatccacctgccttggcctcccaaagtgctgggattacagtgtgagcctctgcttctggcctttttaaaaattttttaaatttatattttttgtagagacagggtcttgctgtgttgcacagtctggtctcaaactgctggtctcgagtgatccttctgcctggcttcccagaatgttgggattataggcgtggcataagtcaccatgctgggacttttttatttctttaatttttaattccagatctggtcacagaaggatttgttgagtagcctcagcacttcttgctttttcatttctttctgataagttacaccatggaccttccccatttttgtcc

SEQ ID NO: 401712 - DNA, 435 bp, Homo sapiens
ccttggtctcactgtctcacaaggtcaggtgaagaggaaagagtagctacctgttagaaagggtatcctctttcctttaccccttctccttgtctactttttcttccattagttcttccatttaaaactcattttcaaaagctcccaaattgctacttggcagcagatggggcactgaaaagaggaatgacaggaaaggtggagcccatctgattgacttttcctccttcattgcaactttctcagggttctctgcattacacatttcaaaaggaaagttctgggcaccatccttggtcatggtgggaatttaattgacttggactcaggtggcactggagccaactggaagccaccaagctctgttctctctccagttcctcaactaactagaaggctgatcctaaatgtaaagccctttagatctaaaaccag

SEQ ID NO: 401713 - DNA, 387 bp, Homo sapiens
attgagactgtgagagctctgtctctttttaactcctggtttgcttctctgtaggtgatggccttgtcctcaccttccagggacaacttttctccacattgaggggaagatggttgtcctcagtcactgactaacagtcttgcatctttctgacatgaaaagtaaatcctttttccttccagcacctaatcaggaattgcaggggaaattgtctgattaacctagcttgggtaggacagaaacccctggaacaggtattatgaatcagagaaattgggttctatgactggccagccttggagtgcacatccacgctaatgatacagtggcctgatttagtaaatgaaaatgcagtgtaagtatggactaaaaaatgattcattcctg

SEQ ID NO: 401714 - DNA, 374 bp, Homo sapiens
gagagtggagagaatgtggtttggccacggactggagataggggctgactttcacacagcaccctggcatggtgatgggcacttcctgtacgtggccctctgttgtcctcacaaccaccagctagattggaattcaccctatttcataaaggagcagagggccagagaggtgaagcaagttgcctaaggtcacacagcctttaattgataggctcgaacttgggtctttgcagcatttaatcccaggctccttgtgtgaggcacttggaagagtgaggtaatggagatgaggcctttttggagattttactcaggtttttagagggctcagtaacttgtcatgtgaccaaccatctggaccagggaggtcttgg

SEQ ID NO: 401715 - DNA, 261 bp, Homo sapiens
cacacacatagtcttagaatgtaaagtcacgttttaattttaggaaaagttataacctcctaccagctaataaaacaaaaatgtgaactctccagtaaagttagtatttttttggactttaataaccaattttattatatttacctaaaaggggggaaaacacaaagtgttaaataaaaagaataaattcttggctgggcatggtggctcacgtgcctgtaatcccagcactttgggaggccaaagcaggcggatcatgag

SEQ ID NO: 401716 - DNA, 197 bp, Homo sapiens
ttcagtgcttccccatttcttacaggaggaatcaaaatattttaacatggttaccattatagcaccatcccttatgattccaaaacaccatattctgcactacagccacatgaggatctttctgtttccaaaacgcattagttcacctttcccaggcggcctttgcagaagctcttgtctctgtctaaaacacaagt

SEQ ID NO: 401717 - DNA, 295 bp, Homo sapiens
gcatgtcaagccttacagagagggatatttttatctttgccctacttccatgccttagactacaccaagtataacataagacctcttagacatactataaatattggctgatatatagctagtgaaaataattgaagaaagactttgcttgttaatatacatagaaaatccattaaagaatgctgatggcctttctgtttccaaaatgcttttacaatcacatttgtgtttttttccctacaataaatctgaaccaagttggcatttatattcctattaatatttataagcaaag

SEQ ID NO: 401718 - DNA, 643 bp, Homo sapiens
ggatgttgagaatgcctggtttgcctgtgtgcctttaagcactagcccagcttggcattgtcaagatttctctctgttgtctccctgttatgcagcataacgaaagggcagttgaatggttaacttgcttgccagcctctgtttggcatgaagtgtgtgtatatacaggaatgtggaatacatcacttaaatataataatggaattaccccatgcttcgtatgtttttacatagttttaaactcataagacgtctggaatgtccccgagttgcaagtttttgagatcttttcagggtcctttctacatcaagccgaagcctgtaacgttaagacttattgtcagtaagaagttagacctacatgttttacttcagaagacccccaaaactccaaatgtcacttacgcagttttactgttgaaaagcagtcatctcccgggggtgaggtggtacagccagctggcccacagccctatgactgcagggtggggaacctttggctggaagttattaaactaagttttgcttaatgtcgtttgcatttttcatagcgaaccaaagggctttatgttactgtttcttattgaaatgatttagaaagaagcaatccattactgcgttctttaaaaacacctgcaaagaa

SEQ ID NO: 401719 - DNA, 124 bp, Homo sapiens
ggctgtgtgaggtgtcagtctgcccctactgggggtgcctcccaattaggctacttgggggttagggacccacttgaggaggtagtctgtccgttctgagatctcaaactccgtgctaggagaa

SEQ ID NO: 401720 - DNA, 673 bp, Homo sapiens
gaactccaggaagtcatccagctgccatctttgttgacttttacatatccaaatgaaaacaaaattaaatgttcttagagaatgaactttgaagtgtatatcatactgggaaataaatgaccataagtacatgttaatgttttaacataaaagttatcccacttgaatctgagtgttcttggagaaaccttaaatctcttcttacaactagtaggatttgtgtccttcctcactaaacaaatattgaatgtttattttatacaagtagtttaaacttgcctaataatgtcaataatcaagggatttgaaaaccttgacctctgaccaatggaaggaccttagttattctagtgcaactagtgtagcacgttagtagaccagcatgtaagaatatatgctgttaatgcctgttcttttgaattcctgacagaaaagtaactggctatacactgaagtgtttcagctgtaaaattagcagtaaattaatataaaacttgcagcttaaatttaatgggacaacactttacatgtttgcttggttgttttttcaaaagtaaaatttgaccttttccagcaaagaggagcttggtgcaagataggccagagttccaatccacaatctatgacttagtagttttgtgaaactggttaaacctttaaactcttgagtttg

SEQ ID NO: 401721 - DNA, 441 bp, Homo sapiens
ccatacttctgagttttcatctttcatgtggttagtcaactagagactgtatgcttcttatcctcattttttatattattttctaagattatatgtacagaccaagcaatagtccctaatttttgtttttatgaatcattgtgtgaggtgatgagtgagttactcaggagctcatttcatcaactgagataggctctgtagatggaagccttgaacttcatctggaccagctgcccacgattctcaccccttgctgtacttcagggcatccagttcacctgggaacttgaaggaagggaaaagagaagaataaacagtacacacacacacaaacacacacacacatacacacacacacaaatatatatacctacactttaccctctgagattcagattccattgtctggaagttgccagtcaactggtatttttttaaagc

SEQ ID NO: 401722 - DNA, 592 bp, Homo sapiens
atttatttatttttattatagccattctaatgggaatgaggtggtacttcattgcagtttggatttgcatttccttggtaattagtaatgtagagcatctttttgtgttccagttagccatttttgtatctctttttgacaaacatctattaagatcttttgcattttttaaattagattataagtgtattttattttgagattttaaagtttcttatatattctgaatattagccttttgtcacatgtatatgaaaacattttctgtcatcgcctaagctgtctcttcaaacttttagttgtttttttaatatgaaaaagcattttagtttgacataatgttgtttgtttattcttgattttgttgcccatgttttgaaatcttattttaataatcctttcaccgtccaatgttataaagcatttttttatgtttttctctaatagtttcataattgatggcattacatttaagtctttagttttagttgattatcatatatggcaaggtacaagggtctagtattatttttctgaatataaatatttaaatggccctgcaccatttattaaagagattagcttttctcta

SEQ ID NO: 401723 - DNA, 1058 bp, Homo sapiens
gcattgatctttttatgtactgattcacgaggacttaagcctatgatgcagttgttttcccagtcttgggagctggcagatgccattacccaggtcaggagatagaaccttgccagctataccctgaagctgttcaagtctttctcccaattacagtcttcataagagttgttagaaggactgaatgagatgaagtagaggaaagtcttctaggacaggggtcctcaacccttgggccacagactggtggcaggagggctgcacagcagatgggatgcctggttgcaagaaaacaagctcagggctcccacagattctacgtgatgcagttttcacagatttgtggccagatgctagagacaaaggctgagaagttgtccaggacgtcatattcttgctttgctggaggcagatctgaaggatgtcatctctcctgtggcttcttctagtgtggggtcccgaagcctggcttccccagccgatgtgctgctttagtcagcgtctgccctggtccttcggttcgcaggctcacacgcttttttgggttgtgtccctttggactgcagaggctacgtgtcctgtgaccaaccacgaaggcggccactcccgctcccctcaggagtgtcttaaaatacctccattttagctaccctattgaatgacaggttagctgggtgctgggttttcaggtgatggacattttccctcagtcctctgaaggtgttgctggcttcaggcattgatgccgccactctgattgttgtatgcagtgagcaaactagaattttctcttggctttctagattttcttctttatattctgaaactttattatatcaaggtttgaattttattttttttggagacagggtcctactctgtcatccaggctggagtgcaatggtgcagtcctgctcactgcagcctccaagtccagggctgaagcgatccttctgcctcagcctcctaagtagctgggatcacaggtgtgcaccactctgcctaacaaggcttgttttttgtttgtttgtttgttttaaataaatacattcagattg

SEQ ID NO: 401724 - DNA, 868 bp, Homo sapiens
gcgggtctgccgtatcatactcagaaatacttgaatggctttccccaagaacaaaaccacaggcttgcacacgagagcatctaaagcgctagtctgtgggactgacaattttcttcttctctatccatttccatagcagttttcacagatttgtggccagatgctagagacaaaggctgagaagttgtccaggacgtcatattcttgctttgctggaggcagatctgaaggatgtcatctctcctgtggcttcttctagtgtggggtcccgaagcctggcttccccagccgatgtgctgctttagtcagcgtctgccctggtccttcggttcgcaggctcacacgcttttttgggttgtgtccctttggactgcagaggctacgtgtcctgtgaccaaccacgaaggcggccactcccgctcccctcaggagtgtcttaaaatacctccattttagctaccctattgaatgacaggttagctgggtgctgggttttcaggtgatggacattttccctcagtcctctgaaggtgttgctggcttcaggcattgatgccgccactctgattgttgtatgcagtgagcaaactagaattttctcttggctttctagattttcttctttatattctgaaactttattatatcaaggtttgaattttattttttttggagacagggtcctactctgtcatccaggctggagtgcaatggtgcagtcctgctcactgcagcctccaagtccagggctgaagcgatccttctgcctcagcctcctaagtagctgggatcacaggtgtgcaccactctgcctaacaaggcttgttttttgtttgtttgtttgttttaaataaatacattcagattg

SEQ ID NO: 401725 - DNA, 329 bp, Homo sapiens
tgggaagcccttggtaaagaaagccaccattttttttacttaggtatattccagtggtttatcatcgggagagggatgataatggaggaaggctcaatgagggagaaagtattcagctgcttgatgttagagcttaatggcaggacctaccagttgcttttcacagaaatgctgtgtattgatcctaaggcagcatgtgttctcttttgtgtggccattatccattctcccacttttccatcagtgactgctttgcttttgttcctcaatcctttacccaaaaatggctgaattatttctgtgcagttaaataaagtgatccaaactca

SEQ ID NO: 401726 - DNA, 595 bp, Homo sapiens
ttaacctgtagcccagaggtgttagatttattttttgagacagagtctcactctgttgcccaggctggagtgcggtggcacaatcttggctcactgcaacctctgccccctgggttcaagcaattcttgtgccttagcctcctgagtagctgggactacaggtgcatgccaccacgcccagccaatttcttgtattcttagtatgagacagggtttcaccatgttggccaggctggtctcaaactcctgacctcaagtgatctgcccgcctcggcctcccaaagtgttggaattacaggcgtgagccaccacgcccagcctatgatattctttttataagcaacttttaaaaagttttttaaaagatctcataagcatatagcactgctacactttagatcactactgtccagtcacactttatataaggatagatgtgtccttttcactccccagtatggtagttactagtcacatgtgtagctactgagcccctgaagtgtgggtgggatgattgagctgaatttgtaattttaatcaaagttagccacatgtggcttgtggctactgtattggacagcagagctttagataa

SEQ ID NO: 401727 - DNA, 255 bp, Homo sapiens
cccaaattccttaaaatcagaatcttaaatatttataccaagttcagtattgaatgactttagaagttaagaagaaaaaaatagttgatttttaatcataaattttttaggtgatttaaatgtcttctgattgacttcattgttaagttcaaaatcaaattgtttacatcattagtcagcccttgtctgctgcttagctgatgggcaagacttagctagcaggaactcagtaaaggttggttaactgatgtttag

SEQ ID NO: 401728 - DNA, 768 bp, Homo sapiens
caagttgggccacccacacggatctggcaactctgatcgcccatatctaagaggagcacttagttctcagttgattattttcataagtggtttctttggtttgcttctctagttggaaaattatattttactttcactttcaacgctatacagtcctttaaagattcttgtaactttctgagaattttagctttctacatttaaaatgtgtagaatctagttttccaacaagcacaaatgtcaagtgtacacatgaaatacattttacacaattttttgtaacagacaagaaatctcgtcactttatttagaacatatcctttcctcaatatactgtaaagtaataatttgtagagtttaactttaatactagggaactgattttacattttgcataagtttctgagataaatgtactctacttcagagaacagtacctatatatggccaaaactacttattttctacaccactgagaaaatattggcagaattggctaggcgcggtggctcacgcctgtaatcccaacactttgggaggccgaggcgggcgaatcacgaggtcaggggatcgagaccatcctggctagtacggtgaaaccccgtctctactaaaaatacaaaaaattagctgggcgtggtggcgggcgcctgtagtcccagctactcaggaggctgaggcaggagaatggcgtgaacccgggaggagcttgcaagtgagtggagatcgtgccactgcactccagcaacagagcgagactccatctca

SEQ ID NO: 401729 - DNA, 587 bp, Homo sapiens
agcaaagggaacttgagggaacttgaggagtatttttggattgattgattacaaaatggaaattagatggaaatacagggcaacataaattccaaagtcagccgtgcctgaaatggtttcctacaagtctacaggcagactctttccctctgtctcttacaccaaaggcaaattaagccacagccgggggcatcctaacgatattggaagctggtaaaaagtatgaatgagaaagatggggaggagagcagggtgtgggactggagtggggatgttaaagctcatgttcagtaacatgtccttccccacacgctgaccagaggcaccattgcccaatgtggctcagatataccagaggcaatagcagtctgtttgctctgtaggaagtgcgagttggaagttgattttccctcagtttggaaaccaatttatgacaataatactttcagatacagacctatatggcacccttcttctgattaactcaacatgcttcatgtctgtgatttgcacttagcattttttatttatttattttttttgtcttcagatggagtcttgctctgtcacgtaggctggagtgcagt

SEQ ID NO: 401730 - DNA, 338 bp, Homo sapiens
ggaggaggagggtaactatgatcacagctttcttcaactactttaaacataaacttccctttccacacgagaggtaggtctctggcactgggatctatactgtacgtgagtactctgtgaatggtggttgttactataataggaaagtgaacattatatttgctaaatattaaaagaacactcagtaaagaatattttagcccttgaagaaatgatataaaaaagtatgtcataggctgaggcaggagaatggcgtgaacccgggaggcggagcttgcagtgagccgagatcccgccactgcactccagcctgggcgacagagcgagactccgtctca

SEQ ID NO: 401731 - DNA, 279 bp, Homo sapiens
gagatccaatcaggaggcagaaatcacacaataatttgaacttggaaagttcaacatcaaaaaaatattacaggggactggagtaatgagagattggctaaaagattatgggaatgtcaaatttaagaagcactcactatccctagggttgagataaaggtcctccccctccctccagacttaagatgcagatctcgttggagggcacagatagtggctcactgaatggcagagaagtagctgtggtgaggtgccagtggaacctgcccaaaaatcctc

SEQ ID NO: 401732 - DNA, 513 bp, Homo sapiens
tgatggtagactagggaggaaagaatgagaggattaaaaagggttgggaacagaagacacaagtgccttaagggataggaactataaaattctgaagaaaacctctaggtgtgttcctgtttcagggaatatctgcaatattacattctttgacaacagattgtccagagagagtgattattcctgagcttctgtgggacttggtgagtttggaataataggaggcaggtggaacctggaggtggggttgggggagaggcaatgagagagccagctggaatcagaaatacccagcttagggatctgcagtagccaaacacccctcgcacctacccgctgcctttgtcaccgcccccaccacctttctcgagctctagtccttgttcctctaggccctgggaactgccctttggcatgttgagcttgagatatgaatgaagataggacctcaaaatgcaagacaaactgaattttcccctggtagcgttttaatctggtagttggtttctgttg

SEQ ID NO: 401733 - DNA, 212 bp, Homo sapiens
tcttgatgagcgacgggtattacatcagataccctgaaacatttcaatatgataagtcctatagtagaagttatctgaagtttttgtaatgaagaaggactaatttgtcatgaaaataaataccatgcaatctagttttcttcattgtagttattactcaaatataactggggttttctgtggccagtctcaagggacaacatttttgccag

SEQ ID NO: 401734 - DNA, 228 bp, Homo sapiens
  misc_feature (35)..(35): n is a, c, g, or t
  misc_feature (54)..(54): n is a, c, g, or t
  misc_feature (65)..(65): n is a, c, g, or t
gattttttgggttaggtcaggagttatttttgccnccttcatcattagagttgntttttctttgnatttaggctctgaaccggcctttttttaattttagagactaggtcttgcactgttggccagctcactccagccccaaactcctgtgctcaagggatcctcttgcctcagcctccaagtagttgagattacaggtgcgtgccgtcatgcctggcccttccttta

SEQ ID NO: 401735 - DNA, 450 bp, Homo sapiens
gcaaaccagcgccgaaaagtatccggcctgccagggtcacaggagcttcttgggcaaggctgttttgatttacagcaatgtagcaagaagagtttcctgtgagagactaaattgctttccaaatctgttttgggccctgtaaaatggcgatgatgacgggtgattttggaagattgtagtgagggcaaggaagtgtctagacaaagcttgagaaaatggtaaatattataccatataaaataggtcttattgccatgggttatctgaaagctgtggaaagggccatctacaacatgaggcttggattacacagatggattcagggacctccacctctacggcatctgctaactcaccttcctcaggtgagacttacatccaccttcctcttgacttctacccaaggagcccaggaaaagccaagagaacaagggggaggaaatgccagag

SEQ ID NO: 401736 - DNA, 771 bp, Homo sapiens
tgataccaggttctccagggagacagatctgggcttctcagcagaggccgcagctgaaacgatgatgccaatggtttggattgacagcagcttaaggaggaaaaaaaaaaaaagaaagaaaaaaagaaaaggctggtgacacccccctggcgtggttgacctggtcccagtcgcagtccctatgggacagcagagctgtcaaaacagaacccaatgatgacggctgaaaatcaagccagactgctgtgcggtcagcttgccgccgtggaatgccttgtgtcttggccatgtccagccaagggtacaacgtgcttgttcccgatcacccaggtttgccattggaagtcaaagacagaatcgcttcatggcactacagatgtggaaaaataaaaatctcagctagaggtgctgagaggagggtgccccaacttcaggaggaccatgtgacggctgtggttgttttcggggtcacttgcagcacacacagcgtccccttgatgctcgatggggaccgcagacgggcctgcagacctaacccctggctgtggacaggagaggctgctccaggcttctttccttctcaatgctttacacaggatttccttcatttgtgctttcctttggtttaacagttaaaaaagaagagtgagggggcaaaatggtttgtcacttgtccaaaactgagagaagaggtggaagtgggcgccaaatctcctgggtgatgcttcctggtcctggcgatcggttgccttgctcagggtttgggagctg

SEQ ID NO: 401737 - DNA, 168 bp, Homo sapiens
ggactttaagatgagctttaatttgtttgttttccttaagtgcatttatcgatgtaaacagagcatgttagagattcccggggagagcagactattgctgatatgttggttttaattcaaaagaaacgatgatgccaatggtttggattgacagcagcttaaggagga

SEQ ID NO: 401738 - DNA, 825 bp, Homo sapiens
tgataccaggttctccagggagacagatctgggcttctcagcagaggccgcagctgaaacgatgatgccaatggtttggattgacagcagcttaaggaggaaaaaaaaaaaaagaaagaaaaaaagaaaaggctggtgacacccccctggcgtggttgacctggtcccagtcgcagtccctatgggacagcagagctgtcaaaacagaacccaatgatgacggctgaaaatcaagccagactgctgtgcggtcagcttgccgccgtggaatgccttgtgtcttggccatgtccagccaagggtacaacgtgcttgttcccgatcacccaggtttgccattggaagtcaaagacagaatcgcttcatggcactacagatgtggaaaaataaaaatctcagctagaaagaacgtccgatttggagatagcgggaggacacgaaggagtgggggccattttggtgctgagaggagggtgccccaacttcaggaggaccatgtgacggctgtggttgttttcggggtcacttgcagcacacacagcgtccccttgatgctcgatggggaccgcagacgggcctgcagacctaacccctggctgtggacaggagaggctgctccaggcttctttccttctcaatgctttacacaggatttccttcatttgtgctttcctttggtttaacagttaaaaaagaagagtgagggggcaaaatggtttgtcacttgtccaaaactgagagaagaggtggaagtgggcgccaaatctcctgggtgatgcttcctggtcctggcgatcggttgccttgctcagggtttgggagctg

SEQ ID NO: 401739 - DNA, 502 bp, Homo sapiens
tcaagtgattgtcgtgcctcagcctcccaagtagctgggattacaggtgcacgccaccacatggggctaatttttgaatttttagtagaaacagggtttcaccatgttggccaggctgttctcaaactcctgaccacaagtgctccgcttgcctcagtctcccaaagtgctgggattataggcttgaactaccacgctcttcctagtgcaagccatttaaacattgtatccaacagctaaagaaagaattcattccacaggcatttatgaaatatgagagacttgactcctgtccaggagaagcatcagcagctagctctacattattttctgatactattcctacactgtgccaccgtgtttccttagcgacttgtgaagaaaaagtgattatatgaagtgtaaatactacacttcattaatggcttggagatactgtgtatctttctgtaattttacccagttaagtgaataaaagcaacaggcccggccggtagccatt

SEQ ID NO: 401740 - DNA, 454 bp, Homo sapiens
ctcttcccgcgttcccactgagcaggtttgaggggcagcaggaaacaaggctgactgcattgtggcacccctccaggctgccttggacgagttaagatgggatccgtcagcttggtccctaaccccaggtaaagatggaacagatgctggctgtgaccaggagtcctgaatttgccttgcaccatttccctccaccggactgggagccactgcggggcaggaagctgccttttccatttcccaagaccggaatcaatcacagcggctcatcgcatcatgcatcctctgcaatggttccttcctttccagggaggttggtcacggccaatgctgtcctgtgtccaccaggtggcgctcgcgatcaccgcaaaacacatggctaccgtgatggtttttaaataagaaatcttacaatggttttagacataaaggactgttgagaatatgatagaga

SEQ ID NO: 401741 - DNA, 412 bp, Homo sapiens
ggagatctgtcccttttagagacaccttacttataatgaagtacttgggaaagcggttttcaagagtataaatatcctgtattctaatgatcatcctctaaacattttatcatttattaatcctccctgcctgtgtctattattatattcatatctctacgctgcaaaatttgggtctcaatttttactgtgcctttgtttttactagtgtctgctgttgcaaaaagaagaaaacattctctgcctgagttttaatttttgtccaaagttaattttaatctatacaattaaaaccttttgcctatcactctggacttttggattgttttttacattcagtgttataatatttgattatgctgattggttttggtgggtactgatgtgaattaataaaaacatttcatttcca

SEQ ID NO: 401742 - DNA, 459 bp, Homo sapiens
acaaaataaaacttagagtcctatgatttaaaacaataaacatatatttttagataggttaaatcatctgtggcatccctgcctaaagattcatggagtttaaaaatccctaacttgaagcagtggagagccttgggagtttggtgtggctagggatggggaggtgtgtggggataagaagacagcattggcaggacatgggccccactgcgcaggaggacagggtggaggtggactcttgatggttatcaggctgttatattttagttcaggggcaatgtgatgggcgggcctcgcctaaggtagccaatgggaataataaagaaaatggtgattacaggagattttttgaagggaaatgaataatacttgtttagtgactagatatggatggtgagtgggaaggcttgaaaactcatgtctctagttgactgagagaatttgaacggccagtcagac

SEQ ID NO: 401743 - DNA, 206 bp, Homo sapiens
aggagatgaaggtagtaaggaaaacatgggttagataaaggccatatgtgcctcactcaagagttagattttagttcattatagtatctactgaatgatttttccacaggatagtgaaatttttcttcattttagaaggactataatgtagacgataagccctgtccacacttttcctgtttcctgtgtctcttctggctgtctgt

SEQ ID NO: 401744 - DNA, 388 bp, Homo sapiens
taaatgtagaatttatccttgttgtgatagattgacagaatttctctcaaacctttatgagccctaaacatttctttaaaacaacacttggaaaagtatttcaaggtctttcttaatttttgatctgttgttaaaaatttccctttcttttggatcagttttggtaattgctacaattctagaatgaattgttggggagcatgcctaaaagtagacaccaataagggagttgctctaacagtttaggcaggagatggttcccaattctaaatccatagctttccctaatatcgggcttgataaataacaacacagtaccccccatttataatgccaaaaccagggaattctcctgaatttctttctttcccttagcaccatttaccac

SEQ ID NO: 401745 - DNA, 322 bp, Homo sapiens
agcaaagatttgggacctaccagtggcttgatatccacacatgaaatttccttgtttgctatgtccacagttaaggtagacatggtggctttctttaaactgcaaggcaacggaacctgtgttattagagaatagcacccctgtaaacgacacagctgcattccattcatccttcagtccattcagtcatccgtgcatccatccatccatctcatccatccttccatccattcattccacccacccatccatccattcatccatccatccacccttccatctctctacccatccactcatccatctacgcatttatccatcc

SEQ ID NO: 401746 - DNA, 318 bp, Homo sapiens
agcccagatgacgcccatggatcaccaccatgaggaagcaaggaacaagatttaaattaagatttaacatattaacctttaacaagttaaagtttaacatgcccagccttacttcttatactataatatatagtttgaagtaagtgaccacactagttgctttaaaaatatatttgcaatctggccaggcgtggtggctcatgcctgtaatcctagcactttgggaggccgaggcgggtggatctcctgagctcaggagttcaagaccagcctgggcaacatggtgaaaccccgtctcaactaaaaataaaaataaaa

SEQ ID NO: 401747 - DNA, 516 bp, Homo sapiens
tctaatataatgcctattttgtaataaggtattgaatattttgtgtaatttagtgaatactgtgctgcaagcgaaaaacagaatggttgtagtctactaaatgtatattgctttcacaccattgtaaagtaaaaaaatcataagttgaaaaaaaaaaaaaaaaaaaaaaaaaaaaggggggggggttaaaattttcccttggggggccaatttggggtacccggttttttggtacacgagggggtcccttattagggagaggtcgtattaataagcgcttagggcattggcgccggtcgttttaacacgtgtcgtggccttgggagaaacatgtgctacgctttgggacgtctcttgggggaagggacccttaccttttggtgggtggtcgaccttattggggacacactttccctaaacggagattaagaggctcaagcgaacatttcaaagttttaagggtgtttatgtgtcgtcaccctaagggaatatcgtggggttagaaactttgcgtta

SEQ ID NO: 401748 - DNA, 382 bp, Homo sapiens
tattgctttttgatgaggcgtattttattcaatgatcttgaccgctcttcccttttctcctaggtagctcccacacatcctttggatctctgataaagagtcatatacttaaagagccatcctcacattcctgcccaggtataccccaaataaaagttatcatagcactgtgcattcctcctttgtaacacttgccaccattgaaattttatttgcttgtgtgattattttgtctaccttctctcctctagactgtgagctgcatgagagaggccatgtctcattttgttccattacatctccagcacttaagagtgctggacacataacgagtgtctgacacataacgagtgctgaataaatgtttgttaactgataaaat

SEQ ID NO: 401749 - DNA, 424 bp, Homo sapiens
ggatccagggcctctcagagttcacctgagctttcccaagtctggtttgttctctctaccctgctgctactactgcaagtgactttcacaagatgcttctgagcatagcattgctctgctgtgaccactgcagatgtcaagagaatttctgccttttggaacttggacaatattggccacctacccagagagaggagaaggataatccagacataaaggtagctcccacacatcctttggatctctgataaagagtcatatacttaaagagccatcctcacattcctgcccagactgtgagctgcatgagagaggccatgtctcattttgttccattacatctccagcacttaagagtgctggacacataacgagtgtctgacacataacgagtgctgaataaatgtttgttaactgataaaat

SEQ ID NO: 401750 - DNA, 605 bp, Homo sapiens
agcctcggggaagcggaacccacaggcgcgcgcgccgctgcttctggccgggcgcgggtcgtggtgcaccacgggagcgccgcaccggccggcatggaggagcgcggcgattccgagccgacccccggctgcagcggcctgggtccgggcggtgttcgcggctttggcgacggcggtggagctccttcgtgggcccctgaggacgcctggatgggcactcaccctaagtatctagaaatgatggaattagatataggagatgccacccaagtttatgtagcgttcttggtttacctggacctcatggaaagcaaaagctggcatgaagtaaactgtgtaggattaccagaactccagctcatctgccttgttggtactgagatagaaggggaggggttacagactgtggtgcctacccccatcactgcttccctcagccataacagttgtacacagaagaaagcccatatgaggacacagcaagaaggtggctgtcttcaagccaagaagagaggcctcatcagagatggaatgttcctgcacttcggtctggatttctagtgtccagaactgtgagaaaataaatttctgttgtttaagccacc

SEQ ID NO: 401751 - DNA, 1832 bp, Homo sapiens
agcctcggggaagcggaacccacaggcgcgcgcgccgctgcttctggccgggcgcgggtcgtggtgcaccacgggagcgccgcaccggccggcatggaggagcgcggcgattccgagccgacccccggctgcagcggcctgggtccgggcggtgttcgcggctttggcgacggcggtggagctccttcgtgggcccctgaggacgcctggatgggcactcaccctaagtatctagaaatgatggaattagatataggagatgccacccaagtttatgtagcgttcttggtttacctggacctcatggaaagcaaaagctggcatgaagtaaactgtgtaggattaccagaactccagctcatctgccttgttggtactgagatagaaggggaggggttacagactgtggtgcctacccccatcactgcttccctcagccataacagaatatttctcttagaagatgacatccatgtttcctgatgcttgttttattcatacaagattggatttgagacccatcagactgcttcatcttttatctcagaaatagggttgacgtacatagtgagggttgacttccccattccataaggttttcattctgaagagtaaaacttccccaggtagaagactttctccttcttaaaaaatatagggtgatttctttaaaactttgttatctagagacagtttaattacagttatatacaggtttatgcctaggatgtattcagatgggtgggacctgtgtgctgcttttgtcatcccacactcaaagttgtctctttgtttcttgctgccactgccagctcattgttgagactgccatttctttctcttactcagctctccccagtgccttttggccactgcagctaccgtagaatggcattttatatgtaccttgtcacccacttctgtttactttttcctctccagtaaaaagtaaaagatttctttcaattggtcttcccattgcagttactgttatttctcttttttggttaactttaaatcaaaactcaaaatatgttcatccagagtgtgtcttaagtaacttacgtgtcttaagtaacagggaccagagacatgttacctacaagagttctgggctatccttttcattcttatcacatatcatagcttgaatattacaacagtgtgggagagaatcaaccgtaaaaatgtcttcattaattagacccagttattccacttttgttaatgtctctcaaattgtacaaagtataaaaaattatatgcacaaagatgttccaagtgacattacttttagtagcccaaattataaaccactttaaagtttggggtaaagattggcaaactttttctataaagggccagaaagtaactattttaggtttttaaacctactgtctctgtcataacttgtcaacactgctgtatgaagcacaaaagcagccatagacaatacataaacaatacgggcgtggctttgttccagtaaaactttgtttacaaatgtggtgccatagtttgtcatccctgggtctaggaaatagtcaataaacagatatatacaaatgatacataatgtacttattaaaaattagtaatgaatattattaaaaacatgaaaatattaccttaagtaaaaattgcaagacggaaaagtgtataagtgggtgtaatcatggctgaaataacagaccaagcatatgataaaaagataacaaagtaaatcaaattactaactggttatagtgggataggaggcagaaaatggatgactttgtcttttctcaatgtttttatttgtattttataataaaaatgttttaaaattaaaa

SEQ ID NO: 401752 - DNA, 1870 bp, Homo sapiens
agcctcggggaagcggaacccacaggcgcgcgcgccgctgcttctggccgggcgcgggtcgtggtgcaccacgggagcgccgcaccggccggcatggaggagcgcggcgattccgagccgacccccggctgcagcggcctgggtccgggcggtgttcgcggctttggcgacggcggtggagctccttcgtgggcccctgaggacgcctggatgggcactcaccctaagtatctagaaatgatggaattagatataggagatgccacccaagtttatgtagcgttcttggtttacctggacctcatggaaagcaaaagctggcatgaagtaaactgtgtaggattaccagaactccagctcatctgccttgttggtactgagatagaaggggaggggttacagactgtggtgcctacccccatcactgcttccctcagccataacaggataagggagatcttgaaggcatctcgaaagttgcaagaatatttctcttagaagatgacatccatgtttcctgatgcttgttttattcatacaagattggatttgagacccatcagactgcttcatcttttatctcagaaatagggttgacgtacatagtgagggttgacttccccattccataaggttttcattctgaagagtaaaacttccccaggtagaagactttctccttcttaaaaaatatagggtgatttctttaaaactttgttatctagagacagtttaattacagttatatacaggtttatgcctaggatgtattcagatgggtgggacctgtgtgctgcttttgtcatcccacactcaaagttgtctctttgtttcttgctgccactgccagctcattgttgagactgccatttctttctcttactcagctctccccagtgccttttggccactgcagctaccgtagaatggcattttatatgtaccttgtcacccacttctgtttactttttcctctccagtaaaaagtaaaagatttctttcaattggtcttcccattgcagttactgttatttctcttttttggttaactttaaatcaaaactcaaaatatgttcatccagagtgtgtcttaagtaacttacgtgtcttaagtaacagggaccagagacatgttacctacaagagttctgggctatccttttcattcttatcacatatcatagcttgaatattacaacagtgtgggagagaatcaaccgtaaaaatgtcttcattaattagacccagttattccacttttgttaatgtctctcaaattgtacaaagtataaaaaattatatgcacaaagatgttccaagtgacattacttttagtagcccaaattataaaccactttaaagtttggggtaaagattggcaaactttttctataaagggccagaaagtaactattttaggtttttaaacctactgtctctgtcataacttgtcaacactgctgtatgaagcacaaaagcagccatagacaatacataaacaatacgggcgtggctttgttccagtaaaactttgtttacaaatgtggtgccatagtttgtcatccctgggtctaggaaatagtcaataaacagatatatacaaatgatacataatgtacttattaaaaattagtaatgaatattattaaaaacatgaaaatattaccttaagtaaaaattgcaagacggaaaagtgtataagtgggtgtaatcatggctgaaataacagaccaagcatatgataaaaagataacaaagtaaatcaaattactaactggttatagtgggataggaggcagaaaatggatgactttgtcttttctcaatgtttttatttgtattttataataaaaatgttttaaaattaaaa

SEQ ID NO: 401753 - DNA, 1421 bp, Homo sapiens
ggagaaaagtccatcctgatcttttttttttccagaatatttctcttagaagatgacatccatgtttcctgatgcttgttttattcatacaagattggatttgagacccatcagactgcttcatcttttatctcagaaatagggttgacgtacatagtgagggttgacttccccattccataaggttttcattctgaagagtaaaacttccccaggtagaagactttctccttcttaaaaaatatagggtgatttctttaaaactttgttatctagagacagtttaattacagttatatacaggtttatgcctaggatgtattcagatgggtgggacctgtgtgctgcttttgtcatcccacactcaaagttgtctctttgtttcttgctgccactgccagctcattgttgagactgccatttctttctcttactcagctctccccagtgccttttggccactgcagctaccgtagaatggcattttatatgtaccttgtcacccacttctgtttactttttcctctccagtaaaaagtaaaagatttctttcaattggtcttcccattgcagttactgttatttctcttttttggttaactttaaatcaaaactcaaaatatgttcatccagagtgtgtcttaagtaacttacgtgtcttaagtaacagggaccagagacatgttacctacaagagttctgggctatccttttcattcttatcacatatcatagcttgaatattacaacagtgtgggagagaatcaaccgtaaaaatgtcttcattaattagacccagttattccacttttgttaatgtctctcaaattgtacaaagtataaaaaattatatgcacaaagatgttccaagtgacattacttttagtagcccaaattataaaccactttaaagtttggggtaaagattggcaaactttttctataaagggccagaaagtaactattttaggtttttaaacctactgtctctgtcataacttgtcaacactgctgtatgaagcacaaaagcagccatagacaatacataaacaatacgggcgtggctttgttccagtaaaactttgtttacaaatgtggtgccatagtttgtcatccctgggtctaggaaatagtcaataaacagatatatacaaatgatacataatgtacttattaaaaattagtaatgaatattattaaaaacatgaaaatattaccttaagtaaaaattgcaagacggaaaagtgtataagtgggtgtaatcatggctgaaataacagaccaagcatatgataaaaagataacaaagtaaatcaaattactaactggttatagtgggataggaggcagaaaatggatgactttgtcttttctcaatgtttttatttgtattttataataaaaatgttttaaaattaaaa

SEQ ID NO: 401754 - DNA, 722 bp, Homo sapiens
agcctcggggaagcggaacccacaggcgcgcgcgccgctgcttctggccgggcgcgggtcgtggtgcaccacgggagcgccgcaccggccggcatggaggagcgcggcgattccgagccgacccccggctgcagcggcctgggtccgggcggtgttcgcggctttggcgacggcggtggagctccttcgtgggcccctgaggacgcctggatgggcactcaccctaagtatctagaaatgatggaattagatataggagatgccacccaagtttatgtagcgttcttggtttacctggacctcatggaaagcaaaagctggcatgaagtaaactgtgtaggattaccagaactccagctcatctgccttgttggtactgagatagaaggggaggggttacagactgtggtgcctacccccatcactgcttccctcagccataacaggataagggagatcttgaaggcatctcgaaagttgcaaggtgatccagatttgccgatgtcttttactttggccatagtggagtctgattctacaatagtctattataaacttactgatggatttatgctgccagaccctcaggtcagttttgaggtaactgacagcaagaagtacaaaaagaggaaaattatgacgtgattttaagtgtgactcaagtcagtcacagaactgccacttcctttgccatagggaaaattcaagaaaaaaagtcttga

SEQ ID NO: 401755 - DNA, 705 bp, Homo sapiens
agcctcggggaagcggaacccacaggcgcgcgcgccgctgcttctggccgggcgcgggtcgtggtgcaccacgggagcgccgcaccggccggcatggaggagcgcggcgattccgagccgacccccggctgcagcggcctgggtccgggcggtgttcgcggctttggcgacggcggtggagctccttcgtgggcccctgaggacgcctggatgggcactcaccctaagtatctagaaatgatggaattagatataggagatgccacccaagtttatgtagcgttcttggtttacctggacctcatggaaagcaaaagctggcatgaagtaaactgtgtaggattaccagaactccagctcatctgccttgttggtactgagatagaaggggaggggttacagactgtggtgcctacccccatcactgcttccctcagccataacaggaggaataatccatatatatttattaaagatattaacaaaaagcagctctcaccttcttgtgaatcagatccaaatcccttaacgtcttcattgattcagttgtacacagaagaaagcccatatgaggacacagcaagaaggtggctgtcttcaagccaagaagagaggcctcatcagagatggaatgttcctgcacttcggtctggatttctagtgtccagaactgtgagaaaataaatttctgttgtttaagccacc

SEQ ID NO: 401756 - DNA, 448 bp, Homo sapiens
acacttgtggtgaggactcagtaaggttcttgtggactgattgtgtccctctctaaattccccaattcacacactgaagctctaatctccagtgtgattgtttttggagttaggccctatatggaggtaatcaaattaacagaggtcatgagagtggggccttaatccaacaggactaatattcttataaaatggggaagaaacaggataccagagatctctatctctctcccccttctctctctctctctctctctctctctctctctctctgtgtctctctctctttcccagttgtacacagaagaaagcccatatgaggacacagcaagaaggtggctgtcttcaagccaagaagagaggcctcatcagagatggaatgttcctgcacttcggtctggatttctagtgtccagaactgtgagaaaataaatttctgttgtttaag

SEQ ID NO: 401757 - DNA, 1974 bp, Homo sapiens
agcctcggggaagcggaacccacaggcgcgcgcgccgctgcttctggccgggcgcgggtcgtggtgcaccacgggagcgccgcaccggccggcatggaggagcgcggcgattccgagccgacccccggctgcagcggcctgggtccgggcggtgttcgcggctttggcgacggcggtggagctccttcgtgggcccctgaggacgcctggatgggcactcaccctaagtatctagaaatgatggaattagatataggagatgccacccaagtttatgtagcgttcttggtttacctggacctcatggaaagcaaaagctggcatgaagtaaactgtgtaggattaccagaactccagctcatctgccttgttggtactgagatagaaggggaggggttacagactgtggtgcctacccccatcactgcttccctcagccataacaggataagggagatcttgaaggcatctcgaaagttgcaaggtgatccagatttgccgatgtcttttactttggccatagtggagtctgattctacaatagtctattataaacttactgatggatttatgctgccagaccctcagaatatttctcttagaagatgacatccatgtttcctgatgcttgttttattcatacaagattggatttgagacccatcagactgcttcatcttttatctcagaaatagggttgacgtacatagtgagggttgacttccccattccataaggttttcattctgaagagtaaaacttccccaggtagaagactttctccttcttaaaaaatatagggtgatttctttaaaactttgttatctagagacagtttaattacagttatatacaggtttatgcctaggatgtattcagatgggtgggacctgtgtgctgcttttgtcatcccacactcaaagttgtctctttgtttcttgctgccactgccagctcattgttgagactgccatttctttctcttactcagctctccccagtgccttttggccactgcagctaccgtagaatggcattttatatgtaccttgtcacccacttctgtttactttttcctctccagtaaaaagtaaaagatttctttcaattggtcttcccattgcagttactgttatttctcttttttggttaactttaaatcaaaactcaaaatatgttcatccagagtgtgtcttaagtaacttacgtgtcttaagtaacagggaccagagacatgttacctacaagagttctgggctatccttttcattcttatcacatatcatagcttgaatattacaacagtgtgggagagaatcaaccgtaaaaatgtcttcattaattagacccagttattccacttttgttaatgtctctcaaattgtacaaagtataaaaaattatatgcacaaagatgttccaagtgacattacttttagtagcccaaattataaaccactttaaagtttggggtaaagattggcaaactttttctataaagggccagaaagtaactattttaggtttttaaacctactgtctctgtcataacttgtcaacactgctgtatgaagcacaaaagcagccatagacaatacataaacaatacgggcgtggctttgttccagtaaaactttgtttacaaatgtggtgccatagtttgtcatccctgggtctaggaaatagtcaataaacagatatatacaaatgatacataatgtacttattaaaaattagtaatgaatattattaaaaacatgaaaatattaccttaagtaaaaattgcaagacggaaaagtgtataagtgggtgtaatcatggctgaaataacagaccaagcatatgataaaaagataacaaagtaaatcaaattactaactggttatagtgggataggaggcagaaaatggatgactttgtcttttctcaatgtttttatttgtattttataataaaaatgttttaaaattaaaa

SEQ ID NO: 401758 - DNA, 2129 bp, Homo sapiens
agcctcggggaagcggaacccacaggcgcgcgcgccgctgcttctggccgggcgcgggtcgtggtgcaccacgggagcgccgcaccggccggcatggaggagcgcggcgattccgagccgacccccggctgcagcggcctgggtccgggcggtgttcgcggctttggcgacggcggtggagctccttcgtgggcccctgaggacgcctggatgggcactcaccctaagtatctagaaatgatggaattagatataggagatgccacccaagtttatgtagcgttcttggtttacctggacctcatggaaagcaaaagctggcatgaagtaaactgtgtaggattaccagaactccagctcatctgccttgttggtactgagatagaaggggaggggttacagactgtggtgcctacccccatcactgcttccctcagccataacaggataagggagatcttgaaggcatctcgaaagttgcaaggtgatccagatttgccgatgtcttttactttggccatagtggagtctgattctacaatagtctattataaacttactgatggatttatgctgccagaccctcagaatatttctcttagaagatgacatccatgtttcctgatgcttgttttattcatacaagattggatttgagacccatcagactgcttcatcttttatctcagaaatagggttgacgtacatagtgagggttgacttccccattccataaggttttcattctgaagagtaaaacttccccaggtagaagactttctccttcttaaaaaatatagggtgatttctttaaaactttgttatctagagacagtttaattacagttatatacaggtttatgcctaggatgtattcagatgggtgggacctgtgtgctgcttttgtcatcccacactcaaagttgtctctttgtttcttgctgccactgccagctcattgttgagactgccatttctttctcttactcagctctccccagtgccttttggccactgcagctaccgtagaatggcattttatatgtaccttgtcacccacttctgtttactttttcctctccagtaaaaagtaaaagatttctttcaattggtcttcccattgcagttactgttatttctcttttttggttaactttaaatcaaaactcaaaatatgttcatccagagtgtgtcttaagtaacttacgtgtcttaagtaacagggaccagagacatgttacctacaagagttctgggctatccttttcattcttatcacatatcatagcttgaatattacaacagtgtgggagagaatcaaccgtaaaaatgtcttcattaattagacccagttattccacttttgttaatgtctctcaaattgtacaaagtataaaaaattatatgcacaaagatgttccaagtgacattacttttagtagcccaaattataaaccactttaaagtttggggtaaagattggcaaactttttctataaagggccagaaagtaactattttaggtttttaaacctactgtctctgtcataacttgtcaacactgctgtatgaagcacaaaagcagccatagacaatacataaacaatacgggcgtggctttgttccagtaaaactttgtttacaaatgtggtgccatagtttgtcatccctgggtctaggaaatagtcaataaacagatatatacaaatgatacataatgtacttattaaaaattagtaatgaatattattaaaaacatgaaaatattaccttaagtaaaaattgcaagacggaaaagtgtataagtgggtgtaatcatggctgaaataacagaccaagcatatgataaaaagataacaaagtaaatcaaattactaactggttatagtgggataggaggcagaaaatggatgactttgtcttttctcaatgtttttatttgtattttataataaaaatgttttaaaattaaaaaaacccacaaatataatatttcattttatacccccaccactcatccacgtcatgggaaaaaaaattttcgcccaagcttattcttgcgccccaaattgggggttatttgggcaatttcgccctatagggagggcgttcaaacattaatcggcggt

SEQ ID NO: 401759 - DNA, 1584 bp, Homo sapiens
  misc_feature (53)..(53): n is a, c, g, or t
  misc_feature (55)..(55): n is a, c, g, or t
taggtagtgggtacgagcgaaatggcccccacaccaaacttcgggtaaagcgnantgataagggagatcttgaaggcatctcgaaagttgcaaggtgatccagatttgccgatgtcttttactttggccatagtggagtctgattctacaatagtctattataaacttactgatggatttatgctgccagaccctcagaatatttctcttagaagatgacatccatgtttcctgatgcttgttttattcatacaagattggatttgagacccatcagactgcttcatcttttatctcagaaatagggttgacgtacatagtgagggttgacttccccattccataaggttttcattctgaagagtaaaacttccccaggtagaagactttctccttcttaaaaaatatagggtgatttctttaaaactttgttatctagagacagtttaattacagttatatacaggtttatgcctaggatgtattcagatgggtgggacctgtgtgctgcttttgtcatcccacactcaaagttgtctctttgtttcttgctgccactgccagctcattgttgagactgccatttctttctcttactcagctctccccagtgccttttggccactgcagctaccgtagaatggcattttatatgtaccttgtcacccacttctgtttactttttcctctccagtaaaaagtaaaagatttctttcaattggtcttcccattgcagttactgttatttctcttttttggttaactttaaatcaaaactcaaaatatgttcatccagagtgtgtcttaagtaacttacgtgtcttaagtaacagggaccagagacatgttacctacaagagttctgggctatccttttcattcttatcacatatcatagcttgaatattacaacagtgtgggagagaatcaaccgtaaaaatgtcttcattaattagacccagttattccacttttgttaatgtctctcaaattgtacaaagtataaaaaattatatgcacaaagatgttccaagtgacattacttttagtagcccaaattataaaccactttaaagtttggggtaaagattggcaaactttttctataaagggccagaaagtaactattttaggtttttaaacctactgtctctgtcataacttgtcaacactgctgtatgaagcacaaaagcagccatagacaatacataaacaatacgggcgtggctttgttccagtaaaactttgtttacaaatgtggtgccatagtttgtcatccctgggtctaggaaatagtcaataaacagatatatacaaatgatacataatgtacttattaaaaattagtaatgaatattattaaaaacatgaaaatattaccttaagtaaaaattgcaagacggaaaagtgtataagtgggtgtaatcatggctgaaataacagaccaagcatatgataaaaagataacaaagtaaatcaaattactaactggttatagtgggataggaggcagaaaatggatgactttgtcttttctcaatgtttttatttgtattttataataaaaatgttttaaaattaaaa

SEQ ID NO: 401760 - DNA, 842 bp, Homo sapiens
agcctcggggaagcggaacccacaggcgcgcgcgccgctgcttctggccgggcgcgggtcgtggtgcaccacgggagcgccgcaccggccggcatggaggagcgcggcgattccgagccgacccccggctgcagcggcctgggtccgggcggtgttcgcggctttggcgacggcggtggagctccttcgtgggcccctgaggacgcctggatgggcactcaccctaagtatctagaaatgatggaattagatataggagatgccacccaagtttatgtagcgttcttggtttacctggacctcatggaaagcaaaagctggcatgaagtaaactgtgtaggattaccagaactccagctcatctgccttgttggtactgagatagaaggggaggggttacagactgtggtgcctacccccatcactgcttccctcagccataacaggtgagcaggtgattttggtctaagttcctttcccgagtaaagcagtaggaaacattaaacatagtgatgtaatacttttaatgaaatttgggatacagggttcatagctttactcttggctatttgaggaataagttaaatatgagtgttgtattcggccattcttgcattgctataaagaaatacctgagactgagtaatttcttaaaaaaaaaagaagaggtttaagtggctcatagttctgaaggctttacagtaagcatggtgctggcatctactcggcttctagggaggcctcaggaagcttataatcatggaggaagttcgtgaagcaagagcaggcacatcatatggcaaaagcaggagtgagagagagtgttgagggggaggttccac

SEQ ID NO: 401761 - DNA, 452 bp, Homo sapiens
atcccttctttactatagatcattggtagaaaagcagtgtaagctgtttgatcaaaaatttataaactttctattttaattttaaataaaatttaaattacaaattatttttaaagttttaaaaaatctttgagttagagattaccaagagtaaagaaatttcagcaaagccatgtaggatacaggaaaggcgtggaacattcagtattgtaattctaagtcacagagacagaatttctgatgctaccatactggactttccaacttgcctggaatgtcctctgccatgatcactgccaatcaaaatatgattcatccacaaaatcaccaaatcaagctaggcatggtgacacatgcctataatctcaggtacatggaaggctgaagtgggaggattgcttgagcccaggagttcaagaccagcctgggcaatgtagtgagagtgcatctca

SEQ ID NO: 401762 - DNA, 2301 bp, Homo sapiens
ccgaggctataagagggcgcacaagtggcgcggcgcaggagccgccgccagtggagggccgggcgctgcggccgcggccggggcgggcgcagggccgagcggacgggggggcgcgggccccccgggaggccgcggccactcccccccgggccggcgcggcgggggaggcggaggatggaaacacccttctacggcgatgaggcgctgagcggcctgggcggcggcgccagtggcagcggcggcacgttcgcgtccccgggccgcttgttccccggggcgcccccgacggccgcggccggcagcatgatgaagaaggacgcgctgacgctgagcctgagtgagcaggtggcggcagcgctcaagcctgcggccgcgccgcctcctacccccctgcgcgccgacggcgcccccagcgcggcaccccccgacggcctgctcgcctctcccgacctggggctgctgaagctggcctcccccgagctcgagcgcctcatcatccagtccaacgggctggtcaccaccacgccgacgagctcacagttcctctaccccaaggtggcggccagcgaggagcaggagttcgccgagggcttcgtcaaggccctggaggatttacacaagcagaaccagctcggcgcgggccgcggccgctgccgccgccgccgccgccgccggggggccctcgggcacggccacgggctccgcgccccccggcgagctggccccggcggcggccgcgcccgaagcgcctgtctacgcgaacctgagcagctacgcgggcggcgccgggggcgcggggggcgccgcgacggtcgccttcgctgccgaacctgtgcccttcccgccgccgccacccccaggcgcgttggggccgccgcgcctggctgcgctcaaggacgagccacagacggtgcccgacgtgccgagcttcggcgagagcccgccgttgtcgcccatcgacatggacacgcaggagcgcatcaaggcggagcgcaagcggctgcgcaaccgcatcgccgcctccaagtgccgcaagcgcaagctggagcgcatctcgcgcctggaagagaaagtgaagaccctcaagagtcagaacacggagctggcgtccacggcgagcctgctgcgcgagcaggtggcgcagctcaagcagaaagtcctcagccacgtcaacagcggctgccagctgctgccccagcaccaggtgcccgcgtactgagtccgcgcgcggggcgcatgcgcggccaccctccccaaggggcgggctcgcgggggggtgtcgtgggcgccccggacttggagagggtgcggccctggggaccccccctccccgagtgtgcccaggaactcagagagggcgcggcccccggggattccccccccgagggtgcccaggactcgacaagctggaccccctgctcccgggggggcgagcgcatgacccccccgccctcgcgctgcctctttcccccgcgcggccgccccgtgttgcacaaacccgcgcgtctcggctgcccctttgtacaccgcgccgcaagggggctccgagggggcgcagcctcaaaccctgcctttcctttacttttactttttttttttttctttggaagagagaagaacagagtgttcgattctgccctatttatgtttctactcgggaacaaacgttggttgtgtgtgtgtgtgttttcttgtgttggttttttaaagaaatgggaagaagaaaaaaaaattctccgcccctttcctcgatctcgctccccccttcggttctttcgaccggtcccccctcccttttttgttctgttttgttttgttttgctacgagtccacattcctgtttgtaatccttggttcgcccggttttctgttttcagtaaagtctcgttacgccaaaaaaaaaaaaaaaaaaacacaaaaaaaaaaaacacaaacaaacaaaaaacaaaaaaaaaaaaaaaaaaaacaaaaaaaaaaaaaacaacacaaacaaaaaaaaaaacacagctgcgcaccgcagccgcgccgccccgagactaatacaacaacccagggagggagaggaccacccgacacaacacataaataccaaacaaaaaacataacacacagaagaagaacgacaagagacacccacacaaccacgcggacaaaccactacaaaacacaaacacgccggaagtggcccaactagggtaaggagaaagagaaaagagaggggggagggaagaggagacgactaagggcgcactaccaaaagggggcaaaagagaagaggagcaaaaagaaaaaccccgcgcg

SEQ ID NO: 401763 - DNA, 2080 bp, Homo sapiens
ccgaggctataagagggcgcacaagtggcgcggcgcaggagccgccgccagtggagggccgggcgctgcggccgcggccggggcgggcgcagggccgagcggacgggggggcgcgggccccccgggaggccgcggccactcccccccgggccggcgcggcgggggaggcggaggatggaaacacccttctacggcggcaccccccgacggcctgctcgcctctcccgacctggggctgctgaagctggcctcccccgagctcgagcgcctcatcatccagtccaacgggctggtcaccaccacgccgacgagctcacagttcctctaccccaaggtggcggccagcgaggagcaggagttcgccgagggcttcgtcaaggccctggaggatttacacaagcagaaccagctcggcgcgggccgcggccgctgccgccgccgccgccgccgccggggggccctcgggcacggccacgggctccgcgccccccggcgagctggccccggcggcggccgcgcccgaagcgcctgtctacgcgaacctgagcagctacgcgggcggcgccgggggcgcggggggcgccgcgacggtcgccttcgctgccgaacctgtgcccttcccgccgccgccacccccaggcgcgttggggccgccgcgcctggctgcgctcaaggacgagccacagacggtgcccgacgtgccgagcttcggcgagagcccgccgttgtcgcccatcgacatggacacgcaggagcgcatcaaggcggagcgcaagcggctgcgcaaccgcatcgccgcctccaagtgccgcaagcgcaagctggagcgcatctcgcgcctggaagagaaagtgaagaccctcaagagtcagaacacggagctggcgtccacggcgagcctgctgcgcgagcaggtggcgcagctcaagcagaaagtcctcagccacgtcaacagcggctgccagctgctgccccagcaccaggtgcccgcgtactgagtccgcgcgcggggcgcatgcgcggccaccctccccaaggggcgggctcgcgggggggtgtcgtgggcgccccggacttggagagggtgcggccctggggaccccccctccccgagtgtgcccaggaactcagagagggcgcggcccccggggattccccccccgagggtgcccaggactcgacaagctggaccccctgctcccgggggggcgagcgcatgacccccccgccctcgcgctgcctctttcccccgcgcggccgccccgtgttgcacaaacccgcgcgtctcggctgcccctttgtacaccgcgccgcaagggggctccgagggggcgcagcctcaaaccctgcctttcctttacttttactttttttttttttctttggaagagagaagaacagagtgttcgattctgccctatttatgtttctactcgggaacaaacgttggttgtgtgtgtgtgtgttttcttgtgttggttttttaaagaaatgggaagaagaaaaaaaaattctccgcccctttcctcgatctcgctccccccttcggttctttcgaccggtcccccctcccttttttgttctgttttgttttgttttgctacgagtccacattcctgtttgtaatccttggttcgcccggttttctgttttcagtaaagtctcgttacgccaaaaaaaaaaaaaaaaaaacacaaaaaaaaaaaacacaaacaaacaaaaaacaaaaaaaaaaaaaaaaaaaacaaaaaaaaaaaaaacaacacaaacaaaaaaaaaaacacagctgcgcaccgcagccgcgccgccccgagactaatacaacaacccagggagggagaggaccacccgacacaacacataaataccaaacaaaaaacataacacacagaagaagaacgacaagagacacccacacaaccacgcggacaaaccactacaaaacacaaacacgccggaagtggcccaactagggtaaggagaaagagaaaagagaggggggagggaagaggagacgactaagggcgcactaccaaaagggggcaaaagagaagaggagcaaaaagaaaaaccccgcgcg

SEQ ID NO: 401764 - DNA, 1213 bp, Homo sapiens
  misc_feature (49)..(49): n is a, c, g, or t
  misc_feature (130)..(130): n is a, c, g, or t
ggagcgtaagatgaaagagtgtgagagaccattgggggtctgtaggggnaagggaagtgggggcgtgtgtaaggggcagggtgtgtgaggagaagaggaaccccagcaaagagtagtaataataatggcnaccgtcacacgataatattcgagtaatatgtgcggggactttacaaagcatctcatatgcttcattttaacttctactccaatcctccgaggtgcgtactgttatcaaacccattttacaagacaggaactcagagagggcgcggcccccggggattccccccccgagggtgcccaggactcgacaagctggaccccctgctcccgggggggcgagcgcatgacccccccgccctcgcgctgcctctttcccccgcgcggccgccccgtgttgcacaaacccgcgcgtctcggctgcccctttgtacaccgcgccgcaagggggctccgagggggcgcagcctcaaaccctgcctttcctttacttttactttttttttttttctttggaagagagaagaacagagtgttcgattctgccctatttatgtttctactcgggaacaaacgttggttgtgtgtgtgtgtgttttcttgtgttggttttttaaagaaatgggaagaagaaaaaaaaattctccgcccctttcctcgatctcgctccccccttcggttctttcgaccggtcccccctcccttttttgttctgttttgttttgttttgctacgagtccacattcctgtttgtaatccttggttcgcccggttttctgttttcagtaaagtctcgttacgccaaaaaaaaaaaaaaaaaaacacaaaaaaaaaaaacacaaacaaacaaaaaacaaaaaaaaaaaaaaaaaaaacaaaaaaaaaaaaaacaacacaaacaaaaaaaaaaacacagctgcgcaccgcagccgcgccgccccgagactaatacaacaacccagggagggagaggaccacccgacacaacacataaataccaaacaaaaaacataacacacagaagaagaacgacaagagacacccacacaaccacgcggacaaaccactacaaaacacaaacacgccggaagtggcccaactagggtaaggagaaagagaaaagagaggggggagggaagaggagacgactaagggcgcactaccaaaagggggcaaaagagaagaggagcaaaaagaaaaaccccgcgcg

SEQ ID NO: 401765 - DNA, 2321 bp, Homo sapiens
ccgaggctataagagggcgcacaagtggcgcggcgcaggagccgccgccagtggagggccgggcgctgcggccgcggccggggcgggcgcagggccgagcggacgggggggcgcgggccccccgggaggccgcggccactcccccccgggccggcgcggcgggggaggcggaggatggaaacacccttctacggcgatgaggcgctgagcggcctgggcggcggcgccagtggcagcggcggcacgttcgcgtccccgggccgcttgttccccggggcgcccccgacggccgcggccggcagcatgatgaagaaggacgcgctgacgctgagcctgagtgagcaggtggcggcagcgctcaagcctgcggccgcgccgcctcctacccccctgcgcgccgacggcgcccccagcgcggcaccccccgacggcctgctcgcctctcccgacctggggctgctgaagctggcctcccccgagctcgagcgcctcatcatccagtccaacgggctggtcaccaccacgccgacgagctcacagttcctctaccccaaggtggcggccagcgaggagcaggagttcgccgagggcttcgtcaaggccctggaggatttacacaagcagaaccagctcggcgcgggccgcggccgctgccgccgccgccgccgccgccggggggccctcgggcacggccacgggctccgcgccccccggcgagctggccccggcggcggccgcgcccgaagcgcctgtctacgcgaacctgagcagctacgcgggcggcgccgggggcgcggggggcgccgcgacggtcgccttcgctgccgaacctgtgcccttcccgccgccgccacccccaggcgcgttggggccgccgcgcctggctgcgctcaaggacgagccacagacggtgcccgacgtgccgagcttcggcgagagcccgccgttgtcgcccatcgacatggacacgcaggagcgcatcaaggcggagcgcaagcggctgcgcaaccgcatcgccgcctccaagtgccgcaagcgcaagctggagcgcatctcgcgcctggaagagaaagtgaagaccctcaagagtcagaacacggagctggcgtccacggcgagcctgctgcgcgagcaggtggcgcagctcaagcagaaagtcctcagccacgtcaacagcggctgccagctgctgccccagcaccaggtgcccgcgtactgagtccgcgcgcggggcgcatgcgcggccaccctccccaaggggcgggctcgcgggggggtgtcgtgggcgccccggacttggagagggtgcggccctggggaccccccctccccgagtgtgcccaggaactcagagagggcgcggcccccggggattccccccccgagggtgcggactcggaaggggcgccccccaggactcgacaagctggaccccctgctcccgggggggcgagcgcatgacccccccgccctcgcgctgcctctttcccccgcgcggccgccccgtgttgcacaaacccgcgcgtctcggctgcccctttgtacaccgcgccgcaagggggctccgagggggcgcagcctcaaaccctgcctttcctttacttttactttttttttttttctttggaagagagaagaacagagtgttcgattctgccctatttatgtttctactcgggaacaaacgttggttgtgtgtgtgtgtgttttcttgtgttggttttttaaagaaatgggaagaagaaaaaaaaattctccgcccctttcctcgatctcgctccccccttcggttctttcgaccggtcccccctcccttttttgttctgttttgttttgttttgctacgagtccacattcctgtttgtaatccttggttcgcccggttttctgttttcagtaaagtctcgttacgccaaaaaaaaaaaaaaaaaaacacaaaaaaaaaaaacacaaacaaacaaaaaacaaaaaaaaaaaaaaaaaaaacaaaaaaaaaaaaaacaacacaaacaaaaaaaaaaacacagctgcgcaccgcagccgcgccgccccgagactaatacaacaacccagggagggagaggaccacccgacacaacacataaataccaaacaaaaaacataacacacagaagaagaacgacaagagacacccacacaaccacgcggacaaaccactacaaaacacaaacacgccggaagtggcccaactagggtaaggagaaagagaaaagagaggggggagggaagaggagacgactaagggcgcactaccaaaagggggcaaaagagaagaggagcaaaaagaaaaaccccgcgcg

SEQ ID NO: 401766 - DNA, 2229 bp, Homo sapiens
ccgaggctataagagggcgcacaagtggcgcggcgcaggagccgccgccagtggagggccgggcgctgcggccgcggccggggcgggcgcagggccgagcggacgggggggcgcgggccccccgggaggccgcggccactcccccccgggccggcgcggcgggggaggcggaggatggaaacacccttctacggcgatgaggcgctgagcggcctgggcggcggcgccagtggcagcggcggcacgttcgcgtccccgggccgcttgttccccggggcgcccccgacggccgcggccggcagcatgatgaagaaggacgcgctgacgctgagcctgagtgagcaggtggcggcagcgctcaagcctgcggccgcgccgcctcctacccccctgcgcgccgacggcgcccccagcgcggcaccccccgacggcctgctcgcctctcccgacctggggctgctgaagctggcctcccccgagctcgagcgcctcatcatccagtccaacgggctggtcaccaccacgccgacgagctcacagttcctctaccccaaggtggcggccagcgaggagcaggagttcgccgagggcttcgtcaaggccctggaggatttacacaagcagaaccagctcggcgcgggccgcggccgctgccgccgccgccgccgccgccggggggccctcgggcacggccacgggctccgcgccccccggcgagctggccccggcggcggccgcgcccgaagcgcctgtctacgcgaacctgagcagctacgcgggcggcgccgggggcgcggggggcgccgcgacggtcgccttcgctgccgaacctgtgcccttcccgccgccgccacccccaggcgcgttggggccgccgcgcctggctgcgctcaaggacgagccacagacggtgcccgacgtgccgagcttcggcgagagcccgccgttgtcgcccatcgacatggacacgcaggagcgcatcaaggcggagcgcaagcggctgcgcaaccgcatcgccgcctccaagtgccgcaagcgcaagctggagcgcatctcgcgcctggaagagaaagtgaagaccctcaagagtcagaacacggagctggcgtccacggcgagcctgctgcgcgagcaggtggcgcagctcaagcagaaagtcctcagccacgtcaacagcggctgccagctgctgccccagcaccaggtgcccgcgtactgagtccgcgcgcggggcgcatgcgcggccaccctccccaaggggcgggctcgcgggggggtgtcgtgggcgccccggacttggagagggtgcggccctggggccaggactcgacaagctggaccccctgctcccgggggggcgagcgcatgacccccccgccctcgcgctgcctctttcccccgcgcggccgccccgtgttgcacaaacccgcgcgtctcggctgcccctttgtacaccgcgccgcaagggggctccgagggggcgcagcctcaaaccctgcctttcctttacttttactttttttttttttctttggaagagagaagaacagagtgttcgattctgccctatttatgtttctactcgggaacaaacgttggttgtgtgtgtgtgtgttttcttgtgttggttttttaaagaaatgggaagaagaaaaaaaaattctccgcccctttcctcgatctcgctccccccttcggttctttcgaccggtcccccctcccttttttgttctgttttgttttgttttgctacgagtccacattcctgtttgtaatccttggttcgcccggttttctgttttcagtaaagtctcgttacgccaaaaaaaaaaaaaaaaaaacacaaaaaaaaaaaacacaaacaaacaaaaaacaaaaaaaaaaaaaaaaaaaacaaaaaaaaaaaaaacaacacaaacaaaaaaaaaaacacagctgcgcaccgcagccgcgccgccccgagactaatacaacaacccagggagggagaggaccacccgacacaacacataaataccaaacaaaaaacataacacacagaagaagaacgacaagagacacccacacaaccacgcggacaaaccactacaaaacacaaacacgccggaagtggcccaactagggtaaggagaaagagaaaagagaggggggagggaagaggagacgactaagggcgcactaccaaaagggggcaaaagagaagaggagcaaaaagaaaaaccccgcgcg

SEQ ID NO: 401767 - DNA, 972 bp, Homo sapiens
  misc_feature (660)..(660): n is a, c, g, or t
  misc_feature (836)..(836): n is a, c, g, or t
  misc_feature (877)..(877): n is a, c, g, or t
  misc_feature (902)..(903): n is a, c, g, or t
  misc_feature (926)..(926): n is a, c, g, or t
  misc_feature (941)..(941): n is a, c, g, or t
  misc_feature (952)..(953): n is a, c, g, or t
  misc_feature (965)..(965): n is a, c, g, or t
ccgaggctataagagggcgcacaagtggcgcggcgcaggagccgccgccagtggagggccgggcgctgcggccgcggccggggcgggcgcagggccgagcggacgggggggcgcgggccccccgggaggccgcggccactcccccccgggccggcgcggcgggggaggcggaggatggaaacacccttctacggcgatgaggcgctgagcggcctgggcggcggcgccagtggcagcggcggcacgttcgcgtccccgggccgcttgttccccggggcgcccccgacggccgcggccggcagcatgatgaagaaggacgcgctgacgctgagcctgagtgagcaggtggcggcagcgctcaagcctgcggccgcgccgcctcctacccccctgcgcgccgacggcgcccccagcgcggcaccccccgacggcctgctcgcctctcccgacctggggctgctgaagctggcctcccccgagctcgagcgcctcatcatccagtccaacgggctggtcaccaccacgccgacgagctcacagttcctctaccccaaggtggcggccagcgaggagcaggagttcgccgagggcttcgtcaaggccctggaggatttacacaagcagaaccagctcggcgcgggccgcggccgcaaatcttgnttagtcatatattaaagagccagctgatgctcttacagttaaaaaaactgtgtagccacattactgttttcaacgtcctgtgtggaaagttgctatcactgtacaattttgcttgagcctttattttacaacagggctttacctctaactcagaattgacgtaagaaggctatttnaaaagtacgataaaaatttgcacaaatcagacttaagaatngagtcagtatgtgtacactttctannatagtatgctgataaggaagggncaatagaggctgccnctaaactctcnnttgaggataatngactgga

SEQ ID NO: 401768 - DNA, 409 bp, Homo sapiens
cacgaggctgtccatggagaccgagccactgactttggtgaccatacctttggtgtttgatgtagacaaccaaagacggaaaagagaagccaatgttccgctacaccaggtacagcaattgccctactgccagtcgaatcagcaaatatctgagcacgagtctgtttttcattaggagattgcagtactctgaaatattatggtcagcatgatgtgtttagtgtagacagataaactcctatttaactgatagtccactcaaaattttatttctccctgaaaaacctgatacagtgtgtaattcagtcagtctttaacagttctaaaaacaaagtaaattttcctgtagtcttttcaacatcaccacaaacaatttgacctctaagctttgacaaaggacttctggcta

SEQ ID NO: 401769 - DNA, 437 bp, Homo sapiens
gcccaaatagacattttttcaaagcagatatagagggggccaataagcacatgaaaagatgctctacagcattaaatattaggaaaatgcaactcaaaacaataagatagcattttatatccactaagatggctgtaagaaaaaagtcaaacaaaaacaggtgttggtgaagttacagaaaaatcgaaatcctcacatattggtggtgggaatataaaatgctgtagctgctttggcaaatggttaggccattcttcaaggagttcaagaccagtctgggcaagatggcaagatcctatctctacaaaaaaattttaaaaattagccaggcatggcagcatgtgcctgtaatttcagctgcttggaaggtggaggcaggagaatcagttgagcccagaaactccaggaggcagtgagctgtgattgcaccactgcac

SEQ ID NO: 401770 - DNA, 406 bp, Homo sapiens
  misc_feature (406)..(406): n is a, c, g, or t
attaggaaggctatggttgctataacaccacaggcatggtatgagtggttgaaatctttcatggtgggataaataacagctgcatctatgataatccaccagcctgtaaaaaatagtacaccagcagcaatggaagcaatagtattgcgcttttccccccagtcaatgcattctgagcatctcaagccctctagaaatccagacatttttttcaggtcagtccagccccgtcgtgcagtggttccggagcccggtgtcgcgccgcgccggcccgcctcactcccccgattttagccaagaaaacaaaacggccacagcctccagacacccggatgcagcagtaccatccacccggctcagtcgcgcagtttccctttttttttttattttccagtaggccaacaan

SEQ ID NO: 401771 - DNA, 412 bp, Homo sapiens
ataaatggactagtcaatgaacttgcccattcttcaaggatgcttagaccgccccgtttagaatgcatctgttggttaaggtctaggatcccatttttggctgcctcagatgcctccacttggcttgctatggctcagctccaccatgcccccctacctctcacattcccattgcacactcccgacctttcaagaagcaggaactggccagttcctgcttcttgaaaggtgcaatagtctcaacataatgaactcaaaatctcagtgcattgaagggtttgcatgccaagttgaccaacgtgcctaaactgtattaactccctatttgcacacttagaattggatcatcagatttgtctaacccacttgaaaggcttagctatctgttcactgaacagtcattatgatgtac

SEQ ID NO: 401772 - DNA, 442 bp, Homo sapiens
tatcaactggtgtttgtcccaacaacagtgtggcagagtcttagttgttcttccaaaatctcttttcccctttttcttgtgcacataactgcctggcttaagaatggacttcccaaccaactctatacctaggtttggccatgtgattaaattgtccccaatgaaatgtgagcaaattgaagtaagtaacttcagccttacttaattaaaagaaaaaagttacttgcctgggactcccttttactgtgaagtgaaaagcaggcacactagtgagctggctgagctgcgtagaggaagacaatgccctggggagcagaccaaggaggtggagggaacctgggaccctgatggagctcacagaggggagtggagccaacctgctgacctgaaatgctcccctgaggagttttacataagaaataaacttccattttatttaaac

SEQ ID NO: 401773 - DNA, 305 bp, Homo sapiens
tatgcagaacaaaagcaactaccaatcaaagtctctgaaacaaatgtgaatcaagcatgggtggctggcctggtgtgctctctgcctactgtctggtggtggtggatgtggtggtggcatcagcaggtcagtggctgaggctacacagtgctggtggtctgatggtcgggcgaccctctcccgctggccgtcctgagcaggagcctcgtgctaacaaggaggccgctaatgagctggccggagctgtggacctgggctggatggcaaatgtgaggaggaacccccgggacatggtaaccagcacg

SEQ ID NO: 401774 - DNA, 306 bp, Homo sapiens
gtcatgggcagtcagagagtgatggggaaagtaatgaataaggaagagagaggtgaggtctatcaaaaaggacgttggaatcctacagtttatccacaggataaaaggaagccaacctcaggcaggcttgcagcattcaagaattgaagctctaagaactaaggtgagctcatcagctccgggagaaggcataggtccagtagagtcgcagactaagcaggtggggaagggggcagttgtacatgcccctctaattctcgcatcatctcacacaacccaagctccatttcctcagaaagccttctg

SEQ ID NO: 401775 - DNA, 746 bp, Homo sapiens
gactttcctactgtttactgttaattctgaaactagagattttcatctgtcttttattcttaccactttctcacggaaaatttgcagctctcccctagagacattactgggagtggtaagcattgtgttgaaatagcagttcagcctgttggcctttgacgtctgatttatgaccagcgtttgtgtgaatgtctgtgtgtgtctttgctcagaactgcatagccacccatgaatccaatggcattgacatcatcacagccctgatcctcaatgatatcaatcctttgggaaagaagaggatggaccttgtgttagaactgaaggcaagtaggaattaaaagcagaagacagtcatttggaaacagtcacttttgtgttttgccttggcacatgcacatgggcaattagtcatgagagtaaatattaaagatagttctttaaatgaatgacccaggttgctagtgctgactacgatgcagaactccaacctttctcttccacgtaaggtatctcatgaggggataggagcttctgaactgttaggtcacacagaatgaagattccttgctccaagctaagaagtgaatcccaacagcatcgagtactaaataccttggttctgaaagtcacaaagagagaaacagtggaaacgccattccctctctggtttctgatttttccccatttgagggaaaagggccggttgaagaatagtacaactaagcctatctaggaccaaaaaaaaa

SEQ ID NO: 401776 - DNA, 441 bp, Homo sapiens
gacagaagatgtgtgtgtttgtatacacatatatctacacattcatccatgtatctttctataactacacaaatatataataaaaagcatgtacttacactaatacttccaattccattccaacaccatgggatttattctagccttcaccttttccatttcatgactccctccagctgccacgattccctgtatgtttacccgtctgcccgtttccctgtgtgtacctgtctcacctctgccacccacctccacggtccccagtgtctccttggctccagctgtaagacctgccagtcctgccacctgaagggaagggaaggggaagaaagaaaggaagtgaaccaattaatacttttaaaagaaaaggaaagggaagataaagcaaggcttttattattttttaataaaataaataaaactgcagataaaatgccattt

SEQ ID NO: 401777 - DNA, 6049 bp, Homo sapiens
cgattgagtcttgcattacaaccccttttgggttaatgtcacagcatataatatagaacttctttttcatgatctttgcaataaattatgttggccaaaaagtcatatgtctgcccattttgaacagtgcactagggttgggggtatgggacagtcgttaagcagcatctaaagtaatcaagcatggatatacgggggaaaaacaaaaatccagacctattctccttttgtgtaactcttgtctatatatgaactctcaatgtattttatatgtgactgatgctgcagatggtagtgtctccttagtgttgtattaaaatggaatttctgcatgcctagcaggagcttgaaccaagtccacccctgcggcagctggaagaccataaaaggggtgaggcgctcaggcaagttctggtcaaccgttactatggaaacgtcagaccttcgggacgaagagagagccttaccagctttggcaatggcccactgtcagcaggaggacccggcaagcccgggggaggagggggaggttccggatccagctctatgagcaggggtgagatgagtctggccgaggttcagtgtcaccttgacaaggagggggcttccaatctagttatcgacctcatcatgaacgcatccagtgaccgagtgttccatgaaagcattctcctggccattgcccttctggaaggaggcaacaccaccatccagcactcctttttctgtcgcttgacagaagataagaagtcagagaaattctttaaggtgttttatgaccggatgaaggtggcccagcaagaaatcaaagcaacagtgacagtgaacaccagtgacttgggaaataaaaagaaagacgatgaggtagacagggatgccccatcacggaaaaaagctaaagagcccacaacacagataacagaagaggtccgggatcagctcctggaggcctccgctgccaccaggaaagccttcaccactttcaggagggaggctgatcccgacgaccactaccagcctggagagggcacccaggccactgccgacaaggccaaggacgacctggagatgagcgcggtcatcaccatcatgcagcccatcctccgcttccttcagctcctgtgtgaaaaccacaaccgagacctgcagaacttcctccgttgccaaaataacaagaccaactacaatttggtatgtgagaccctgcagtttctggactgtatttgtggaagcacaactggaggccttggtcttctgggcttgtatataaatgaaaagaacgtagcgcttatcaaccaaaccctggaaagtctgaccgaatactgtcaaggaccttgccatgagaaccagaactgcatagccacccatgaatccaatggcattgacatcatcacagccctgatcctcaatgatatcaatcctttgggaaagaagaggatggaccttgtgttagaactgaagaacaatgcctcgaagttgctcctggccatcatggaaagcaggcacgacagtgaaaacgcagagaggatactttataacatgaggcccaaggaactggtggaagtgatcaagaaagcctacatgcaaggtgaagtggaatttgaggatggagaaaacggtgaggatggggcggcgtcccccaggaacgtggggcacaacatctacatattagcccatcagttggctcggcataacaaagaacttcagagcatgctgaaacctggtggccaagtggacggagatgaagccctggagttttatgccaagcacacggcgcagatagagattgtcagattagaccgaacaatggaacagatagtctttcccgtgcccagcatatgtgaattcctaaccaaggagtcaaaactacgaatttactatactacagagagagacgaacaaggcagcaaaatcaatgatttctttctgcggtctgaagacctcttcaatgaaatgaattggcagaagaaactgagagcccagcccgtgttgtactggtgtgcccgcaacatgtctttctggagcagcatttcgtttaacctggccgtcctgatgaacctgctggtggcgtttttctacccgtttaagggagtccgaggaggaaccctggagccccactggtcgggactcctgtggacagccatgctcatctctctggccatcgtcattgccctccccaagccccatggcatccgggccttaattgcctccacaattctacgactgatattttcagtcgggttacaacccacgttgtttcttctgggcgctttcaatgtatgcaataaaatcatctttctaatgagctttgtgggcaactgtgggacattcacaagaggctaccgagccatggttctggatgttgagttcctctatcatttgttgtatctggtgatctgtgccatggggctctttgtccatgaattcttctacagtctgctgctttttgatttagtgtacagagaagagactttgcttaatgtcattaaaagtgtcactcgcaatggacggtccatcatcctgacagcagttctggctctgatcctcgtttacctgttctcaatagtgggctatcttttcttcaaggatgactttatcttggaagtagataggctgcccaatgaaacagctgttccagaaaccggcgagagtttggcaagcgagttcctgttctccgatgtgtgtagggtggagagtggggagaactgctcctctcctgcacccagagaagagctggtccctgcagaagagacggaacaggataaagagcacacatgtgagacgctgctgatgtgcattgtcaccgtgctgagtcacgggctgcggagcgggggtggagtaggagatgtactcaggaagccgtccaaagaggaacccctgtttgctgctagagttatttatgacctcttgttcttcttcatggtcatcatcattgttcttaacctgatttttggggttatcattgacacttttgctgacctgaggagtgagaagcagaagaaggaagagatcttgaagaccacgtgctttatctgtggcttggaaagagacaagtttgacaacaagactgtcacctttgaagagcacatcaaggaagaacacaacatgtggcactatctgtgcttcatcgtcctggtgaaagtaaaggactccaccgaatatactgggcctgagagttacgtggcagaaatgatcaaggaaagaaaccttgactggttccccaggatgagagccatgtcattggtcagcagtgattctgaaggagaacagaatgagctgagaaacctgcaggagaagctggagtccaccatgaaacttgtcacgaacctttctggccagctgtcggaattaaaggatcagatgacagaacaaaggaagcagaaacaaagaattggtcttctaggacatcctcctcacatgaatgtcaacccacaacaaccagcataagcaaatgaaagaaaggaattgtatttaccttttataattattattagtgtgggtatggctaatgagttctgattcacccacgaaggttacatttatgctgaatacatttgtaaatactcagttttatactgtatgtatatgattgctactctaaaggtttggatatatgtattgtaattagaattgttggcatgatgacatttcatttgtgccaaaaatattaaaaatgccttttttggaaggactaacagaaagcacctgatttgcacttgaaccagattatagatttaaaagtatatgacatgtattttgtatttaaaactagaatagccagtatttatgttttttataaaactgtgcaatacgaattatgcaatcacaatacatttgtagctcccgagtgtcctaaagggagtgcacttctttgaagctggtgtgttaatactatgtaataaatggttaactttcaaatgatgctgctgccaaaattatattaatagtgagtttcaggcccctgggcattttgtaccatgtaattatcctctggtgatgctgtttctcgttagtggcagtagtgcctccgtctcctagtgataatgctccaagtctatgaactgttaaatcagcattcattttaagaaaagcaactttagtttcaaagatacttttaagcttctaaattgatcatttaaactatttctttaaataagagagccaaattagaggctcatactttagcttgtgaagaagataatgaattttttaaagggaactttctatgcaatgttcaggataaatgcatactgctggccaatcagtgtcatctcctgggtaaattttgatgtcgcattataaagacatgcataattgatggtttctagattatctagtccaaacaatagagtttattttttcttcatctgaaccaacatgctacagtagctaagaagtattaaaactatatacatccatataaagatgaaatatgaactatctcattagaagtcatagttgaccacagacatgttattcttctgaaagagccacattttggttttatttcttgtcacatgatttcttttcttgatggatgaaaaatatgaaaggaaacttttatatctgttgcctagttttgtacatggatctcattttacaagagaatctctctgcaaaaaaaaaaaaaacagtttaaaaatgcattgaaagcagagttctgaaatgagtaaagtttgtaaatgcatatataaaaatatttaataaatgatgcagaatatacagtgactggttggtggctttcatttggcatttgtgacttaactgctattccatttatgtactttctttaggatcagtttgaagtacagtcggtttgattaccaggttaattcagaaaatgtttacctgattatttaaaaaaacacttgctgttgttatgacagctctgaggagaattattagaacaaacattggggagtatttagtacaacattcattcattcttctggattagtgactgccagccaggctgtcgggagcgccctactaaatctcctgtctcttctgcttttactgggggatctttaatttgctgtgtgccatgtggaagtatcgggaacagctgaaatttgttttatttatgcccagtggtcagggtccttcagcaaagtgtaaaatgtttttacagaaccactttgcctgtccaaacgtagtaaaacctgttccctcctcaaatcagtgcttgccctggctgctttttttgacactaattttctctatgctttggtaaataataccacccaatgttgtggaactaggtcaagattaaattccagttaaatggctagtttggtaactaatgcttttactttataaatttgataacttaaaaacaaattaattttttccagtcagtgcagcctgtctccacaaaatttttccatcgtaaggcaagcctaagacagatacctacttttatctgtaagcaaaatggcaatctatgctaacccccacaatgcacacattagctagcaaggacttgcttttcccctgggctttctctttgatctctcacactgcccaacgagatgtggcagtgtgtgtggtttgtctcccaagtcccatccagttcattggaaagttctgcattgacatgccaagttgcagcttttacaggtttgtcatgttccatttgaatcctgtcacttaagatataaatcttcattcagtgtgccagcttcagcagaaaataaacgaaattggaatgccactcctccctccatgcagtagatcctacccttgccgtttgggtgtgaacactaaagctagtagaattgaaacatacaatttgaagtgaaaactccgggggcctttgatgtgtaattgtaattctgcctgcttccttcacattgtgcctttccaacacctctattttaagatcaaggtccaagtcaccttcaaagttacctacccggatgaagaattagtgttatcagggtgaaagtatggtagtactcgctaacatgagagaaagccaatgttacttaattaagccattttatttaatattaacagtttgccacagcagagagccactcagcatctg

SEQ ID NO: 401778 - DNA, 9856 bp, Homo sapiens
gttgctgtcggagagagaaagccgcacgccgagaggaggtgtgggtgttccgcttccatcctaacggaacgagctccctcttcgcggacatgggattacccagcggctgctaacccctctcctcgccctgctcccccaaaccggcgtggctccccgggcaccaaggagctgactacagaggagcaggatttgcacccctcgctgggcttgctttggcaacagagtgcctgacccaggtcaggattttcaagaaagacatgtctgacaaaatgtctagcttcctacatattggagacatttgttctctgtacgcggagggatcgacaaatggatttattagcaccttgggcctggttgatgatcgttgtgttgtacagccagaaaccggggaccttaacaatccacctaagaaattcagagactgcctctttaagctatgtcccatgaaccgctactctgcccaaaagcagttctggaaagccgctaagcctggggccaacagcaccacagacgcagtgctactcaacaaactgcaccacgctgcagacttggaaaagaagcagaatgagacagaaaacaggaaattgctggggaccgtaatccagtatggcaatgtgatccagctcctgcatttgaaaagtaataaatacctaacagtgaataagaggcttcctgctctgttggagaagaatgccatgagagtcacattggacgaggctggaaatgaagggtcctggttttatattcagccattctacaagctgcgatccattggagacagcgtggtcataggtgacaaggtggttctgaaccccgtcaatgctggtcagcccctacatgctagcagccatcaactggtagataacccaggctgcaatgaggtcaattccgtcaactgcaatacaagctggaaaatagtccttttcatgaaatggagtgataacaaagacgacatattaaaggggggtgacgtggtgaggctgtttcatgctgagcaggagaagtttctcacctgtgacgaacacaggaagaagcagcacgtcttcctgagaaccacgggccggcagtcggccacatctgccaccagttcaaaagccctgtgggaggtggaggtggtccagcatgacccatgtcggggcggagcagggtattggaacagccttttccgtttcaagcatctggccacggggcattacttggcagcagaggtggaccctgatcaggacgcctctcgaagtaggttgcggaatgcccaagaaaagatggtatactccctggtctctgtgcctgaaggcaatgacatctcctccattttcgagctagatcccaccactctgcgtggaggtgacagccttgtcccaaggaactcttatgttcggctcagacacctatgtactaatacctgggttcacagcacaaatattcctattgacaaggaagaagaaaagcccgtgatgctgaaaattggcacctctcctgtgaaggaggataaggaagcatttgccatagttccggtttctcctgctgaagttcgggacctggactttgccaatgatgccagcaaggtgctgggctccattgctgggaagctagagaagggcaccatcacccagaatgaaaggaggtctgtaaccaagctgctagaagatttggtttacttcgtcactggtggaactaattctggtcaagatgttctcgaagttgtcttctccaagcccaacagagaacggcagaaactgatgagagaacagaatattctcaagcagatcttcaagttgttacaagccccattcacagactgcggtgatggcccaatgcttcggctggaagagctcggggaccagcggcacgctcctttcagacacatctgccggctctgctacagggtgctgagacactcgcagcaagactacaggaagaaccaggagtatatagccaagcagtttggcttcatgcagaagcagattggctatgatgtgttggctgaagacactatcactgccctgctccacaataatcggaaactcctggaaaaacacattaccgcggcagagattgacacatttgtcagcctggtgcgaaagaacagggagcccagattcttagattacctctccgacctctgtgtctccatgaacaaatcaattccagtgacccaggaactgatatgtaaagctgtgctgaaccccaccaacgctgacatcctgattgagaccaaattggttctttctcgttttgaatttgaaggtgtctcttccactggagagaatgctctggaggcaggagaagacgaggaagaggtgtggctgttttggagggacagcaacaaagagattcgcagcaagagtgtgagggaattggctcaggatgctaaagaagggcagaaggaggaccgagacgttctcagctactacagatatcagctgaacctctttgcgaggatgtgtctggaccgccaatacctggccatcaacgaaatctcaggccagctggatgtcgatctcattctccgctgcatgtctgacgagaacctgccctatgacctcagggcgtccttctgccgcctcatgcttcacatgcatgtggaccgagatccccaggaacaagtcacccccgtgaaatatgcccgcctctggtcggagattccctcggagatcgccattgacgactatgatagtagtggagcttccaaagatgaaattaaggagagatttgctcagaccatggagtttgtggaggagtatttaagagatgtggtttgtcagaggttccctttctctgataaagagaagaataagcttacgtttgaggttgtaaatttagctaggaatctcatatactttggtttctacaacttctctgaccttctacgattaactaagatccttctggccatattggactgtgtacatgtgacaacaatcttccccattagcaagatggcgaaaggagaagagaataaaggtaacaatgatgtggagaagctgaagagcagtaacgtgatgagatctattcatggcgtgggagagctgatgacccaggtggtgctccggggaggaggctttttgcccatgactcccatggctgctgcccctgaaggcaatgtgaagcaggcagagcctgagaaggaggacatcatggtcatggacaccaagctgaagatcattgagatactccagtttattttgaatgtgaggttggattataggatctcctgcctcctgtgtatatttaagcgagagtttgatgaaagcaattcccagacttcagaaacatcctccggaaacagcagccaagaagggccaagtaatgtaccaggtgctcttgactttgaacacattgaagaacaagcagaaggcatctttggaggaagtgaggagaacaccccactggacttggatgaccacggcggcagaacctttctccgtgtcctgctccacttgacgatgcatgactacccacccctggtgtcaggggccctgcagctcctcttccggcacttcagccagaggcaggaggtgctccaggccttcaaacaggttcaactgctggttaccagccaagatgtggacaactacaaacagatcaaacaagacttggatcaactgaggtccatcgtggaaaagtcagagctttgggtgtacaaagggcagggccccgatgagactatggatggtgcatctggagaaaatgaacataagaaaacggaggagggaaataacaagccacaaaagcatgaaagcaccagcagctacaactacagagtggtcaaagagattttgattcggcttagcaaactctgtgttcaagagagtgcctcagtgagaaagagcaggaagcagcaacagcgtctgctccggaacatgggcgcgcacgccgtggtgctggagctgctgcagattccctatgagaaggccgaagataccaagatgcaagagataatgaggttggctcatgaatttttgcagaatttctgcgcaggcaaccagcagaatcaagctttgctacataaacacataaacctgtttctcaacccagggatcctggaggcagtaaccatgcagcacatcttcatgaacaatttccagctttgcagtgagatcaacgagagagttgttcagcacttcgttcactgcatagagactcacggtcggaatgtccagtatataaagttcttacagacaattgtcaaggcagaagggaaatttattaaaaaatgccaagacatggttatggccgagctggtcaattcgggagaggatgtcctcgtgttctacaacgacagagcctctttccagactctgatccagatgatgcggtcagaacgggatcggatggatgagaacagccctctcatgtaccacatccacttggtcgagctcctggctgtgtgcacggagggtaagaatgtctacacagagatcaagtgcaactccctgctcccgctggatgacatcgttcgcgtggtgacccacgaggactgcatccctgaggttaaaattgcatacattaacttcctgaatcactgctatgtggatacagaggtggaaatgaaggagatttataccagcaatcacatgtggaaattgtttgagaatttccttgtagacatctgcagggcctgtaacaacactagtgacaggaaacatgcagactcgattttggagaagtatgtcaccgaaatcgtcatgagtattgttactactttcttcagctctcccttctcagaccagagtacgactttgcagactcgccagcctgtctttgtgcaactgctgcaaggcgtgttcagggtttaccactgcaactggttaatgccaagccaaaaagcctccgtggagagctgtattcgggtgctgtctgatgtagccaagagccgggccattgccattcccgtggacctggacagccaagtcaacaacctctttctcaagtcccacagcattgtgcagaaaacagccatgaactggcggctctcagcccgcaatgccgcacgcagggactctgttctggcagcttccagagactaccggaatatcattgagagattgcaggacatcgtctccgcgctggaggaccgtctcaggcccctggtgcaggcagagttatctgtgctcgtggatgttctccacagacccgagctgcttttcccagagaacacagacgccagaaggaaatgtgaaagtggcggtttcatttgcaagttaataaagcatacaaaacagctgctagaagaaaatgaagagaagctctgcattaaggtcctacagaccctgagggaaatgatgaccaaagatagaggctatggagaaaagggtgaggcgctcaggcaagttctggtcaaccgttactatggaaacgtcagaccttcgggacgaagagagagccttaccagctttggcaatggcccactgtcagcaggaggacccggcaagcccgggggaggagggggaggttccggatccagctctatgagcaggggtgagatgagtctggccgaggttcagtgtcaccttgacaaggagggggcttccaatctagttatcgacctcatcatgaacgcatccagtgaccgagtgttccatgaaagcattctcctggccattgcccttctggaaggaggcaacaccaccatccagcactcctttttctgtcgcttgacagaagataagaagtcagagaaattctttaaggtgttttatgaccggatgaaggtggcccagcaagaaatcaaagcaacagtgacagtgaacaccagtgacttgggaaataaaaagaaagacgatgaggtagacagggatgccccatcacggaaaaaagctaaagagcccacaacacagataacagaagaggtccgggatcagctcctggaggcctccgctgccaccaggaaagccttcaccactttcaggagggaggctgatcccgacgaccactaccagcctggagagggcacccaggccactgccgacaaggccaaggacgacctggagatgagcgcggtcatcaccatcatgcagcccatcctccgcttccttcagctcctgtgtgaaaaccacaaccgagacctgcagaacttcctccgttgccaaaataacaagaccaactacaatttggtatgtgagaccctgcagtttctggactgtatttgtggaagcacaactggaggccttggtcttctgggcttgtatataaatgaaaagaacgtagcgcttatcaaccaaaccctggaaagtctgaccgaatactgtcaaggaccttgccatgagaaccagaactgcatagccacccatgaatccaatggcattgacatcatcacagccctgatcctcaatgatatcaatcctttgggaaagaagaggatggaccttgtgttagaactgaagaacaatgcctcgaagttgctcctggccatcatggaaagcaggcacgacagtgaaaacgcagagaggatactttataacatgaggcccaaggaactggtggaagtgatcaagaaagcctacatgcaaggtgaagtggaatttgaggatggagaaaacggtgaggatggggcggcgtcccccaggaacgtggggcacaacatctacatattagcccatcagttggctcggcataacaaagaacttcagagcatgctgaaacctggtggccaagtggacggagatgaagccctggagttttatgccaagcacacggcgcagatagagattgtcagattagaccgaacaatggaacagatagtctttcccgtgcccagcatatgtgaattcctaaccaaggagtcaaaactacgaatttactatactacagagagagacgaacaaggcagcaaaatcaatgatttctttctgcggtctgaagacctcttcaatgaaatgaattggcagaagaaactgagagcccagcccgtgttgtactggtgtgcccgcaacatgtctttctggagcagcatttcgtttaacctggccgtcctgatgaacctgctggtggcgtttttctacccgtttaagggagtccgaggaggaaccctggagccccactggtcgggactcctgtggacagccatgctcatctctctggccatcgtcattgccctccccaagccccatggcatccgggccttaattgcctccacaattctacgactgatattttcagtcgggttacaacccacgttgtttcttctgggcgctttcaatgtatgcaataaaatcatctttctaatgagctttgtgggcaactgtgggacattcacaagaggctaccgagccatggttctggatgttgagttcctctatcatttgttgtatctggtgatctgtgccatggggctctttgtccatgaattcttctacagtctgctgctttttgatttagtgtacagagaagagactttgtactctaaaggtttggatatatgtattgtaattagaattgttggcatgatgacatttcatttgtgccaaaaatattaaaaatgccttttttggaaggactaacagaaagcacctgatttgcacttgaaccagattatagatttaaaagtatatgacatgtattttgtatttaaaactagaatagccagtatttatgttttttataaaactgtgcaatacgaattatgcaatcacaatacatttgtagctcccgagtgtcctaaagggagtgcacttctttgaagctggtgtgttaatactatgtaataaatggttaactttcaaatgatgctgctgccaaaattatattaatagtgagtttcaggcccctgggcattttgtaccatgtaattatcctctggtgatgctgtttctcgttagtggcagtagtgcctccgtctcctagtgataatgctccaagtctatgaactgttaaatcagcattcattttaagaaaagcaactttagtttcaaagatacttttaagcttctaaattgatcatttaaactatttctttaaataagagagccaaattagaggctcatactttagcttgtgaagaagataatgaattttttaaagggaactttctatgcaatgttcaggataaatgcatactgctggccaatcagtgtcatctcctgggtaaattttgatgtcgcattataaagacatgcataattgatggtttctagattatctagtccaaacaatagagtttattttttcttcatctgaaccaacatgctacagtagctaagaagtattaaaactatatacatccatataaagatgaaatatgaactatctcattagaagtcatagttgaccacagacatgttattcttctgaaagagccacattttggttttatttcttgtcacatgatttcttttcttgatggatgaaaaatatgaaaggaaacttttatatctgttgcctagttttgtacatggatctcattttacaagagaatctctctgcaaaaaaaaaaaaaacagtttaaaaatgcattgaaagcagagttctgaaatgagtaaagtttgtaaatgcatatataaaaatatttaataaatgatgcagaatatacagtgactggttggtggctttcatttggcatttgtgacttaactgctattccatttatgtactttctttaggatcagtttgaagtacagtcggtttgattaccaggttaattcagaaaatgtttacctgattatttaaaaaaacacttgctgttgttatgacagctctgaggagaattattagaacaaacattggggagtatttagtacaacattcattcattcttctggattagtgactgccagccaggctgtcgggagcgccctactaaatctcctgtctcttctgcttttactgggggatctttaatttgctgtgtgccatgtggaagtatcgggaacagctgaaatttgttttatttatgcccagtggtcagggtccttcagcaaagtgtaaaatgtttttacagaaccactttgcctgtccaaacgtagtaaaacctgttccctcctcaaatcagtgcttgccctggctgctttttttgacactaattttctctatgctttggtaaataataccacccaatgttgtggaactaggtcaagattaaattccagttaaatggctagtttggtaactaatgcttttactttataaatttgataacttaaaaacaaattaattttttccagtcagtgcagcctgtctccacaaaatttttccatcgtaaggcaagcctaagacagatacctacttttatctgtaagcaaaatggcaatctatgctaacccccacaatgcacacattagctagcaaggacttgcttttcccctgggctttctctttgatctctcacactgcccaacgagatgtggcagtgtgtgtggtttgtctcccaagtcccatccagttcattggaaagttctgcattgacatgccaagttgcagcttttacaggtttgtcatgttccatttgaatcctgtcacttaagatataaatcttcattcagtgtgccagcttcagcagaaaataaacgaaattggaatgccactcctccctccatgcagtagatcctacccttgccgtttgggtgtgaacactaaagctagtagaattgaaacatacaatttgaagtgaaaactccgggggcctttgatgtgtaattgtaattctgcctgcttccttcacattgtgcctttccaacacctctattttaagatcaaggtccaagtcaccttcaaagttacctacccggatgaagaattagtgttatcagggtgaaagtatggtagtactcgctaacatgagagaaagccaatgttacttaattaagccattttatttaatattaacagtttgccacagcagagagccactcagcatctg

SEQ ID NO: 401779 - DNA, 6809 bp, Homo sapiens
gttgctgtcggagagagaaagccgcacgccgagaggaggtgtgggtgttccgcttccatcctaacggaacgagctccctcttcgcggacatgggattacccagcggctgctaacccctctcctcgccctgctcccccaaaccggcgtggctccccgggcaccaaggagctgactacagaggagcaggatttgcacccctcgctgggcttgctttggcaacagagtgcctgacccaggtcaggattttcaagaaagacatgtctgacaaaatgtctagcttcctacatattggagacatttgttctctgtacgcggagggatcgacaaatggatttattagcaccttgggcctggttgatgatcgttgtgttgtacagccagaaaccggggaccttaacaatccacctaagaaattcagagactgcctctttaagctatgtcccatgaaccgctactctgcccaaaagcagttctggaaagccgctaagcctggggccaacagcaccacagacgcagtgctactcaacaaactgcaccacgctgcagacttggaaaagaagcagaatgagacagaaaacaggaaattgctggggaccgtaatccagtatggcaatgtgatccagctcctgcatttgaaaagtaataaatacctaacagtgaataagaggcttcctgctctgttggagaagaatgccatgagagtcacattggacgaggctggaaatgaagggtcctggttttatattcagccattctacaagctgcgatccattggagacagcgtggtcataggtgacaaggtggttctgaaccccgtcaatgctggtcagcccctacatgctagcagccatcaactggtagataacccaggctgcaatgaggtcaattccgtcaactgcaatacaagctggaaaatagtccttttcatgaaatggagtgataacaaagacgacatattaaaggggggtgacgtggtgaggctgtttcatgctgagcaggagaagtttctcacctgtgacgaacacaggaagaagcagcacgtcttcctgagaaccacgggccggcagtcggccacatctgccaccagttcaaaagccctgtgggaggtggaggtggtccagcatgacccatgtcggggcggagcagggtattggaacagccttttccgtttcaagcatctggccacggggcattacttggcagcagaggtggaccctgatcaggacgcctctcgaagtaggttgcggaatgcccaagaaaagatggtatactccctggtctctgtgcctgaaggcaatgacatctcctccattttcgagctagatcccaccactctgcgtggaggtgacagccttgtcccaaggaactcttatgttcggctcagacacctatgtactaatacctgggttcacagcacaaatattcctattgacaaggaagaagaaaagcccgtgatgctgaaaattggcacctctcctgtgaaggaggataaggaagcatttgccatagttccggtttctcctgctgaagttcgggacctggactttgccaatgatgccagcaaggtgctgggctccattgctgggaagctagagaagggcaccatcacccagaatgaaaggaggtctgtaaccaagctgctagaagatttggtttacttcgtcactggtggaactaattctggtcaagatgttctcgaagttgtcttctccaagcccaacagagaacggcagaaactgatgagagaacagaatattctcaagcagatcttcaagttgttacaagccccattcacagactgcggtgatggcccaatgcttcggctggaagagctcggggaccagcggcacgctcctttcagacacatctgccggctctgctacagggtgctgagacactcgcagcaagactacaggaagaaccaggagtatatagccaagcagtttggcttcatgcagaagcagattggctatgatgtgttggctgaagacactatcactgccctgctccacaataatcggaaactcctggaaaaacacattaccgcggcagagattgacacatttgtcagcctggtgcgaaagaacagggagcccagattcttagattacctctccgacctctgtgtctccatgaacaaatcaattccagtgacccaggaactgatatgtaaagctgtgctgaaccccaccaacgctgacatcctgattgagaccaaattggttctttctcgttttgaatttgaaggtgtctcttccactggagagaatgctctggaggcaggagaagacgaggaagaggtgtggctgttttggagggacagcaacaaagagattcgcagcaagagtgtgagggaattggctcaggatgctaaagaagggcagaaggaggaccgagacgttctcagctactacagatatcagctgaacctctttgcgaggatgtgtctggaccgccaatacctggccatcaacgaaatctcaggccagctggatgtcgatctcattctccgctgcatgtctgacgagaacctgccctatgacctcagggcgtccttctgccgcctcatgcttcacatgcatgtggaccgagatccccaggaacaagtcacccccgtgaaatatgcccgcctctggtcggagattccctcggagatcgccattgacgactatgatagtagtggagcttccaaagatgaaattaaggagagatttgctcagaccatggagtttgtggaggagtatttaagagatgtggtttgtcagaggttccctttctctgataaagagaagaataagcttacgtttgaggttgtaaatttagctaggaatctcatatactttggtttctacaacttctctgaccttctacgattaactaagatccttctggccatattggactgtgtacatgtgacaacaatcttccccattagcaagatggcgaaaggagaagagaataaaggtaacaatgatgtggagaagctgaagagcagtaacgtgatgagatctattcatggcgtgggagagctgatgacccaggtggtgctccggggaggaggctttttgcccatgactcccatggctgctgcccctgaaggcaatgtgaagcaggcagagcctgagaaggaggacatcatggtcatggacaccaagctgaagatcattgagatactccagtttattttgaatgtgaggttggattataggatctcctgcctcctgtgtatatttaagcgagagtttgatgaaagcaattcccagacttcagaaacatcctccggaaacagcagccaagaagggccaagtaatgtaccaggtgctcttgactttgaacacattgaagaacaagcagaaggcatctttggaggaagtgaggagaacaccccactggacttggatgaccacggcggcagaacctttctccgtgtcctgctccacttgacgatgcatgactacccacccctggtgtcaggggccctgcagctcctcttccggcacttcagccagaggcaggaggtgctccaggccttcaaacaggttcaactgctggttaccagccaagatgtggacaactacaaacagatcaaacaagacttggatcaactgaggtccatcgtggaaaagtcagagctttgggtgtacaaagggcagggccccgatgagactatggatggtgcatctggagaaaatgaacataagaaaacggaggagggaaataacaagccacaaaagcatgaaagcaccagcagctacaactacagagtggtcaaagagattttgattcggcttagcaaactctgtgttcaagagagtgcctcagtgagaaagagcaggaagcagcaacagcgtctgctccggaacatgggcgcgcacgccgtggtgctggagctgctgcagattccctatgagaaggccgaagataccaagatgcaagagataatgaggttggctcatgaatttttgcagaatttctgcgcaggcaaccagcagaatcaagctttgctacataaacacataaacctgtttctcaacccagggatcctggaggcagtaaccatgcagcacatcttcatgaacaatttccagctttgcagtgagatcaacgagagagttgttcagcacttcgttcactgcatagagactcacggtcggaatgtccagtatataaagttcttacagacaattgtcaaggcagaagggaaatttattaaaaaatgccaagacatggttatggccgagctggtcaattcgggagaggatgtcctcgtgttctacaacgacagagcctctttccagactctgatccagatgatgcggtcagaacgggatcggatggatgagaacagccctctcatgtaccacatccacttggtcgagctcctggctgtgtgcacggagggtaagaatgtctacacagagatcaagtgcaactccctgctcccgctggatgacatcgttcgcgtggtgacccacgaggactgcatccctgaggttaaaattgcatacattaacttcctgaatcactgctatgtggatacagaggtggaaatgaaggagatttataccagcaatcacatgtggaaattgtttgagaatttccttgtagacatctgcagggcctgtaacaacactagtgacaggaaacatgcagactcgattttggagaagtatgtcaccgaaatcgtcatgagtattgttactactttcttcagctctcccttctcagaccagagtacgactttgcagactcgccagcctgtctttgtgcaactgctgcaaggcgtgttcagggtttaccactgcaactggttaatgccaagccaaaaagcctccgtggagagctgtattcgggtgctgtctgatgtagccaagagccgggccattgccattcccgtggacctggacagccaagtcaacaacctctttctcaagtcccacagcattgtgcagaaaacagccatgaactggcggctctcagcccgcaatgccgcacgcagggactctgttctggcagcttccagagactaccggaatatcattgagagattgcaggacatcgtctccgcgctggaggaccgtctcaggcccctggtgcaggcagagttatctgtgctcgtggatgttctccacagacccgagctgcttttcccagagaacacagacgccagaaggaaatgtgaaagtggcggtttcatttgcaagttaataaagcatacaaaacagctgctagaagaaaatgaagagaagctctgcattaaggtcctacagaccctgagggaaatgatgaccaaagatagaggctatggagaaaagggtgaggcgctcaggcaagttctggtcaaccgttactatggaaacgtcagaccttcgggacgaagagagagccttaccagctttggcaatggcccactgtcagcaggaggacccggcaagcccgggggaggagggggaggttccggatccagctctatgagcaggggtgagatgagtctggccgaggttcagtgtcaccttgacaaggagggggcttccaatctagttatcgacctcatcatgaacgcatccagtgaccgagtgttccatgaaagcattctcctggccattgcccttctggaaggaggcaacaccaccatccagcactcctttttctgtcgcttgacagaagataagaagtcagagaaattctttaaggtgttttatgaccggatgaaggtggcccagcaagaaatcaaagcaacagtgacagtgaacaccagtgacttgggaaataaaaagaaagacgatgaggtagacagggatgccccatcacggaaaaaagctaaagagcccacaacacagataacagaagaggtccgggatcagctcctggaggcctccgctgccaccaggaaagccttcaccactttcaggagggaggctgatcccgacgaccactaccagcctggagagggcacccaggccactgccgacaaggccaaggacgacctggagatgagcgcggtcatcaccatcatgcagcccatcctccgcttccttcagctcctgtgtgaaaaccacaaccgagacctgcagaacttcctccgttgccaaaataacaagaccaactacaatttggtatgtgagaccctgcagtttctggactgtatttgtggaagcacaactggaggccttggtcttctgggcttgtatataaatgaaaagaacgtagcgcttatcaaccaaaccctggaaagtctgaccgaatactgtcaaggaccttgccatgagaaccagaactgcatagccacccatgaatccaatggcattgacatcatcacagccctgatcctcaatgatatcaatcctttgggaaagaagaggatggaccttgtgttagaactgaaggcaagtaggaattaaaagcagaagacagtcatttggaaacagtcacttttgtgttttgccttggcacatgcacatgggcaattagtcatgagagtaaatattaaagatagttctttaaatgaatgacccaggttgctagtgctgactacgatgcagaactccaacctttctcttccacgtaaggtatctcatgaggggataggagcttctgaactgttaggtcacacagaatgaagattccttgctccaagctaagaagtgaatcccaacagcatcgagtactaaataccttggttctgaaagtcacaaagagagaaacagtggaaacgccattccctctctggtttctgatttttccccatttgagggaaaagggccggttgaagaatagtacaactaagcctatctaggaccaaaaaaaaa

SEQ ID NO: 401780 - DNA, 6714 bp, Homo sapiens
gttgctgtcggagagagaaagccgcacgccgagaggaggtgtgggtgttccgcttccatcctaacggaacgagctccctcttcgcggacatgggattacccagcggctgctaacccctctcctcgccctgctcccccaaaccggcgtggctccccgggcaccaaggagctgactacagaggagcaggatttgcacccctcgctgggcttgctttggcaacagagtgcctgacccaggtcaggattttcaagaaagacatgtctgacaaaatgtctagcttcctacatattggagacatttgttctctgtacgcggagggatcgacaaatggatttattagcaccttgggcctggttgatgatcgttgtgttgtacagccagaaaccggggaccttaacaatccacctaagaaattcagagactgcctctttaagctatgtcccatgaaccgctactctgcccaaaagcagttctggaaagccgctaagcctggggccaacagcaccacagacgcagtgctactcaacaaactgcaccacgctgcagacttggaaaagaagcagaatgagacagaaaacaggaaattgctggggaccgtaatccagtatggcaatgtgatccagctcctgcatttgaaaagtaataaatacctaacagtgaataagaggcttcctgctctgttggagaagaatgccatgagagtcacattggacgaggctggaaatgaagggtcctggttttatattcagccattctacaagctgcgatccattggagacagcgtggtcataggtgacaaggtggttctgaaccccgtcaatgctggtcagcccctacatgctagcagccatcaactggtagataacccaggctgcaatgaggtcaattccgtcaactgcaatacaagctggaaaatagtccttttcatgaaatggagtgataacaaagacgacatattaaaggggggtgacgtggtgaggctgtttcatgctgagcaggagaagtttctcacctgtgacgaacacaggaagaagcagcacgtcttcctgagaaccacgggccggcagtcggccacatctgccaccagttcaaaagccctgtgggaggtggaggtggtccagcatgacccatgtcggggcggagcagggtattggaacagccttttccgtttcaagcatctggccacggggcattacttggcagcagaggtggaccctgatcaggacgcctctcgaagtaggttgcggaatgcccaagaaaagatggtatactccctggtctctgtgcctgaaggcaatgacatctcctccattttcgagctagatcccaccactctgcgtggaggtgacagccttgtcccaaggaactcttatgttcggctcagacacctatgtactaatacctgggttcacagcacaaatattcctattgacaaggaagaagaaaagcccgtgatgctgaaaattggcacctctcctgtgaaggaggataaggaagcatttgccatagttccggtttctcctgctgaagttcgggacctggactttgccaatgatgccagcaaggtgctgggctccattgctgggaagctagagaagggcaccatcacccagaatgaaaggaggtctgtaaccaagctgctagaagatttggtttacttcgtcactggtggaactaattctggtcaagatgttctcgaagttgtcttctccaagcccaacagagaacggcagaaactgatgagagaacagaatattctcaagcagatcttcaagttgttacaagccccattcacagactgcggtgatggcccaatgcttcggctggaagagctcggggaccagcggcacgctcctttcagacacatctgccggctctgctacagggtgctgagacactcgcagcaagactacaggaagaaccaggagtatatagccaagcagtttggcttcatgcagaagcagattggctatgatgtgttggctgaagacactatcactgccctgctccacaataatcggaaactcctggaaaaacacattaccgcggcagagattgacacatttgtcagcctggtgcgaaagaacagggagcccagattcttagattacctctccgacctctgtgtctccatgaacaaatcaattccagtgacccaggaactgatatgtaaagctgtgctgaaccccaccaacgctgacatcctgattgagaccaaattggttctttctcgttttgaatttgaaggtgtctcttccactggagagaatgctctggaggcaggagaagacgaggaagaggtgtggctgttttggagggacagcaacaaagagattcgcagcaagagtgtgagggaattggctcaggatgctaaagaagggcagaaggaggaccgagacgttctcagctactacagatatcagctgaacctctttgcgaggatgtgtctggaccgccaatacctggccatcaacgaaatctcaggccagctggatgtcgatctcattctccgctgcatgtctgacgagaacctgccctatgacctcagggcgtccttctgccgcctcatgcttcacatgcatgtggaccgagatccccaggaacaagtcacccccgtgaaatatgcccgcctctggtcggagattccctcggagatcgccattgacgactatgatagtagtggagcttccaaagatgaaattaaggagagatttgctcagaccatggagtttgtggaggagtatttaagagatgtggtttgtcagaggttccctttctctgataaagagaagaataagcttacgtttgaggttgtaaatttagctaggaatctcatatactttggtttctacaacttctctgaccttctacgattaactaagatccttctggccatattggactgtgtacatgtgacaacaatcttccccattagcaagatggcgaaaggagaagagaataaaggtaacaatgatgtggagaagctgaagagcagtaacgtgatgagatctattcatggcgtgggagagctgatgacccaggtggtgctccggggaggaggctttttgcccatgactcccatggctgctgcccctgaaggcaatgtgaagcaggcagagcctgagaaggaggacatcatggtcatggacaccaagctgaagatcattgagatactccagtttattttgaatgtgaggttggattataggatctcctgcctcctgtgtatatttaagcgagagtttgatgaaagcaattcccagacttcagaaacatcctccggaaacagcagccaagaagggccaagtaatgtaccaggtgctcttgactttgaacacattgaagaacaagcagaaggcatctttggaggaagtgaggagaacaccccactggacttggatgaccacggcggcagaacctttctccgtgtcctgctccacttgacgatgcatgactacccacccctggtgtcaggggccctgcagctcctcttccggcacttcagccagaggcaggaggtgctccaggccttcaaacaggttcaactgctggttaccagccaagatgtggacaactacaaacagatcaaacaagacttggatcaactgaggtccatcgtggaaaagtcagagctttgggtgtacaaagggcagggccccgatgagactatggatggtgcatctggagaaaatgaacataagaaaacggaggagggaaataacaagccacaaaagcatgaaagcaccagcagctacaactacagagtggtcaaagagattttgattcggcttagcaaactctgtgttcaagagagtgcctcagtgagaaagagcaggaagcagcaacagcgtctgctccggaacatgggcgcgcacgccgtggtgctggagctgctgcagattccctatgagaaggccgaagataccaagatgcaagagataatgaggttggctcatgaatttttgcagaatttctgcgcaggcaaccagcagaatcaagctttgctacataaacacataaacctgtttctcaacccagggatcctggaggcagtaaccatgcagcacatcttcatgaacaatttccagctttgcagtgagatcaacgagagagttgttcagcacttcgttcactgcatagagactcacggtcggaatgtccagtatataaagttcttacagacaattgtcaaggcagaagggaaatttattaaaaaatgccaagacatggttatggccgagctggtcaattcgggagaggatgtcctcgtgttctacaacgacagagcctctttccagactctgatccagatgatgcggtcagaacgggatcggatggatgagaacagccctctcatgtaccacatccacttggtcgagctcctggctgtgtgcacggagggtaagaatgtctacacagagatcaagtgcaactccctgctcccgctggatgacatcgttcgcgtggtgacccacgaggactgcatccctgaggttaaaattgcatacattaacttcctgaatcactgctatgtggatacagaggtggaaatgaaggagatttataccagcaatcacatgtggaaattgtttgagaatttccttgtagacatctgcagggcctgtaacaacactagtgacaggaaacatgcagactcgattttggagaagtatgtcaccgaaatcgtcatgagtattgttactactttcttcagctctcccttctcagaccagagtacgactttgcagactcgccagcctgtctttgtgcaactgctgcaaggcgtgttcagggtttaccactgcaactggttaatgccaagccaaaaagcctccgtggagagctgtattcgggtgctgtctgatgtagccaagagccgggccattgccattcccgtggacctggacagccaagtcaacaacctctttctcaagtcccacagcattgtgcagaaaacagccatgaactggcggctctcagcccgcaatgccgcacgcagggactctgttctggcagcttccagagactaccggaatatcattgagagattgcaggacatcgtctccgcgctggaggaccgtctcaggcccctggtgcaggcagagttatctgtgctcgtggatgttctccacagacccgagctgcttttcccagagaacacagacgccagaaggaaatgtgaaagtggcggtttcatttgcaagttaataaagcatacaaaacagctgctagaagaaaatgaagagaagctctgcattaaggtcctacagaccctgagggaaatgatgaccaaagatagaggctatggagaaaagggtgaggcgctcaggcaagttctggtcaaccgttactatggaaacgtcagaccttcgggacgaagagagagccttaccagctttggcaatggcccactgtcagcaggaggacccggcaagcccgggggaggagggggaggttccggatccagctctatgagcaggggtgagatgagtctggccgaggttcagtgtcaccttgacaaggagggggcttccaatctagttatcgacctcatcatgaacgcatccagtgaccgagtgttccatgaaagcattctcctggccattgcccttctggaaggaggcaacaccaccatccagcactcctttttctgtcgcttgacagaagataagaagtcagagaaattctttaaggtgttttatgaccggatgaaggtggcccagcaagaaatcaaagcaacagtgacagtgaacaccagtgacttgggaaataaaaagaaagacgatgaggtagacagggatgccccatcacggaaaaaagctaaagagcccacaacacagataacagaagaggtccgggatcagctcctggaggcctccgctgccaccaggaaagccttcaccactttcaggagggaggctgatcccgacgaccactaccagcctggagagggcacccaggccactgccgacaaggccaaggacgacctggagatgagcgcggtcatcaccatcatgcagcccatcctccgcttccttcagctcctgtgtgaaaaccacaaccgagacctgcagaacttcctccgttgccaaaataacaagaccaactacaatttggtatgtgagaccctgcagtttctggactgtatttgtggaagcacaactggaggccttggtcttctgggcttgtatataaatgaaaagaacgtagcgcttatcaaccaaaccctggaaagtctgaccgaatactgtcaaggaccttgccatgagaaccagaactgcatagccacccatgaatccaatggcattgacatcatcacagccctgatcctcaatgatatcaatcctttgggaaagaagaggatggaccttgtgttagaactgaaggcaagtaggaattaaaagcagaagacagtcatttggaaacagtcacttttgtgttttgccttggcacatgcacatgggcaattagtcatgagagtaaatattaaagatagttctttaaatgaatgacccaggttgctagtgctgactacgatgcagaactccaacctttctcttccacgtaaggtatctcatgaggggataggagcttctgaactgttaggtcacacagaatgaagattccttgctccaagctaagaagtgaatcccaacagaaccaaggtatttagtactcgatgctgttgggattcacttcttagcttggagcaag

SEQ ID NO: 401781 - DNA, 2681 bp, Homo sapiens
gttgctgtcggagagagaaagccgcacgccgagaggaggtgtgggtgttccgcttccatcctaacggaacgagctccctcttcgcggacatgggattacccagcggctgctaacccctctcctcgccctgctcccccaaaccggcgtggctccccgggcaccaaggagctgactacagaggagcaggatttgcacccctcgctgggcttgctttggcaacagagtgcctgacccaggtcaggattttcaagaaagacatgtctgacaaaatgtctagcttcctacatattggagacatttgttctctgtacgcggagggatcgacaaatggatttattagcaccttgggcctggttgatgatcgttgtgttgtacagccagaaaccggggaccttaacaatccacctaagaaattcagagactgcctctttaagctatgtcccatgaaccgctactctgcccaaaagcagttctggaaagccgctaagcctggggccaacagcaccacagacgcagtgctactcaacaaactgcaccacgctgcagacttggaaaagaagcagaatgagacagaaaacaggaaattgctggggaccgtaatccagtatggcaatgtgatccagctcctgcatttgaaaagtaataaatacctaacagtgaataagaggcttcctgctctgttggagaagaatgccatgagagtcacattggacgaggctggaaatgaagggtcctggttttatattcagccattctacaagctgcgatccattggagacagcgtggtcataggtgacaaggtggttctgaaccccgtcaatgctggtcagcccctacatgctagcagccatcaactggtagataacccaggctgcaatgaggtcaattccgtcaactgcaatacaagctggaaaatagtccttttcatgaaatggagtgataacaaagacgacatattaaaggggggtgacgtggtgaggctgtttcatgctgagcaggagaagtttctcacctgtgacgaacacaggaagaagcagcacgtcttcctgagaaccacgggccggcagtcggccacatctgccaccagttcaaaagccctgtgggaggtggaggtggtccagcatgacccatgtcggggcggagcagggtattggaacagccttttccgtttcaagcatctggccacggggcattacttggcagcagaggtggaccctgatcaggacgcctctcgaagtaggttgcggaatgcccaagaaaagatggtatactccctggtctctgtgcctgaaggcaatgacatctcctccattttcgagctagatcccaccactctgcgtggaggtgacagccttgtcccaaggaactcttatgttcggctcagacacctatgtactaatacctgggttcacagcacaaatattcctattgacaaggaagaagaaaagcccgtgatgctgaaaattggcacctctcctgtgaaggaggataaggaagcatttgccatagttccggtttctcctgctgaagttcgggacctggactttgccaatgatgccagcaaggtgctgggctccattgctgggaagctagagaagggcaccatcacccagaatgaaaggaggtctgtaaccaagctgctagaagatttggtttacttcgtcactggtggaactaattctggtcaagatgttctcgaagttgtcttctccaagcccaacagagaacggcagaaactgatgagagaacagaatattctcaagcagatcttcaagttgttacaagccccattcacagactgcggtgatggcccaatgcttcggctggaagagctcggggaccagcggcacgctcctttcagacacatctgccggctctgctacagggtgctgagacactcgcagcaagactacaggaagaaccaggagtatatagccaagcagtttggcttcatgcagaagcagattggctatgatgtgttggctgaagacactatcactgccctgctccacaataatcggaaactcctggaaaaacacattaccgcggcagagattgacacatttgtcagcctggtgcgaaagaacagggagcccagattcttagattacctctccgacctctgtgtctccatgaacaaatcaattccagtgacccaggaactgatatgtaaagctgtgctgaaccccaccaacgctgacatcctgattgagaccaaattggttctttctcgttttgaatttgaaggtgtctcttccactggagagaatgctctggaggcaggagaagacgaggaagaggtgtggctgttttggagggacagcaacaaagagattcgcagcaagagtgtgagggaattggctcaggatgctaaagaagggcagaaggaggaccgagacgttctcagctactacagctgccacgattccctgtatgtttacccgtctgcccgtttccctgtgtgtacctgtctcacctctgccacccacctccacggtccccagtgtctccttggctccagctgtaagacctgccagtcctgccacctgaagggaagggaaggggaagaaagaaaggaagtgaaccaattaatacttttaaaagaaaaggaaagggaagataaagcaaggcttttattattttttaataaaataaataaaactgcagataaaatgccattt

SEQ ID NO: 401782 - DNA, 475 bp, Homo sapiens
aaaatccagacctattctccttttgtgtaactcttgtctatatatgaactctcaatgtattttatatgtgactgatgctgcagatggtagtgtctccttagtgttgtattaaaatggaatttctgcatgcctagcaggagcttgaaccaagtccacccctgcggcagctggaagaccataaaagggtacgtagtcttgagtcttgggtatcgggagctaatgatcaatgaccgtaacacctccatcagccacacactgtgattgagagacagcttttgttgttgatattgttaaagcattaattgactcaagagcaatcacagccatgtatataaatgaaactaaatagtggttctgcccattgtctacctgatcagagcactgtaaccagctggcctccaaataatgaccaagtaaacttttcatgtccttttttcttttctgtggtggctttctatttaggtgaaatataaaa

SEQ ID NO: 401783 - DNA, 300 bp, Homo sapiens
cagaggtaaatctatggttcagtatgcgatttgacgtacaggaagtatctgggtctaatgatgaaactttttaactttccagatgacagaacaaaggaagcagaaacaaagaattggtcttctaggacatcctcctcacatgaatgtcaacccacaacaaccagcataagcaaatgaaagaaaggaattgtatttaccttttataattattattagtgtgggtatggctaatgagttctgattcacccacgaaggttacatttatgctgaatacatttgtaaatactcagttttatactg

SEQ ID NO: 401784 - DNA, 10947 bp, Homo sapiens
gttgctgtcggagagagaaagccgcacgccgagaggaggtgtgggtgttccgcttccatcctaacggaacgagctccctcttcgcggacatgggattacccagcggctgctaacccctctcctcgccctgctcccccaaaccggcgtggctccccgggcaccaaggagctgactacagaggagcaggatttgcacccctcgctgggcttgctttggcaacagagtgcctgacccaggtcaggattttcaagaaagacatgtctgacaaaatgtctagcttcctacatattggagacatttgttctctgtacgcggagggatcgacaaatggatttattagcaccttgggcctggttgatgatcgttgtgttgtacagccagaaaccggggaccttaacaatccacctaagaaattcagagactgcctctttaagctatgtcccatgaaccgctactctgcccaaaagcagttctggaaagccgctaagcctggggccaacagcaccacagacgcagtgctactcaacaaactgcaccacgctgcagacttggaaaagaagcagaatgagacagaaaacaggaaattgctggggaccgtaatccagtatggcaatgtgatccagctcctgcatttgaaaagtaataaatacctaacagtgaataagaggcttcctgctctgttggagaagaatgccatgagagtcacattggacgaggctggaaatgaagggtcctggttttatattcagccattctacaagctgcgatccattggagacagcgtggtcataggtgacaaggtggttctgaaccccgtcaatgctggtcagcccctacatgctagcagccatcaactggtagataacccaggctgcaatgaggtcaattccgtcaactgcaatacaagctggaaaatagtccttttcatgaaatggagtgataacaaagacgacatattaaaggggggtgacgtggtgaggctgtttcatgctgagcaggagaagtttctcacctgtgacgaacacaggaagaagcagcacgtcttcctgagaaccacgggccggcagtcggccacatctgccaccagttcaaaagccctgtgggaggtggaggtggtccagcatgacccatgtcggggcggagcagggtattggaacagccttttccgtttcaagcatctggccacggggcattacttggcagcagaggtggaccctgatcaggacgcctctcgaagtaggttgcggaatgcccaagaaaagatggtatactccctggtctctgtgcctgaaggcaatgacatctcctccattttcgagctagatcccaccactctgcgtggaggtgacagccttgtcccaaggaactcttatgttcggctcagacacctatgtactaatacctgggttcacagcacaaatattcctattgacaaggaagaagaaaagcccgtgatgctgaaaattggcacctctcctgtgaaggaggataaggaagcatttgccatagttccggtttctcctgctgaagttcgggacctggactttgccaatgatgccagcaaggtgctgggctccattgctgggaagctagagaagggcaccatcacccagaatgaaaggaggtctgtaaccaagctgctagaagatttggtttacttcgtcactggtggaactaattctggtcaagatgttctcgaagttgtcttctccaagcccaacagagaacggcagaaactgatgagagaacagaatattctcaagcagatcttcaagttgttacaagccccattcacagactgcggtgatggcccaatgcttcggctggaagagctcggggaccagcggcacgctcctttcagacacatctgccggctctgctacagggtgctgagacactcgcagcaagactacaggaagaaccaggagtatatagccaagcagtttggcttcatgcagaagcagattggctatgatgtgttggctgaagacactatcactgccctgctccacaataatcggaaactcctggaaaaacacattaccgcggcagagattgacacatttgtcagcctggtgcgaaagaacagggagcccagattcttagattacctctccgacctctgtgtctccatgaacaaatcaattccagtgacccaggaactgatatgtaaagctgtgctgaaccccaccaacgctgacatcctgattgagaccaaattggttctttctcgttttgaatttgaaggtgtctcttccactggagagaatgctctggaggcaggagaagacgaggaagaggtgtggctgttttggagggacagcaacaaagagattcgcagcaagagtgtgagggaattggctcaggatgctaaagaagggcagaaggaggaccgagacgttctcagctactacagatatcagctgaacctctttgcgaggatgtgtctggaccgccaatacctggccatcaacgaaatctcaggccagctggatgtcgatctcattctccgctgcatgtctgacgagaacctgccctatgacctcagggcgtccttctgccgcctcatgcttcacatgcatgtggaccgagatccccaggaacaagtcacccccgtgaaatatgcccgcctctggtcggagattccctcggagatcgccattgacgactatgatagtagtggagcttccaaagatgaaattaaggagagatttgctcagaccatggagtttgtggaggagtatttaagagatgtggtttgtcagaggttccctttctctgataaagagaagaataagcttacgtttgaggttgtaaatttagctaggaatctcatatactttggtttctacaacttctctgaccttctacgattaactaagatccttctggccatattggactgtgtacatgtgacaacaatcttccccattagcaagatggcgaaaggagaagagaataaaggcagtaacgtgatgagatctattcatggcgtgggagagctgatgacccaggtggtgctccggggaggaggctttttgcccatgactcccatggctgctgcccctgaaggcaatgtgaagcaggcagagcctgagaaggaggacatcatggtcatggacaccaagctgaagatcattgagatactccagtttattttgaatgtgaggttggattataggatctcctgcctcctgtgtatatttaagcgagagtttgatgaaagcaattcccagacttcagaaacatcctccggaaacagcagccaagaagggccaagtaatgtaccaggtgctcttgactttgaacacattgaagaacaagcagaaggcatctttggaggaagtgaggagaacaccccactggacttggatgaccacggcggcagaacctttctccgtgtcctgctccacttgacgatgcatgactacccacccctggtgtcaggggccctgcagctcctcttccggcacttcagccagaggcaggaggtgctccaggccttcaaacaggttcaactgctggttaccagccaagatgtggacaactacaaacagatcaaacaagacttggatcaactgaggtccatcgtggaaaagtcagagctttgggtgtacaaagggcagggccccgatgagactatggatggtgcatctggagaaaatgaacataagaaaacggaggagggaaataacaagccacaaaagcatgaaagcaccagcagctacaactacagagtggtcaaagagattttgattcggcttagcaaactctgtgttcaagagagtgcctcagtgagaaagagcaggaagcagcaacagcgtctgctccggaacatgggcgcgcacgccgtggtgctggagctgctgcagattccctatgagaaggccgaagataccaagatgcaagagataatgaggttggctcatgaatttttgcagaatttctgcgcaggcaaccagcagaatcaagctttgctacataaacacataaacctgtttctcaacccagggatcctggaggcagtaaccatgcagcacatcttcatgaacaatttccagctttgcagtgagatcaacgagagagttgttcagcacttcgttcactgcatagagactcacggtcggaatgtccagtatataaagttcttacagacaattgtcaaggcagaagggaaatttattaaaaaatgccaagacatggttatggccgagctggtcaattcgggagaggatgtcctcgtgttctacaacgacagagcctctttccagactctgatccagatgatgcggtcagaacgggatcggatggatgagaacagccctctcatgtaccacatccacttggtcgagctcctggctgtgtgcacggagggtaagaatgtctacacagagatcaagtgcaactccctgctcccgctggatgacatcgttcgcgtggtgacccacgaggactgcatccctgaggttaaaattgcatacattaacttcctgaatcactgctatgtggatacagaggtggaaatgaaggagatttataccagcaatcacatgtggaaattgtttgagaatttccttgtagacatctgcagggcctgtaacaacactagtgacaggaaacatgcagactcgattttggagaagtatgtcaccgaaatcgtcatgagtattgttactactttcttcagctctcccttctcagaccagagtacgactttgcagactcgccagcctgtctttgtgcaactgctgcaaggcgtgttcagggtttaccactgcaactggttaatgccaagccaaaaagcctccgtggagagctgtattcgggtgctgtctgatgtagccaagagccgggccattgccattcccgtggacctggacagccaagtcaacaacctctttctcaagtcccacagcattgtgcagaaaacagccatgaactggcggctctcagcccgcaatgccgcacgcagggactctgttctggcagcttccagagactaccggaatatcattgagagattgcaggacatcgtctccgcgctggaggaccgtctcaggcccctggtgcaggcagagttatctgtgctcgtggatgttctccacagacccgagctgcttttcccagagaacacagacgccagaaggaaatgtgaaagtggcggtttcatttgcaagttaataaagcatacaaaacagctgctagaagaaaatgaagagaagctctgcattaaggtcctacagaccctgagggaaatgatgaccaaagatagaggctatggagaaaagggtgaggcgctcaggcaagttctggtcaaccgttactatggaaacgtcagaccttcgggacgaagagagagccttaccagctttggcaatggcccactgtcagcaggaggacccggcaagcccgggggaggagggggaggttccggatccagctctatgagcaggggtgagatgagtctggccgaggttcagtgtcaccttgacaaggagggggcttccaatctagttatcgacctcatcatgaacgcatccagtgaccgagtgttccatgaaagcattctcctggccattgcccttctggaaggaggcaacaccaccatccagcactcctttttctgtcgcttgacagaagataagaagtcagagaaattctttaaggtgttttatgaccggatgaaggtggcccagcaagaaatcaaagcaacagtgacagtgaacaccagtgacttgggaaataaaaagaaagacgatgaggtagacagggatgccccatcacggaaaaaagctaaagagcccacaacacagataacagaagaggtccgggatcagctcctggaggcctccgctgccaccaggaaagccttcaccactttcaggagggaggctgatcccgacgaccactaccagcctggagagggcacccaggccactgccgacaaggccaaggacgacctggagatgagcgcggtcatcaccatcatgcagcccatcctccgcttccttcagctcctgtgtgaaaaccacaaccgagacctgcagaacttcctccgttgccaaaataacaagaccaactacaatttggtatgtgagaccctgcagtttctggactgtatttgtggaagcacaactggaggccttggtcttctgggcttgtatataaatgaaaagaacgtagcgcttatcaaccaaaccctggaaagtctgaccgaatactgtcaaggaccttgccatgagaaccagaactgcatagccacccatgaatccaatggcattgacatcatcacagccctgatcctcaatgatatcaatcctttgggaaagaagaggatggaccttgtgttagaactgaagaacaatgcctcgaagttgctcctggccatcatggaaagcaggcacgacagtgaaaacgcagagaggatactttataacatgaggcccaaggaactggtggaagtgatcaagaaagcctacatgcaaggtgaagtggaatttgaggatggagaaaacggtgaggatggggcggcgtcccccaggaacgtggggcacaacatctacatattagcccatcagttggctcggcataacaaagaacttcagagcatgctgaaacctggtggccaagtggacggagatgaagccctggagttttatgccaagcacacggcgcagatagagattgtcagattagaccgaacaatggaacagatagtctttcccgtgcccagcatatgtgaattcctaaccaaggagtcaaaactacgaatttactatactacagagagagacgaacaaggcagcaaaatcaatgatttctttctgcggtctgaagacctcttcaatgaaatgaattggcagaagaaactgagagcccagcccgtgttgtactggtgtgcccgcaacatgtctttctggagcagcatttcgtttaacctggccgtcctgatgaacctgctggtggcgtttttctacccgtttaagggagtccgaggaggaaccctggagccccactggtcgggactcctgtggacagccatgctcatctctctggccatcgtcattgccctccccaagccccatggcatccgggccttaattgcctccacaattctacgactgatattttcagtcgggttacaacccacgttgtttcttctgggcgctttcaatgtatgcaataaaatcatctttctaatgagctttgtgggcaactgtgggacattcacaagaggctaccgagccatggttctggatgttgagttcctctatcatttgttgtatctggtgatctgtgccatggggctctttgtccatgaattcttctacagtctgctgctttttgatttagtgtacagagaagagactttgcttaatgtcattaaaagtgtcactcgcaatggacggtccatcatcctgacagcagttctggctctgatcctcgtttacctgttctcaatagtgggctatcttttcttcaaggatgactttatcttggaagtagataggctgcccaatgaaacagctgttccagaaaccggcgagagtttggcaagcgagttcctgttctccgatgtgtgtagggtggagagtggggagaactgctcctctcctgcacccagagaagagctggtccctgcagaagagacggaacaggataaagagcacacatgtgagacgctgctgatgtgcattgtcaccgtgctgagtcacgggctgcggagcgggggtggagtaggagatgtactcaggaagccgtccaaagaggaacccctgtttgctgctagagttatttatgacctcttgttcttcttcatggtcatcatcattgttcttaacctgatttttggggttatcattgacacttttgctgacctgaggagtgagaagcagaagaaggaagagatcttgaagaccacgtgctttatctgtggcttggaaagagacaagtttgacaacaagactgtcacctttgaagagcacatcaaggaagaacacaacatgtggcactatctgtgcttcatcgtcctggtgaaagtaaaggactccaccgaatatactgggcctgagagttacgtggcagaaatgatcaaggaaagaaaccttgactggttccccaggatgagagccatgtcattggtcagcagtgattctgaaggagaacagaatgagctgagaaacctgcaggagaagctggagtccaccatgaaacttgtcacgaacctttctggccagctgtcggaattaaaggatcagatgacagaacaaaggaagcagaaacaaagaattggtcttctaggacatcctcctcacatgaatgtcaacccacaacaaccagcataagcaaatgaaagaaaggaattgtatttaccttttataattattattagtgtgggtatggctaatgagttctgattcacccacgaaggttacatttatgctgaatacatttgtaaatactcagttttatactgtatgtatatgattgctactctaaaggtttggatatatgtattgtaattagaattgttggcatgatgacatttcatttgtgccaaaaatattaaaaatgccttttttggaaggactaacagaaagcacctgatttgcacttgaaccagattatagatttaaaagtatatgacatgtattttgtatttaaaactagaatagccagtatttatgttttttataaaactgtgcaatacgaattatgcaatcacaatacatttgtagctcccgagtgtcctaaagggagtgcacttctttgaagctggtgtgttaatactatgtaataaatggttaactttcaaatgatgctgctgccaaaattatattaatagtgagtttcaggcccctgggcattttgtaccatgtaattatcctctggtgatgctgtttctcgttagtggcagtagtgcctccgtctcctagtgataatgctccaagtctatgaactgttaaatcagcattcattttaagaaaagcaactttagtttcaaagatacttttaagcttctaaattgatcatttaaactatttctttaaataagagagccaaattagaggctcatactttagcttgtgaagaagataatgaattttttaaagggaactttctatgcaatgttcaggataaatgcatactgctggccaatcagtgtcatctcctgggtaaattttgatgtcgcattataaagacatgcataattgatggtttctagattatctagtccaaacaatagagtttattttttcttcatctgaaccaacatgctacagtagctaagaagtattaaaactatatacatccatataaagatgaaatatgaactatctcattagaagtcatagttgaccacagacatgttattcttctgaaagagccacattttggttttatttcttgtcacatgatttcttttcttgatggatgaaaaatatgaaaggaaacttttatatctgttgcctagttttgtacatggatctcattttacaagagaatctctctgcaaaaaaaaaaaaaacagtttaaaaatgcattgaaagcagagttctgaaatgagtaaagtttgtaaatgcatatataaaaatatttaataaatgatgcagaatatacagtgactggttggtggctttcatttggcatttgtgacttaactgctattccatttatgtactttctttaggatcagtttgaagtacagtcggtttgattaccaggttaattcagaaaatgtttacctgattatttaaaaaaacacttgctgttgttatgacagctctgaggagaattattagaacaaacattggggagtatttagtacaacattcattcattcttctggattagtgactgccagccaggctgtcgggagcgccctactaaatctcctgtctcttctgcttttactgggggatctttaatttgctgtgtgccatgtggaagtatcgggaacagctgaaatttgttttatttatgcccagtggtcagggtccttcagcaaagtgtaaaatgtttttacagaaccactttgcctgtccaaacgtagtaaaacctgttccctcctcaaatcagtgcttgccctggctgctttttttgacactaattttctctatgctttggtaaataataccacccaatgttgtggaactaggtcaagattaaattccagttaaatggctagtttggtaactaatgcttttactttataaatttgataacttaaaaacaaattaattttttccagtcagtgcagcctgtctccacaaaatttttccatcgtaaggcaagcctaagacagatacctacttttatctgtaagcaaaatggcaatctatgctaacccccacaatgcacacattagctagcaaggacttgcttttcccctgggctttctctttgatctctcacactgcccaacgagatgtggcagtgtgtgtggtttgtctcccaagtcccatccagttcattggaaagttctgcattgacatgccaagttgcagcttttacaggtttgtcatgttccatttgaatcctgtcacttaagatataaatcttcattcagtgtgccagcttcagcagaaaataaacgaaattggaatgccactcctccctccatgcagtagatcctacccttgccgtttgggtgtgaacactaaagctagtagaattgaaacatacaatttgaagtgaaaactccgggggcctttgatgtgtaattgtaattctgcctgcttccttcacattgtgcctttccaacacctctattttaagatcaaggtccaagtcaccttcaaagttacctacccggatgaagaattagtgttatcagggtgaaagtatggtagtactcgctaacatgagagaaagccaatgttacttaattaagccattttatttaatattaacagtttgccacagcagagagccactcagcatctg

SEQ ID NO: 401785 - DNA, 10992 bp, Homo sapiens
gttgctgtcggagagagaaagccgcacgccgagaggaggtgtgggtgttccgcttccatcctaacggaacgagctccctcttcgcggacatgggattacccagcggctgctaacccctctcctcgccctgctcccccaaaccggcgtggctccccgggcaccaaggagctgactacagaggagcaggatttgcacccctcgctgggcttgctttggcaacagagtgcctgacccaggtcaggattttcaagaaagacatgtctgacaaaatgtctagcttcctacatattggagacatttgttctctgtacgcggagggatcgacaaatggatttattagcaccttgggcctggttgatgatcgttgtgttgtacagccagaaaccggggaccttaacaatccacctaagaaattcagagactgcctctttaagctatgtcccatgaaccgctactctgcccaaaagcagttctggaaagccgctaagcctggggccaacagcaccacagacgcagtgctactcaacaaactgcaccacgctgcagacttggaaaagaagcagaatgagacagaaaacaggaaattgctggggaccgtaatccagtatggcaatgtgatccagctcctgcatttgaaaagtaataaatacctaacagtgaataagaggcttcctgctctgttggagaagaatgccatgagagtcacattggacgaggctggaaatgaagggtcctggttttatattcagccattctacaagctgcgatccattggagacagcgtggtcataggtgacaaggtggttctgaaccccgtcaatgctggtcagcccctacatgctagcagccatcaactggtagataacccaggctgcaatgaggtcaattccgtcaactgcaatacaagctggaaaatagtccttttcatgaaatggagtgataacaaagacgacatattaaaggggggtgacgtggtgaggctgtttcatgctgagcaggagaagtttctcacctgtgacgaacacaggaagaagcagcacgtcttcctgagaaccacgggccggcagtcggccacatctgccaccagttcaaaagccctgtgggaggtggaggtggtccagcatgacccatgtcggggcggagcagggtattggaacagccttttccgtttcaagcatctggccacggggcattacttggcagcagaggtagaccctgactttgaggaagaatgcctggagtttcagccctcagtggaccctgatcaggacgcctctcgaagtaggttgcggaatgcccaagaaaagatggtatactccctggtctctgtgcctgaaggcaatgacatctcctccattttcgagctagatcccaccactctgcgtggaggtgacagccttgtcccaaggaactcttatgttcggctcagacacctatgtactaatacctgggttcacagcacaaatattcctattgacaaggaagaagaaaagcccgtgatgctgaaaattggcacctctcctgtgaaggaggataaggaagcatttgccatagttccggtttctcctgctgaagttcgggacctggactttgccaatgatgccagcaaggtgctgggctccattgctgggaagctagagaagggcaccatcacccagaatgaaaggaggtctgtaaccaagctgctagaagatttggtttacttcgtcactggtggaactaattctggtcaagatgttctcgaagttgtcttctccaagcccaacagagaacggcagaaactgatgagagaacagaatattctcaagcagatcttcaagttgttacaagccccattcacagactgcggtgatggcccaatgcttcggctggaagagctcggggaccagcggcacgctcctttcagacacatctgccggctctgctacagggtgctgagacactcgcagcaagactacaggaagaaccaggagtatatagccaagcagtttggcttcatgcagaagcagattggctatgatgtgttggctgaagacactatcactgccctgctccacaataatcggaaactcctggaaaaacacattaccgcggcagagattgacacatttgtcagcctggtgcgaaagaacagggagcccagattcttagattacctctccgacctctgtgtctccatgaacaaatcaattccagtgacccaggaactgatatgtaaagctgtgctgaaccccaccaacgctgacatcctgattgagaccaaattggttctttctcgttttgaatttgaaggtgtctcttccactggagagaatgctctggaggcaggagaagacgaggaagaggtgtggctgttttggagggacagcaacaaagagattcgcagcaagagtgtgagggaattggctcaggatgctaaagaagggcagaaggaggaccgagacgttctcagctactacagatatcagctgaacctctttgcgaggatgtgtctggaccgccaatacctggccatcaacgaaatctcaggccagctggatgtcgatctcattctccgctgcatgtctgacgagaacctgccctatgacctcagggcgtccttctgccgcctcatgcttcacatgcatgtggaccgagatccccaggaacaagtcacccccgtgaaatatgcccgcctctggtcggagattccctcggagatcgccattgacgactatgatagtagtggagcttccaaagatgaaattaaggagagatttgctcagaccatggagtttgtggaggagtatttaagagatgtggtttgtcagaggttccctttctctgataaagagaagaataagcttacgtttgaggttgtaaatttagctaggaatctcatatactttggtttctacaacttctctgaccttctacgattaactaagatccttctggccatattggactgtgtacatgtgacaacaatcttccccattagcaagatggcgaaaggagaagagaataaaggcagtaacgtgatgagatctattcatggcgtgggagagctgatgacccaggtggtgctccggggaggaggctttttgcccatgactcccatggctgctgcccctgaaggcaatgtgaagcaggcagagcctgagaaggaggacatcatggtcatggacaccaagctgaagatcattgagatactccagtttattttgaatgtgaggttggattataggatctcctgcctcctgtgtatatttaagcgagagtttgatgaaagcaattcccagacttcagaaacatcctccggaaacagcagccaagaagggccaagtaatgtaccaggtgctcttgactttgaacacattgaagaacaagcagaaggcatctttggaggaagtgaggagaacaccccactggacttggatgaccacggcggcagaacctttctccgtgtcctgctccacttgacgatgcatgactacccacccctggtgtcaggggccctgcagctcctcttccggcacttcagccagaggcaggaggtgctccaggccttcaaacaggttcaactgctggttaccagccaagatgtggacaactacaaacagatcaaacaagacttggatcaactgaggtccatcgtggaaaagtcagagctttgggtgtacaaagggcagggccccgatgagactatggatggtgcatctggagaaaatgaacataagaaaacggaggagggaaataacaagccacaaaagcatgaaagcaccagcagctacaactacagagtggtcaaagagattttgattcggcttagcaaactctgtgttcaagagagtgcctcagtgagaaagagcaggaagcagcaacagcgtctgctccggaacatgggcgcgcacgccgtggtgctggagctgctgcagattccctatgagaaggccgaagataccaagatgcaagagataatgaggttggctcatgaatttttgcagaatttctgcgcaggcaaccagcagaatcaagctttgctacataaacacataaacctgtttctcaacccagggatcctggaggcagtaaccatgcagcacatcttcatgaacaatttccagctttgcagtgagatcaacgagagagttgttcagcacttcgttcactgcatagagactcacggtcggaatgtccagtatataaagttcttacagacaattgtcaaggcagaagggaaatttattaaaaaatgccaagacatggttatggccgagctggtcaattcgggagaggatgtcctcgtgttctacaacgacagagcctctttccagactctgatccagatgatgcggtcagaacgggatcggatggatgagaacagccctctcatgtaccacatccacttggtcgagctcctggctgtgtgcacggagggtaagaatgtctacacagagatcaagtgcaactccctgctcccgctggatgacatcgttcgcgtggtgacccacgaggactgcatccctgaggttaaaattgcatacattaacttcctgaatcactgctatgtggatacagaggtggaaatgaaggagatttataccagcaatcacatgtggaaattgtttgagaatttccttgtagacatctgcagggcctgtaacaacactagtgacaggaaacatgcagactcgattttggagaagtatgtcaccgaaatcgtcatgagtattgttactactttcttcagctctcccttctcagaccagagtacgactttgcagactcgccagcctgtctttgtgcaactgctgcaaggcgtgttcagggtttaccactgcaactggttaatgccaagccaaaaagcctccgtggagagctgtattcgggtgctgtctgatgtagccaagagccgggccattgccattcccgtggacctggacagccaagtcaacaacctctttctcaagtcccacagcattgtgcagaaaacagccatgaactggcggctctcagcccgcaatgccgcacgcagggactctgttctggcagcttccagagactaccggaatatcattgagagattgcaggacatcgtctccgcgctggaggaccgtctcaggcccctggtgcaggcagagttatctgtgctcgtggatgttctccacagacccgagctgcttttcccagagaacacagacgccagaaggaaatgtgaaagtggcggtttcatttgcaagttaataaagcatacaaaacagctgctagaagaaaatgaagagaagctctgcattaaggtcctacagaccctgagggaaatgatgaccaaagatagaggctatggagaaaagggtgaggcgctcaggcaagttctggtcaaccgttactatggaaacgtcagaccttcgggacgaagagagagccttaccagctttggcaatggcccactgtcagcaggaggacccggcaagcccgggggaggagggggaggttccggatccagctctatgagcaggggtgagatgagtctggccgaggttcagtgtcaccttgacaaggagggggcttccaatctagttatcgacctcatcatgaacgcatccagtgaccgagtgttccatgaaagcattctcctggccattgcccttctggaaggaggcaacaccaccatccagcactcctttttctgtcgcttgacagaagataagaagtcagagaaattctttaaggtgttttatgaccggatgaaggtggcccagcaagaaatcaaagcaacagtgacagtgaacaccagtgacttgggaaataaaaagaaagacgatgaggtagacagggatgccccatcacggaaaaaagctaaagagcccacaacacagataacagaagaggtccgggatcagctcctggaggcctccgctgccaccaggaaagccttcaccactttcaggagggaggctgatcccgacgaccactaccagcctggagagggcacccaggccactgccgacaaggccaaggacgacctggagatgagcgcggtcatcaccatcatgcagcccatcctccgcttccttcagctcctgtgtgaaaaccacaaccgagacctgcagaacttcctccgttgccaaaataacaagaccaactacaatttggtatgtgagaccctgcagtttctggactgtatttgtggaagcacaactggaggccttggtcttctgggcttgtatataaatgaaaagaacgtagcgcttatcaaccaaaccctggaaagtctgaccgaatactgtcaaggaccttgccatgagaaccagaactgcatagccacccatgaatccaatggcattgacatcatcacagccctgatcctcaatgatatcaatcctttgggaaagaagaggatggaccttgtgttagaactgaagaacaatgcctcgaagttgctcctggccatcatggaaagcaggcacgacagtgaaaacgcagagaggatactttataacatgaggcccaaggaactggtggaagtgatcaagaaagcctacatgcaaggtgaagtggaatttgaggatggagaaaacggtgaggatggggcggcgtcccccaggaacgtggggcacaacatctacatattagcccatcagttggctcggcataacaaagaacttcagagcatgctgaaacctggtggccaagtggacggagatgaagccctggagttttatgccaagcacacggcgcagatagagattgtcagattagaccgaacaatggaacagatagtctttcccgtgcccagcatatgtgaattcctaaccaaggagtcaaaactacgaatttactatactacagagagagacgaacaaggcagcaaaatcaatgatttctttctgcggtctgaagacctcttcaatgaaatgaattggcagaagaaactgagagcccagcccgtgttgtactggtgtgcccgcaacatgtctttctggagcagcatttcgtttaacctggccgtcctgatgaacctgctggtggcgtttttctacccgtttaagggagtccgaggaggaaccctggagccccactggtcgggactcctgtggacagccatgctcatctctctggccatcgtcattgccctccccaagccccatggcatccgggccttaattgcctccacaattctacgactgatattttcagtcgggttacaacccacgttgtttcttctgggcgctttcaatgtatgcaataaaatcatctttctaatgagctttgtgggcaactgtgggacattcacaagaggctaccgagccatggttctggatgttgagttcctctatcatttgttgtatctggtgatctgtgccatggggctctttgtccatgaattcttctacagtctgctgctttttgatttagtgtacagagaagagactttgcttaatgtcattaaaagtgtcactcgcaatggacggtccatcatcctgacagcagttctggctctgatcctcgtttacctgttctcaatagtgggctatcttttcttcaaggatgactttatcttggaagtagataggctgcccaatgaaacagctgttccagaaaccggcgagagtttggcaagcgagttcctgttctccgatgtgtgtagggtggagagtggggagaactgctcctctcctgcacccagagaagagctggtccctgcagaagagacggaacaggataaagagcacacatgtgagacgctgctgatgtgcattgtcaccgtgctgagtcacgggctgcggagcgggggtggagtaggagatgtactcaggaagccgtccaaagaggaacccctgtttgctgctagagttatttatgacctcttgttcttcttcatggtcatcatcattgttcttaacctgatttttggggttatcattgacacttttgctgacctgaggagtgagaagcagaagaaggaagagatcttgaagaccacgtgctttatctgtggcttggaaagagacaagtttgacaacaagactgtcacctttgaagagcacatcaaggaagaacacaacatgtggcactatctgtgcttcatcgtcctggtgaaagtaaaggactccaccgaatatactgggcctgagagttacgtggcagaaatgatcaaggaaagaaaccttgactggttccccaggatgagagccatgtcattggtcagcagtgattctgaaggagaacagaatgagctgagaaacctgcaggagaagctggagtccaccatgaaacttgtcacgaacctttctggccagctgtcggaattaaaggatcagatgacagaacaaaggaagcagaaacaaagaattggtcttctaggacatcctcctcacatgaatgtcaacccacaacaaccagcataagcaaatgaaagaaaggaattgtatttaccttttataattattattagtgtgggtatggctaatgagttctgattcacccacgaaggttacatttatgctgaatacatttgtaaatactcagttttatactgtatgtatatgattgctactctaaaggtttggatatatgtattgtaattagaattgttggcatgatgacatttcatttgtgccaaaaatattaaaaatgccttttttggaaggactaacagaaagcacctgatttgcacttgaaccagattatagatttaaaagtatatgacatgtattttgtatttaaaactagaatagccagtatttatgttttttataaaactgtgcaatacgaattatgcaatcacaatacatttgtagctcccgagtgtcctaaagggagtgcacttctttgaagctggtgtgttaatactatgtaataaatggttaactttcaaatgatgctgctgccaaaattatattaatagtgagtttcaggcccctgggcattttgtaccatgtaattatcctctggtgatgctgtttctcgttagtggcagtagtgcctccgtctcctagtgataatgctccaagtctatgaactgttaaatcagcattcattttaagaaaagcaactttagtttcaaagatacttttaagcttctaaattgatcatttaaactatttctttaaataagagagccaaattagaggctcatactttagcttgtgaagaagataatgaattttttaaagggaactttctatgcaatgttcaggataaatgcatactgctggccaatcagtgtcatctcctgggtaaattttgatgtcgcattataaagacatgcataattgatggtttctagattatctagtccaaacaatagagtttattttttcttcatctgaaccaacatgctacagtagctaagaagtattaaaactatatacatccatataaagatgaaatatgaactatctcattagaagtcatagttgaccacagacatgttattcttctgaaagagccacattttggttttatttcttgtcacatgatttcttttcttgatggatgaaaaatatgaaaggaaacttttatatctgttgcctagttttgtacatggatctcattttacaagagaatctctctgcaaaaaaaaaaaaaacagtttaaaaatgcattgaaagcagagttctgaaatgagtaaagtttgtaaatgcatatataaaaatatttaataaatgatgcagaatatacagtgactggttggtggctttcatttggcatttgtgacttaactgctattccatttatgtactttctttaggatcagtttgaagtacagtcggtttgattaccaggttaattcagaaaatgtttacctgattatttaaaaaaacacttgctgttgttatgacagctctgaggagaattattagaacaaacattggggagtatttagtacaacattcattcattcttctggattagtgactgccagccaggctgtcgggagcgccctactaaatctcctgtctcttctgcttttactgggggatctttaatttgctgtgtgccatgtggaagtatcgggaacagctgaaatttgttttatttatgcccagtggtcagggtccttcagcaaagtgtaaaatgtttttacagaaccactttgcctgtccaaacgtagtaaaacctgttccctcctcaaatcagtgcttgccctggctgctttttttgacactaattttctctatgctttggtaaataataccacccaatgttgtggaactaggtcaagattaaattccagttaaatggctagtttggtaactaatgcttttactttataaatttgataacttaaaaacaaattaattttttccagtcagtgcagcctgtctccacaaaatttttccatcgtaaggcaagcctaagacagatacctacttttatctgtaagcaaaatggcaatctatgctaacccccacaatgcacacattagctagcaaggacttgcttttcccctgggctttctctttgatctctcacactgcccaacgagatgtggcagtgtgtgtggtttgtctcccaagtcccatccagttcattggaaagttctgcattgacatgccaagttgcagcttttacaggtttgtcatgttccatttgaatcctgtcacttaagatataaatcttcattcagtgtgccagcttcagcagaaaataaacgaaattggaatgccactcctccctccatgcagtagatcctacccttgccgtttgggtgtgaacactaaagctagtagaattgaaacatacaatttgaagtgaaaactccgggggcctttgatgtgtaattgtaattctgcctgcttccttcacattgtgcctttccaacacctctattttaagatcaaggtccaagtcaccttcaaagttacctacccggatgaagaattagtgttatcagggtgaaagtatggtagtactcgctaacatgagagaaagccaatgttacttaattaagccattttatttaatattaacagtttgccacagcagagagccactcagcatctg

SEQ ID NO: 401786 - DNA, 11091 bp, Homo sapiens
gttgctgtcggagagagaaagccgcacgccgagaggaggtgtgggtgttccgcttccatcctaacggaacgagctccctcttcgcggacatgggattacccagcggctgctaacccctctcctcgccctgctcccccaaaccggcgtggctccccgggcaccaaggagctgactacagaggagcaggatttgcacccctcgctgggcttgctttggcaacagagtgcctgacccaggtcaggattttcaagaaagacatgtctgacaaaatgtctagcttcctacatattggagacatttgttctctgtacgcggagggatcgacaaatggatttattagcaccttgggcctggttgatgatcgttgtgttgtacagccagaaaccggggaccttaacaatccacctaagaaattcagagactgcctctttaagctatgtcccatgaaccgctactctgcccaaaagcagttctggaaagccgctaagcctggggccaacagcaccacagacgcagtgctactcaacaaactgcaccacgctgcagacttggaaaagaagcagaatgagacagaaaacaggaaattgctggggaccgtaatccagtatggcaatgtgatccagctcctgcatttgaaaagtaataaatacctaacagtgaataagaggcttcctgctctgttggagaagaatgccatgagagtcacattggacgaggctggaaatgaagggtcctggttttatattcagccattctacaagctgcgatccattggagacagcgtggtcataggtgacaaggtggttctgaaccccgtcaatgctggtcagcccctacatgctagcagccatcaactggtagataacccaggctgcaatgaggtcaattccgtcaactgcaatacaagctggaaaatagtccttttcatgaaatggagtgataacaaagacgacatattaaaggggggtgacgtggtgaggctgtttcatgctgagcaggagaagtttctcacctgtgacgaacacaggaagaagcagcacgtcttcctgagaaccacgggccggcagtcggccacatctgccaccagttcaaaagccctgtgggaggtggaggtggtccagcatgacccatgtcggggcggagcagggtattggaacagccttttccgtttcaagcatctggccacggggcattacttggcagcagaggtggaccctgatcaggacgcctctcgaagtaggttgcggaatgcccaagaaaagatggtatactccctggtctctgtgcctgaaggcaatgacatctcctccattttcgagctagatcccaccactctgcgtggaggtgacagccttgtcccaaggaactcttatgttcggctcagacacctatgtactaatacctgggttcacagcacaaatattcctattgacaaggaagaagaaaagcccgtgatgctgaaaattggcacctctcctgtgaaggaggataaggaagcatttgccatagttccggtttctcctgctgaagttcgggacctggactttgccaatgatgccagcaaggtgctgggctccattgctgggaagctagagaagggcaccatcacccagaatgaaaggaggtctgtaaccaagctgctagaagatttggtttacttcgtcactggtggaactaattctggtcaagatgttctcgaagttgtcttctccaagcccaacagagaacggcagaaactgatgagagaacagaatattctcaagcagatcttcaagttgttacaagccccattcacagactgcggtgatggcccaatgcttcggctggaagagctcggggaccagcggcacgctcctttcagacacatctgccggctctgctacagggtgctgagacactcgcagcaagactacaggaagaaccaggagtatatagccaagcagtttggcttcatgcagaagcagattggctatgatgtgttggctgaagacactatcactgccctgctccacaataatcggaaactcctggaaaaacacattaccgcggcagagattgacacatttgtcagcctggtgcgaaagaacagggagcccagattcttagattacctctccgacctctgtgtctccatgaacaaatcaattccagtgacccaggaactgatatgtaaagctgtgctgaaccccaccaacgctgacatcctgattgagaccaaattggttctttctcgttttgaatttgaaggtgtctcttccactggagagaatgctctggaggcaggagaagacgaggaagaggtgtggctgttttggagggacagcaacaaagagattcgcagcaagagtgtgagggaattggctcaggatgctaaagaagggcagaaggaggaccgagacgttctcagctactacagatatcagctgaacctctttgcgaggatgtgtctggaccgccaatacctggccatcaacgaaatctcaggccagctggatgtcgatctcattctccgctgcatgtctgacgagaacctgccctatgacctcagggcgtccttctgccgcctcatgcttcacatgcatgtggaccgagatccccaggaacaagtcacccccgtgaaatatgcccgcctctggtcggagattccctcggagatcgccattgacgactatgatagtagtggagcttccaaagatgaaattaaggagagatttgctcagaccatggagtttgtggaggagtatttaagagatgtggtttgtcagaggttccctttctctgataaagagaagaataagcttacgtttgaggttgtaaatttagctaggaatctcatatactttggtttctacaacttctctgaccttctacgattaactaagatccttctggccatattggactgtgtacatgtgacaacaatcttccccattagcaagatggcgaaaggagaagagaataaaggtaacaatgatgtggagaagctgaagagcagtaacgtgatgagatctattcatggcgtgggagagctgatgacccaggtggtgctccggggaggaggctttttgcccatgactcccatggctgctgcccctgaaggcaatgtgaagcaggcagagcctgagaaggaggacatcatggtcatggacaccaagctgaagatcattgagatactccagtttattttgaatgtgaggttggattataggatctcctgcctcctgtgtatatttaagcgagagtttgatgaaagcaattcccagacttcagaaacatcctccggaaacagcagccaagaagggccaagtaatgtaccaggtgctcttgactttgaacacattgaagaacaagcagaaggcatctttggaggaagtgaggagaacaccccactggacttggatgaccacggcggcagaacctttctccgtgtcctgctccacttgacgatgcatgactacccacccctggtgtcaggggccctgcagctcctcttccggcacttcagccagaggcaggaggtgctccaggccttcaaacaggttcaactgctggttaccagccaagatgtggacaactacaaacagatcaaacaagacttggatcaactgaggtccatcgtggaaaagtcagagctttgggtgtacaaagggcagggccccgatgagactatggatggtgcatctggagaaaatgaacataagaaaacggaggagggaaataacaagccacaaaagcatgaaagcaccagcagctacaactacagagtggtcaaagagattttgattcggcttagcaaactctgtgttcaagagagtgcctcagtgagaaagagcaggaagcagcaacagcgtctgctccggaacatgggcgcgcacgccgtggtgctggagctgctgcagattccctatgagaaggccgaagataccaagatgcaagagataatgaggttggctcatgaatttttgcagaatttctgcgcaggcaaccagcagaatcaagctttgctacataaacacataaacctgtttctcaacccagggatcctggaggcagtaaccatgcagcacatcttcatgaacaatttccagctttgcagtgagatcaacgagagagttgttcagcacttcgttcactgcatagagactcacggtcggaatgtccagtatataaagttcttacagacaattgtcaaggcagaagggaaatttattaaaaaatgccaagacatggttatggccgagctggtcaattcgggagaggatgtcctcgtgttctacaacgacagagcctctttccagactctgatccagatgatgcggtcagaacgggatcggatggatgagaacagccctctcatgtaccacatccacttggtcgagctcctggctgtgtgcacggagggtaagaatgtctacacagagatcaagtgcaactccctgctcccgctggatgacatcgttcgcgtggtgacccacgaggactgcatccctgaggttaaaattgcatacattaacttcctgaatcactgctatgtggatacagaggtggaaatgaaggagatttataccagcaatcacatgtggaaattgtttgagaatttccttgtagacatctgcagggcctgtaacaacactagtgacaggaaacatgcagactcgattttggagaagtatgtcaccgaaatcgtcatgagtattgttactactttcttcagctctcccttctcagaccagagtacgactttgcagactcgccagcctgtctttgtgcaactgctgcaaggcgtgttcagggtttaccactgcaactggttaatgccaagccaaaaagcctccgtggagagctgtattcgggtgctgtctgatgtagccaagagccgggccattgccattcccgtggacctggacagccaagtcaacaacctctttctcaagtcccacagcattgtgcagaaaacagccatgaactggcggctctcagcccgcaatgccgcacgcagggactctgttctggcagcttccagagactaccggaatatcattgagagattgcaggacatcgtctccgcgctggaggaccgtctcaggcccctggtgcaggcagagttatctgtgctcgtggatgttctccacagacccgagctgcttttcccagagaacacagacgccagaaggaaatgtgaaagtggcggtttcatttgcaagttaataaagcatacaaaacagctgctagaagaaaatgaagagaagctctgcattaaggtcctacagaccctgagggaaatgatgaccaaagatagaggctatggagaaaagctaatttccattgatgaattggataatgctgagcttcctccagctccggattctgagaacgccactgaggagcttgaaccaagtccacccctgcggcagctggaagaccataaaaggggtgaggcgctcaggcaagttctggtcaaccgttactatggaaacgtcagaccttcgggacgaagagagagccttaccagctttggcaatggcccactgtcagcaggaggacccggcaagcccgggggaggagggggaggttccggatccagctctatgagcaggggtgagatgagtctggccgaggttcagtgtcaccttgacaaggagggggcttccaatctagttatcgacctcatcatgaacgcatccagtgaccgagtgttccatgaaagcattctcctggccattgcccttctggaaggaggcaacaccaccatccagcactcctttttctgtcgcttgacagaagataagaagtcagagaaattctttaaggtgttttatgaccggatgaaggtggcccagcaagaaatcaaagcaacagtgacagtgaacaccagtgacttgggaaataaaaagaaagacgatgaggtagacagggatgccccatcacggaaaaaagctaaagagcccacaacacagataacagaagaggtccgggatcagctcctggaggcctccgctgccaccaggaaagccttcaccactttcaggagggaggctgatcccgacgaccactaccagcctggagagggcacccaggccactgccgacaaggccaaggacgacctggagatgagcgcggtcatcaccatcatgcagcccatcctccgcttccttcagctcctgtgtgaaaaccacaaccgagacctgcagaacttcctccgttgccaaaataacaagaccaactacaatttggtatgtgagaccctgcagtttctggactgtatttgtggaagcacaactggaggccttggtcttctgggcttgtatataaatgaaaagaacgtagcgcttatcaaccaaaccctggaaagtctgaccgaatactgtcaaggaccttgccatgagaaccagaactgcatagccacccatgaatccaatggcattgacatcatcacagccctgatcctcaatgatatcaatcctttgggaaagaagaggatggaccttgtgttagaactgaagaacaatgcctcgaagttgctcctggccatcatggaaagcaggcacgacagtgaaaacgcagagaggatactttataacatgaggcccaaggaactggtggaagtgatcaagaaagcctacatgcaaggtgaagtggaatttgaggatggagaaaacggtgaggatggggcggcgtcccccaggaacgtggggcacaacatctacatattagcccatcagttggctcggcataacaaagaacttcagagcatgctgaaacctggtggccaagtggacggagatgaagccctggagttttatgccaagcacacggcgcagatagagattgtcagattagaccgaacaatggaacagatagtctttcccgtgcccagcatatgtgaattcctaaccaaggagtcaaaactacgaatttactatactacagagagagacgaacaaggcagcaaaatcaatgatttctttctgcggtctgaagacctcttcaatgaaatgaattggcagaagaaactgagagcccagcccgtgttgtactggtgtgcccgcaacatgtctttctggagcagcatttcgtttaacctggccgtcctgatgaacctgctggtggcgtttttctacccgtttaagggagtccgaggaggaaccctggagccccactggtcgggactcctgtggacagccatgctcatctctctggccatcgtcattgccctccccaagccccatggcatccgggccttaattgcctccacaattctacgactgatattttcagtcgggttacaacccacgttgtttcttctgggcgctttcaatgtatgcaataaaatcatctttctaatgagctttgtgggcaactgtgggacattcacaagaggctaccgagccatggttctggatgttgagttcctctatcatttgttgtatctggtgatctgtgccatggggctctttgtccatgaattcttctacagtctgctgctttttgatttagtgtacagagaagagactttgcttaatgtcattaaaagtgtcactcgcaatggacggtccatcatcctgacagcagttctggctctgatcctcgtttacctgttctcaatagtgggctatcttttcttcaaggatgactttatcttggaagtagataggctgcccaatgaaacagctgttccagaaaccggcgagagtttggcaagcgagttcctgttctccgatgtgtgtagggtggagagtggggagaactgctcctctcctgcacccagagaagagctggtccctgcagaagagacggaacaggataaagagcacacatgtgagacgctgctgatgtgcattgtcaccgtgctgagtcacgggctgcggagcgggggtggagtaggagatgtactcaggaagccgtccaaagaggaacccctgtttgctgctagagttatttatgacctcttgttcttcttcatggtcatcatcattgttcttaacctgatttttggggttatcattgacacttttgctgacctgaggagtgagaagcagaagaaggaagagatcttgaagaccacgtgctttatctgtggcttggaaagagacaagtttgacaacaagactgtcacctttgaagagcacatcaaggaagaacacaacatgtggcactatctgtgcttcatcgtcctggtgaaagtaaaggactccaccgaatatactgggcctgagagttacgtggcagaaatgatcaaggaaagaaaccttgactggttccccaggatgagagccatgtcattggtcagcagtgattctgaaggagaacagaatgagctgagaaacctgcaggagaagctggagtccaccatgaaacttgtcacgaacctttctggccagctgtcggaattaaaggatcagatgacagaacaaaggaagcagaaacaaagaattggtcttctaggacatcctcctcacatgaatgtcaacccacaacaaccagcataagcaaatgaaagaaaggaattgtatttaccttttataattattattagtgtgggtatggctaatgagttctgattcacccacgaaggttacatttatgctgaatacatttgtaaatactcagttttatactgtatgtatatgattgctactctaaaggtttggatatatgtattgtaattagaattgttggcatgatgacatttcatttgtgccaaaaatattaaaaatgccttttttggaaggactaacagaaagcacctgatttgcacttgaaccagattatagatttaaaagtatatgacatgtattttgtatttaaaactagaatagccagtatttatgttttttataaaactgtgcaatacgaattatgcaatcacaatacatttgtagctcccgagtgtcctaaagggagtgcacttctttgaagctggtgtgttaatactatgtaataaatggttaactttcaaatgatgctgctgccaaaattatattaatagtgagtttcaggcccctgggcattttgtaccatgtaattatcctctggtgatgctgtttctcgttagtggcagtagtgcctccgtctcctagtgataatgctccaagtctatgaactgttaaatcagcattcattttaagaaaagcaactttagtttcaaagatacttttaagcttctaaattgatcatttaaactatttctttaaataagagagccaaattagaggctcatactttagcttgtgaagaagataatgaattttttaaagggaactttctatgcaatgttcaggataaatgcatactgctggccaatcagtgtcatctcctgggtaaattttgatgtcgcattataaagacatgcataattgatggtttctagattatctagtccaaacaatagagtttattttttcttcatctgaaccaacatgctacagtagctaagaagtattaaaactatatacatccatataaagatgaaatatgaactatctcattagaagtcatagttgaccacagacatgttattcttctgaaagagccacattttggttttatttcttgtcacatgatttcttttcttgatggatgaaaaatatgaaaggaaacttttatatctgttgcctagttttgtacatggatctcattttacaagagaatctctctgcaaaaaaaaaaaaaacagtttaaaaatgcattgaaagcagagttctgaaatgagtaaagtttgtaaatgcatatataaaaatatttaataaatgatgcagaatatacagtgactggttggtggctttcatttggcatttgtgacttaactgctattccatttatgtactttctttaggatcagtttgaagtacagtcggtttgattaccaggttaattcagaaaatgtttacctgattatttaaaaaaacacttgctgttgttatgacagctctgaggagaattattagaacaaacattggggagtatttagtacaacattcattcattcttctggattagtgactgccagccaggctgtcgggagcgccctactaaatctcctgtctcttctgcttttactgggggatctttaatttgctgtgtgccatgtggaagtatcgggaacagctgaaatttgttttatttatgcccagtggtcagggtccttcagcaaagtgtaaaatgtttttacagaaccactttgcctgtccaaacgtagtaaaacctgttccctcctcaaatcagtgcttgccctggctgctttttttgacactaattttctctatgctttggtaaataataccacccaatgttgtggaactaggtcaagattaaattccagttaaatggctagtttggtaactaatgcttttactttataaatttgataacttaaaaacaaattaattttttccagtcagtgcagcctgtctccacaaaatttttccatcgtaaggcaagcctaagacagatacctacttttatctgtaagcaaaatggcaatctatgctaacccccacaatgcacacattagctagcaaggacttgcttttcccctgggctttctctttgatctctcacactgcccaacgagatgtggcagtgtgtgtggtttgtctcccaagtcccatccagttcattggaaagttctgcattgacatgccaagttgcagcttttacaggtttgtcatgttccatttgaatcctgtcacttaagatataaatcttcattcagtgtgccagcttcagcagaaaataaacgaaattggaatgccactcctccctccatgcagtagatcctacccttgccgtttgggtgtgaacactaaagctagtagaattgaaacatacaatttgaagtgaaaactccgggggcctttgatgtgtaattgtaattctgcctgcttccttcacattgtgcctttccaacacctctattttaagatcaaggtccaagtcaccttcaaagttacctacccggatgaagaattagtgttatcagggtgaaagtatggtagtactcgctaacatgagagaaagccaatgttacttaattaagccattttatttaatattaacagtttgccacagcagagagccactcagcatctg

SEQ ID NO: 401787 - DNA, 3454 bp, Homo sapiens
ctctgttcagtagacttagggactgtttccatcagggttaggcctgatccacctgaacgcacagtgaatatccctcctggctgtgtcacaccacacttggagaagtcgcaattgagacaggggacatgaaaagagatgcagttttcagtttaaaagttgaatgcccaatttaatttctacccaagtagatgaggtctcacttgagctgtgccccaggctccgcagaccaaagggtcgcaagggacccagactgatccagacacctctcttttccaggaacccctgtttgctgctagagttatttatgacctcttgttcttcttcatggtcatcatcattgttcttaacctgatttttggggttatcattgacacttttgctgacctgaggagtgagaagcagaagaaggaagagatcttgaagaccacgtgctttatctgtggcttggaaagagacaagtttgacaacaagactgtcacctttgaagagcacatcaaggaagaacacaacatgtggcactatctgtgcttcatcgtcctggtgaaagtaaaggactccaccgaatatactgggcctgagagttacgtggcagaaatgatcaaggaaagaaaccttgactggttccccaggatgagagccatgtcattggtcagcagtgattctgaaggagaacagaatgagctgagaaacctgcaggagaagctggagtccaccatgaaacttgtcacgaacctttctggccagctgtcggaattaaaggatcagatgacagaacaaaggaagcagaaacaaagaattggtcttctaggacatcctcctcacatgaatgtcaacccacaacaaccagcataagcaaatgaaagaaaggaattgtatttaccttttataattattattagtgtgggtatggctaatgagttctgattcacccacgaaggttacatttatgctgaatacatttgtaaatactcagttttatactgtatgtatatgattgctactctaaaggtttggatatatgtattgtaattagaattgttggcatgatgacatttcatttgtgccaaaaatattaaaaatgccttttttggaaggactaacagaaagcacctgatttgcacttgaaccagattatagatttaaaagtatatgacatgtattttgtatttaaaactagaatagccagtatttatgttttttataaaactgtgcaatacgaattatgcaatcacaatacatttgtagctcccgagtgtcctaaagggagtgcacttctttgaagctggtgtgttaatactatgtaataaatggttaactttcaaatgatgctgctgccaaaattatattaatagtgagtttcaggcccctgggcattttgtaccatgtaattatcctctggtgatgctgtttctcgttagtggcagtagtgcctccgtctcctagtgataatgctccaagtctatgaactgttaaatcagcattcattttaagaaaagcaactttagtttcaaagatacttttaagcttctaaattgatcatttaaactatttctttaaataagagagccaaattagaggctcatactttagcttgtgaagaagataatgaattttttaaagggaactttctatgcaatgttcaggataaatgcatactgctggccaatcagtgtcatctcctgggtaaattttgatgtcgcattataaagacatgcataattgatggtttctagattatctagtccaaacaatagagtttattttttcttcatctgaaccaacatgctacagtagctaagaagtattaaaactatatacatccatataaagatgaaatatgaactatctcattagaagtcatagttgaccacagacatgttattcttctgaaagagccacattttggttttatttcttgtcacatgatttcttttcttgatggatgaaaaatatgaaaggaaacttttatatctgttgcctagttttgtacatggatctcattttacaagagaatctctctgcaaaaaaaaaaaaaacagtttaaaaatgcattgaaagcagagttctgaaatgagtaaagtttgtaaatgcatatataaaaatatttaataaatgatgcagaatatacagtgactggttggtggctttcatttggcatttgtgacttaactgctattccatttatgtactttctttaggatcagtttgaagtacagtcggtttgattaccaggttaattcagaaaatgtttacctgattatttaaaaaaacacttgctgttgttatgacagctctgaggagaattattagaacaaacattggggagtatttagtacaacattcattcattcttctggattagtgactgccagccaggctgtcgggagcgccctactaaatctcctgtctcttctgcttttactgggggatctttaatttgctgtgtgccatgtggaagtatcgggaacagctgaaatttgttttatttatgcccagtggtcagggtccttcagcaaagtgtaaaatgtttttacagaaccactttgcctgtccaaacgtagtaaaacctgttccctcctcaaatcagtgcttgccctggctgctttttttgacactaattttctctatgctttggtaaataataccacccaatgttgtggaactaggtcaagattaaattccagttaaatggctagtttggtaactaatgcttttactttataaatttgataacttaaaaacaaattaattttttccagtcagtgcagcctgtctccacaaaatttttccatcgtaaggcaagcctaagacagatacctacttttatctgtaagcaaaatggcaatctatgctaacccccacaatgcacacattagctagcaaggacttgcttttcccctgggctttctctttgatctctcacactgcccaacgagatgtggcagtgtgtgtggtttgtctcccaagtcccatccagttcattggaaagttctgcattgacatgccaagttgcagcttttacaggtttgtcatgttccatttgaatcctgtcacttaagatataaatcttcattcagtgtgccagcttcagcagaaaataaacgaaattggaatgccactcctccctccatgcagtagatcctacccttgccgtttgggtgtgaacactaaagctagtagaattgaaacatacaatttgaagtgaaaactccgggggcctttgatgtgtaattgtaattctgcctgcttccttcacattgtgcctttccaacacctctattttaagatcaaggtccaagtcaccttcaaagttacctacccggatgaagaattagtgttatcagggtgaaagtatggtagtactcgctaacatgagagaaagccaatgttacttaattaagccattttatttaatattaacagtttgccacagcagagagccactcagcatctg

SEQ ID NO: 401788 - DNA, 5401 bp, Homo sapiens
gttgctgtcggagagagaaagccgcacgccgagaggaggtgtgggtgttccgcttccatcctaacggaacgagctccctcttcgcggacatgggattacccagcggctgctaacccctctcctcgccctgctcccccaaaccggcgtggctccccgggcaccaaggagctgactacagaggagcaggatttgcacccctcgctgggcttgctttggcaacagagtgcctgacccaggtcaggattttcaagaaagacatgtctgacaaaatgtctagcttcctacatattggagacatttgttctctgtacgcggagggatcgacaaatggatttattagcaccttgggcctggttgatgatcgttgtgttgtacagccagaaaccggggaccttaacaatccacctaagaaattcagagactgcctctttaagctatgtcccatgaaccgctactctgcccaaaagcagttctggaaagccgctaagcctggggccaacagcaccacagacgcagtgctactcaacaaactgcaccacgctgcagacttggaaaagaagcagaatgagacagaaaacaggaaattgctggggaccgtaatccagtatggcaatgtgatccagctcctgcatttgaaaagtaataaatacctaacagtgaataagaggcttcctgctctgttggagaagaatgccatgagagtcacattggacgaggctggaaatgaagggtcctggttttatattcagccattctacaagctgcgatccattggagacagcgtggtcataggtgacaaggtggttctgaaccccgtcaatgctggtcagcccctacatgctagcagccatcaactggtagataacccaggctgcaatgaggtcaattccgtcaactgcaatacaagctggaaaatagtccttttcatgaaatggagtgataacaaagacgacatattaaaggggggtgacgtggtgaggctgtttcatgctgagcaggagaagtttctcacctgtgacgaacacaggaagaagcagcacgtcttcctgagaaccacgggccggcagtcggccacatctgccaccagttcaaaagccctgtgggaggtggaggtggtccagcatgacccatgtcggggcggagcagggtattggaacagccttttccgtttcaagcatctggccacggggcattacttggcagcagaggtggaccctgatcaggacgcctctcgaagtaggttgcggaatgcccaagaaaagatggtatactccctggtctctgtgcctgaaggcaatgacatctcctccattttcgagctagatcccaccactctgcgtggaggtgacagccttgtcccaaggaactcttatgttcggctcagacacctatgtactaatacctgggttcacagcacaaatattcctattgacaaggaagaagaaaagcccgtgatgctgaaaattggcacctctcctgtgaaggaggataaggaagcatttgccatagttccggtttctcctgctgaagttcgggacctggactttgccaatgatgccagcaaggtgctgggctccattgctgggaagctagagaagggcaccatcacccagaatgaaaggaggtctgtaaccaagctgctagaagatttggtttacttcgtcactggtggaactaattctggtcaagatgttctcgaagttgtcttctccaagcccaacagagaacggcagaaactgatgagagaacagaatattctcaagcagatcttcaagttgttacaagccccattcacagactgcggtgatggcccaatgcttcggctggaagagctcggggaccagcggcacgctcctttcagacacatctgccggctctgctacagggtgctgagacactcgcagcaagactacaggaagaaccaggagtatatagccaagcagtttggcttcatgcagaagcagattggctatgatgtgttggctgaagacactatcactgccctgctccacaataatcggaaactcctggaaaaacacattaccgcggcagagattgacacatttgtcagcctggtgcgaaagaacagggagcccagattcttagattacctctccgacctctgtgtctccatgaacaaatcaattccagtgacccaggaactgatatgtaaagctgtgctgaaccccaccaacgctgacatcctgattgagaccaaattggttctttctcgttttgaatttgaaggtgtctcttccactggagagaatgctctggaggcaggagaagacgaggaagaggtgtggctgttttggagggacagcaacaaagagattcgcagcaagagtgtgagggaattggctcaggatgctaaagaagggcagaaggaggaccgagacgttctcagctactacagatatcagctgaacctctttgcgaggatgtgtctggaccgccaatacctggccatcaacgaaatctcaggccagctggatgtcgatctcattctccgctgcatgtctgacgagaacctgccctatgacctcagggcgtccttctgccgcctcatgcttcacatgcatgtggaccgagatccccaggaacaagtcacccccgtgaaatatgcccgcctctggtcggagattccctcggagatcgccattgacgactatgatagtagtggagcttccaaagatgaaattaaggagagatttgctcagaccatggagtttgtggaggagtatttaagagatgtggtttgtcagaggttccctttctctgataaagagaagaataagcttacgtttgaggttgtaaatttagctaggaatctcatatactttggtttctacaacttctctgaccttctacgattaactaagatccttctggccatattggactgtgtacatgtgacaacaatcttccccattagcaagatggcgaaaggagaagagaataaaggtaacaatgatgtggagaagctgaagagcagtaacgtgatgagatctattcatggcgtgggagagctgatgacccaggtggtgctccggggaggaggctttttgcccatgactcccatggctgctgcccctgaaggcaatgtgaagcaggcagagcctgagaaggaggacatcatggtcatggacaccaagctgaagatcattgagatactccagtttattttgaatgtgaggttggattataggatctcctgcctcctgtgtatatttaagcgagagtttgatgaaagcaattcccagacttcagaaacatcctccggaaacagcagccaagaagggccaagtaatgtaccaggtgctcttgactttgaacacattgaagaacaagcagaaggcatctttggaggaagtgaggagaacaccccactggacttggatgaccacggcggcagaacctttctccgtgtcctgctccacttgacgatgcatgactacccacccctggtgtcaggggccctgcagctcctcttccggcacttcagccagaggcaggaggtgctccaggccttcaaacaggttcaactgctggttaccagccaagatgtggacaactacaaacagatcaaacaagacttggatcaactgaggtccatcgtggaaaagtcagagctttgggtgtacaaagggcagggccccgatgagactatggatggtgcatctggagaaaatgaacataagaaaacggaggagggaaataacaagccacaaaagcatgaaagcaccagcagctacaactacagagtggtcaaagagattttgattcggcttagcaaactctgtgttcaagagagtgcctcagtgagaaagagcaggaagcagcaacagcgtctgctccggaacatgggcgcgcacgccgtggtgctggagctgctgcagattccctatgagaaggccgaagataccaagatgcaagagataatgaggttggctcatgaatttttgcagaatttctgcgcaggcaaccagcagaatcaagctttgctacataaacacataaacctgtttctcaacccagggatcctggaggcagtaaccatgcagcacatcttcatgaacaatttccagctttgcagtgagatcaacgagagagttgttcagcacttcgttcactgcatagagactcacggtcggaatgtccagtatataaagttcttacagacaattgtcaaggcagaagggaaatttattaaaaaatgccaagacatggttatggccgagctggtcaattcgggagaggatgtcctcgtgttctacaacgacagagcctctttccagactctgatccagatgatgcggtcagaacgggatcggatggatgagaacagccctctcatgtaccacatccacttggtcgagctcctggctgtgtgcacggagggtaagaatgtctacacagagatcaagtgcaactccctgctcccgctggatgacatcgttcgcgtggtgacccacgaggactgcatccctgaggttaaaattgcatacattaacttcctgaatcactgctatgtggatacagaggtggaaatgaaggagatttataccagcaatcacatgtggaaattgtttgagaatttccttgtagacatctgcagggcctgtaacaacactagtgacaggaaacatgcagactcgattttggagaagtatgtcaccgaaatcgtcatgagtattgttactactttcttcagctctcccttctcagaccagagtacgactttgcagactcgccagcctgtctttgtgcaactgctgcaaggcgtgttcagggtttaccactgcaactggttaatgccaagccaaaaagcctccgtggagagctgtattcgggtgctgtctgatgtagccaagagccgggccattgccattcccgtggacctggacagccaagtcaacaacctctttctcaagtcccacagcattgtgcagaaaacagccatgaactggcggctctcagcccgcaatgccgcacgcagggactctgttctggcagcttccagagactaccggaatatcattgagagattgcaggacatcgtctccgcgctggagatgggagcaggtgagacgcagagccccagtactgagaggaggaagccctcttacagggccccttgcccaccccaagtccgtgtctgaaacacggagcgggtgctgcttcaacccgcatttaatgctgtgtaagtagcgataaccacgtacgagtctgtctggttgatttctaatgtgactcctctggtatttcctcctggtaataaatacaagtgtgacctttcagattgcatatctcaaaagtaacattgctaatgttttataataaaatatattatgtgtgttttggttggtgaaaataatacagactacattttaaaagataa

SEQ ID NO: 401789 - DNA, 2378 bp, Homo sapiens
gttgctgtcggagagagaaagccgcacgccgagaggaggtgtgggtgttccgcttccatcctaacggaacgagctccctcttcgcggacatgggattacccagcggctgctaacccctctcctcgccctgctcccccaaaccggcgtggctccccgggcaccaaggagctgactacagaggagcaggatttgcacccctcgctgggcttgctttggcaacagagtgcctgacccaggtcaggattttcaagaaagacatgtctgacaaaatgtctagcttcctacatattggagacatttgttctctgtacgcggagggatcgacaaatggatttattagcaccttgggcctggttgatgatcgttgtgttgtacagccagaaaccggggaccttaacaatccacctaagaaattcagagactgcctctttaagctatgtcccatgaaccgctactctgcccaaaagcagttctggaaagccgctaagcctggggccaacagcaccacagacgcagtgctactcaacaaactgcaccacgctgcagacttggaaaagaagcagaatgagacagaaaacaggaaattgctggggaccgtaatccagtatggcaatgtgatccagctcctgcatttgaaaagtaataaatacctaacagtgaataagaggcttcctgctctgttggagaagaatgccatgagagtcacattggacgaggctggaaatgaagggtcctggttttatattcagccattctacaagctgcgatccattggagacagcgtggtcataggtgacaaggtggttctgaaccccgtcaatgctggtcagcccctacatgctagcagccatcaactggtagataacccaggctgcaatgaggtcaattccgtcaactgcaatacaagctggaaaatagtccttttcatgaaatggagtgataacaaagacgacatattaaaggggggtgacgtggtgaggctgtttcatgctgagcaggagaagtttctcacctgtgacgaacacaggaagaagcagcacgtcttcctgagaaccacgggccggcagtcggccacatctgccaccagttcaaaagccctgtgggaggtggaggtggtccagcatgacccatgtcggggcggagcagggtattggaacagccttttccgtttcaagcatctggccacggggcattacttggcagcagaggtggaccctgatcaggacgcctctcgaagtaggttgcggaatgcccaagaaaagatggtatactccctggtctctgtgcctgaaggcaatgacatctcctccattttcgagctagatcccaccactctgcgtggaggtgacagccttgtcccaaggaactcttatgttcggctcagacacctatgtactaatacctgggttcacagcacaaatattcctattgacaaggaagaagaaaagcccgtgatgctgaaaattggcacctctcctgtgaaggaggataaggaagcatttgccatagttccggtttctcctgctgaagttcgggacctggactttgccaatgatgccagcaaggtgctgggctccattgctgggaagctagagaagggcaccatcacccagaatgaaaggaggtctgtaaccaagctgctagaagatttggtttacttcgtcactggtggaactaattctggtcaagatgttctcgaagttgtcttctccaagcccaacagagaacggcagaaactgatgagagaacagaatattctcaagcagatcttcaagttgttacaagccccattcacagactgcggtgatggcccaatgcttcggctggaagagctcggggaccagcggcacgctcctttcagacacatctgccggctctgctacagggtgctgagacactcgcagcaagactacaggaagaaccaggagtatatagccaagcagtttggcttcatgcagaagcagattggctatgatgtgttggctgaagacactatcactgccctgctccacaataatcggaaactcctggaaaaacacattaccgcggcagagattgacacatttgtcagcctggtgcgaaagaacagggagcccagattcttagattacctctccgacctctgtgtctccatgaacaaatcaattccagtgacccaggaactgatatgtaaagctgtgctgaaccccaccaacgctgacatcctgattgagaccaaattggttctttctcgttttgaatttgaaggtgtctcttccactggagagaatgctgaggcacaagaatcacttaaacccaggaggcagaggttgcagtgagccgtgatcgcaccactgcactccagcctgggcaacagagtgagactctgtctcaaaaaa

SEQ ID NO: 401790 - DNA, 272 bp, Homo sapiens
tgtttgggcacggtgactgaaatacatttgtgtgagatgctctcgttgctctcatgaagagtttggcacagtccgtgccatctgactgttcctgtcattgttctcaggtatgcaataaaatcatctttctaatgagctttgtgggcaactgtgggacattcacaagaggctaccgagccatggttctggatgttgagttcctctatcatttgttgtatctggtgatctgtgccatggggctctttgtccatgaattcttctacagtctgctg

SEQ ID NO: 401791 - DNA, 419 bp, Homo sapiens
tgaagagtgaataggagagagacatttggctggagatttgaaattttttcccataatgtctcttgtagtacttaataaatcatttttttaaaaagatcaaaaattaaaactgaaaaattcaccagtggcttccagaccaggaaatgggcagaaacaacaaatgcagtaaacttcaaagccagaaaacaaaaaaacaaatgaacagaatattcaaaagtggagtggaggccgggtgtagctggcattacaggcgtgacgaccatgcccggctgccattgacagttttttaaaaagcagcaataggacatcatttttgatacagagaatgatttggagcagggaaaatggagatgaagggacctgttaggaggctagcgtcgaatctaggctggagtctatgccataccatctgaatacat

SEQ ID NO: 401792 - DNA, 182 bp, Homo sapiens
agcttgcagcctgaaacatcagtcagatgagatcttgggtgaagagaaaagactgtataacatatttactgtctgctgagtgcataagaatgcagtctctgccagtcactggagacatcaagccctgaccactacaggaagcacatggtttccattacataaaatttacacatttggatttg

SEQ ID NO: 401793 - DNA, 2144 bp, Homo sapiens
attcttgctggtggaaagcaccgtgaaatcaaccagcggcagctctgaacgcgacgcacagcccgcgagggagcctgggcaaggacggagcgggcctgcaccggcggttgggcgggctccgggggcggggtccacctgggaccgcggcgcgcccctcaccgctcgcgccgccagggggcgccctccggagagcgcgcctaggccgcggcctgcgcttggcccctgcgggccgccgtctccgtgcccggcattcggccgctgttcggctgcgcggcggcagctcccggcggctcctggcggcgccgcagtcggaccttcgggcgcctgctggccggcggcagcagcgatggccccctgagcaggcagggagcaggcggcggcaggcgggcaagcgggcgggtgccgcagcccaggcccgggtcgcgcctctttgtttccacgggtagcggcgcagtcccgggccccgggcggaagtgagacgcgctcggcgcgggggccgcggcggccgcaccatgagcgacatccgccactcgctgctgcgccgcgatgcgctgagcgccgccaaggaggtgttgtaccacctggacatctacttcagcagccagctgcagagcgcgccgctgcccatcgtggacaagggccccgtggagctgctggaggagttcgtgttccaggtgcccaaggagcgcagcgcgcagcccaaggagcaaaccaaggactctgttcggcagattattttttcatcccttttcagccctcaagggaacaaagccgatgacagccggatgagcttgttgggaaaactggtctccatggcggtggctgtgtgtcgaatcccggtgttggagtgtgctgcctcctggcttcagcggacgcccgtggtttactgtgtgaggttagccaaggcccttgtagatgactactgctgtttggtgccgggatccattcagacgctgaagcagatattcagtgccagcccgagattctgctgccagttcatcacctccgttaccgcgctctatgacctgtcatcagatgacctcattccacctatggacttgcttgaaatgattgtcacctggatttttgaggacccaagcgtcctgcaagtgctcatgacgctgcagctgcacctgaccgagaagaatctgtatgggcgcctggggctgatcctcttcgaccacatggtcccgctggtagaggagatcaacaggttggcggatgaactgaaccccctcaacgcctcccaggagattgagctctcgctggaccggctggcgcaggctctgcaggtggccatggcctcaggagctctgctgtgcacgagagatgacctgagaaccttgtgctccaggctgccccataataacctcctccagctggtgatctcgggtcccgtgcagcagtcgcctcacgccgcgctccccccggggttctacccccacatccacacgcccccgctgggctacggggctgtcccggcccaccccgccgcccaccccgccctgcccacgcaccccggccacaccttcatctccggcgtgacctttcccttcaggcccatccgctaggctggcccgtgtgtgccttctgcgctctcgctggacgaagcctttcgagatggaaggggtggccggactcccagaagagaacctcggggaaggggtcgggcagcccctccccgccggcagaaccgtcttggtgtcacggagtccaggtgcttcccacccggtcgcattctttgacatgcagattggatggtggagggaagagtccagcctctgccgagagcctgctgcgtgcatttttaaaagatgccgatcctgggagcctctgttctctgcgcatttcagacacagcctgtgtggcgaggagtgtgacggcaggagccacgggtgcaagcccgtgtgtctggcctctttcctcgtgaagacgatgtgtccccgccagaaaaagtgggctccttctgcagccccgtgagctgagcccaggctgcgtagtgaccacaagcttatgtgcagcactgctcagggaggctgtcaggaattcccctcacctcggaaaggaacttctcagttttattgggggtgtctaaatttcctttcatatgttcaaataaatttttctaaacagtcaaaaaaaaa

SEQ ID NO: 401794 - DNA, 2435 bp, Homo sapiens
attcttgctggtggaaagcaccgtgaaatcaaccagcggcagctctgaacgcgacgcacagcccgcgagggagcctgggcaaggacggagcgggcctgcaccggcggttgggcgggctccgggggcggggtccacctgggaccgcggcgcgcccctcaccgctcgcgccgccagggggcgccctccggagagcgcgcctaggccgcggcctgcgcttggcccctgcgggccgccgtctccgtgcccggcattcggccgctgttcggctgcgcggcggcagctcccggcggctcctggcggcgccgcagtcggaccttcgggcgcctgctggccggcggcagcagcgatggccccctgagcaggcagggagcaggcggcggcaggcgggcaagcgggcgggtgccgcagcccaggcccgggtcgcgcctctttgtttccacgggtagcggcgcagtcccgggccccgggcggaagtgagacgcgctcggcgcgggggccgcggcggccgcaccatgagcgacatccgccactcgctgctgcgccgcgatgcgctgagcgccgccaaggaggtgttgtaccacctggacatctacttcagcagccagctgcagagcgcgccgctgcccatcgtggacaagggccccgtggagctgctggaggagttcgtgttccaggtgcccaaggagcgcagcgcgcagcccaagagactgaattcccttcaggagcttcaacttcttgaaatcatgtgcaattatttccaggagcaaaccaaggactctgttcggcagattattttttcatcccttttcagccctcaagggaacaaagccgatgacagccggatgagcttgttgggaaaactggtctccatggcggtggctgtgtgtcgaatcccggtgttggagtgtgctgcctcctggcttcagcggacgcccgtggtttactgtgtgaggttagccaaggcccttgtagatgactactgctgtttggtgccgggatccattcagacgctgaagcagatattcagtgccagcccgagattctgctgccagttcatcacctccgttaccgcgctctatgacctgtcatcagatgacctcattccacctatggacttgcttgaaatgattgtcacctggatttttgaggacccaaggttgattctcatcacttttttaaatactccgattgcggccaatctgccaataggattcttagagctcaccccgctcgttggattgatccgctggtgcgtgaaggcacccctggcttataaaaggaaaaagaagccccccttatccaatggccatgtcagcaacaaggtcacaaaggacccgggcgtggggatggacagagactcccacctcttgtactcaaaactccacctcagcgtcctgcaagtgctcatgacgctgcagctgcacctgaccgagaagaatctgtatgggcgcctggggctgatcctcttcgaccacatggtcccgctggtagaggagatcaacaggttggcggatgaactgaaccccctcaacgcctcccaggagattgagctctcgctggaccggctggcgcaggctctgcaggtggccatggcctcaggagctctgctgtgcacgagagatgacctgagaaccttgtgctccaggctgccccataataacctcctccagctggtgatctcgggtcccgtgcagcagtcgcctcacgccgcgctccccccggggttctacccccacatccacacgcccccgctgggctacggggctgtcccggcccaccccgccgcccaccccgccctgcccacgcaccccggccacaccttcatctccggcgtgacctttcccttcaggcccatccgctaggctggcccgtgtgtgccttctgcgctctcgctggacgaagcctttcgagatggaaggggtggccggactcccagaagagaacctcggggaaggggtcgggcagcccctccccgccggcagaaccgtcttggtgtcacggagtccaggtgcttcccacccggtcgcattctttgacatgcagattggatggtggagggaagagtccagcctctgccgagagcctgctgcgtgcatttttaaaagatgccgatcctgggagcctctgttctctgcgcatttcagacacagcctgtgtggcgaggagtgtgacggcaggagccacgggtgcaagcccgtgtgtctggcctctttcctcgtgaagacgatgtgtccccgccagaaaaagtgggctccttctgcagccccgtgagctgagcccaggctgcgtagtgaccacaagcttatgtgcagcactgctcagggaggctgtcaggaattcccctcacctcggaaaggaacttctcagttttattgggggtgtctaaatttcctttcatatgttcaaataaatttttctaaacagtcaaaaaaaaa

SEQ ID NO: 401795 - DNA, 2585 bp, Homo sapiens
attcttgctggtggaaagcaccgtgaaatcaaccagcggcagctctgaacgcgacgcacagcccgcgagggagcctgggcaaggacggagcgggcctgcaccggcggttgggcgggctccgggggcggggtccacctgggaccgcggcgcgcccctcaccgctcgcgccgccagggggcgccctccggagagcgcgcctaggccgcggcctgcgcttggcccctgcgggccgccgtctccgtgcccggcattcggccgctgttcggctgcgcggcggcagctcccggcggctcctggcggcgccgcagtcggaccttcgggcgcctgctggccggcggcagcagcgatggccccctgagcaggcagggagcaggcggcggcaggcgggcaagcgggcgggtgccgcagcccaggcccgggtcgcgcctctttgtttccacgggtagcggcgcagtcccgggccccgggcggaagtgagacgcgctcggcgcgggggccgcggcggccgcaccatgagcgacatccgccactcgctgctgcgccgcgatgcgctgagcgccgccaaggaggtgttgtaccacctggacatctacttcagcagccagctgcagagcgcgccgctgcccatcgtggacaagggccccgtggagctgctggaggagttcgtgttccaggtgcccaaggagcgcagcgcgcagcccaagagactgaattcccttcaggagcttcaacttcttgaaatcatgtgcaattatttccaggagcaaaccaaggactctgttcggcagattattttttcatcccttttcagccctcaagggaacaaagccgatgacagccggatgagcttgttgggaaaactggtctccatggcggtggctgtgtgtcgaatcccggtgttggagtgtgctgcctcctggcttcagcggacgcccgtggtttactgtgtgaggttagccaaggcccttgtagatgactactgctgtttggtgccgggatccattcagacgctgaagcagatattcagtgccagcccgagattctgctgccagttcatcacctccgttaccgcgctctatgacctgtcatcagatgacctcattccacctatggacttgcttgaaatgattgtcacctggatttttgaggacccaaggttgattctcatcacttttttaaatactccgattgcggccaatctgccaataggattcttagagctcaccccgctcgttggattgatccgctggtgcgtgaaggcacccctggcttataaaaggaaaaagaagccccccttatccaatggccatgtcagcaacaaggtcacaaaggacccgggcgtggggatggacagagactcccacctcttgtactcaaaactccacctcagcgtcctgcaagtgctcatgacgctgcagctgcacctgaccgagaagaatctgtatgggcgcctggggctgatcctcttcgaccacatggtcccgctggtagaggagatcaacaggttggcggatgaactgaaccccctcaacgcctcccaggagattgagctctcgctggaccggctggcgcaggctctgcaggtggccatggcctcaggagctctgctgtgcacgagagatgacctgagaaccttgtgctccaggctgccccataataagacggtagtgaggatgagacccagtggtgtttgtgaatttctcatcctactccttgccacgtggagacctccacaaacgcagtcatcaggactctgaatttcggggtcgtttgcaaggccagcttcctggggcttctgcttggaattcagcctcctccagctggtgatctcgggtcccgtgcagcagtcgcctcacgccgcgctccccccggggttctacccccacatccacacgcccccgctgggctacggggctgtcccggcccaccccgccgcccaccccgccctgcccacgcaccccggccacaccttcatctccggcgtgacctttcccttcaggcccatccgctaggctggcccgtgtgtgccttctgcgctctcgctggacgaagcctttcgagatggaaggggtggccggactcccagaagagaacctcggggaaggggtcgggcagcccctccccgccggcagaaccgtcttggtgtcacggagtccaggtgcttcccacccggtcgcattctttgacatgcagattggatggtggagggaagagtccagcctctgccgagagcctgctgcgtgcatttttaaaagatgccgatcctgggagcctctgttctctgcgcatttcagacacagcctgtgtggcgaggagtgtgacggcaggagccacgggtgcaagcccgtgtgtctggcctctttcctcgtgaagacgatgtgtccccgccagaaaaagtgggctccttctgcagccccgtgagctgagcccaggctgcgtagtgaccacaagcttatgtgcagcactgctcagggaggctgtcaggaattcccctcacctcggaaaggaacttctcagttttattgggggtgtctaaatttcctttcatatgttcaaataaatttttctaaacagtcaaaaaaaaa

SEQ ID NO: 401796 - DNA, 2378 bp, Homo sapiens
attcttgctggtggaaagcaccgtgaaatcaaccagcggcagctctgaacgcgacgcacagcccgcgagggagcctgggcaaggacggagcgggcctgcaccggcggttgggcgggctccgggggcggggtccacctgggaccgcggcgcgcccctcaccgctcgcgccgccagggggcgccctccggagagcgcgcctaggccgcggcctgcgcttggcccctgcgggccgccgtctccgtgcccggcattcggccgctgttcggctgcgcggcggcagctcccggcggctcctggcggcgccgcagtcggaccttcgggcgcctgctggccggcggcagcagcgatggccccctgagcaggcagggagcaggcggcggcaggcgggcaagcgggcgggtgccgcagcccaggcccgggtcgcgcctctttgtttccacgggtagcggcgcagtcccgggccccgggcggaagtgagacgcgctcggcgcgggggccgcggcggccgcaccatgagcgacatccgccactcgctgctgcgccgcgatgcgctgagcgccgccaaggaggtgttgtaccacctggacatctacttcagcagccagctgcagagcgcgccgctgcccatcgtggacaagggccccgtggagctgctggaggagttcgtgttccaggtgcccaaggagcgcagcgcgcagcccaaggagcaaaccaaggactctgttcggcagattattttttcatcccttttcagccctcaagggaacaaagccgatgacagccggatgagcttgttgggaaaactggtctccatggcggtggctgtgtgtcgaatcccggtgttggagtgtgctgcctcctggcttcagcggacgcccgtggtttactgtgtgaggttagccaaggcccttgtagatgactactgctgtttggtgccgggatccattcagacgctgaagcagatattcagtgccagcccgagattctgctgccagttcatcacctccgttaccgcgctctatgacctgtcatcagatgacctcattccacctatggacttgcttgaaatgattgtcacctggatttttgaggacccaaggttgattctcatcacttttttaaatactccgattgcggccaatctgccaataggattcttagagctcaccccgctcgttggattgatccgctggtgcgtgaaggcacccctggcttataaaaggaaaaagaagccccccttatccaatggccatgtcagcaacaaggtcacaaaggacccgggcgtggggatggacagagactcccacctcttgtactcaaaactccacctcagcgtcctgcaagtgctcatgacgctgcagctgcacctgaccgagaagaatctgtatgggcgcctggggctgatcctcttcgaccacatggtcccgctggtagaggagatcaacaggttggcggatgaactgaaccccctcaacgcctcccaggagattgagctctcgctggaccggctggcgcaggctctgcaggtggccatggcctcaggagctctgctgtgcacgagagatgacctgagaaccttgtgctccaggctgccccataataacctcctccagctggtgatctcgggtcccgtgcagcagtcgcctcacgccgcgctccccccggggttctacccccacatccacacgcccccgctgggctacggggctgtcccggcccaccccgccgcccaccccgccctgcccacgcaccccggccacaccttcatctccggcgtgacctttcccttcaggcccatccgctaggctggcccgtgtgtgccttctgcgctctcgctggacgaagcctttcgagatggaaggggtggccggactcccagaagagaacctcggggaaggggtcgggcagcccctccccgccggcagaaccgtcttggtgtcacggagtccaggtgcttcccacccggtcgcattctttgacatgcagattggatggtggagggaagagtccagcctctgccgagagcctgctgcgtgcatttttaaaagatgccgatcctgggagcctctgttctctgcgcatttcagacacagcctgtgtggcgaggagtgtgacggcaggagccacgggtgcaagcccgtgtgtctggcctctttcctcgtgaagacgatgtgtccccgccagaaaaagtgggctccttctgcagccccgtgagctgagcccaggctgcgtagtgaccacaagcttatgtgcagcactgctcagggaggctgtcaggaattcccctcacctcggaaaggaacttctcagttttattgggggtgtctaaatttcctttcatatgttcaaataaatttttctaaacagtcaaaaaaaaa

SEQ ID NO: 401797 - DNA, 1949 bp, Homo sapiens
attcttgctggtggaaagcaccgtgaaatcaaccagcggcagctctgaacgcgacgcacagcccgcgagggagcctgggcaaggacggagcgggcctgcaccggcggttgggcgggctccgggggcggggtccacctgggaccgcggcgcgcccctcaccgctcgcgccgccagggggcgccctccggagagcgcgcctaggccgcggcctgcgcttggcccctgcgggccgccgtctccgtgcccggcattcggccgctgttcggctgcgcggcggcagctcccggcggctcctggcggcgccgcagtcggaccttcgggcgcctgctggccggcggcagcagcgatggccccctgagcaggcagggagcaggcggcggcaggcgggcaagcgggcgggtgccgcagcccaggcccgggtcgcgcctctttgtttccacgggtagcggcgcagtcccgggccccgggcggaagtgagacgcgctcggcgcgggggccgcggcggccgcaccatgagcgacatccgccactcgctgctgcgccgcgatgcgctgagcgccgccaaggaggtgttgtaccacctggacatctacttcagcagccagctgcagagcgcgccgctgcccatcgtggacaagggccccgtggagctgctggaggagttcgtgttccaggtgcccaaggagcgcagcgcgcagcccaagagactgaattcccttcaggagcttcaacttcttgaaatcatgtgcaattatttccaggagcaaaccaaggactctgttcggcagattattttttcatcccttttcagccctcaagggaacaaagccgatgacagccggatgagcttgttgggaaaactggtctccatggcggtggctgtgtgtcgaatcccggtgttggagtgtgctgcctcctggcttcagcggacgcccgtggtttactgtgtgaggttagccaaggcccttgtagatgactactgctgtttggtgccgggatccattcagacgctgaagcagatattcagtgccagcccgagattctgctgccagttcatcacctccgttaccgcgctctatgacctgtcatcagatgacctcattccacctatggacttgcttgaaatgattgtcacctggatttttgaggacccaaggttgattctcatcacttttttaaatactccgattgcggccaatctgccaataggattcttagagctcaccccgctcgttggattgatccgctggtgcgtgaaggcacccctggcttataaaaggaaaaagaagccccccttatccaatggccatgtcagcaacaaggtcacaaaggacccgggcgtggggatggacagagactcccacctcttgtactcaaaactccacctcagcgtcctgcaagtgctcatgacgctgcagctgcacctgaccgagaagaatctgtatgggcgcctggggctgatcctcttcgaccacatggtcccgctggtagaggagatcaacaggttggcggatgaactgaaccccctcaacgcctcccaggagattgagctctcgctggaccggctggcgcaggctctgcaggtggccatggcctcaggagctctgctgtgcacgagagatgacctgagaaccttgtgctccaggctgccccataataagactctgaatttcggggtcgtttgcaaggccagcttcctggggcttctgcttggaattcagcctcctccagctggtgatctcgggtcccgtgcagcagtcgcctcacgccgcgctccccccggggttctaccccaaatcgaaagccacacggaaggggcgaggaggagcatgtaacggggggcaagcggcatgggacaccagaggccgagagcaatgacacgcaggcgccacgcacggcggccagaacgagggcccccacagcagcgcatcaaacggcgagcgggcgca

SEQ ID NO: 401798 - DNA, 1779 bp, Homo sapiens
attcttgctggtggaaagcaccgtgaaatcaaccagcggcagctctgaacgcgacgcacagcccgcgagggagcctgggcaaggacggagcgggcctgcaccggcggttgggcgggctccgggggcggggtccacctgggaccgcggcgcgcccctcaccgctcgcgccgccagggggcgccctccggagagcgcgcctaggccgcggcctgcgcttggcccctgcgggccgccgtctccgtgcccggcattcggccgctgttcggctgcgcggcggcagctcccggcggctcctggcggcgccgcagtcggaccttcgggcgcctgctggccggcggcagcagcgatggccccctgagcaggcagggagcaggcggcggcaggcgggcaagcgggcgggtgccgcagcccaggcccgggtcgcgcctctttgtttccacgggtagcggcgcagtcccgggccccgggcggaagtgagacgcgctcggcgcgggggccgcggcggccgcaccatgagcgacatccgccactcgctgctgcgccgcgatgcgctgagcgccgccaaggaggtgttgtaccacctggacatctacttcagcagccagctgcagagcgcgccgctgcccatcgtggacaagggccccgtggagctgctggaggagttcgtgttccaggtgcccaaggagcgcagcgcgcagcccaagagactgaattcccttcaggagcttcaacttcttgaaatcatgtgcaattatttccaggagcaaaccaaggactctgttcggcagattattttttcatcccttttcagccctcaagggaacaaagccgatgacagccggatgagcttgttgggaaaactggtctccatggcggtggctgtgtgtcgaatcccggtgttggagtgtgctgcctcctggcttcagcggacgcccgtggtttactgtgtgaggttagccaaggcccttgtagatgactactgctgtttggtgccgggatccattcagacgctgaagcagatattcagtgccagcccgagattctgctgccagttcatcacctccgttaccgcgctctatgacctgtcatcagatgacctcattccacctatggacttgcttgaaatgattgtcacctggatttttgaggacccaaggttgattctcatcacttttttaaatactccgattgcggccaatctgccaataggattcttagagctcaccccgctcgttggattgatccgctggtgcgtgaaggcacccctggcttataaaaggaaaaagaagccccccttatccaatggccatgtcagcaacaaggtcacaaaggacccgggcgtggggatggacagagactcccacctcttgtactcaaaactccacctcagcgtcctgcaagtgctcatgacgctgcagctgcacctgaccgagaagaatctgtatgggcgcctggggctgatcctcttcgaccacatggtcccgctggtagaggagatcaacaggttggcggatgaactgaaccccctcaacgcctcccaggagattgagctctcgctggaccggctggcgcaggctctgcaggtggccatggcctcaggagctctgctgtgcacgagagatgacctgagaaccttgtgctccaggctgccccataataagtaagtatcctcaggactcctagctgggccagcttgctggagcagggtggagggaggcaagacagggcgagcccctttgtcctgggttctttggggagagcccagtaagcacatgatga

SEQ ID NO: 401799 - DNA, 1727 bp, Homo sapiens
attcttgctggtggaaagcaccgtgaaatcaaccagcggcagctctgaacgcgacgcacagcccgcgagggagcctgggcaaggacggagcgggcctgcaccggcggttgggcgggctccgggggcggggtccacctgggaccgcggcgcgcccctcaccgctcgcgccgccagggggcgccctccggagagcgcgcctaggccgcggcctgcgcttggcccctgcgggccgccgtctccgtgcccggcattcggccgctgttcggctgcgcggcggcagctcccggcggctcctggcggcgccgcagtcggaccttcgggcgcctgctggccggcggcagcagcgatggccccctgagcaggcagggagcaggcggcggcaggcgggcaagcgggcgggtgccgcagcccaggcccgggtcgcgcctctttgtttccacgggtagcggcgcagtcccgggccccgggcggaagtgagacgcgctcggcgcgggggccgcggcggccgcaccatgagcgacatccgccactcgctgctgcgccgcgatgcgctgagcgccgccaaggaggtgttgtaccacctggacatctacttcagcagccagctgcagagcgcgccgctgcccatcgtggacaagggccccgtggagctgctggaggagttcgtgttccaggtgcccaaggagcgcagcgcgcagcccaagagactgaattcccttcaggagcttcaacttcttgaaatcatgtgcaattatttccaggagcaaaccaaggactctgttcggcagattattttttcatcccttttcagccctcaagggaacaaagccgatgacagccggatgagcttgttgggaaaactggtctccatggcggtggctgtgtgtcgaatcccggtgttggagtgtgctgcctcctggcttcagcggacgcccgtggtttactgtgtgaggttagccaaggcccttgtagatgactactgctgtttggtgccgggatccattcagacgctgaagcagatattcagtgccagcccgagattctgctgccagttcatcacctccgttaccgcgctctatgacctgtcatcagatgacctcattccacctatggacttgcttgaaatgattgtcacctggatttttgaggacccaaggttgattctcatcacttttttaaatactccgattgcggccaatctgccaataggattcttagagctcaccccgctcgttggattgatccgctggtgcgtgaaggcacccctggcttataaaaggaaaaagaagccccccttatccaatggccatgtcagcaacaaggtcacaaaggacccgggcgtggggatggacagagactcccacctcttgtactcaaaactccacctcagcgtcctgcaagtgctcatgacgctgcagctgcacctgaccgagaagaatctgtatgggcgcctggggctgatcctcttcgaccacatggtcccgctggtagaggagatcaacaggttggcggatgaactgaaccccctcaacgcctcccaggagattgagctctcgctggaccggctggcgcaggctctgcaggtggccatggcctcaggagctctgctgtgcacgagaggtggagtctcgcttctttgcccaggctggagtgcagtggtgcgatctcggctcattgcaacctctgcctcccgggttctagtgattctaccgcctcagcctcccaag

SEQ ID NO: 401800 - DNA, 2328 bp, Homo sapiens
attcttgctggtggaaagcaccgtgaaatcaaccagcggcagctctgaacgcgacgcacagcccgcgagggagcctgggcaaggacggagcgggcctgcaccggcggttgggcgggctccgggggcggggtccacctgggaccgcggcgcgcccctcaccgctcgcgccgccagggggcgccctccggagagcgcgcctaggccgcggcctgcgcttggcccctgcgggccgccgtctccgtgcccggcattcggccgctgttcggctgcgcggcggcagctcccggcggctcctggcggcgccgcagtcggaccttcgggcgcctgctggccggcggcagcagcgatggccccctgagcaggcagggagcaggcggcggcaggcgggcaagcgggcgggtgccgcagcccaggcccgggtcgcgcctctttgtttccacgggtagcggcgcagtcccgggccccgggcggaagtgagacgcgctcggcgcgggggccgcggcggccgcaccatgagcgacatccgccactcgctgctgcgccgcgatgcgctgagcgccgccaaggaggtgttgtaccacctggacatctacttcagcagccagctgcagagcgcgccgctgcccatcgtggacaagggccccgtggagctgctggaggagttcgtgttccaggtgcccaaggagcgcagcgcgcagcccaagccctcaagggaacaaagccgatgacagccggatgagcttgttgggaaaactggtctccatggcggtggctgtgtgtcgaatcccggtgttggagtgtgctgcctcctggcttcagcggacgcccgtggtttactgtgtgaggttagccaaggcccttgtagatgactactgctgtttggtgccgggatccattcagacgctgaagcagatattcagtgccagcccgagattctgctgccagttcatcacctccgttaccgcgctctatgacctgtcatcagatgacctcattccacctatggacttgcttgaaatgattgtcacctggatttttgaggacccaaggttgattctcatcacttttttaaatactccgattgcggccaatctgccaataggattcttagagctcaccccgctcgttggattgatccgctggtgcgtgaaggcacccctggcttataaaaggaaaaagaagccccccttatccaatggccatgtcagcaacaaggtcacaaaggacccgggcgtggggatggacagagactcccacctcttgtactcaaaactccacctcagcgtcctgcaagtgctcatgacgctgcagctgcacctgaccgagaagaatctgtatgggcgcctggggctgatcctcttcgaccacatggtcccgctggtagaggagatcaacaggttggcggatgaactgaaccccctcaacgcctcccaggagattgagctctcgctggaccggctggcgcaggctctgcaggtggccatggcctcaggagctctgctgtgcacgagagatgacctgagaaccttgtgctccaggctgccccataataacctcctccagctggtgatctcgggtcccgtgcagcagtcgcctcacgccgcgctccccccggggttctacccccacatccacacgcccccgctgggctacggggctgtcccggcccaccccgccgcccaccccgccctgcccacgcaccccggccacaccttcatctccggcgtgacctttcccttcaggcccatccgctaggctggcccgtgtgtgccttctgcgctctcgctggacgaagcctttcgagatggaaggggtggccggactcccagaagagaacctcggggaaggggtcgggcagcccctccccgccggcagaaccgtcttggtgtcacggagtccaggtgcttcccacccggtcgcattctttgacatgcagattggatggtggagggaagagtccagcctctgccgagagcctgctgcgtgcatttttaaaagatgccgatcctgggagcctctgttctctgcgcatttcagacacagcctgtgtggcgaggagtgtgacggcaggagccacgggtgcaagcccgtgtgtctggcctctttcctcgtgaagacgatgtgtccccgccagaaaaagtgggctccttctgcagccccgtgagctgagcccaggctgcgtagtgaccacaagcttatgtgcagcactgctcagggaggctgtcaggaattcccctcacctcggaaaggaacttctcagttttattgggggtgtctaaatttcctttcatatgttcaaataaatttttctaaacagtcaaaaaaaaa

SEQ ID NO: 401801 - DNA, 1993 bp, Homo sapiens
attcttgctggtggaaagcaccgtgaaatcaaccagcggcagctctgaacgcgacgcacagcccgcgagggagcctgggcaaggacggagcgggcctgcaccggcggttgggcgggctccgggggcggggtccacctgggaccgcggcgcgcccctcaccgctcgcgccgccagggggcgccctccggagagcgcgcctaggccgcggcctgcgcttggcccctgcgggccgccgtctccgtgcccggcattcggccgctgttcggctgcgcggcggcagctcccggcggctcctggcggcgccgcagtcggaccttcgggcgcctgctggccggcggcagcagcgatggccccctgagcaggcagggagcaggcggcggcaggcgggcaagcgggcgggtgccgcagcccaggcccgggtcgcgcctctttgtttccacgggtagcggcgcagtcccgggccccgggcggaagtgagacgcgctcggcgcgggggccgcggcggccgcaccatgagcgacatccgccactcgctgctgcgccgcgatgcgctgagcgccgccaaggaggtgttgtaccacctggacatctacttcagcagccagctgcagagcgcgccgctgcccatcgtggacaagggccccgtggagctgctggaggagttcgtgttccaggtgcccaaggagcgcagcgcgcagcccaagagactgaattcccttcaggagcttcaacttcttgaaatcatgtgcaattatttccaggagcaaaccaaggactctgttcggcagattattttttcatcccttttcagccctcaagggaacaaagccgatgacagccggatgagcttgttgggaaaactggtctccatggcggtggctgtgtgtcgaatcccggtgttggagtgtgctgcctcctggcttcagcggacgcccgtggtttactgtgtgaggttagccaaggcccttgtagatgactactgctgtttggtgccgggatccattcagacgctgaagcagatattcagtgccagcccgagattctgctgccagttcatcacctccgttaccgcgctctatgacctgtcatcagatgacctcattccacctatggacttgcttgaaatgattgtcacctggatttttgaggacccaaggttgattctcatcacttttttaaatactccgattgcggccaatctgccaataggattcttagagctcaccccgctcgttggattgatccgctggtgcgtgaaggcacccctggcttataaaaggaaaaagaagccccccttatccaatggccatgtcagcaacaaggtcacaaaggacccgggcgtggggatggacagagactcccacctcttgtactcaaaactccacctcagcgtcctgcaagtgctcatgacgctgcagctgcacctgaccgagaagaatctgtatgggcgcctggggctgatcctcttcgaccacatggtcccgctggtagaggagatcaacaggttggcggatgaactgaaccccctcaacgcctcccaggagattgagctctcgctggaccggctggcgcaggctctgcaggtggccatggcctcaggagctctgctgtgcacgagagatgacctgagaaccttgtgctccaggctgccccataataagactctgaatttcggggtcgtttgcaaggccagcttcctggggcttctgcttggaattcaggtagggcgcggtcattctcggctctgaggagactgtggccagctgttctgtgtgtcccagcgcagcagagagccgcagaggctgacgtggaggccacctgtgtgggctgcgcgcccgggagtgctacggccggagctccgtgggccacaggccccgtgcagagcccactcccacgcatcctcgcctgtggggtcctggctctgccactgcttctccgtgtccaccgcctggacccccgggtggtccgtgcctgtgtcggtgcctctcctggg

SEQ ID NO: 401802 - DNA, 1073 bp, Homo sapiens
gtacccggcgcgtcgggtgcagctgcagcgtcctgcaagtgctcatgacgctgcagctgcacctgaccgagaagaatctgtatgggcgcctggggctgatcctcttcgaccacatggtcccgctggtagaggagatcaacaggttggcggatgaactgaaccccctcaacgcctcccaggagattgagctctcgctggaccggctggcgcaggctctgcaggtggccatggcctcaggagctctgctgtgcacgagagatgacctgagaaccttgtgctccaggctgccccataataacctcctccagctggtgatctcgggtcccgtgcagcagtcgcctcacgccgcgctccccccggggttctacccccacatccacacgcccccgctgggctacggggctgtcccggcccaccccgccgcccaccccgccctgcccacgcaccccggccacaccttcatctccggcgtgacctttcccttcaggcccatccgctaggctggcccgtgtgtgccttctgcgctctcgctggacgaagcctttcgagatggaaggggtggccggactcccagaagagaacctcggggaaggggtcgggcagcccctccccgccggcagaaccgtcttggtgtcacggagtccaggtgcttcccacccggtcgcattctttgacatgcagattggatggtggagggaagagtccagcctctgccgagagcctgctgcgtgcatttttaaaagatgccgatcctgggagcctctgttctctgcgcatttcagacacagcctgtgtggcgaggagtgtgacggcaggagccacgggtgcaagcccgtgtgtctggcctctttcctcgtgaagacgatgtgtccccgccagaaaaagtgggctccttctgcagccccgtgagctgagcccaggctgcgtagtgaccacaagcttatgtgcagcactgctcagggaggctgtcaggaattcccctcacctcggaaaggaacttctcagttttattgggggtgtctaaatttcctttcatatgttcaaataaatttttctaaacagtcaaaaaaaaa

SEQ ID NO: 401803 - DNA, 271 bp, Homo sapiens
attttctggttgacaattggttgagtttggctaaagacctgggatcaaaggaatgtcaggttagcataagaggttgtggagaccaaagtcttatcatgctgatgaagcttttagctagcgggcttcagagacaacaggttgcaaaatgttccttatcagacctaaatgtgttgatgttaatgctggggaggtataatgaggaatattccacccccacgtcccatgatggcctgaacctgtctctcaggttcaattttaagagccctggctg

SEQ ID NO: 401804 - DNA, 476 bp, Homo sapiens
attctgggcaagacaagcagggccgctaacctcgttagtgttattataacaagtcgtattcctcgggcattttcgacaccattgaagccctttctcatctattatttcactttaggcatcaaattatctcattgtctaaaataaaccaggctgaatttttaaaaataataaaataaaataaaccaggctgcgggcagaaaggtttcgagggaatcttcatttctagtgaaagattactacaagtgtattcagcccacagacgttgaaatcctgccaagcgaaagccctaacaggctcctaaggatcccgcctgtctctgttggagagtggcagtgggggaggggtagtagaaaaacctggaaagagcgcttgtagcatttgcatttgttcaactgggagagaaactgccactccaggctttaggaaagtgtgagagggggcgcctcttctggttctggccctaggagggtcaaacc

SEQ ID NO: 401805 - DNA, 435 bp, Homo sapiens
cctttaaggaaaaaactggcaaccactgccttagagcaatgagggtctctacagaccaagcgtatatgtcttaggaatatggatctcctcatctttagtgtgaaaaacgatgctgacaaatgcaggaaaagaaatggaatgatggagatccacttttaacaatgctggtttatgtgcagtgaacttgacagtaactactttttaatttactgatgccatgaacagtccaaggaaaaaatccttttctagattagccgatttcactgtattaaagataatttttaatgtacatcaaaagacgtcatcaagagaatgaaaagacaagccataaactgggaaaaggtatttccctcaaaacccacaatgagtagaacccagattatgtaaagaactcctaaaaatcaatcagaataaaaaataatcaactgggaaatg

SEQ ID NO: 401806 - DNA, 1659 bp, Homo sapiens
aaagagtgtaatctcacgtatcactaaggtgctgatgagtcccaaatcataatacctaccatgccttttctgtatgacatttccagctgttggacatctttttgttttttgtttttttctcccctagacggagtcttgctctgtttcccaggctggaatgcagtggcacgatctcagctcactgcaacctctgcctcccaggttcaagcgattcttctggtctcagcctccggagtagctgggattataggcacatgccaccacgcccagccaatttttgtatttttagtagagatggggtttcaccatgttggccaggcttgtctcaaactcctgaactcaggtgatccaccagcctcggcctcccaaagtgctgggattacaggcatgagccaccacgcccggccttttttttttttcttttctttttgagatggagtcttgccctgtcgcccaggctggagtgcaatggcgcgatctcggctcgctgcaacctccgcttcccaggttcaagcgattctcctgcctcagcctcccgagtgtgggattacaggtgcgcaccaccacgcccagctaatttttttgtatttttagtagagacggggtttcaccatgttggtcaggctggtcttgaactcctgacctcgtgatccacctgctttggcctcccaaagtgctgggattacagacatgagccaccacccccagctgctgttagacatctttatctggatgtcctacagataactcaacatgacttcactggttgtccattgcagttaaagcatgactgtcctccaaagctagaaacatgagaatcatctttaacaaattgggtatttctttaattcaacagatattcttttattacttgccattctgctaggcctgctgagagctggggatacagtgagagctggggaacagaacagggatggtcctaatctttatggagaaccattgggtggtccattgggtgagatggacatttctccaggaatcccacaaaaatggaatcatgaacttcaagaagaggtcatgtagggaaaggacacaatggggtaagagtatataacagagggcctgacttagtgggaagagagggtggacaggggagactcaaaatggcttaagcaaaatatcaaagaagagctaagtgaaagtagaatattgaggaaagaatattccctgcagaagccctgtgttgttttttttttttttcgatttataaatagtttatcctgttcacattatgcagaatttcagtgtcgttaatccacaatgttagtacggtaacagaaacataaaggagaaaaaaggcaggtggggggaggttcatagtgtggcctgacatagtctaagggttctctcctgtagtatgcatctcctgcaggcaagtattaatatcacttcattgtttgaaggacagtacactatccaggattcatttattgttcaggtgtcttttctaaagtatgagaaaacaggaataaattcaataatgaatatctgcaattcaaaccaatttaactacaggtcagtggtgtctttcttatctattatcacaaacatcccagttgcctccatctaaaaatttctttcaaaagttaagacacaattaattatatcttattaattccctcaaaagcaaaaaaaaac

SEQ ID NO: 401807 - DNA, 539 bp, Homo sapiens
caaacatatccatcatctcaaatttgtgtgtcagtatctgtgtgtgtatgcatgtgtgtgtgtgtgtgtgtttgttttgggtaagaacacttaacatgatatctgtcctcaacgtttttcaaactgcacaatgtcatattgttaatgataggtactacgttgtgcaatagatctctataactcattcatcttgcataactgaaactttatacacatcacagaacaattcttcatttccctcttctccagcccctggcaactatcattctattctctgcttttatgagtttgacaattttagataccacatatatatggaatcatgcaatatttgtcctgtgatgggcttagcataatgtctcctaggttcatctatgttgttacaaatggcaggatttccttttcctttaaggctgaaaaatatgacatatatagtcatccctcagtatccacagggattggtttcaagacctccatggataccaaagtctacagatgctcaaatatctcatatattaataaaatgatatagaattaat

SEQ ID NO: 401808 - DNA, 748 bp, Homo sapiens
ggcgatttgacattgccatcacgttcaagcatgtgatcattttcctaagtccaggatagatcctagggttctctctctagattttaaaagggtcaccaggtgactgatgatttgctagggatggaaaccactgttatagggtccactcctttagatctatgtctaattctttgtggtggttgtttttgtttttgggagttaggaatgtgttaaaaagagctgatcagagcttttaacatgctcatcagagaaacacgcatgatcagtaaattcagcaattttcaggaggttcacagatgcccggtggcaaagccctgaatatcatggtaagacggggagagcatgaactaatgttaaggaatgggttttgatgttgctactgaacaaagagcctttggagaatgcatgcaagactgggtggaaagtaggttctatatagttctgggcactgttcagtgtgctgccctaattctctagtttagtaatcccgtgaaactccacgtgagcactttattaggacaaatgttttcaatggaagctttacaccattacatgccactataaaagacttgcttctggaagcaatgagtagacaagaaaaagggattcacgaggtctgatggtgactcattctaaactttaaacagtgatcttcagaaattcatggactgcagcttgctgccggcactcatttaatgttacataaacatgctctttgagtctgaagtaaatctgattttcaatgtga

SEQ ID NO: 401809 - DNA, 1056 bp, Homo sapiens
ccagcagtggaagcattcctgtctggactccttcagagataaggaaattatcttgacaactcaggggcaggccacagatgctcagataccagtgtctggaaggtctcatccctttgagccacactgtcctaagaagaactggatctggtagtaacatgctggcacctgggtctcttgttgataaaggggaaacctctaaattttgtactacatggaatgtggtccctgattgctggctctgtggtctgcagacctgttgatgtagctcatccaagactgcttagacactctcctgaaggaccagttggaagatttcttatctagggtgtcctaaaaagagatgttacatttcttgtggtcatttaacattggcatcctctctattgggcagctctgtcgggctaagtctgttcagaccattcatttcttcttcgttctccaaaagatggtgagcaggtagtcgccattcttagttgaaattgcccttcaggtttttatttcccgaattacgtaatccttacattattttctcttgaaaatctttgctaagttctgcatactcatcttcagttgctatgcacagaatcaagtcttgtcagagtaacgctcaagtccagcatcttcccttgtgtagatcacctgtatttatttgcctgcttgtaccagcattggtggtgtgagtgggagcctaagtgacctgtcagtgtcacagcgagtcctgagccctgtgtgtgtcctgagactcaggctgtgcagcgggttcgctgagatgctgagcctccatgttggggtcagccaggaccccagtgcgtcatgccagttgtttcattttctctctaggctaaaagttgttgttgttgttgttgttgtttgagacagagtttcgctcttgttgcccaggctggagtgcaatggtgtgatcttggctcactgcaacctccgcttcccaggttcaagtgactttcccgccctagtctctcaagtagctgggactacaggcatgtgctaccatgcctggctaattttgttttgtattttattttttttgagacggag

SEQ ID NO: 401810 - DNA, 676 bp, Homo sapiens
tatctcccttacgtctcatctcccttaccgtctcacctcccttacgtctcatctcccttaccgtctcatctcccttaccgtctcatctcccttaccgtctcatctcccttaccgtctcatctcccttaccgtaatccttacattattttctcttgaaaatctttgctaagttctgcatactcatcttcagttgctatgcacagaatcaagtcttgtcagagtaacgctcaagtccagcatcttcccttgtgtagatcacctgtatttatttgcctgcttgtaccagcattggtggtgtgagtgggagcctaagtgacctgtcagtgtcacagcgagtcctgagccctgtgtgtgtcctgagactcaggctgtgcagcgggttcgctgagatgctgagcctccatgttggggtcagccaggaccccagtgcgtcatgccagttgtttcattttctctctaggctaaaagttgttgttgttgttgttgttgtttgagacagagtttcgctcttgttgcccaggctggagtgcaatggtgtgatcttggctcactgcaacctccgcttcccaggttcaagtgactttcccgccctagtctctcaagtagctgggactacaggcatgtgctaccatgcctggctaattttgttttgtattttattttttttgagacggag

SEQ ID NO: 401811 - DNA, 539 bp, Homo sapiens
cagttgctatgcacagaatcaagtcttgtcagagtaacgctcaagtccagcatcttcccttgtgtagatcacctgtatttatttgcctgcttgtaccagcattggtggtgtgagtgggagcctaagtgacctgtcagtgtcacagcgagtcctgagccctgtgtgtgtcctgagactcaggctgtgcagcgggttcgctgagatgctgagcctccatgttggggtcagccaggaccccagtgcgtcatgccagttgtttcattttctctctaggctaaaagttgttgttgttgttgttgttgtttgagacagagtttcgctcttgttgcccaggctggagtgcaatggtgtgatcttggctcactgcaacctccgcttcccaggttcaagtgactttcccgccctagtctctcaagtagctgggactacaggcatgtgctaccatgcctggctaattttgttttgtattttattttttttgagacggagtcttgctctgtcgcccaggctggagtgcaatggtgcgatcttggctcact

SEQ ID NO: 401812 - DNA, 382 bp, Homo sapiens
agaaaagtagctgcagccgccacctggcagccttgggacgctggctcaggccctgagtgcccccttgggtgccccgccccccaacagagctcctgaggctgaggtcaggctgcctgccttggctgccaccaacgcacagagctgcatgcaagccgggaggcgggagcacggccggcctcaccctgtgagagcagagtcacaggctccgggctgttgttgtggggagggcctggggcttcccgtggccactgctggcctggctgggcctcctcagccgtggccctcggggcctgcacctcagagcggtgactggcctcactgtgacccacggacgtctactgtgacttcctccttagctccctgaagacacccagggctgggc

SEQ ID NO: 401813 - DNA, 377 bp, Homo sapiens
gtcgaggtggacagatcacctgaggtcaggagtttgaggccagcctggccaacatggtgaaaccccgtctctactaaaaatacaaaaattagccaggtgtggtggcacgcgcctgtaatcccagctactcgggaggctgagacaggagactcacttgaacccaggaggtggaggttgcactgagccaagattgtgccactgcactccagcctgggtgacagagcgagactccatctcaaaaaaagaaaagaaaaaaaaagacccacttcttgactgtttccaactatcttgttcttccttaacatagtgtgcatatctgttaacagcagcacttataattatagtatcattgctgtaattaatatccttggctgtct

SEQ ID NO: 401814 - DNA, 363 bp, Homo sapiens
ccacatttgcaggaggctccaaaggctccctctgttaccctactctaacaggtagctgaagcatatctttttaagctcccatgtttagtttttcactaatatggatagacgcttttctaaactaggacacacgtgactgtgtacggaaacaaggagtttgatagtcactatttctagaagattctgggtcattgtatggatgtcagtggctggcctgggcattgatgtggatgaaatggtgtggattaggggtctgatgcagtggctgttttaacctttaaacccattggcactgataccaactttggcttcagaaatactgaaattgaggtgccagtggtacagtcccatggagatgtctaa

SEQ ID NO: 401815 - DNA, 206 bp, Homo sapiens
aggaagactttagcactgaggtcagtcttcacctgcacttcagccatccatttccatggctgcactccaaaccagtcttacctagaactgctatgctttattataagtaaaactgctccacttttaaaaccttaaatataattagctgagcgtggtggctcatgcctgtaatcctagccacccgggaggctgaggcaggagaatcg

SEQ ID NO: 401816 - DNA, 244 bp, Homo sapiens
cactgtgctccggccaacagttggttttgtgtgctctactgtgctgactctgaggcatgatgtattaaaagaatgatcccgagtcctgcccgctgctgtctactgacctgcttggagctcacctgcctgtacccagcatctgtcactgcctggagtagttccttacttttggcattactgagaaaaggcagggtgcgtgtcacgtaagtgtaaaaccaaaacaaaccagaccccaaaaaactaa

SEQ ID NO: 401817 - DNA, 446 bp, Homo sapiens
agacccctggaacctgtggatatgtcaggtttcatggccatgggaattgacattatacaaggaattcaggttgctgatcaactgatgttaaaataaggaatatattcaggtttatctgatggttccagtgtaataatcagggtccgtaaaagtggaagaagcaggcagagaagagatcagaaggagatgtttgaaggaggtcagagagatgcaacgtgagaaggactcagctactgctgcctttgacaatggaggaaggggccatgaacttaaggaacgcagcagtctctgaaagctggaaaaggagaggaaatgggttttcccctggagcctccagaaaagagcacagccctgccaatactttgactttagtccattgagacctgtgtcagacttctgacttctagaactatcagagaataaatgtgtattaagccaaaaaaaaa

SEQ ID NO: 401818 - DNA, 5159 bp, Homo sapiens
  misc_feature (225)..(225): n is a, c, g, or t
  misc_feature (297)..(297): n is a, c, g, or t
  misc_feature (1002)..(1002): n is a, c, g, or t
  misc_feature (1043)..(1043): n is a, c, g, or t
  misc_feature (2431)..(2431): n is a, c, g, or t
  misc_feature (2659)..(2659): n is a, c, g, or t
taatactcctttattccctgttttaaaaatttttttaaatttgatacaataattatacataataatggagtaccatgtgagattcaatccacatatacattgtgaaatgatcaaattaggatagttagcatgcacatcacccccaaataattattacttttgtggtgagaacacttaaaattgtctcttttagaaatatacgttattattaaccatagtcacctngctgtgcaatagaacaccagaacttattcctcctaaatgtaactttttacccattgaccactccctcctcanccccctctctcctccccacccctggtaaccactgttctgttatctcctatgatagcaactttttagcttctgcatgtgagattgtacggtagttgcctttctgtgcctggattatttcatttagcataatgtccttcgggtatatccctgttgctgcaaaagacaggatttctctctctttttctggttgaatagtattccattgtcagagaatgttgtaagactaggaaaggaacactgcaggctggagccctggggaaatggtctgaggcaggtggtgggactagagctggggtctggcaaacaggctgggtttgattgtcagcataatagagagcactcatgtgccagctgggtgggaggagcagccgagtgaagaaggggaagcctctcaggaagcatgtgcagggtttatggtaatgagcagaccagcaggtacgtagtgggagaggggtgtgatggggcagaggaacttacgttatgatagtacaagacagaggttgagcctcattttaataggcattgtggtgggtgttgaatagtgatggaatgtatgggtctggaatcaggctgcctggtcaagggctctgaaacatgagtgtgcatcagaatcacctcgaggcttgttaaaggataggctgtggaccacatctcctcagttgctgattcagtgggtgtgggtggggcctgagaattcacatttcncactggtgatgctgctgttactgattgggaccacatttggngaacactggtctagaattgagaggttggcaaaccttctctgttaagaggtagatagtaaatattttaggccttctgggctacaaagagtatctgttacatattttttattgcttttcatgacccattaagcatatatatatcattctctgccatatacaaacaggctgttgggggagtgaggatgatgtagggaaggtggggcatggtttaataacccctgggccatgcctagatgatcagtcctctgccacatagctggctgacctttgccaagttaatcaccttttacctttattttctcatgtttctaataaaacagagacgataatattcatacttcttaccatatagaacttctgaggattcagtgagcaaagccacaaaagatggtatgtcacaatatctgggatatagctagaatttataatttatttttactctgttgataggcaatgggaaaacagtaagaggcagaccaacagtgatccagggctctgaaagctaattgcttcaagatcctgctaccattttcttttgggccgcttgcaaagaagaatcctttgactgaagcatgtatgtacactctgaagtacagcctgggttagtctcttataagggatcggatcattgctcagctctcccttgagtggcacttagaaaatggcgctattcgtaagctgactggtattgggcccaggactctggctgaaggggtgggcatgctggtaaccatttgcaacctatgctcaggtcctacttgttgggaagccctgattgagaagagtggcctggtctgtgctggcattagataggatctggctgcattaatattgaaactactctgccttttaatgtctcattttgcctcatggtgggagtgaaagtgagaaccacagaaaatctgcctgccaggtgttccacatttcttgtgctacagcatgcaagtgagcagtgaggtgtaccttttcctcatgtagctgggaaagcaatacccctgcttgtacctctggcatatcttctctgtgctggtgcacctagagaggttgcctggtggccctgagagagccatctcatcactaaacactgatggtgaaagctggccatgctcaaataagatgtagcaatctacctcttctttgtctagttacccccaagggggcatccactttcttgctcacctcaccagttgcatgttctagtccttgccagaagcacataataatgactttgtaagcttaagttacaggcacacaaaagggcctgatggtgatatgactccaccctccccgtttttgctgacattccgccaaatatccttctgtctcctccccaccttgcaaaacaaacttcctgttttgaatttggtccaggctggaacagccccacnacacctgttaacacacgcagacgcacacttcccccttcataattgcttagcttcttgttgcctagccagatttcccctcagcttacagttcctgaatcataagatattgaaccagcaaatttaagagttgacattttacttagaggtattcaagtgaaaacatggcttctggtttattttgctgtattgtgccatgaccacttggctaattcttctcctccttcacancagaatggaagtgaggaaaggcaaccagctgacacaggagccagagtgagaccagcagactctcacactcaacctacaccatgaatttgtgtctatcttctacgcgttaagagccaaggacaggtgaagttgccagagagcaatggctctcttcactccgtggaagttgtcctctcagaagctgggctttttcctggtgacttttggcttcatttggggtatgatgcttctgcactttaccatccagcagcgaactcagcctgaaagcagctccatgctgcgcgagcagatcctggacctcagcaaaaggtacatcaaggcactggcagaagaaaacaggaatgtggtggatgggccatacgctggagtcatgacagcttatgatctgaagaaaacccttgctgtgttattagataacattttgcagcgcattggcaagttggagtcgaaggtggacaatcttgttgtcaatggcaccggaacaaactcaaccaactccactacagctgttcccagcttggttgcacttgagaaaattaatgtggcagatatcattaacggagctcaagaaaaatgtgtattgcctcctatggacggctaccctcactgtgagggaaagatcaagtggatgaaagacatgtggcgttcagatccctgctacgcagactatggagtggatggatccacctgctctttttttatttacctcagtgaggttgaaaattggtgtcctcatttaccttggagagcaaaaaatccctacgaagaagctgatcataattcattggcggaaattcgtacagattttaatattctctacagtatgatgaaaaagcatgaagaattccggtggatgagactacggatccggcgaatggctgacgcatggatccaagcaatcaagtccctggcagaaaagcagaaccttgaaaagagaaagcggaagaaagtcctcgttcacctgggactcctgaccaaggaatctggatttaagattgcagagacagctttcagtggtggccctcttggtgaattagttcaatggagtgatttaattacatctctgtacttactgggccatgacattaggatttcagcttcactggctgagctcaaggaaatcatgaagaaggttgtaggaaaccgatctggctgcccaactgtaggagacagaattgttgagctcatttacattgatattgtaggacttgctcaattcaagaaaactcttggaccatcctgggttcattaccagtgcatgctccgagtccttgattcatttggtactgaacccgaatttaatcatgcaaattatgcccaatcgaaaggccacaagaccccttggggaaaatggaatctgaaccctcagcagttttataccatgttccctcataccccagacaacagctttctggggtttgtggttgagcagcacctgaactccagtgatatccaccacattaatgaaatcaaaaggcagaaccagtcccttgtgtatggcaaagtggatagcttctggaagaataagaagatctacttggacattattcacacatacatggaagtgcatgcaactgtttatggctccagcacaaagaatattcccagttacgtgaaaaaccatggtatcctcagtggacgggacctgcagttccttcttcgagaaaccaagttgtttgttggacttgggttcccttacgagggcccagctcccctggaagctatcgcaaatggatgtgcttttctgaatcccaagttcaacccacccaaaagcagcaaaaacacagactttttcattggcaagccaactctgagagagctgacatcccagcatccttacgctgaagttttcatcgggcggccacatgtgtggactgttgacctcaacaatcaggaggaagtagaggatgcagtgaaagcaattttaaatcagaagattgagccatacatgccatatgaatttacgtgcgaggggatgctacagagaatcaatgctttcattgaaaaacaggacttctgccatgggcaagtgatgtggccacccctcagcgccctacaggtcaagcttgctgagcccgggcagtcctgcaagcaggtgtgccaggagagccagctcatctgcgagccttctttcttccagcacctcaacaaggacaaggacatgctgaagtacaaggtgacctgccaaagctcagagctggccaaggacatcctggtgccctcctttgaccctaagaataagcactgtgtgtttcaaggtgacctcctgctcttcagctgtgcaggcgcccaccccaggcaccagagggtctgcccctgccgggacttcatcaagggccaggtggctctctgcaaagactgcctatagcagctacctgctcagccctgcaccatgctgctggggaagacagtggccccagccccgtcaggcagggccagggacagaagtcatgcagggactctggcaagagcctgaactttttcgtagaaggttctgaat

SEQ ID NO: 401819 - DNA, 4114 bp, Homo sapiens
  misc_feature (225)..(225): n is a, c, g, or t
  misc_feature (297)..(297): n is a, c, g, or t
  misc_feature (1002)..(1002): n is a, c, g, or t
  misc_feature (1043)..(1043): n is a, c, g, or t
taatactcctttattccctgttttaaaaatttttttaaatttgatacaataattatacataataatggagtaccatgtgagattcaatccacatatacattgtgaaatgatcaaattaggatagttagcatgcacatcacccccaaataattattacttttgtggtgagaacacttaaaattgtctcttttagaaatatacgttattattaaccatagtcacctngctgtgcaatagaacaccagaacttattcctcctaaatgtaactttttacccattgaccactccctcctcanccccctctctcctccccacccctggtaaccactgttctgttatctcctatgatagcaactttttagcttctgcatgtgagattgtacggtagttgcctttctgtgcctggattatttcatttagcataatgtccttcgggtatatccctgttgctgcaaaagacaggatttctctctctttttctggttgaatagtattccattgtcagagaatgttgtaagactaggaaaggaacactgcaggctggagccctggggaaatggtctgaggcaggtggtgggactagagctggggtctggcaaacaggctgggtttgattgtcagcataatagagagcactcatgtgccagctgggtgggaggagcagccgagtgaagaaggggaagcctctcaggaagcatgtgcagggtttatggtaatgagcagaccagcaggtacgtagtgggagaggggtgtgatggggcagaggaacttacgttatgatagtacaagacagaggttgagcctcattttaataggcattgtggtgggtgttgaatagtgatggaatgtatgggtctggaatcaggctgcctggtcaagggctctgaaacatgagtgtgcatcagaatcacctcgaggcttgttaaaggataggctgtggaccacatctcctcagttgctgattcagtgggtgtgggtggggcctgagaattcacatttcncactggtgatgctgctgttactgattgggaccacatttggngaacactggtctagaattgagaggttggcaaaccttctctgttaagaggtagatagtaaatattttaggccttctgggctacaaagagtatctgttacatattttttattgcttttcatgacccattaagcatatatatatcattctctgccatatacaaacaggctgttgggggagtgaggatgatgtagggaaggtggggcatggtttaataacccctgggccatgcctagatgatcagtcctctgccacatagctggctgacctttgccaagttaatcaccttttacctttattttctcatgtttctaataaaacagagacgataatattcatacttcttaccatatagaacttctgaggattcagtgagcaaagccacaaaagatggtatgtcacaatatctgggatatagctagaatttataatttatttttactctgttgataggcaatgggaaaacagtaagaggcagaccaacagtgatccagggctctgaaagctaattgcttcaagatcctgctaccattttcttttgggccgcttgcaaagaagaatcctttgactgaagcataatggaagtgaggaaaggcaaccagctgacacaggagccagagtgagaccagcagactctcacactcaacctacaccatgaatttgtgtctatcttctacgcgttaagagccaaggacaggtgaagttgccagagagcaatggctctcttcactccgtggaagttgtcctctcagaagctgggctttttcctggtgacttttggcttcatttggggtatgatgcttctgcactttaccatccagcagcgaactcagcctgaaagcagctccatgctgcgcgagcagatcctggacctcagcaaaaggtacatcaaggcactggcagaagaaaacaggaatgtggtggatgggccatacgctggagtcatgacagcttatgatctgaagaaaacccttgctgtgttattagataacattttgcagcgcattggcaagttggagtcgaaggtggacaatcttgttgtcaatggcaccggaacaaactcaaccaactccactacagctgttcccagcttggttgcacttgagaaaattaatgtggcagatatcattaacggagctcaagaaaaatgtgtattgcctcctatggacggctaccctcactgtgagggaaagatcaagtggatgaaagacatgtggcgttcagatccctgctacgcagactatggagtggatggatccacctgctctttttttatttacctcagtgaggttgaaaattggtgtcctcatttaccttggagagcaaaaaatccctacgaagaagctgatcataattcattggcggaaattcgtacagattttaatattctctacagtatgatgaaaaagcatgaagaattccggtggatgagactacggatccggcgaatggctgacgcatggatccaagcaatcaagtccctggcagaaaagcagaaccttgaaaagagaaagcggaagaaagtcctcgttcacctgggactcctgaccaaggaatctggatttaagattgcagagacagctttcagtggtggccctcttggtgaattagttcaatggagtgatttaattacatctctgtacttactgggccatgacattaggatttcagcttcactggctgagctcaaggaaatcatgaagaaggttgtaggaaaccgatctggctgcccaactgtaggagacagaattgttgagctcatttacattgatattgtaggacttgctcaattcaagaaaactcttggaccatcctgggttcattaccagtgcatgctccgagtccttgattcatttggtactgaacccgaatttaatcatgcaaattatgcccaatcgaaaggccacaagaccccttggggaaaatggaatctgaaccctcagcagttttataccatgttccctcataccccagacaacagctttctggggtttgtggttgagcagcacctgaactccagtgatatccaccacattaatgaaatcaaaaggcagaaccagtcccttgtgtatggcaaagtggatagcttctggaagaataagaagatctacttggacattattcacacatacatggaagtgcatgcaactgtttatggctccagcacaaagaatattcccagttacgtgaaaaaccatggtatcctcagtggacgggacctgcagttccttcttcgagaaaccaagttgtttgttggacttgggttcccttacgagggcccagctcccctggaagctatcgcaaatggatgtgcttttctgaatcccaagttcaacccacccaaaagcagcaaaaacacagactttttcattggcaagccaactctgagagagctgacatcccagcatccttacgctgaagttttcatcgggcggccacatgtgtggactgttgacctcaacaatcaggaggaagtagaggatgcagtgaaagcaattttaaatcagaagattgagccatacatgccatatgaatttacgtgcgaggggatgctacagagaatcaatgctttcattgaaaaacaggacttctgccatgggcaagtgatgtggccacccctcagcgccctacaggtcaagcttgctgagcccgggcagtcctgcaagcaggtgtgccaggagagccagctcatctgcgagccttctttcttccagcacctcaacaaggacaaggacatgctgaagtacaaggtgacctgccaaagctcagagctggccaaggacatcctggtgccctcctttgaccctaagaataagcactgtgtgtttcaaggtgacctcctgctcttcagctgtgcaggcgcccaccccaggcaccagagggtctgcccctgccgggacttcatcaagggccaggtggctctctgcaaagactgcctatagcagctacctgctcagccctgcaccatgctgctggggaagacagtggccccagccccgtcaggcagggccagggacagaagtcatgcagggactctggcaagagcctgaactttttcgtagaaggttctgaat

SEQ ID NO: 401820 - DNA, 3433 bp, Homo sapiens
  misc_feature (225)..(225): n is a, c, g, or t
  misc_feature (297)..(297): n is a, c, g, or t
  misc_feature (1002)..(1002): n is a, c, g, or t
  misc_feature (1043)..(1043): n is a, c, g, or t
taatactcctttattccctgttttaaaaatttttttaaatttgatacaataattatacataataatggagtaccatgtgagattcaatccacatatacattgtgaaatgatcaaattaggatagttagcatgcacatcacccccaaataattattacttttgtggtgagaacacttaaaattgtctcttttagaaatatacgttattattaaccatagtcacctngctgtgcaatagaacaccagaacttattcctcctaaatgtaactttttacccattgaccactccctcctcanccccctctctcctccccacccctggtaaccactgttctgttatctcctatgatagcaactttttagcttctgcatgtgagattgtacggtagttgcctttctgtgcctggattatttcatttagcataatgtccttcgggtatatccctgttgctgcaaaagacaggatttctctctctttttctggttgaatagtattccattgtcagagaatgttgtaagactaggaaaggaacactgcaggctggagccctggggaaatggtctgaggcaggtggtgggactagagctggggtctggcaaacaggctgggtttgattgtcagcataatagagagcactcatgtgccagctgggtgggaggagcagccgagtgaagaaggggaagcctctcaggaagcatgtgcagggtttatggtaatgagcagaccagcaggtacgtagtgggagaggggtgtgatggggcagaggaacttacgttatgatagtacaagacagaggttgagcctcattttaataggcattgtggtgggtgttgaatagtgatggaatgtatgggtctggaatcaggctgcctggtcaagggctctgaaacatgagtgtgcatcagaatcacctcgaggcttgttaaaggataggctgtggaccacatctcctcagttgctgattcagtgggtgtgggtggggcctgagaattcacatttcncactggtgatgctgctgttactgattgggaccacatttggngaacactggtctagaattgagaggttggcaaaccttctctgttaagaggtagatagtaaatattttaggccttctgggctacaaagagtatctgttacatattttttattgcttttcatgacccattaagcatatatatatcattctctgccatatacaaacaggctgttgggggagtgaggatgatgtagggaaggtggggcatggtttaataacccctgggccatgcctagatgatcagtcctctgccacatagctggctgacctttgccaagttaatcaccttttacctttattttctcatgtttctaataaaacagagacgataatattcatacttcttaccatatagaacttctgaggattcagtgagcaaagccacaaaagatggtatgtcacaatatctgggatatagctagaatttataatttatttttactctgttgataggcaatgggaaaacagtaagaggcagaccaacagtgatccagggctctgaaagctaattgcttcaagatcctgctaccattttcttttgggccgcttgcaaagaagaatcctttgactgaagcataatggaagtgaggaaaggcaaccagctgacacaggagccagagtgagaccagcagactctcacactcaacctacaccatgaatttgtgtctatcttctacgcgttaagagccaaggacaggtgaagttgccagagagcaatggctctcttcactccgtggaagttgtcctctcagaagctgggctttttcctggtgacttttggcttcatttggggtatgatgcttctgcactttaccatccagcagcgaactcagcctgaaagcagctccatgctgcgcgagcagatcctggacctcagcaaaaggtacatcaaggcactggcagaagaaaacaggaatgtggtggatgggccatacgctggagtcatgacagcttatgatctgaagaaaacccttgctgtgttattagataacattttgcagcgcattggcaagttggagtcgaaggtggacaatcttgttgtcaatggcaccggaacaaactcaaccaactccactacagctgttcccagcttggttgcacttgagaaaattaatgtggcagatatcattaacggagctcaagaaaaatgtgtattgcctcctatggacggctaccctcactgtgagggaaagatcaagtggatgaaagacatgtggcgttcagatccctgctacgcagactatggagtggatggatccacctgctctttttttatttacctcagtgaggttgaaaattggtgtcctcatttaccttggagagcaaaaaatccctacgaagaagctgatcataattcattggcggaaattcgtacagattttaatattctctacagtatgatgaaaaagcatgaagaattccggtggatgagactacggatccggcgaatggctgacgcatggatccaagcaatcaagtccctggcagaaaagcagaaccttgaaaagagaaagcggaagaaagtcctcgttcacctgggactcctgaccaaggaatctggatttaagattgcagagacagctttcagtggtggccctcttggtgaattagttcaatggagtgatttaattacatctctgtacttactgggccatgacattaggatttcagcttcactggctgagctcaaggaaatcatgaagaaggttgtaggaaaccgatctggctgcccaactgtaggagacagaattgttgagctcatttacattgatattgtaggacttgctcaattcaagaaaactcttggaccatcctgggttcattaccagtgcatgctccgagtccttgattcatttggtactgaacccgaatttaatcatgcaaattatgcccaatcgaaaggccacaagaccccttggggaaaatggaatctgaaccctcagcagttttataccatgttccctcataccccagacaacagctttctggggtttgtggttgagcagcacctgaactccagtgatatccaccacattaatgaaatcaaaaggcagaaccagtcccttgtgtatggcaaagtggatagcttctggaagattgagctccttgaggagatgataatggctgacattttagtgcttcctgtgttccaggcatggccttcacaatgactatgaagtaaatactattattaaccccacttttgagtgaaagaactgaagcagatagaggtaaaggttcctcaggtggtcaggatttgaattacatcatgtattgtagccaacacactggactacaaggaatggattctctcttggtaatttcctcctctgtctccaacccatcctctcaaatcccaaaagcctaaataaatacatttatgttggtgtggt

SEQ ID NO: 401821 - DNA, 1727 bp, Homo sapiens
gcagaagcaggaagcagcagaagcaggaagcggcagaagcaggaagcagtatgatgaaaaagcatgaagaattccggtggatgagactacggatccggcgaatggctgacgcatggatccaagcaatcaagtccctggcagaaaagcagaaccttgaaaagagaaagcggaagaaagtcctcgttcacctgggactcctgaccaaggaatctggatttaagattgcagagacagctttcagtggtggccctcttggtgaattagttcaatggagtgatttaattacatctctgtacttactgggccatgacattaggatttcagcttcactggctgagctcaaggaaatcatgaagaaggttgtaggaaaccgatctggctgcccaactgtaggagacagaattgttgagctcatttacattgatattgtaggacttgctcaattcaagaaaactcttggaccatcctgggttcattaccagtgcatgctccgagtccttgattcatttggtactgaacccgaatttaatcatgcaaattatgcccaatcgaaaggccacaagaccccttggggaaaatggaatctgaaccctcagcagttttataccatgttccctcataccccagacaacagctttctggggtttgtggttgagcagcacctgaactccagtgatatccaccacattaatgaaatcaaaaggcagaaccagtcccttgtgtatggcaaagtggatagcttctggaagaataagaagatctacttggacattattcacacatacatggaagtgcatgcaactgtttatggctccagcacaaagaatattcccagttacgtgaaaaaccatggtatcctcagtggacgggacctgcagttccttcttcgagaaaccaagttgtttgttggacttgggttcccttacgagggcccagctcccctggaagctatcgcaaatggatgtgcttttctgaatcccaagttcaacccacccaaaagcagcaaaaacacagactttttcattggcaagccaactctgagagagctgacatcccagcatccttacgctgaagttttcatcgggcggccacatgtgtggactgttgacctcaacaatcaggaggaagtagaggatgcagtgaaagcaattttaaatcagaagattgagccatacatgccatatgaatttacgtgcgaggggatgctacagagaatcaatgctttcattgaaaaacaggacttctgccatgggcaagtgatgtggccacccctcagcgccctacaggtcaagcttgctgagcccgggcagtcctgcaagcaggtgtgccaggagagccagctcatctgcgagccttctttcttccagcacctcaacaaggacaaggacatgctgaagtacaaggtgacctgccaaagctcagagctggccaaggacatcctggtgccctcctttgaccctaagaataagcactgtgtgtttcaaggtgacctcctgctcttcagctgtgcaggcgcccaccccaggcaccagagggtctgcccctgccgggacttcatcaagggccaggtggctctctgcaaagactgcctatagcagctacctgctcagccctgcaccatgctgctggggaagacagtggccccagccccgtcaggcagggccagggacagaagtcatgcagggactctggcaagagcctgaactttttcgtagaaggttctgaat

SEQ ID NO: 401822 - DNA, 412 bp, Homo sapiens
atttgaagtataaccattgctattcttctgagtaattttgcttggaaatgcctatattctgtggggatcatagtttacatatgttttgccttttctagaaagtgtaagatgctttcagtggcgaacaggaggactgtgttcatgcacttccttttggatatttgtcctgtcagtatattagatcacattgtttgctcacgccaataaggttaggaaccgtggatctcagctgagacctgaccagatcctgtggcctcgcattccctcctaccccttagttttcctcctcctccaccccacccaacccccatatgcatagaaccctgggttgctgagtcctgtgcacagccatgagctagtttgtgatgggaaggattcattctgactgaccagacctgggtaacatctacct

SEQ ID NO: 401823 - DNA, 83 bp, Homo sapiens
ctattgggggaagtggggaggttggggaagatcccagagttcctaagtatattaagattaaaatatttccattccttaatact

SEQ ID NO: 401824 - DNA, 286 bp, Homo sapiens
tatttttaaaaatgaatccccccagctgacatgaacataccaaagcatgcatgcacacagtgtttacttttttcagtaatagtatgtgctgggaaaactttacaggaattacagcttatttactgctgcttgaaacagagaaaagccttgtcatgtcttcttagaaaggcaccccttgagatactactgaaattggcttctctgtttcaaaacactcttctgagatgctcagtcccataccccttccttccaatatcctttgttagaagcctgaagtcagtatgtg

SEQ ID NO: 401825 - DNA, 5355 bp, Homo sapiens
  misc_feature (2773)..(2773): n is a, c, g, or t
gcaattaattataggcttgtaattccacatctgaagtcaaagatctattggaacagaaaagcaagttgaccatagaagtggctgaacttcagagacagcttcaactggaagtcaagaatcaacagaacattaaagaagagagagagaggatgagagcaaacctagaagagctccgaagccaacacaacgaaaaggtggaggagaactccacattgcagcaacgactggaagaaagtgaaggggagctccggaagaatctggaggagctattccaggtgaagatggaacgggagcagcatcagactgagatcagggatctccaggaccagctctcagaaatgcacgatgaactggacagtgcaaagcgatcggaggacagggagaagggagctctgattgaggagctcttacaggcaaaacaggatcttcaagatctgctgattgccaaagaggagcaagaagacctcttgagaaagcgagagcgtgaactcaccgccctgaagggagccctgaaagaagaggtttccagccatgatcaggagatggacaagctgaaggagcaatatgatgctgagttgcaggccctgagggagagtgtggaagaagcaaccaagaatgtcgaggtcttggcgagcaggagcaacacttcagagcaagaccaggcggggactgaaatgcgcgtgaagcttctgcaggaggagaatgagaagctgcagggaagaagcgaagagctggagcggagagttgctcagcttcaaaggcagatcgaggacctgaaaggcgatgaagccaaggcgaaggaaacgctgaagaagtacgagggagaaatacgacagttagaggaggcccttgtgcacgccagaaaggaagaaaaagaagctgtgtcagccagaagggccctggagaatgaactggaggctgctcagggaaatctgagtcagactacccaggagcagaagcagttgtctgagaagctcaaagaggagagtgagcagaaggagcagctaagaaggttgaagaacgagatggagaatgagcggtggcacctgggcaaaaccattgagaaactgcagaaggagatggcagacattgttgaggcctcccgtacctcaaccctggagctccagaaccagctggatgagtataaggagaaaaaccgcagggagctcgcagaaatgcaaagacagttgaaggagaaaacgctggaggcagaaaagtcccgactgacagccatgaaaatgcaggatgagatgcgtctgatggaggaagagttacgggactaccagagagctcaggatgaagcactcacaaaaaggcagcttctggagcagacgctgaaggacctggagtatgagctggaagccaagagtcacctcaaagatgaccgcagcaggctggtcaagcagatggaggacaaggtgtctcaactggagatggaactggaagaagagagaaacaactcagatttgctgtctgagaggatcagtaggagcagggaacagatggagcagttgaggaatgagctacttcaggagagagctgcgagacaagacttggagtgcgacaagatttccctggagaggcagaacaaggacttaaagagccggattatccacctggaaggttcctacaggtccagcaaagaggggctggttgtgcagatggaggccaggatcgcggagctggaggaccgcctggagagtgaggagagggatcgggccaatcttcagctcagcaaccggcggctggagcggaaagtgaaggagctggtgatgcaggtggatgatgagcacctgtcattgactgatcagaaggaccagctgagcttgcgtttgaaagccatgaagcggcaggtggaggaggctgaggaggaaatcgacagactggaaagttctaaaaagaagctgcagagggagctggaggagcagatggacatgaatgagcatctgcaggggcagctcaactccatgaagaaggacttaagactgaagaagctgccgagtaaagtgctggatgacatggatgacgacgatgacctcagcacggatgggggaagcctctatgaggcgcctgtgagctacacattctccaaggacagcaccgtcgccagccagatctgagtgctctcccgggctgtggaagtacctgtcattcctgcaggagctgcagccacccaaagtgggaggcagggaggggagcatctgtctgccactgagaccaatcacagcctctttgcacagcatgccagctcctcagtgttacattcctcgccagggtctctcagtgggtcttcgacagagagcttttgcagtttaaaatgttgggatgcctgaggaccaggagccaccacccactggggtgttgtgagagatacactttggtaggctgaggcccctgttccacagccactatttgcattgctgtccctgccccctcatcactccccctgccaagacaaagggtccagaaggctaggacttacttaatagcactgtgcagggaggaaaccatgtatagcttgtacatattttaaaccagaccttctcacgaactgctgctgttgggtttggaatgtgatggaggcttggtagggtggctggtttgtaaagttcatgcatctatattgagtattctttttttttttttttgagatggagtttcattcttgttgccgaggctggagtgcaatggcgcaaccttggctcactgcaacctctgcctccctggttcaagtgattctcctgcctcatcctcccaagaagctgagattacngatgaccaccaccactcctggctaattttttgtatttagtagagacggggtttcaccatgttggtcaggctggtcttgaactcctgacctcaggtgatccacctgcctcagcctcccaaagtgctgagattacaggcatgagccaccacgcccagccattgagtattcttttttaaaatatgaagctattagattttaagtgttgaggagcagaggtgagaagagagagagagagagaaagtcaaataaagtcaaagaccagtttggaaaccaaagttggaaaagaagaattgtagtggtcatggacagctaagactgagcatagcagttcacatggtctgggtaaacaagtcactggcacaggggaaagccagaaggttgcttgtgtctgtgactgcagctatggccttgtttgcttagtttatctggaattctgttataatttctgaactgttctgagacctgttcccagtcactgattgcaatttcttttacacaggttgggtagggagagttgtaggtaaggccttaaacaaatgaggccgtttctggaaggatagggctgtgtggtcatgtcccacagcaagcttttgggatcgggggaataagagggtatgggggaaaggttcatagacttaggtgtgagaatgaggtgggaggtgtctggtaaggtcatgggggaagggagatgagagaggagataggcagatgtgggtatggggcccagtgtgagaaggaagacagagaagttcttgaaagctgggggatgtgtgggcaagaggtggattgagcaggatctcagggttatgtcgaggaagggaagaaagaaacagaagtcaggcagaggcgtgtctgtgcaaactggaggactccttccaacttcctggaacaaagcgacatcgccagcagcaggctggcagggagtggttgaggtctgggggccaggccacatggctggagaggaatttcagggagcatagcatcgggaggatgctacatatccagggactccctcctggccttcctgtgtcacttcacaatgtgacagtccccaggcatgcccacaggccaggcccagtcacagctgggcttccacaggtcagaatatgggacaggacatggtcagggagaggaccctgtgagttggtgacatatatgtggcagagatggtagtgttcagctgcttcagcagtgtccccaaccatcccaatagggtgggggcctgtgggccagaggactccatgacagtagccatggagtcccacctgtgccaggtcagagcccacccggcaggtttcagagtggtcagcccagtttaagggtgggagtctggagccagacagccaagccccttccacatctacagggtcactgtcatcctcaccacagccaggggtgattctcacctctgcctgcttatgtggggtgtggccgattcctccctttagtcattcattcatttagcacatatttattgggcatcggtgatgtgtcaggcacagtccttggcacacagaatacagcagtgaattaaacaggcaaaaattcctcccctcctggagctcagtgtcaggaaagggggtgataaatgacaatcaaatcgacatggaggttgagcacctctgtactcagccctctgtctgtccttctgaggacgcaacaagcctggttccctagagctcactttgaccctcaatatgttcataatttccctgctgcttctcccatcgttagacatctgccagtaagcctgctgagagaagcctcagcccactcatacctagagacgctgctggggaaggtcagcacacccaagaactttgggagtgtgtgtctgttttggtttgtgagaaagtagctgcccctcattctggccagttctttccagtagccatggggctggctacaagaagcaaaactgcccatgcaaagagaacacaggtcacttttcaaaacacttgcatcattaccctaaaaataggctgttatgcgttttgacaattgcgctatcctacactctgagggagttggcaacgcatgcggtatagtggagtgggaagagttgagactgaaagttaagagaagggttttcaagtcccggctcatctcaccccagtgaccttgacagtgtgctcactctcagagccatggattacctggaacaaagtgcagattagtgcccacggtcctttccaggtataacatgctatcgttctttaattttattatatatacatacttttcttctgttttttgctttaagaactaaccccgatcaagagtattttctttagctagcttaaaaagaaaacatatattttatgtaaaaacacatacatggccaaatgcaatactgaagagacaatcatcctgtatcttttatggtttttcctgcttctgagtgtcgttctacaatgcccgttgacttattccattgcgtctctgctttagggtatggtttggtcgctttggttgtcatgagaaagagacattctccttgcagctacctccatgtgagtgaattcctggataaagcaagatttcctttcaataaacgctgtcacccaatgggaaaaaaaact

SEQ ID NO: 401826 - DNA, 501 bp, Homo sapiens
catgatacgaatcgagctcgtgacccattcgcgaatgaccttgacagtgtgctcactctcagagccatggattacctggaacaaagtgcagattagtgcccacggtcctttccaggtataacatgctatcgttctttaattttattatatatacatacttttcttctgttttttgctttaagaactaaccccgatcaagagtattttctttagctagcttaaaaagaaaacatatattttatgtaaaaacacatacatggccaaatgcaatactgaagagacaatcatcctgtatcttttatggtttttcctgcttctgagtgtcgttctacaatgcccgttgacttattccattgcgtctctgctttagggtatggtttggtcgctttggttgtcatgagaaagagacattctccttgcagctacctccatgtgagtgaattcctggataaagcaagatttcctttcaataaacgctgtcacccaatgggaaaaaaaact

SEQ ID NO: 401827 - DNA, 5265 bp, Homo sapiens
  misc_feature (2683)..(2683): n is a, c, g, or t
tttaaaatcacactgattcctgttagaatcaacagaacattaaagaagagagagagaggatgagagcaaacctagaagagctccgaagccaacacaacgaaaaggtggaggagaactccacattgcagcaacgactggaagaaagtgaaggggagctccggaagaatctggaggagctattccaggtgaagatggaacgggagcagcatcagactgagatcagggatctccaggaccagctctcagaaatgcacgatgaactggacagtgcaaagcgatcggaggacagggagaagggagctctgattgaggagctcttacaggcaaaacaggatcttcaagatctgctgattgccaaagaggagcaagaagacctcttgagaaagcgagagcgtgaactcaccgccctgaagggagccctgaaagaagaggtttccagccatgatcaggagatggacaagctgaaggagcaatatgatgctgagttgcaggccctgagggagagtgtggaagaagcaaccaagaatgtcgaggtcttggcgagcaggagcaacacttcagagcaagaccaggcggggactgaaatgcgcgtgaagcttctgcaggaggagaatgagaagctgcagggaagaagcgaagagctggagcggagagttgctcagcttcaaaggcagatcgaggacctgaaaggcgatgaagccaaggcgaaggaaacgctgaagaagtacgagggagaaatacgacagttagaggaggcccttgtgcacgccagaaaggaagaaaaagaagctgtgtcagccagaagggccctggagaatgaactggaggctgctcagggaaatctgagtcagactacccaggagcagaagcagttgtctgagaagctcaaagaggagagtgagcagaaggagcagctaagaaggttgaagaacgagatggagaatgagcggtggcacctgggcaaaaccattgagaaactgcagaaggagatggcagacattgttgaggcctcccgtacctcaaccctggagctccagaaccagctggatgagtataaggagaaaaaccgcagggagctcgcagaaatgcaaagacagttgaaggagaaaacgctggaggcagaaaagtcccgactgacagccatgaaaatgcaggatgagatgcgtctgatggaggaagagttacgggactaccagagagctcaggatgaagcactcacaaaaaggcagcttctggagcagacgctgaaggacctggagtatgagctggaagccaagagtcacctcaaagatgaccgcagcaggctggtcaagcagatggaggacaaggtgtctcaactggagatggaactggaagaagagagaaacaactcagatttgctgtctgagaggatcagtaggagcagggaacagatggagcagttgaggaatgagctacttcaggagagagctgcgagacaagacttggagtgcgacaagatttccctggagaggcagaacaaggacttaaagagccggattatccacctggaaggttcctacaggtccagcaaagaggggctggttgtgcagatggaggccaggatcgcggagctggaggaccgcctggagagtgaggagagggatcgggccaatcttcagctcagcaaccggcggctggagcggaaagtgaaggagctggtgatgcaggtggatgatgagcacctgtcattgactgatcagaaggaccagctgagcttgcgtttgaaagccatgaagcggcaggtggaggaggctgaggaggaaatcgacagactggaaagttctaaaaagaagctgcagagggagctggaggagcagatggacatgaatgagcatctgcaggggcagctcaactccatgaagaaggacttaagactgaagaagctgccgagtaaagtgctggatgacatggatgacgacgatgacctcagcacggatgggggaagcctctatgaggcgcctgtgagctacacattctccaaggacagcaccgtcgccagccagatctgagtgctctcccgggctgtggaagtacctgtcattcctgcaggagctgcagccacccaaagtgggaggcagggaggggagcatctgtctgccactgagaccaatcacagcctctttgcacagcatgccagctcctcagtgttacattcctcgccagggtctctcagtgggtcttcgacagagagcttttgcagtttaaaatgttgggatgcctgaggaccaggagccaccacccactggggtgttgtgagagatacactttggtaggctgaggcccctgttccacagccactatttgcattgctgtccctgccccctcatcactccccctgccaagacaaagggtccagaaggctaggacttacttaatagcactgtgcagggaggaaaccatgtatagcttgtacatattttaaaccagaccttctcacgaactgctgctgttgggtttggaatgtgatggaggcttggtagggtggctggtttgtaaagttcatgcatctatattgagtattctttttttttttttttgagatggagtttcattcttgttgccgaggctggagtgcaatggcgcaaccttggctcactgcaacctctgcctccctggttcaagtgattctcctgcctcatcctcccaagaagctgagattacngatgaccaccaccactcctggctaattttttgtatttagtagagacggggtttcaccatgttggtcaggctggtcttgaactcctgacctcaggtgatccacctgcctcagcctcccaaagtgctgagattacaggcatgagccaccacgcccagccattgagtattcttttttaaaatatgaagctattagattttaagtgttgaggagcagaggtgagaagagagagagagagagaaagtcaaataaagtcaaagaccagtttggaaaccaaagttggaaaagaagaattgtagtggtcatggacagctaagactgagcatagcagttcacatggtctgggtaaacaagtcactggcacaggggaaagccagaaggttgcttgtgtctgtgactgcagctatggccttgtttgcttagtttatctggaattctgttataatttctgaactgttctgagacctgttcccagtcactgattgcaatttcttttacacaggttgggtagggagagttgtaggtaaggccttaaacaaatgaggccgtttctggaaggatagggctgtgtggtcatgtcccacagcaagcttttgggatcgggggaataagagggtatgggggaaaggttcatagacttaggtgtgagaatgaggtgggaggtgtctggtaaggtcatgggggaagggagatgagagaggagataggcagatgtgggtatggggcccagtgtgagaaggaagacagagaagttcttgaaagctgggggatgtgtgggcaagaggtggattgagcaggatctcagggttatgtcgaggaagggaagaaagaaacagaagtcaggcagaggcgtgtctgtgcaaactggaggactccttccaacttcctggaacaaagcgacatcgccagcagcaggctggcagggagtggttgaggtctgggggccaggccacatggctggagaggaatttcagggagcatagcatcgggaggatgctacatatccagggactccctcctggccttcctgtgtcacttcacaatgtgacagtccccaggcatgcccacaggccaggcccagtcacagctgggcttccacaggtcagaatatgggacaggacatggtcagggagaggaccctgtgagttggtgacatatatgtggcagagatggtagtgttcagctgcttcagcagtgtccccaaccatcccaatagggtgggggcctgtgggccagaggactccatgacagtagccatggagtcccacctgtgccaggtcagagcccacccggcaggtttcagagtggtcagcccagtttaagggtgggagtctggagccagacagccaagccccttccacatctacagggtcactgtcatcctcaccacagccaggggtgattctcacctctgcctgcttatgtggggtgtggccgattcctccctttagtcattcattcatttagcacatatttattgggcatcggtgatgtgtcaggcacagtccttggcacacagaatacagcagtgaattaaacaggcaaaaattcctcccctcctggagctcagtgtcaggaaagggggtgataaatgacaatcaaatcgacatggaggttgagcacctctgtactcagccctctgtctgtccttctgaggacgcaacaagcctggttccctagagctcactttgaccctcaatatgttcataatttccctgctgcttctcccatcgttagacatctgccagtaagcctgctgagagaagcctcagcccactcatacctagagacgctgctggggaaggtcagcacacccaagaactttgggagtgtgtgtctgttttggtttgtgagaaagtagctgcccctcattctggccagttctttccagtagccatggggctggctacaagaagcaaaactgcccatgcaaagagaacacaggtcacttttcaaaacacttgcatcattaccctaaaaataggctgttatgcgttttgacaattgcgctatcctacactctgagggagttggcaacgcatgcggtatagtggagtgggaagagttgagactgaaagttaagagaagggttttcaagtcccggctcatctcaccccagtgaccttgacagtgtgctcactctcagagccatggattacctggaacaaagtgcagattagtgcccacggtcctttccaggtataacatgctatcgttctttaattttattatatatacatacttttcttctgttttttgctttaagaactaaccccgatcaagagtattttctttagctagcttaaaaagaaaacatatattttatgtaaaaacacatacatggccaaatgcaatactgaagagacaatcatcctgtatcttttatggtttttcctgcttctgagtgtcgttctacaatgcccgttgacttattccattgcgtctctgctttagggtatggtttggtcgctttggttgtcatgagaaagagacattctccttgcagctacctccatgtgagtgaattcctggataaagcaagatttcctttcaataaacgctgtcacccaatgggaaaaaaaact

SEQ ID NO: 401828 - DNA, 4673 bp, Homo sapiens
  misc_feature (2683)..(2683): n is a, c, g, or t
tttaaaatcacactgattcctgttagaatcaacagaacattaaagaagagagagagaggatgagagcaaacctagaagagctccgaagccaacacaacgaaaaggtggaggagaactccacattgcagcaacgactggaagaaagtgaaggggagctccggaagaatctggaggagctattccaggtgaagatggaacgggagcagcatcagactgagatcagggatctccaggaccagctctcagaaatgcacgatgaactggacagtgcaaagcgatcggaggacagggagaagggagctctgattgaggagctcttacaggcaaaacaggatcttcaagatctgctgattgccaaagaggagcaagaagacctcttgagaaagcgagagcgtgaactcaccgccctgaagggagccctgaaagaagaggtttccagccatgatcaggagatggacaagctgaaggagcaatatgatgctgagttgcaggccctgagggagagtgtggaagaagcaaccaagaatgtcgaggtcttggcgagcaggagcaacacttcagagcaagaccaggcggggactgaaatgcgcgtgaagcttctgcaggaggagaatgagaagctgcagggaagaagcgaagagctggagcggagagttgctcagcttcaaaggcagatcgaggacctgaaaggcgatgaagccaaggcgaaggaaacgctgaagaagtacgagggagaaatacgacagttagaggaggcccttgtgcacgccagaaaggaagaaaaagaagctgtgtcagccagaagggccctggagaatgaactggaggctgctcagggaaatctgagtcagactacccaggagcagaagcagttgtctgagaagctcaaagaggagagtgagcagaaggagcagctaagaaggttgaagaacgagatggagaatgagcggtggcacctgggcaaaaccattgagaaactgcagaaggagatggcagacattgttgaggcctcccgtacctcaaccctggagctccagaaccagctggatgagtataaggagaaaaaccgcagggagctcgcagaaatgcaaagacagttgaaggagaaaacgctggaggcagaaaagtcccgactgacagccatgaaaatgcaggatgagatgcgtctgatggaggaagagttacgggactaccagagagctcaggatgaagcactcacaaaaaggcagcttctggagcagacgctgaaggacctggagtatgagctggaagccaagagtcacctcaaagatgaccgcagcaggctggtcaagcagatggaggacaaggtgtctcaactggagatggaactggaagaagagagaaacaactcagatttgctgtctgagaggatcagtaggagcagggaacagatggagcagttgaggaatgagctacttcaggagagagctgcgagacaagacttggagtgcgacaagatttccctggagaggcagaacaaggacttaaagagccggattatccacctggaaggttcctacaggtccagcaaagaggggctggttgtgcagatggaggccaggatcgcggagctggaggaccgcctggagagtgaggagagggatcgggccaatcttcagctcagcaaccggcggctggagcggaaagtgaaggagctggtgatgcaggtggatgatgagcacctgtcattgactgatcagaaggaccagctgagcttgcgtttgaaagccatgaagcggcaggtggaggaggctgaggaggaaatcgacagactggaaagttctaaaaagaagctgcagagggagctggaggagcagatggacatgaatgagcatctgcaggggcagctcaactccatgaagaaggacttaagactgaagaagctgccgagtaaagtgctggatgacatggatgacgacgatgacctcagcacggatgggggaagcctctatgaggcgcctgtgagctacacattctccaaggacagcaccgtcgccagccagatctgagtgctctcccgggctgtggaagtacctgtcattcctgcaggagctgcagccacccaaagtgggaggcagggaggggagcatctgtctgccactgagaccaatcacagcctctttgcacagcatgccagctcctcagtgttacattcctcgccagggtctctcagtgggtcttcgacagagagcttttgcagtttaaaatgttgggatgcctgaggaccaggagccaccacccactggggtgttgtgagagatacactttggtaggctgaggcccctgttccacagccactatttgcattgctgtccctgccccctcatcactccccctgccaagacaaagggtccagaaggctaggacttacttaatagcactgtgcagggaggaaaccatgtatagcttgtacatattttaaaccagaccttctcacgaactgctgctgttgggtttggaatgtgatggaggcttggtagggtggctggtttgtaaagttcatgcatctatattgagtattctttttttttttttttgagatggagtttcattcttgttgccgaggctggagtgcaatggcgcaaccttggctcactgcaacctctgcctccctggttcaagtgattctcctgcctcatcctcccaagaagctgagattacngatgaccaccaccactcctggctaattttttgtatttagtagagacggggtttcaccatgttggtcaggctggtcttgaactcctgacctcaggtgatccacctgcctcagcctcccaaagtgctgagattacaggcatgagccaccacgcccagccattgagtattcttttttaaaatatgaagctattagattttaagtgttgaggagcagaggtgagaagagagagagagagagaaagtcaaataaagtcaaagaccagtttggaaaccaaagttggaaaagaagaattgtagtggtcatggacagctaagactgagcatagcagttcacatggtctgggtaaacaagtcactggcacaggggaaagccagaaggttgcttgtgtctgtgactgcagctatggccttgtttgcttagtttatctggaattctgttataatttctgaactgttctgagacctgttcccagtcactgattgcaatttcttttacacaggttgggtagggagagttgtaggtaaggccttaaacaaatgaggccgtttctggaaggatagggctgtgtggtcatgtcccacagcaagcttttgggatcgggggaataagagggtatgggggaaaggttcatagacttaggtgtgagaatgaggtgggaggtgtctggtaaggtcatgggggaagggagatgagagaggagataggcagatgtgggtatggggcccagtgtgagaaggaagacagagaagttcttgaaagctgggggatgtgtgggcaagaggtggattgagcaggatctcagggttatgtcgaggaagggaagaaagaaacagaagtcaggcagaggcgtgtctgtgcaaactggaggactccttccaacttcctggaacaaagcgacatcgccagcagcaggctggcagggagtggttgaggtctgggggccaggccacatggctggagaggaatttcagggagcatagcatcgggaggatgctacatatccagggactccctcctggccttcctgtgtcacttcacaatgtgacagtccccaggcatgcccacaggccaggcccagtcacagctgggcttccacaggtcagaatatgggacaggacatggtcagggagaggaccctgtgagttggtgacatatatgtggcagagatggtagtgttcagctgcttcagcagtgtccccaaccatcccaatagggtgggggcctgtgggccagaggactccatgacagtagccatggagtcccacctgtgccaggtcagagcccacccggcaggtttcagagtggtcagcccagtttaagggtgggagtctggagccagacagccaagccccttccacatctacagggtcactgtcatcctcaccacagccaggggtgattctcacctctgcctgcttatgtggggtgtggccgattcctccctttagtcattcattcatttagcacatatttattgggcatcggtgatgtgtcaggcacagtccttggcacacagaatacagcagtgaattaaacaggcaaaaattcctcccctcctggagctcagtgtcaggaaagggggtgataaatgacaatcaaatcgacatggaggttgagcacctctgtactcagccctctgtctgtccttctgaggacgcaacaagcctggttccctagagctcactttgaccctcaatatgttcataatttccctgctgcttctcccatcgttagacatctgccagtaagcctgctgagagaagcctcagcccactcatacctagagacgctgctggggaaggtcagcacacccaagaactttgggagtgtgtgtctgttttggtttgtgagaaagtagctgcccctcattctggccagttctttccagtagccatggggctggctacaagaagcaaaactgcccatgcaaagagaacacaggtcacttttcaaaacacttgcatccagagacacttgcatccagaggtgg

SEQ ID NO: 401829 - DNA, 3926 bp, Homo sapiens
  misc_feature (2683)..(2683): n is a, c, g, or t
tttaaaatcacactgattcctgttagaatcaacagaacattaaagaagagagagagaggatgagagcaaacctagaagagctccgaagccaacacaacgaaaaggtggaggagaactccacattgcagcaacgactggaagaaagtgaaggggagctccggaagaatctggaggagctattccaggtgaagatggaacgggagcagcatcagactgagatcagggatctccaggaccagctctcagaaatgcacgatgaactggacagtgcaaagcgatcggaggacagggagaagggagctctgattgaggagctcttacaggcaaaacaggatcttcaagatctgctgattgccaaagaggagcaagaagacctcttgagaaagcgagagcgtgaactcaccgccctgaagggagccctgaaagaagaggtttccagccatgatcaggagatggacaagctgaaggagcaatatgatgctgagttgcaggccctgagggagagtgtggaagaagcaaccaagaatgtcgaggtcttggcgagcaggagcaacacttcagagcaagaccaggcggggactgaaatgcgcgtgaagcttctgcaggaggagaatgagaagctgcagggaagaagcgaagagctggagcggagagttgctcagcttcaaaggcagatcgaggacctgaaaggcgatgaagccaaggcgaaggaaacgctgaagaagtacgagggagaaatacgacagttagaggaggcccttgtgcacgccagaaaggaagaaaaagaagctgtgtcagccagaagggccctggagaatgaactggaggctgctcagggaaatctgagtcagactacccaggagcagaagcagttgtctgagaagctcaaagaggagagtgagcagaaggagcagctaagaaggttgaagaacgagatggagaatgagcggtggcacctgggcaaaaccattgagaaactgcagaaggagatggcagacattgttgaggcctcccgtacctcaaccctggagctccagaaccagctggatgagtataaggagaaaaaccgcagggagctcgcagaaatgcaaagacagttgaaggagaaaacgctggaggcagaaaagtcccgactgacagccatgaaaatgcaggatgagatgcgtctgatggaggaagagttacgggactaccagagagctcaggatgaagcactcacaaaaaggcagcttctggagcagacgctgaaggacctggagtatgagctggaagccaagagtcacctcaaagatgaccgcagcaggctggtcaagcagatggaggacaaggtgtctcaactggagatggaactggaagaagagagaaacaactcagatttgctgtctgagaggatcagtaggagcagggaacagatggagcagttgaggaatgagctacttcaggagagagctgcgagacaagacttggagtgcgacaagatttccctggagaggcagaacaaggacttaaagagccggattatccacctggaaggttcctacaggtccagcaaagaggggctggttgtgcagatggaggccaggatcgcggagctggaggaccgcctggagagtgaggagagggatcgggccaatcttcagctcagcaaccggcggctggagcggaaagtgaaggagctggtgatgcaggtggatgatgagcacctgtcattgactgatcagaaggaccagctgagcttgcgtttgaaagccatgaagcggcaggtggaggaggctgaggaggaaatcgacagactggaaagttctaaaaagaagctgcagagggagctggaggagcagatggacatgaatgagcatctgcaggggcagctcaactccatgaagaaggacttaagactgaagaagctgccgagtaaagtgctggatgacatggatgacgacgatgacctcagcacggatgggggaagcctctatgaggcgcctgtgagctacacattctccaaggacagcaccgtcgccagccagatctgagtgctctcccgggctgtggaagtacctgtcattcctgcaggagctgcagccacccaaagtgggaggcagggaggggagcatctgtctgccactgagaccaatcacagcctctttgcacagcatgccagctcctcagtgttacattcctcgccagggtctctcagtgggtcttcgacagagagcttttgcagtttaaaatgttgggatgcctgaggaccaggagccaccacccactggggtgttgtgagagatacactttggtaggctgaggcccctgttccacagccactatttgcattgctgtccctgccccctcatcactccccctgccaagacaaagggtccagaaggctaggacttacttaatagcactgtgcagggaggaaaccatgtatagcttgtacatattttaaaccagaccttctcacgaactgctgctgttgggtttggaatgtgatggaggcttggtagggtggctggtttgtaaagttcatgcatctatattgagtattctttttttttttttttgagatggagtttcattcttgttgccgaggctggagtgcaatggcgcaaccttggctcactgcaacctctgcctccctggttcaagtgattctcctgcctcatcctcccaagaagctgagattacngatgaccaccaccactcctggctaattttttgtatttagtagagacggggtttcaccatgttggtcaggctggtcttgaactcctgacctcaggtgatccacctgcctcagcctcccaaagtgctgagattacaggcatgagccaccacgcccagccattgagtattcttttttaaaatatgaagctattagattttaagtgttgaggagcagaggtgagaagagagagagagagagaaagtcaaataaagtcaaagaccagtttggaaaccaaagttggaaaagaagaattgtagtggtcatggacagctaagactgagcatagcagttcacatggtctgggtaaacaagtcactggcacaggggaaagccagaaggttgcttgtgtctgtgactgcagctatggccttgtttgcttagtttatctggaattctgttataatttctgaactgttctgagacctgttcccagtcactgattgcaatttcttttacacaggttgggtagggagagttgtaggtaaggccttaaacaaatgaggccgtttctggaaggatagggctgtgtggtcatgtcccacagcaagcttttgggatcgggggaataagagggtatgggggaaaggttcatagacttaggtgtgagaatgaggtgggaggtgtctggtaaggtcatgggggaagggagatgagagaggagataggcagatgtgggtatggggcccagtgtgagaaggaagacagagaagttcttgaaagctgggggatgtgtgggcaagaggtggattgagcaggatctcagggttatgtcgaggaagggaagaaagaaacagaagtcaggcagaggcgtgtctgtgcaaactggaggactccttccaacttcctggaacaaagcgacatcgccagcagcaggctggcagggagtggttgaggtctgggggccaggccacatggctggagaggaatttcagggagcatagcatcgggaggatgctacatatccagggactccctcctggccttcctgtgtcacttcacaatgtgacagtccccaggcatgcccacaggccaggcccagtcacagctgggcttccacaggtcagaatatgggacaggacatggtcagggagaggaccctgtgagttggtgacatatatgtggcagctacctccatgtgagtgaattcctggataaagcaagatttcctttcaataaacgctgtcacccaatgggaaaaaaaact

SEQ ID NO: 401830 - DNA, 628 bp, Homo sapiens
ttgagatggagtcttgctctgttgcccaggctggagtgcagtggcgcgatctcagctcactgcaagcaagctttgcctcctgggttgacgccattctcctgcctcagcttcctgagaagctgggacaacaggcgcccgccaccatgcccagctaatttttttgtatatttagtagagacggggtttcaccatgttagtcaggatggtctcgatctcctgacctcgtgatctgcccgcctcggcctctcaaagtgctggggattacaagcatgagccaccgtgcccagctggtttttattttcttattgtttgcctattttaacctttcctaaaatgaaaatatatttttaaaaaatcattttatttagaaaaattaaattagtgcccctcaagtctgatttaatgatattagactagcctttcccacagctgttctaaccgtagaaccttgaagtttagtagaaaactacaatgttacaaatttcatcatgtgtaaatataacctaaatcatcttagaattgtgatgaccagaacgatttctatttgagatgcaatcctagtctcagaaacagacttcaaccaacaaaataattatttctcaagagtaaacccttaactagaaaaacc

SEQ ID NO: 401831 - DNA, 214 bp, Homo sapiens
tgaggagagtgagatactgggggctgattggctttgttgcctccggatagtattcctagactaaagaaggaccttgaagggtgggtggcaatgtttagaggatataaatcagaaagtgtctgagacaagtctcaatttagagatttattttgccaaggttgaggatgctctggggaaaaagagacacaagccaaagtaggatctgtagcctgta

SEQ ID NO: 401832 - DNA, 3136 bp, Homo sapiens
gcgcatgcgtgctgtgcggcgcggtctcagggaaggtggggctatggcagctgctagggaccctccggaagtatcgctgcgagaagccacccagcgaaaattgcggaggttttccgagctaagaggcaaacttgtagcacgtggagaattctgggacatagttgcaataacagcggctgatgaaaaacaggaacttgcttacaaccaacagctgtcagaaaagctgaaaagaaaggagttaccccttggagttcaatatcacgtttttgtggatcctgctggagccaaaattggaaatggaggatcaacactttgtgcccttcaatgtttggaaaagctatatggagataaatggaattcttttaccatcttattaattcactctggtggctacagtcaacgacttccaaatgcaagtgctctgggaaaaattttcactgctttacctcttggtaaccccatttatcagatgctagaattaaagctagccatgtacattgatttccccttaaatatgaatcctggaattctggttacctgtgcagatgatattgaactttatagtattggagaatttgagtttattaggtttgacaaacctggctttactgctttagctcatccttctagtttgacgataggtaccacacatggagtatttgtcttagatccttttgatgatttaaaacatagagaccttgaatacaggtcttgccatcgtttccttcataagcccagcatagaaaagatgtatcagtttaatgctgtgtgtagacctggaaatttttgtcaacaggactttgctgggggtgacattgccgatcttaaattagactctgactatgtctacacagatagcctattttatatggatcataaatcagcaaaaatgttacttgctttttatgaaaaaataggcacactgagctgtgaaatagatgcctatggtgactttctgcaggctttgggacctggagcaactgtggagtacaccagaaacacatcaaatgtcattaaagaagagtcagagttggtagaaatgaggcagagaatatttcatcttcttaaaggaacatcactaaatgttgttgttcttaataactccaaattttatcacattggaacaaccgaagaatatttgttttactttacctcagataacagtttaaagtcagagctcggcttacagtccataacttttagtatctttccagatataccagaatgctctggcaaaacatcctgtatcattcaaagcatactggattcaagatgttctgtggcacctggctcagttgtggagtattccagattggggcctgatgtttcagttggggaaaactgcattattagtggttcttacatcctaacaaaagctgccctccccgcacattcttttgtatgttccttaagcttaaagatgaatagatgcttaaagtatgcaactatggcatttggagtgcaagacaacttgaaaaagagtgtgaaaacattgtcagatataaagttacttcaattctttggagtctgtttcctgtcatgcttagatgtttggaatcttaaagttacagaggaactgttctctggtaacaagacatgtctgagtttgtggactgcacgcattttcccagtttgttcttctttgagtgactcagttataacatccctaaagatgttaaatgctgttaagaacaagtcagcattcagcctgaatagctataagttgctgtccattgaagaaatgcttatctacaaagatgtagaagatatgataacttacagggaacaaatttttctagaaatcagtttaaaaagcagtttgatgtagaggtattttaaatattgtacactttgcctttttgagtaacattccagagataggtattttttgtaggctgtttcactgaactcagttaatgaaaactgtattaacataattgttgtagcataatattaatagtgcaaaagtacatataagtcattttgatgaaaaatattccaagactaagttgagaaaagagatactattttggatgtgtatcagtatttttgtttttaataatgattgatttgtggagcattgttttttcacataattagttttaaaggtaattttctaagcatacctttggaatttttccatcttttttgaggcttttggtccagtgaagttctaagtattcactggcacttctctcctcaactgtaattctatttttaataataaaaatggcatactgtagggtcttcagagtagtgtaggaatactgtagaaatactttttcagaaacgaatccatagctgacaaattcactcagtgcccaatatattgtgattattttcgttgataaagaactagatacaaagacctctgaaattgatgataaaatttgtatctcattaattttatcaaaatgaaactaaaagtacatatgtattatacacttgaacatgtgtttgtatatctttaaaattttcctttatgttccattccataggaaaacacacatatgcacacaaaactcagttatctgtggggaaagtggtagtaataattgagattcatcaataatcatataatttcactatagacattacttgcattatctcctatcagtccttctaacaaaacttaaattaccagatgaactgactttagttttcatcttattttttgtccacatgctggtgatgctgagaaacaataattggcccaaatgcagacatcaagaagcaggcaggaaaatggaaaaactgagataatacacaggtgataaacagtttcaagaaaataaaaattggctagaatctcaagttatgtgtttctatattggtataagcatataagtgaaaagtcttataagtgtaatagagaaaagatttgtcagtgtgtttttttaaatgaaataactagtctgtgctactttatgtcaatataaaaattggtaaactagaagtaacttgtccacaaccctcagttatgatacttatgtgcgtgtttttttttccaaagtttttcccaaggagaagatacaaatatatggtagctattgtttaaaaatgattgatttacttgcagatttttcagaggatgttatgtctttgtcattcattaaatgttcaaaattgtagtttt

SEQ ID NO: 401833 - DNA, 1233 bp, Homo sapiens
gcgcatgcgtgctgtgcggcgcggtctcagggaaggtggggctatggcagctgctagggaccctccggaagtatcgctgcgagaagccacccagcgaaaattgcggaggttttccgagctaagaggcaaacttgtagcacgtggagaattctgggacatagttgcaataacagcggctgatgaaaaacaggaacttgcttacaaccaacagctgtcagaaaagctgaaaagaaaggagttaccccttggagttcaatatcacgtttttgtggatcctgctggagccaaaattggaaatggaggatcaacactttgtgcccttcaatgtttggaaaagctatatggagataaatggaattcttttaccatcttattaattcactctgatgaatggaagaaaaaagtcagtgaatcatatgttatcacaatagaaagattagaagatgacctgcagatcaaggaaaaagaactgacagaactaaggaatatatttgggtaatggattggtgacaggaagaaatgaagaaaaagagaaggcaggaggagaaagaaagacagaaagggcaccttagagtaccattgtctgattatatcctcctctgtgctgcctctaatctttatcaacataacagcacttactacatggtgttgtttttatccatttataggtctatctccccactagtatatgtgttcattaaaggcagctttttttcttatttagccttatttatatttgtacttatttgtaaaacaaactaataacttagggcttaccatatgccagaaatgcttctacgtatctttttgtgcatcagcttatataatcctaatggtgtatatgtaaagtgctttagcacagtgtctggcacatggcaaaccctcaaaaatgttagttaacacttaatcattattgtttatgttaacaaccctctgaagtaagtgttgcaattgccatgttatacctggagaaaatgaggctaatcaaattaaactggcttgaactagattaaacaatttgtatgatttacctaggattgcatccatctttatttgatttcaaaatgtatcatattcataatcttggttatgaatattatacaacctttttgaaaaaactatggaagtgatggctctccacatgtgacttcaaatgttttcaattaaattattttgtttcaatagtttttatcataataaattttaagactatgttttgctaaacattgtcaa

SEQ ID NO: 401834 - DNA, 3239 bp, Homo sapiens
gcgcatgcgtgctgtgcggcgcggtctcagggaaggtggggctatggcagctgctagggaccctccggaagtatcgctgcgagaagccacccagcgaaaattgcggaggttttccgagctaagaggcaaacttgtagcacgtggagaattctgggacatagttgcaataacagcggctgatgaaaaacaggaacttgcttacaaccaacagctgtcagaaaagctgaaaagaaaggagttaccccttggagttcaatatcacgtttttgtggatcctgctggagccaaaattggaaatggaggatcaacactttgtgcccttcaatgtttggaaaagctatatggagataaatggaattcttttaccatcttattaattcactctggtggctacagtcaacgacttccaaatgcaagtgctctgggaaaaattttcactgctttacctcttggtaaccccatttatcagatgctagaattaaagctagccatgtacattgatttccccttaaatatgaatcctggaattctggttacctgtgcagatgatattgaactttatagtattggagaatttgagtttattaggtttgacaaacctggctttactgctttagctcatccttctagtttgacgataggtaccacacatggagtatttgtcttagatccttttgatgatttaaaacatagagaccttgaatacaggtcttgccatcgtttccttcataagcccagcatagaaaagatgtatcagtttaatgctgtgtgtagacctggaaatttttgtcaacaggactttgctgggggtgacattgccgatcttaaattagactctgactatgtctacacagatagcctattttatatggatcataaatcagcaaaaatgttacttgctttttatgaaaaaataggcacactgagctgtgaaatagatgcctatggtgactttctgcaggctttgggacctggagcaactgtggagtacaccagaaacacatcaaatgtcattaaagaagagtcagagttggtagaaatgaggcagagaatatttcatcttcttaaaggaacatcactaaatgttgttgttcttaataactccaaattttatcacattggaacaaccgaagaatatttgttttactttacctcagataacagtttaaagtcagagctcggcttacagtccataacttttagtatctttccagatataccagaatgctctggcaaaacatcctgtatcattcaaagcatactggattcaagatgttctgtggcacctggctcagttgtggagtattccagattggggcctgatgtttcagttggggaaaactgcattattagtggttcttacatcctaacaaaagctgccctccccgcacattcttttgtatgttccttaagcttaaagatgaatagatgcttaaagtatgcaactatggcatttggagtgcaagacaacttgaaaaagagtgtgaaaacattgtcagatataaagttacttcaattctttggagtctgtttcctgtcatgcttagatgtttggaatcttaaagttacagaggaactgttctctggtaacaagacatgtctgagtttgtggactgcacgcattttcccagtttgttcttctttgagtgactcagttataacatccctaaagatgttaaatgctgttaagaacaagtcagcattcagcctgaatagctataagttgctgtccattgaagaaatgcttatctacaaagatgtagaagatatgataacttacagggaacaaatttttctagaaatcagtttaaaaagcagtttgatgtagaggtattttaaatattgtacactttgcctttttgagtaacattccagagataggtattttttgtaggctgtttcactgaactcagttaatgaaaactgtattaacataattgttgtagcataatattaatagtgcaaaagtacatataagtcattttgatgaaaaatattccaagactaagttgagaaaagagatactattttggatgtgtatcagtatttttgtttttaataatgattgatttgtggagcattgttttttcacataattagttttaaaggtaattttctaagcatacctttggaatttttccatcttttttgaggcttttggtccagtgaagttctaagtattcactggcacttctctcctcaactgtaattctatttttaataataaaaatggcatactgtagggtcttcagagtagtgtaggaatactgtagaaatactttttcagaaacgaatccatagctgacaaattcactcagtgcccaatatattgtgattattttcgttgataaagaactagatacaaagacctctgaaattgatgataaaatttgtatctcattaattttatcaaaatgaaactaaaagtacatatgtattatacacttgaacatgtgtttgtatatctttaaaattttcctttatgttccattccataggaaaacacacatatgcacacaaaactcagttatctgtggggaaagtggtagtaataattgagattcatcaataatcatataatttcactatagacattacttgcattatctcctatcagtccttctaacaaaacttaaattaccagatgaactgactttagttttcatcttattttttgtccacatgctggtgatgctgagaaacaataattggcccaaatgcagacatcaagaagcaggcaggaaaatggaaaaactgagataatacacaggtgataaacagtttcaagaaaataaaaattggctagaatctcaagttatgtgtttctatattggtataagcatataagtgaaaagtcttataagtgtaatagagaaaagatttgtcagtgtgtttttttaaatgaaataactagtctgtgctactttatgtcaatataaaaattggtaaactagaagtaacttgtccacaaccctcagttatgatacttatgtgcgtgtttttttttccaaagtttttcccaaggagaagatacaaatatatggtagctattgtttaaaaatgattgatttacttgcagatttttcagaggatgttatgtctttgtcattcattaaatgttcaaaattgtagttttaccaaatctgaagtgccatcagttataagaatcaccattattttatgttccattaagaaaaacacaataaaacatgacactgctttttttgttacttgaaatt

SEQ ID NO: 401835 - DNA, 3185 bp, Homo sapiens
gcgcatgcgtgctgtgcggcgcggtctcagggaaggtggggctatggcagctgctagggaccctccggaagtatcgctgcgagaagccacccagcgaaaattgcggaggttttccgagctaagaggcaaacttgtagcacgtggagaattctgggacatagttgcaataacagcggctgatgaaaaacaggaacttgcttacaaccaacagctgtcagaaaagctgaaaagaaaggagttaccccttggagttcaatatcacgtttttgtggatcctgctggagccaaaattggaaatggaggatcaacactttgtgcccttcaatgtttggaaaagctatatggagataaatggaattcttttaccatcttattaattcactctggtggctacagtcaacgacttccaaatgcaagtgctctgggaaaaattttcactgctttacctcttggtaaccccatttatcagatgctagaattaaagctagccatgtacattgatttccccttaaatatgaatcctggaattctggttacctgtgcagatgatattgaactttatagtattggagaatttgagtttattaggtttgacaaacctggctttactgctttagctcatccttctagtttgacgataggtaccacacatggagtatttgtcttagatccttttgatgatttaaaacatagagaccttgaatacaggtcttgccatcgtttccttcataagcccagcatagaaaagatgtatcagtttaatgctgtgtgtagacctggaaatttttgtcaacaggactttgctgggggtgacattgccgatcttaaattagactctgactatgtctacacagatagcctattttatatggatcataaatcagcaaaaatgttacttgctttttatgaaaaaataggcacactgagctgtgaaatagatgcctatggtgactttctgcaggctttgggacctggagcaactgtggagtacaccagaaacacatcaaatgtcattaaagaagagtcagagttggtagaaatgaggcagagaatatttcatcttcttaaaggaacatcactaaatgttgttgttcttaataactccaaattttatcacattggaacaaccgaagaatatttgttttactttacctcagataacagtttaaagtcagagctcggcttacagtccataacttttagtatctttccagatataccagaatgctctggcaaaacatcctgtatcattcaaagcatactggattcaagatgttctgtggcacctggctcagttgtggagtattccagattggggcctgatgtttcagttggggaaaactgcattattagtggttcttacatcctaacaaaagctgccctccccgcacattcttttgtatgttccttaagcttaaagatgaatagatgcttaaagtatgcaactatggcatttggagtgcaagacaacttgaaaaagagtgtgaaaacattgtcagatataaagttacttcaattctttggagtctgtttcctgtcatgcttagatgtttggaatcttaaagttacagaggaactgttctctggtaacaagacatgtctgagtttgtggactgcacgcattttcccagtttgttcttctttgagtgactcagttataacatccctaaagatgttaaatgctgttaagaacaagtcagcattcagcctgaatagctataagttgctgtccattgaagaaatgcttatctacaaagatgtagaagatatgataacttacagggaacaaatttttctagaaatcagtttaaaaagcagtttgatgtagaggtattttaaatattgtacactttgcctttttgagtaacattccagagataggtattttttgtaggctgtttcactgaactcagttaatgaaaactgtattaacataattgttgtagcataatattaatagtgcaaaagtacatataagtcattttgatgaaaaatattccaagactaagttgagatttgtggagcattgttttttcacataattagttttaaaggtaattttctaagcatacctttggaatttttccatcttttttgaggcttttggtccagtgaagttctaagtattcactggcacttctctcctcaactgtaattctatttttaataataaaaatggcatactgtagggtcttcagagtagtgtaggaatactgtagaaatactttttcagaaacgaatccatagctgacaaattcactcagtgcccaatatattgtgattattttcgttgataaagaactagatacaaagacctctgaaattgatgataaaatttgtatctcattaattttatcaaaatgaaactaaaagtacatatgtattatacacttgaacatgtgtttgtatatctttaaaattttcctttatgttccattccataggaaaacacacatatgcacacaaaactcagttatctgtggggaaagtggtagtaataattgagattcatcaataatcatataatttcactatagacattacttgcattatctcctatcagtccttctaacaaaacttaaattaccagatgaactgactttagttttcatcttattttttgtccacatgctggtgatgctgagaaacaataattggcccaaatgcagacatcaagaagcaggcaggaaaatggaaaaactgagataatacacaggtgataaacagtttcaagaaaataaaaattggctagaatctcaagttatgtgtttctatattggtataagcatataagtgaaaagtcttataagtgtaatagagaaaagatttgtcagtgtgtttttttaaatgaaataactagtctgtgctactttatgtcaatataaaaattggtaaactagaagtaacttgtccacaaccctcagttatgatacttatgtgcgtgtttttttttccaaagtttttcccaaggagaagatacaaatatatggtagctattgtttaaaaatgattgatttacttgcagatttttcagaggatgttatgtctttgtcattcattaaatgttcaaaattgtagttttaccaaatctgaagtgccatcagttataagaatcaccattattttatgttccattaagaaaaacacaataaaacatgacactgctttttttgttacttgaaatt

SEQ ID NO: 401836 - DNA, 488 bp, Homo sapiens
aggaagcatgtacgcagatccaattaaatcactaggtcactctaaatcactaggccatttttaggtcatttatggggcttggaaatatacaatcattaaaaaataacttttccacaaataaagggcaagcttgtgaaggcagaaaagagaaaccgtataactggaattaaccttgaagggtataaaaaaaatttacttttaaatgtgagaaatttctaggagatccaatatatgtatcaaaatttcactttggaattatgatctaacaaatcacttaatacctttctgaattacagatagtccacataaaacccaaggtactataataactaagtacattacttcaatctgtactttatataaatgacttggctttatcctcagtgctaaaagaaacaagtcaatccatttctttgtgttctgataacataaatgatgcaggaaaaaaatatgaatcaggctttctgaagaaaaggtatgagtctacc

SEQ ID NO: 401837 - DNA, 523 bp, Homo sapiens
gaagatatgcaggaaataaaatttttaggaaataaaatattctttacaatgtatcttaaaacaacaaaatgaacaatgaagatgtataaactggctgtgcatttacttaacttaaaggatatcagaattaatatattacaaaaaaaattcattcttaaaagcaaagtataattgtttgccacaattattttaatatatttctttcccaggataaattttaaactcaggaaagcaaggactggaattggaagggttaaaaaaacacgaagcaacagtaactccatttagataaggggatagaagggtggagcaagggaacaatacactaaagtacttttctttcacagatcttggttcaaattaaggttaaattccaaaggaggatgtgttttccccatatggagtcttaaaggacatgcctttgtttccagcttcccagagaagatatatgttaacacaaacaagcatttcataataaatttaacttttatagagtgactaatgccctcctgcaataaggcgg

SEQ ID NO: 401838 - DNA, 117 bp, Homo sapiens
ggggaagaccaacaaagcaagataaagagcttgctgttgtgttagagcctcgagtgggcttccagcagggtgaggcttttctacctggcgttatacaggaagttcaaggtaaagtca

SEQ ID NO: 401839 - DNA, 251 bp, Homo sapiens
aatgttgatggccgccaccctcatgacatcatagatgatatcaacagtggttctgtggaatgcccagccagttaagcacaaaggaaaatatttcaataaaggatcatttgacaactggtggaaaaaaaaaaaagtagttcaatagtgcttcaaaggatatttcaagaaatttaaatccagagaatggaagaaatatttgcaaatctgataaggatctagtaaccagattatataaataacttataatgcaa

SEQ ID NO: 401840 - DNA, 346 bp, Homo sapiens
cacagactgggtaatttgtaaagaaaagaaatgtatttttcatagttctggatgctgggaagtccattatcaaggtatcggcatcttgagagggcctctttgctgctgtatcatcctatggtggaagggtaggagagcacacagcaagaggcgcagaggggccaaacttgcttttgtaacaaagccactctctaacccagtcccgcaataatgacattaatctattcatggcggcagaaccctcttgatctaatcacctcttaaaggttctacttctcaacatggttgcattgaaggttaagtttccagcacatgaactttgggggacacgttcaggccataatag

SEQ ID NO: 401841 - DNA, 4387 bp, Homo sapiens
cctgccggcatgcgataaaggccggggaatgtctagctggggccgcgctgagccgagtgcggacccgctttgtgtgcgcgtttgtttgtctccgctgcggtccgaaccgctgccgcgacccccgaggaggcggggcctccgcgcgcccggctccgcctggtgagggtttcacggcctctgctgccgccgccgccgccctcgtttgttccgttagatcgcgcagccccgaccgctgcacccggatcctagcaagccgggcgaggctgcccgggagccctcgatggccttcatttcacccaagcccgcttcttgctttccccggcgcttcccctcttttcctggttaacagcttatgggcggggagctcggcaaaactcagactaaaaacagaaaaagagaaaagaaaggacaaattcgatacacccgcgtcggtcctccagagtttgtgaaggggtgtaaacatgtcggagtctggggagatgagtgaatttggctacatcatggaattgatagctaaaggcaaggttaccattaagaatatcgaaagggagctcatttgcccagcatgcaaggagctgtttacccacccattgattctcccttgccaacatagtatctgtcataaatgtgtaaaagaactcctgctgactctcgatgattcattcaacgatgtgggatcagacaactccaatcaaagcagtcctcgacttcggctcccctcccctagtatggataaaattgaccgaattaacagaccaggctggaagcgcaattcattgaccccgaggacaactgttttcccttgccctggctgtgagcatgatgtggatcttggagaacgaggaatcaatggtctgtttcgaaacttcactttggaaactattgtggacagatatcgtcaagcagctagggcagccacagccattatgtgtgacctttgtaaaccaccacctcaagaatccacaaaaagctgcatggactgtagtgcaagttactgcaatgaatgcttcaaaattcatcacccttggggtactataaaagctcaacatgagtatgttggtccaactactaacttcagacccaagattttaatgtgcccagaacatgaaacagagagaataaacatgtactgtgaattatgtaggaggccagtttgccatctgtgtaagttgggtggtaatcatgccaaccaccgtgtaaccactatgagcagtgcctacaaaaccttaaaggaaaagctttcaaaggatattgattaccttattggtaaggaaagccaggtgaagagtcaaatatctgaactaaacttgttaatgaaagaaacagagtgtaatggagagagggctaaagaagaagcaattacacattttgaaaagctctttgaagttctggaagagaggaaatcatctgttttgaaagcaattgactcctctaagaaactaagattagacaaatttcagactcaaatggaagagtaccagggacttctagagaacaatggacttgtgggatatgctcaagaagtgctaaaggagacagatcagtcttgctttgtgcagacagcaaagcagctccacctcagaatacagaaagccacagaatctttgaagagctttagacctgcagctcagacttcttttgaagactatgttgttaatacctctaaacaaacagaacttcttggagaattatcctttttctctagtggcatagacgtgccagagatcaatgaggaacagagcaaagtttataacaatgccttgataaattggcaccatccagaaaaggataaagctgatagctatgttcttgaatatcggaaaatcaatagagatgatgaaatgtcatggaatgagatagaagtgtgtggaacaagtaaaataattcaagacttggaaaacagtagtacctatgctttcagagtaagagcttacaagggttcaatctgtagtccttgcagcagagaattgattcttcatactcctccagctccagttttcagcttcctctttgatgaaaaatgtggctataataatgaacacctcctgctgaacttgaagagagaccgtgtagagagtagagctggatttaatcttctgcttgctgcagaacgcatccaagtgggttattacacaagcttagactacatcattggagatactggcattacaaaaggaaaacacttctgggccttccgtgtggaaccatattcatacctggtaaaagtgggagttgcttctagcgataaactacaagaatggctccgttctccccgggatgcagttagtccaagatatgagcaagacagtgggcatgacagtggaagtgaggatgcctgttttgattcttcacaaccatttaccttagttactataggcatgcagaaattttttatacccaagtcacctacttcttctaatgaacctgaaaatagagttctccctatgccaacaagtattgggattttccttgactgtgataaaggcaaagtaaatttctatgatatggatcagatgaaatgcctttatgaacgccaagtggactgttcacatacactgtatccagcatttgcattaatgggcagtggaggaattcagcttgaagaacccatcacagcaaaatatctggaataccaagaggacatgtagttgaaacatctgatgtgactcaggataaaaactgtaaacaaagcaatgccttagcgttaaccttcgtaactaattacatatcgctgagtgttctgtcaccccacttgtgtttgagtatgattcttcttgaaatacagaaaatctaaacagccttgtgtcttcatgtcgttgttctgcctttcacaaatgatgaaagtgaagatgttctttccaagttaatactgaagtggttaactttgcaactggactgtcttttactttatgtacaggatatctaatttatttctgtcagctggtgttgctgacactttccttatggtgggggggatacaaaagtatttattatgattctcttctgtttgacttttcatttttatatcatgtttatgtcctaagagaagatattttttaaatgccttatggataggaattagtactaagcaatgtgtcttgcatttgttttcaataggaaaacaaagttctagataggttaaaagaaaaacaccataaaagtggtagtatatttaagtggaaaattatgtattttaaagtgtgtaactattaaaaatatattgcctggaaaaggaatactactgttttgttttgttaagaccacaaactgtattgctaaggacattttaagagtctgcttagccataacactcatttaacagcatgggtagtaagcatggtttcttgcagaaaacacaaagttctcagctaacacattaaacttctcactttatatactttttttcagagaaatttatctttagtttttcttattctgtgaaaatatttgttcttatgtcaaagaattatttttcagatatattggtaaagatggactgatattaaaagtcatatttattcttttacccccttactgtgttttgtgattttcatttttggcccaattattacatatcaggttttcctgatttatatttacatgtttgaaaagttcattatatattttagtagcgttacatatattataaatttttgtaacatttaaatgttcacttatgtggcattttctgtttctcattggtaataagcatttctaatataagcaagtaaaaatacaaatttaattacttagaaatgataactaagatcacaatgactgtgtaccctttaaaatatcttttaatttgaggaattacattctatctaaattgtgtgtctgtttttgaaaggtgttgctttcaagtaggtggtttttatttaaagtacttatttttttgaggttaaaatattcagaaactacttttatgcattgtagcagtaatcatttatggaatgcttttgacatgttttaacagggtaaccaaaacttttaggcctgttttttttggttgtccttgttgttatatttttaatggaaatctgttactcaggctggtagcattaaattagctttttaccctcaactcaagtagcaaatatcatggagaacttcagtgtttagcaggctgttaatttcccatctatgaatagcactttatgatgtaggctaaactaagcaaataatgcagcgttatgtggatcattatgcaataaagctgctaaagtcacatttgtggttgatactcaagccttgtacaagcacatatcatgtagacatttttaaatgtgaagctttaacaggaataggatagctgtttcaaaccttgtgcaattgtaaataaattgtttagctgtgtttctttcatttttaataaaaaattaaaaag

SEQ ID NO: 401842 - DNA, 1274 bp, Homo sapiens
cctgccggcatgcgataaaggccggggaatgtctagctggggccgcgctgagccgagtgcggacccgctttgtgtgcgcgtttgtttgtctccgctgcggtccgaaccgctgccgcgacccccgaggaggcggggcctccgcgcgcccggctccgcctggtgagggtttcacggcctctgctgccgccgccgccgccctcgtttgttccgttagatcgcgcagccccgaccgctgcacccggatcctagcaagccgggcgaggctgcccgggagccctcgatggccttcatttcacccaagcccgcttcttgctttccccggcgcttcccctcttttcctggttaacagcttatgggcggggagctcggcaaaactcagactaaaaacagaaaaagagaaaagaaaggacaaattcgatacacccgcgtcggtcctccagagtttgtgaaggggtgtaaacatgtcggagtctggggagatgagtgaatttggctacatcatggaattgatagctaaaggcaaggcttcagcaatgggcctgcagcaaacccatgagcattcccggttgacttctaaaggtggagaggcccgctgtccctttgaaatctctgaggttggaaagcagtctctcccaagaagaacttaggacaattcctctctctgttttgtgggggttggagggggagagttggtctggagtaggctcctaaccatttcaacgtaagcttatttcctaccactctcctcaggctcaaatcctgccccgccccgcagccccagcactagcccatttaagacccctgttttgtgtgtgattatacaggatttgaacactgaatattaaccatggaatagcagacctttgagactgacttgctttattttcctctgtggggttcggttccactttgtagttcgggtttgtaatgtaaagaataatgggaaactggtctaattatgagagttaagagagtagaggcctgtagttggcctgccctccgccccaccatccctcaaagttgagaccactgagttaaccatcctcttaatttctctcacttttcccccagatttgtttcatccttgtactggacttctcaagctctgtacataattaaaaatacatagctttacatttttacaaacttaatacctggaatatatgcttgttgtaaagtattcaaacttcacagaaaggttcacagagtaaaaagtctaagttcatgcccacctccaatctcattccttccccagtggcagcagtttgtgtgtc

SEQ ID NO: 401843 - DNA, 645 bp, Homo sapiens
cctgccggcatgcgataaaggccggggaatgtctagctggggccgcgctgagccgagtgcggacccgctttgtgtgcgcgtttgtttgtctccgctgcggtccgaaccgctgccgcgacccccgaggaggcggggcctccgcgcgcccggctccgcctggtgagggtttcacggcctctgctgccgccgccgccgccctcgtttgttccgttagatcgcgcagccccgaccgctgcacccggatcctagcaagccgggcgaggctgcccgggagccctcgatggccttcatttcacccaagcccgcttcttgctttccccggcgcttcccctcttttcctggttaacagcttatgggcggggagctcggcaaaactcagactaaaaacagaaaaagagaaaagaaaggacaaattcgatacacccgcgtcggtcctccagagtttgtgaaggggtgtaaacatgtcggagtctggggagatgagtgaatttggctacatcatggaattgatagctaaaggcaagatgccggattggagacgaggctaccgctgcagacagggctgtgggaagacgacggaacttgccacagcgacagacttctcccaaacaggaaataaaagtgggaagcattttaaaacctaaa

SEQ ID NO: 401844 - DNA, 785 bp, Homo sapiens
ggcacgcgatgtttccaacagcatgtgctcacgttcaggtatctgtcgcattctggatagttctcccaatattctgaacttttcttaagcgtgtatttgtgttatagcgatctcaatcagtgatctttgatgttactagtgtttaggaggcaccatgaactatgcccatataatatagtgaacttaatggatacatgtgtatgttctgactgctccacacatctgctgtttccttttctctctcctcaggccttcctatttcgtgaaacagcaacactgaaattaaaccaatcactagcccatttaagacccctgttttgtgtgtgattatacaggatttgaacactgaatattaaccatggaatagcagacctttgagactgacttgctttattttcctctgtggggttcggttccactttgtagttcgggtttgtaatgtaaagaataatgggaaactggtctaattatgagagttaagagagtagaggcctgtagttggcctgccctccgccccaccatccctcaaagttgagaccactgagttaaccatcctcttaatttctctcacttttcccccagatttgtttcatccttgtactggacttctcaagctctgtacataattaaaaatacatagctttacatttttacaaacttaatacctggaatatatgcttgttgtaaagtattcaaacttcacagaaaggttcacagagtaaaaagtctaagttcatgcccacctccaatctcattccttccccagtggcagcagtttgtgtgtc

SEQ ID NO: 401845 - DNA, 4203 bp, Homo sapiens
ttcccaggcggagtccgcaggagccgctgctgcagccggcagctgggcgggattcccggggtagtcgctgggagcaaagctcgcttctcccgcgcctgtgcttttgcctgccccggcttacttctccccgcgtcggtccgctggccacgtacagctgaccagctcatcttccagcttcggaccgaggctccacggccgccgcagggacccgcccaccagaccctgcgctcggtagccggtgtgagtggaacgtgccgctgatgacacctggcagaaggcagccatggagggcgatggctcagattcgccggttaccattaagaatatcgaaagggagctcatttgcccagcatgcaaggagctgtttacccacccattgattctcccttgccaacatagtatctgtcataaatgtgtaaaagaactcctgctgactctcgatgattcattcaacgatgtgggatcagacaactccaatcaaagcagtcctcgacttcggctcccctcccctagtatggataaaattgaccgaattaacagaccagcatcacaacggagatctgtggggtggagaggctggaagcgcaattcattgaccccgaggacaactgttttcccttgccctggctgtgagcatgatgtggatcttggagaacgaggaatcaatggtctgtttcgaaacttcactttggaaactattgtggacagatatcgtcaagcagctagggcagccacagccattatgtgtgacctttgtaaaccaccacctcaagaatccacaaaaagctgcatggactgtagtgcaagttactgcaatgaatgcttcaaaattcatcacccttggggtactataaaagctcaacatgagtatgttggtccaactactaacttcagacccaagattttaatgtgcccagaacatgaaacagagagaataaacatgtactgtgaattatgtaggaggccagtttgccatctgtgtaagttgggtggtaatcatgccaaccaccgtgtaaccactatgagcagtgcctacaaaaccttaaaggaaaagctttcaaaggatattgattaccttattggtaaggaaagccaggtgaagagtcaaatatctgaactaaacttgttaatgaaagaaacagagtgtaatggagagagggctaaagaagaagcaattacacattttgaaaagctctttgaagttctggaagagaggaaatcatctgttttgaaagcaattgactcctctaagaaactaagattagacaaatttcagactcaaatggaagagtaccagggacttctagagaacaatggacttgtgggatatgctcaagaagtgctaaaggagacagatcagtcttgctttgtgcagacagcaaagcagctccacctcagaatacagaaagccacagaatctttgaagagctttagacctgcagctcagacttcttttgaagactatgttgttaatacctctaaacaaacagaacttcttggagaattatcctttttctctagtggcatagacgtgccagagatcaatgaggaacagagcaaagtttataacaatgccttgataaattggcaccatccagaaaaggataaagctgatagctatgttcttgaatatcggaaaatcaatagagatgatgaaatgtcatggaatgagatagaagtgtgtggaacaagtaaaataattcaagacttggaaaacagtagtacctatgctttcagagtaagagcttacaagggttcaatctgtagtccttgcagcagagaattgattcttcatactcctccagctccagttttcagcttcctctttgatgaaaaatgtggctataataatgaacacctcctgctgaacttgaagagagaccgtgtagagagtagagctggatttaatcttctgcttgctgcagaacgcatccaagtgggttattacacaagcttagactacatcattggagatactggcattacaaaaggaaaacacttctgggccttccgtgtggaaccatattcatacctggtaaaagtgggagttgcttctagcgataaactacaagaatggctccgttctccccgggatgcagttagtccaagatatgagcaagacagtgggcatgacagtggaagtgaggatgcctgttttgattcttcacaaccatttaccttagttactataggcatgcagaaattttttatacccaagtcacctacttcttctaatgaacctgaaaatagagttctccctatgccaacaagtattgggattttccttgactgtgataaaggcaaagtaaatttctatgatatggatcagatgaaatgcctttatgaacgccaagtggactgttcacatacactgtatccagcatttgcattaatgggcagtggaggaattcagcttgaagaacccatcacagcaaaatatctggaataccaagaggacatgtagttgaaacatctgatgtgactcaggataaaaactgtaaacaaagcaatgccttagcgttaaccttcgtaactaattacatatcgctgagtgttctgtcaccccacttgtgtttgagtatgattcttcttgaaatacagaaaatctaaacagccttgtgtcttcatgtcgttgttctgcctttcacaaatgatgaaagtgaagatgttctttccaagttaatactgaagtggttaactttgcaactggactgtcttttactttatgtacaggatatctaatttatttctgtcagctggtgttgctgacactttccttatggtgggggggatacaaaagtatttattatgattctcttctgtttgacttttcatttttatatcatgtttatgtcctaagagaagatattttttaaatgccttatggataggaattagtactaagcaatgtgtcttgcatttgttttcaataggaaaacaaagttctagataggttaaaagaaaaacaccataaaagtggtagtatatttaagtggaaaattatgtattttaaagtgtgtaactattaaaaatatattgcctggaaaaggaatactactgttttgttttgttaagaccacaaactgtattgctaaggacattttaagagtctgcttagccataacactcatttaacagcatgggtagtaagcatggtttcttgcagaaaacacaaagttctcagctaacacattaaacttctcactttatatactttttttcagagaaatttatctttagtttttcttattctgtgaaaatatttgttcttatgtcaaagaattatttttcagatatattggtaaagatggactgatattaaaagtcatatttattcttttacccccttactgtgttttgtgattttcatttttggcccaattattacatatcaggttttcctgatttatatttacatgtttgaaaagttcattatatattttagtagcgttacatatattataaatttttgtaacatttaaatgttcacttatgtggcattttctgtttctcattggtaataagcatttctaatataagcaagtaaaaatacaaatttaattacttagaaatgataactaagatcacaatgactgtgtaccctttaaaatatcttttaatttgaggaattacattctatctaaattgtgtgtctgtttttgaaaggtgttgctttcaagtaggtggtttttatttaaagtacttatttttttgaggttaaaatattcagaaactacttttatgcattgtagcagtaatcatttatggaatgcttttgacatgttttaacagggtaaccaaaacttttaggcctgttttttttggttgtccttgttgttatatttttaatggaaatctgttactcaggctggtagcattaaattagctttttaccctcaactcaagtagcaaatatcatggagaacttcagtgtttagcaggctgttaatttcccatctatgaatagcactttatgatgtaggctaaactaagcaaataatgcagcgttatgtggatcattatgcaataaagctgctaaagtcacatttgtggttgatactcaagccttgtacaagcacatatcatgtagacatttttaaatgtgaagctttaacaggaataggatagctgtttcaaaccttgtgcaattgtaaataaattgtttagctgtgtttctttcatttttaataaaaaattaaaaag

SEQ ID NO: 401846 - DNA, 3938 bp, Homo sapiens
ttcccaggcggagtccgcaggagccgctgctgcagccggcagctgggcgggattcccggggtagtcgctgggagcaaagctcgcttctcccgcgcctgtgcttttgcctgccccggcttacttctccccgcgtcggtccgctggccacgtacagctgaccagctcatcttccagcttcggaccgaggctccacggccgccgcagggacccgcccaccagaccctgcgctcggtagccggtgtgagtggaacgtgccgctgatgacacctggcagaaggcagccatggagggcgatggctcagattcgccggctggaagcgcaattcattgaccccgaggacaactgttttcccttgccctggctgtgagcatgatgtggatcttggagaacgaggaatcaatggtctgtttcgaaacttcactttggaaactattgtggacagatatcgtcaagcagctagggcagccacagccattatgtgtgacctttgtaaaccaccacctcaagaatccacaaaaagctgcatggactgtagtgcaagttactgcaatgaatgcttcaaaattcatcacccttggggtactataaaagctcaacatgagtatgttggtccaactactaacttcagacccaagattttaatgtgcccagaacatgaaacagagagaataaacatgtactgtgaattatgtaggaggccagtttgccatctgtgtaagttgggtggtaatcatgccaaccaccgtgtaaccactatgagcagtgcctacaaaaccttaaaggaaaagctttcaaaggatattgattaccttattggtaaggaaagccaggtgaagagtcaaatatctgaactaaacttgttaatgaaagaaacagagtgtaatggagagagggctaaagaagaagcaattacacattttgaaaagctctttgaagttctggaagagaggaaatcatctgttttgaaagcaattgactcctctaagaaactaagattagacaaatttcagactcaaatggaagagtaccagggacttctagagaacaatggacttgtgggatatgctcaagaagtgctaaaggagacagatcagtcttgctttgtgcagacagcaaagcagctccacctcagaatacagaaagccacagaatctttgaagagctttagacctgcagctcagacttcttttgaagactatgttgttaatacctctaaacaaacagaacttcttggagaattatcctttttctctagtggcatagacgtgccagagatcaatgaggaacagagcaaagtttataacaatgccttgataaattggcaccatccagaaaaggataaagctgatagctatgttcttgaatatcggaaaatcaatagagatgatgaaatgtcatggaatgagatagaagtgtgtggaacaagtaaaataattcaagacttggaaaacagtagtacctatgctttcagagtaagagcttacaagggttcaatctgtagtccttgcagcagagaattgattcttcatactcctccagctccagttttcagcttcctctttgatgaaaaatgtggctataataatgaacacctcctgctgaacttgaagagagaccgtgtagagagtagagctggatttaatcttctgcttgctgcagaacgcatccaagtgggttattacacaagcttagactacatcattggagatactggcattacaaaaggaaaacacttctgggccttccgtgtggaaccatattcatacctggtaaaagtgggagttgcttctagcgataaactacaagaatggctccgttctccccgggatgcagttagtccaagatatgagcaagacagtgggcatgacagtggaagtgaggatgcctgttttgattcttcacaaccatttaccttagttactataggcatgcagaaattttttatacccaagtcacctacttcttctaatgaacctgaaaatagagttctccctatgccaacaagtattgggattttccttgactgtgataaaggcaaagtaaatttctatgatatggatcagatgaaatgcctttatgaacgccaagtggactgttcacatacactgtatccagcatttgcattaatgggcagtggaggaattcagcttgaagaacccatcacagcaaaatatctggaataccaagaggacatgtagttgaaacatctgatgtgactcaggataaaaactgtaaacaaagcaatgccttagcgttaaccttcgtaactaattacatatcgctgagtgttctgtcaccccacttgtgtttgagtatgattcttcttgaaatacagaaaatctaaacagccttgtgtcttcatgtcgttgttctgcctttcacaaatgatgaaagtgaagatgttctttccaagttaatactgaagtggttaactttgcaactggactgtcttttactttatgtacaggatatctaatttatttctgtcagctggtgttgctgacactttccttatggtgggggggatacaaaagtatttattatgattctcttctgtttgacttttcatttttatatcatgtttatgtcctaagagaagatattttttaaatgccttatggataggaattagtactaagcaatgtgtcttgcatttgttttcaataggaaaacaaagttctagataggttaaaagaaaaacaccataaaagtggtagtatatttaagtggaaaattatgtattttaaagtgtgtaactattaaaaatatattgcctggaaaaggaatactactgttttgttttgttaagaccacaaactgtattgctaaggacattttaagagtctgcttagccataacactcatttaacagcatgggtagtaagcatggtttcttgcagaaaacacaaagttctcagctaacacattaaacttctcactttatatactttttttcagagaaatttatctttagtttttcttattctgtgaaaatatttgttcttatgtcaaagaattatttttcagatatattggtaaagatggactgatattaaaagtcatatttattcttttacccccttactgtgttttgtgattttcatttttggcccaattattacatatcaggttttcctgatttatatttacatgtttgaaaagttcattatatattttagtagcgttacatatattataaatttttgtaacatttaaatgttcacttatgtggcattttctgtttctcattggtaataagcatttctaatataagcaagtaaaaatacaaatttaattacttagaaatgataactaagatcacaatgactgtgtaccctttaaaatatcttttaatttgaggaattacattctatctaaattgtgtgtctgtttttgaaaggtgttgctttcaagtaggtggtttttatttaaagtacttatttttttgaggttaaaatattcagaaactacttttatgcattgtagcagtaatcatttatggaatgcttttgacatgttttaacagggtaaccaaaacttttaggcctgttttttttggttgtccttgttgttatatttttaatggaaatctgttactcaggctggtagcattaaattagctttttaccctcaactcaagtagcaaatatcatggagaacttcagtgtttagcaggctgttaatttcccatctatgaatagcactttatgatgtaggctaaactaagcaaataatgcagcgttatgtggatcattatgcaataaagctgctaaagtcacatttgtggttgatactcaagccttgtacaagcacatatcatgtagacatttttaaatgtgaagctttaacaggaataggatagctgtttcaaaccttgtgcaattgtaaataaattgtttagctgtgtttctttcatttttaataaaaaattaaaaag

SEQ ID NO: 401847 - DNA, 704 bp, Homo sapiens
ggtgagggtttcacggcctctgctgccgccgccgccgccctcgtttgttccgttagatcgcgcagccccgaccgctgcacccggatcctagcaagccgggcgaggctgcccgggagccctcgatggccttcatttcacccaagcccgcttcttgctttccccggcgcttcccctcttttcctggttaacagcttatgggcggggagctcggcaaaactcagactaaaaacagaaaaagagaaaagaaaggacaaattcgatacacccgcgtcggtcctccagagtttgtgaaggggtgtaaacatgtcggagtctggggagatgagtgaatttggctacatcatggaattgatagctaaaggcaaggtaagtgatgaggcgcggggcgccgcggcctgggcccccgactccggcactacctggcccgccactgtgggcgtccgtgtccattccagcgcctgggaagggcgggaggctggaatccaggagccgcgctcgcagcccgggcgtcccagcagctgcggaatgcaaagtagccgccttttctttattgcgtggcatctctgaaataagccaagaggggactttcggacgcttttggggccagctgggcagcaataggggctctcggacgccgaagggcgagagcccagcgtcggaagatggagaggagggcggggcgttggccaagggggcgctgcccc

SEQ ID NO: 401848 - DNA, 723 bp, Homo sapiens
cctgccggcatgcgataaaggccggggaatgtctagctggggccgcgctgagccgagtgcggacccgctttgtgtgcgcgtttgtttgtctccgctgcggtccgaaccgctgccgcgacccccgaggaggcggggcctccgcgcgcccggctccgcctggtgagggtttcacggcctctgctgccgccgccgccgccctcgtttgttccgttagatcgcgcagccccgaccgctgcacccggatcctagcaagccgggcgaggctgcccgggagccctcgatggccttcatttcacccaagcccgcttcttgctttccccggcgcttcccctcttttcctggttaacagcttatgggcggggagctcggcaaaactcagactaaaaacagaaaaagagaaaagaaaggacaaattcgatacacccgcgtcggtcctccagagtttgtgaaggggtgtaaacatgtcggagtctggggagatgagtgaatttggctacatcatggaattgatagctaaaggcaagatgccggattggagacgaggctaccgctgcagacagggctgtgggaagacgacggaacttgccacagcgacagacttctcccaaacaggaaataaaagtgggaagcattttaaaacctaaaaaaaaaacaaacacatcaaaccacaacaccaccgccaccaagcccaccaccgcagaccagcccaccaccagagagggg

SEQ ID NO: 401849 - DNA, 4173 bp, Homo sapiens
ttcccaggcggagtccgcaggagccgctgctgcagccggcagctgggcgggattcccggggtagtcgctgggagcaaagctcgcttctcccgcgcctgtgcttttgcctgccccggcttacttctccccgcgtcggtccgctggccacgtacagctgaccagctcatcttccagcttcggaccgaggctccacggccgccgcagggacccgcccaccagaccctgcgctcggtagccggtgtgagtggaacgtgccgctgatgacacctggcagaaggcagccatggagggcgatggctcagattcgccggttaccattaagaatatcgaaagggagctcatttgcccagcatgcaaggagctgtttacccacccattgattctcccttgccaacatagtatctgtcataaatgtgtaaaagaactcctgctgactctcgatgattcattcaacgatgtgggatcagacaactccaatcaaagcagtcctcgacttcggctcccctcccctagtatggataaaattgaccgaattaacagaccaggctggaagcgcaattcattgaccccgaggacaactgttttcccttgccctggctgtgagcatgatgtggatcttggagaacgaggaatcaatggtctgtttcgaaacttcactttggaaactattgtggacagatatcgtcaagcagctagggcagccacagccattatgtgtgacctttgtaaaccaccacctcaagaatccacaaaaagctgcatggactgtagtgcaagttactgcaatgaatgcttcaaaattcatcacccttggggtactataaaagctcaacatgagtatgttggtccaactactaacttcagacccaagattttaatgtgcccagaacatgaaacagagagaataaacatgtactgtgaattatgtaggaggccagtttgccatctgtgtaagttgggtggtaatcatgccaaccaccgtgtaaccactatgagcagtgcctacaaaaccttaaaggaaaagctttcaaaggatattgattaccttattggtaaggaaagccaggtgaagagtcaaatatctgaactaaacttgttaatgaaagaaacagagtgtaatggagagagggctaaagaagaagcaattacacattttgaaaagctctttgaagttctggaagagaggaaatcatctgttttgaaagcaattgactcctctaagaaactaagattagacaaatttcagactcaaatggaagagtaccagggacttctagagaacaatggacttgtgggatatgctcaagaagtgctaaaggagacagatcagtcttgctttgtgcagacagcaaagcagctccacctcagaatacagaaagccacagaatctttgaagagctttagacctgcagctcagacttcttttgaagactatgttgttaatacctctaaacaaacagaacttcttggagaattatcctttttctctagtggcatagacgtgccagagatcaatgaggaacagagcaaagtttataacaatgccttgataaattggcaccatccagaaaaggataaagctgatagctatgttcttgaatatcggaaaatcaatagagatgatgaaatgtcatggaatgagatagaagtgtgtggaacaagtaaaataattcaagacttggaaaacagtagtacctatgctttcagagtaagagcttacaagggttcaatctgtagtccttgcagcagagaattgattcttcatactcctccagctccagttttcagcttcctctttgatgaaaaatgtggctataataatgaacacctcctgctgaacttgaagagagaccgtgtagagagtagagctggatttaatcttctgcttgctgcagaacgcatccaagtgggttattacacaagcttagactacatcattggagatactggcattacaaaaggaaaacacttctgggccttccgtgtggaaccatattcatacctggtaaaagtgggagttgcttctagcgataaactacaagaatggctccgttctccccgggatgcagttagtccaagatatgagcaagacagtgggcatgacagtggaagtgaggatgcctgttttgattcttcacaaccatttaccttagttactataggcatgcagaaattttttatacccaagtcacctacttcttctaatgaacctgaaaatagagttctccctatgccaacaagtattgggattttccttgactgtgataaaggcaaagtaaatttctatgatatggatcagatgaaatgcctttatgaacgccaagtggactgttcacatacactgtatccagcatttgcattaatgggcagtggaggaattcagcttgaagaacccatcacagcaaaatatctggaataccaagaggacatgtagttgaaacatctgatgtgactcaggataaaaactgtaaacaaagcaatgccttagcgttaaccttcgtaactaattacatatcgctgagtgttctgtcaccccacttgtgtttgagtatgattcttcttgaaatacagaaaatctaaacagccttgtgtcttcatgtcgttgttctgcctttcacaaatgatgaaagtgaagatgttctttccaagttaatactgaagtggttaactttgcaactggactgtcttttactttatgtacaggatatctaatttatttctgtcagctggtgttgctgacactttccttatggtgggggggatacaaaagtatttattatgattctcttctgtttgacttttcatttttatatcatgtttatgtcctaagagaagatattttttaaatgccttatggataggaattagtactaagcaatgtgtcttgcatttgttttcaataggaaaacaaagttctagataggttaaaagaaaaacaccataaaagtggtagtatatttaagtggaaaattatgtattttaaagtgtgtaactattaaaaatatattgcctggaaaaggaatactactgttttgttttgttaagaccacaaactgtattgctaaggacattttaagagtctgcttagccataacactcatttaacagcatgggtagtaagcatggtttcttgcagaaaacacaaagttctcagctaacacattaaacttctcactttatatactttttttcagagaaatttatctttagtttttcttattctgtgaaaatatttgttcttatgtcaaagaattatttttcagatatattggtaaagatggactgatattaaaagtcatatttattcttttacccccttactgtgttttgtgattttcatttttggcccaattattacatatcaggttttcctgatttatatttacatgtttgaaaagttcattatatattttagtagcgttacatatattataaatttttgtaacatttaaatgttcacttatgtggcattttctgtttctcattggtaataagcatttctaatataagcaagtaaaaatacaaatttaattacttagaaatgataactaagatcacaatgactgtgtaccctttaaaatatcttttaatttgaggaattacattctatctaaattgtgtgtctgtttttgaaaggtgttgctttcaagtaggtggtttttatttaaagtacttatttttttgaggttaaaatattcagaaactacttttatgcattgtagcagtaatcatttatggaatgcttttgacatgttttaacagggtaaccaaaacttttaggcctgttttttttggttgtccttgttgttatatttttaatggaaatctgttactcaggctggtagcattaaattagctttttaccctcaactcaagtagcaaatatcatggagaacttcagtgtttagcaggctgttaatttcccatctatgaatagcactttatgatgtaggctaaactaagcaaataatgcagcgttatgtggatcattatgcaataaagctgctaaagtcacatttgtggttgatactcaagccttgtacaagcacatatcatgtagacatttttaaatgtgaagctttaacaggaataggatagctgtttcaaaccttgtgcaattgtaaataaattgtttagctgtgtttctttcatttttaataaaaaattaaaaag

SEQ ID NO: 401850 - DNA, 4205 bp, Homo sapiens
agcggagtttaaatccattgtttctggccgggtatggtggcccggcactttgggaggccaaggtgggaggatcacctgaggtcaggagttcgagaccagcctggacaacatggttgtcagcgaagtgaaggaaagccggcagtcacaggcctcacccagctcccacacagtccaaagggccagtcccacttccactgtacccccaacaacagtaccaagtttgtttccaggcagtgggtgagcagggctgagaacttgccccagtctacccgcctcccagctgcaaaagcaagtatggctttccttctcccacctgtggagtctgcacactggatttacaccctcccccaagttgtggccaggaggcttctccatcagttcaaattgttacaaactttagctggaggtttccttctccctgtggccttttcccagagcctctggccgttctccggaaggacccctgtgaggccaggcaaaaacgacttgatgggggcccagtgagcttccaggggttttcccactgcttcctctacccttgtatttcactcagctctctaaattgactcagctccaggctggaagcgcaattcattgaccccgaggacaactgttttcccttgccctggctgtgagcatgatgtggatcttggagaacgaggaatcaatggtctgtttcgaaacttcactttggaaactattgtggacagatatcgtcaagcagctagggcagccacagccattatgtgtgacctttgtaaaccaccacctcaagaatccacaaaaagctgcatggactgtagtgcaagttactgcaatgaatgcttcaaaattcatcacccttggggtactataaaagctcaacatgagtatgttggtccaactactaacttcagacccaagattttaatgtgcccagaacatgaaacagagagaataaacatgtactgtgaattatgtaggaggccagtttgccatctgtgtaagttgggtggtaatcatgccaaccaccgtgtaaccactatgagcagtgcctacaaaaccttaaaggaaaagctttcaaaggatattgattaccttattggtaaggaaagccaggtgaagagtcaaatatctgaactaaacttgttaatgaaagaaacagagtgtaatggagagagggctaaagaagaagcaattacacattttgaaaagctctttgaagttctggaagagaggaaatcatctgttttgaaagcaattgactcctctaagaaactaagattagacaaatttcagactcaaatggaagagtaccagggacttctagagaacaatggacttgtgggatatgctcaagaagtgctaaaggagacagatcagtcttgctttgtgcagacagcaaagcagctccacctcagaatacagaaagccacagaatctttgaagagctttagacctgcagctcagacttcttttgaagactatgttgttaatacctctaaacaaacagaacttcttggagaattatcctttttctctagtggcatagacgtgccagagatcaatgaggaacagagcaaagtttataacaatgccttgataaattggcaccatccagaaaaggataaagctgatagctatgttcttgaatatcggaaaatcaatagagatgatgaaatgtcatggaatgagatagaagtgtgtggaacaagtaaaataattcaagacttggaaaacagtagtacctatgctttcagagtaagagcttacaagggttcaatctgtagtccttgcagcagagaattgattcttcatactcctccagctccagttttcagcttcctctttgatgaaaaatgtggctataataatgaacacctcctgctgaacttgaagagagaccgtgtagagagtagagctggatttaatcttctgcttgctgcagaacgcatccaagtgggttattacacaagcttagactacatcattggagatactggcattacaaaaggaaaacacttctgggccttccgtgtggaaccatattcatacctggtaaaagtgggagttgcttctagcgataaactacaagaatggctccgttctccccgggatgcagttagtccaagatatgagcaagacagtgggcatgacagtggaagtgaggatgcctgttttgattcttcacaaccatttaccttagttactataggcatgcagaaattttttatacccaagtcacctacttcttctaatgaacctgaaaatagagttctccctatgccaacaagtattgggattttccttgactgtgataaaggcaaagtaaatttctatgatatggatcagatgaaatgcctttatgaacgccaagtggactgttcacatacactgtatccagcatttgcattaatgggcagtggaggaattcagcttgaagaacccatcacagcaaaatatctggaataccaagaggacatgtagttgaaacatctgatgtgactcaggataaaaactgtaaacaaagcaatgccttagcgttaaccttcgtaactaattacatatcgctgagtgttctgtcaccccacttgtgtttgagtatgattcttcttgaaatacagaaaatctaaacagccttgtgtcttcatgtcgttgttctgcctttcacaaatgatgaaagtgaagatgttctttccaagttaatactgaagtggttaactttgcaactggactgtcttttactttatgtacaggatatctaatttatttctgtcagctggtgttgctgacactttccttatggtgggggggatacaaaagtatttattatgattctcttctgtttgacttttcatttttatatcatgtttatgtcctaagagaagatattttttaaatgccttatggataggaattagtactaagcaatgtgtcttgcatttgttttcaataggaaaacaaagttctagataggttaaaagaaaaacaccataaaagtggtagtatatttaagtggaaaattatgtattttaaagtgtgtaactattaaaaatatattgcctggaaaaggaatactactgttttgttttgttaagaccacaaactgtattgctaaggacattttaagagtctgcttagccataacactcatttaacagcatgggtagtaagcatggtttcttgcagaaaacacaaagttctcagctaacacattaaacttctcactttatatactttttttcagagaaatttatctttagtttttcttattctgtgaaaatatttgttcttatgtcaaagaattatttttcagatatattggtaaagatggactgatattaaaagtcatatttattcttttacccccttactgtgttttgtgattttcatttttggcccaattattacatatcaggttttcctgatttatatttacatgtttgaaaagttcattatatattttagtagcgttacatatattataaatttttgtaacatttaaatgttcacttatgtggcattttctgtttctcattggtaataagcatttctaatataagcaagtaaaaatacaaatttaattacttagaaatgataactaagatcacaatgactgtgtaccctttaaaatatcttttaatttgaggaattacattctatctaaattgtgtgtctgtttttgaaaggtgttgctttcaagtaggtggtttttatttaaagtacttatttttttgaggttaaaatattcagaaactacttttatgcattgtagcagtaatcatttatggaatgcttttgacatgttttaacagggtaaccaaaacttttaggcctgttttttttggttgtccttgttgttatatttttaatggaaatctgttactcaggctggtagcattaaattagctttttaccctcaactcaagtagcaaatatcatggagaacttcagtgtttagcaggctgttaatttcccatctatgaatagcactttatgatgtaggctaaactaagcaaataatgcagcgttatgtggatcattatgcaataaagctgctaaagtcacatttgtggttgatactcaagccttgtacaagcacatatcatgtagacatttttaaatgtgaagctttaacaggaataggatagctgtttcaaaccttgtgcaattgtaaataaattgtttagctgtgtttctttcatttttaataaaaaattaaaaag

SEQ ID NO: 401851 - DNA, 3740 bp, Homo sapiens
agcggagtttaaatccattgtttctggccgggtatggtggcccggcactttgggaggccaaggtgggaggatcacctgaggtcaggagttcgagaccagcctggacaacatggctggaagcgcaattcattgaccccgaggacaactgttttcccttgccctggctgtgagcatgatgtggatcttggagaacgaggaatcaatggtctgtttcgaaacttcactttggaaactattgtggacagatatcgtcaagcagctagggcagccacagccattatgtgtgacctttgtaaaccaccacctcaagaatccacaaaaagctgcatggactgtagtgcaagttactgcaatgaatgcttcaaaattcatcacccttggggtactataaaagctcaacatgagtatgttggtccaactactaacttcagacccaagattttaatgtgcccagaacatgaaacagagagaataaacatgtactgtgaattatgtaggaggccagtttgccatctgtgtaagttgggtggtaatcatgccaaccaccgtgtaaccactatgagcagtgcctacaaaaccttaaaggaaaagctttcaaaggatattgattaccttattggtaaggaaagccaggtgaagagtcaaatatctgaactaaacttgttaatgaaagaaacagagtgtaatggagagagggctaaagaagaagcaattacacattttgaaaagctctttgaagttctggaagagaggaaatcatctgttttgaaagcaattgactcctctaagaaactaagattagacaaatttcagactcaaatggaagagtaccagggacttctagagaacaatggacttgtgggatatgctcaagaagtgctaaaggagacagatcagtcttgctttgtgcagacagcaaagcagctccacctcagaatacagaaagccacagaatctttgaagagctttagacctgcagctcagacttcttttgaagactatgttgttaatacctctaaacaaacagaacttcttggagaattatcctttttctctagtggcatagacgtgccagagatcaatgaggaacagagcaaagtttataacaatgccttgataaattggcaccatccagaaaaggataaagctgatagctatgttcttgaatatcggaaaatcaatagagatgatgaaatgtcatggaatgagatagaagtgtgtggaacaagtaaaataattcaagacttggaaaacagtagtacctatgctttcagagtaagagcttacaagggttcaatctgtagtccttgcagcagagaattgattcttcatactcctccagctccagttttcagcttcctctttgatgaaaaatgtggctataataatgaacacctcctgctgaacttgaagagagaccgtgtagagagtagagctggatttaatcttctgcttgctgcagaacgcatccaagtgggttattacacaagcttagactacatcattggagatactggcattacaaaaggaaaacacttctgggccttccgtgtggaaccatattcatacctggtaaaagtgggagttgcttctagcgataaactacaagaatggctccgttctccccgggatgcagttagtccaagatatgagcaagacagtgggcatgacagtggaagtgaggatgcctgttttgattcttcacaaccatttaccttagttactataggcatgcagaaattttttatacccaagtcacctacttcttctaatgaacctgaaaatagagttctccctatgccaacaagtattgggattttccttgactgtgataaaggcaaagtaaatttctatgatatggatcagatgaaatgcctttatgaacgccaagtggactgttcacatacactgtatccagcatttgcattaatgggcagtggaggaattcagcttgaagaacccatcacagcaaaatatctggaataccaagaggacatgtagttgaaacatctgatgtgactcaggataaaaactgtaaacaaagcaatgccttagcgttaaccttcgtaactaattacatatcgctgagtgttctgtcaccccacttgtgtttgagtatgattcttcttgaaatacagaaaatctaaacagccttgtgtcttcatgtcgttgttctgcctttcacaaatgatgaaagtgaagatgttctttccaagttaatactgaagtggttaactttgcaactggactgtcttttactttatgtacaggatatctaatttatttctgtcagctggtgttgctgacactttccttatggtgggggggatacaaaagtatttattatgattctcttctgtttgacttttcatttttatatcatgtttatgtcctaagagaagatattttttaaatgccttatggataggaattagtactaagcaatgtgtcttgcatttgttttcaataggaaaacaaagttctagataggttaaaagaaaaacaccataaaagtggtagtatatttaagtggaaaattatgtattttaaagtgtgtaactattaaaaatatattgcctggaaaaggaatactactgttttgttttgttaagaccacaaactgtattgctaaggacattttaagagtctgcttagccataacactcatttaacagcatgggtagtaagcatggtttcttgcagaaaacacaaagttctcagctaacacattaaacttctcactttatatactttttttcagagaaatttatctttagtttttcttattctgtgaaaatatttgttcttatgtcaaagaattatttttcagatatattggtaaagatggactgatattaaaagtcatatttattcttttacccccttactgtgttttgtgattttcatttttggcccaattattacatatcaggttttcctgatttatatttacatgtttgaaaagttcattatatattttagtagcgttacatatattataaatttttgtaacatttaaatgttcacttatgtggcattttctgtttctcattggtaataagcatttctaatataagcaagtaaaaatacaaatttaattacttagaaatgataactaagatcacaatgactgtgtaccctttaaaatatcttttaatttgaggaattacattctatctaaattgtgtgtctgtttttgaaaggtgttgctttcaagtaggtggtttttatttaaagtacttatttttttgaggttaaaatattcagaaactacttttatgcattgtagcagtaatcatttatggaatgcttttgacatgttttaacagggtaaccaaaacttttaggcctgttttttttggttgtccttgttgttatatttttaatggaaatctgttactcaggctggtagcattaaattagctttttaccctcaactcaagtagcaaatatcatggagaacttcagtgtttagcaggctgttaatttcccatctatgaatagcactttatgatgtaggctaaactaagcaaataatgcagcgttatgtggatcattatgcaataaagctgctaaagtcacatttgtggttgatactcaagccttgtacaagcacatatcatgtagacatttttaaatgtgaagctttaacaggaataggatagctgtttcaaaccttgtgcaattgtaaataaattgtttagctgtgtttctttcatttttaataaaaaattaaaaag

SEQ ID NO: 401852 - DNA, 454 bp, Homo sapiens
atcacactctttatgagcctctcctttgttcccagagaccctgaatgggtccagccactcccctcactaagagcctgggcgcaactttggtggaggtgataagtgccatggtaaaggtacactgtgcagagtgagttagggtgagaccacccaccttgggaagggggccacggtgagaaagccatggatctagaccaggagtacaagaattttagaatggagagagcccttagaggccagctaatgcatcacttatccagctcaaagacttgcaagatgcagggccagatgcggtggctcacgcctataatcccagcagtttgagatgctgaagcaggcagatcacttgagaccaggagttcaagaccagcctggccaacatggcaaaaccccatctctactaaaaaatacaaaaattagccaggtgtggtggcacacacctgtaatcccaggt

SEQ ID NO: 401853 - DNA, 516 bp, Homo sapiens
tctagaggatcccatatcggtggagaggtgggcagatcacttgagcccaggagtttgagagcagtctggccaacatggtgaaaccccatctccactaaaaatacaaaaattagccaggcgtggtggtggtgcctgtaatcccagctactcgggaggttgaggcaggagaatcacttgaacccgggagttggaggttgcagtgagctgagatcacaccactgcactccagcctgagcaacagagcgagactccgtctcaagaaaaaaaaaaaaagaattttgcactctcagctctaagcacacttaatactctcaacaacctgtgatacagatataatattattacattgattttacagaggaggaaactgaggcttaaggaggttaagaaaatcttccaagttcgtcacataggtagtcggttgggcagctcagattcaatgccaggtccacctgactttaaagcccatgaccttaacaattatgccttattaatttccttttgcagatattcact

SEQ ID NO: 401854 - DNA, 381 bp, Homo sapiens
cactagcttgacctggaatccgcatgaatcatccacattggccagctagcccatccccaggggaccctgtaattgtgcaaccagcctctcccctctacccaccctccttctcttgataaaacctggccagaaactcaggcatagagagaaaatggatgcggtgacaattccatgtgttattcagaattaactaggtgaatatcgctgagctcctcttaggtagtaggcattgaacgatgcagagatctcggggaaatgggccttatcctcagggaccctgcagccctctggttccagtgtcagcagccctcactaaatgtcaatggatgcgcccagaagaggagctaggacttcataggacgagacaggttctctagcgcc

SEQ ID NO: 401855 - DNA, 534 bp, Homo sapiens
aatttggcatcattattttatctggcaatctcagtcaggtttaacacctttcccaagctgagcttgtcatttcctccaaaagaacacaaacctataaaggacaggtaacgtcctgtgggacagccatcctttgccctatgctgagaaaacaggtttgcagagaataaaaacgaacaaataaataaacatttaaaaaagcagttgtgtggaaagaagcacaaaagagaggccatgagactccataattaagcagagatgaactgccctagttcttaatggcttgttagtcctcattccagtcttccacagggtgtgacttggcttccataaaataaactcacggtcccatgatcattttccctctttgctttagcaagaatctttaactaaaacaactctcttttcatttccactgtctaccactctagtctcaactctcatgagtctggaattttgcaaaagcctgataaacttgtcacatgattccagtgtctacccattccttgtaagtaaccaagatattcttgcctgatt

SEQ ID NO: 401856 - DNA, 162 bp, Homo sapiens
acccacccaccttgggcttccaaagtactggaattacaggcatgtgccaccctgccgggccctagttttctatttaaaatccccaatgaaggttaaacaaaatgagaggcttaaatcttttgggggataagttgattatctccctggtttactaatttctta

SEQ ID NO: 401857 - DNA, 1105 bp, Homo sapiens
  misc_feature (6)..(6): n is a, c, g, or t
ggcatnatcctcaacacaataaaccaaagcttcagggttaacggaagacatgatgcagagcaagcctctgtgattcctgcccagcacctgtgaggcctgacgtgtcagttcccaataaatgctcttctgatatgtttcccgtacaggcaaggaggcttgggtagtgcagatttgtgtatttcaatctttgaaagctctgatgtaatttagaaatgaaatccaatcatgagtccaggcagagaacgcctgctgtaatctacactgttgctgggactgcgcattctgtatataactgtgttgggtgttgggctatcgcccaacaccttaaaccccccgagcacacaaagcagtgagaagtagttatcttcctggttctttctagttgcctaataacatagttggcttgctctggtctcaagtcaatttggaaacagagagagaatcaagagaatcaaatcaggggacgaagcaaaacaaaagtgaatagcaaacaataagcacatgaaaaatgtgcaacattagccatgggggaaaattcaaatcaaaaccgcaattagataccacttcacacctaccaggatggctagaatcaaaaggacttacaataacaagtgttggggatgatgtggagaaattggaacccttacatactactggtgggaatgtaaaatgttgcagcctaaatgtggaaagcagcctggccattccaccaaaggtcagagttgtcaaatgatccagcagttccactcacaggtatgtatactcaagagaaatataaacatgtccatgcaaaaacttgcacacagatgttcacagagcattattcataatagcaaaaaagtgaaaacaacccaaatgtccatcaaccgataaacaatacgtggtatatccatataatgatatatattcagctataaaaaggaatgaagtattgatacatgtacaacacagatgaaccttgacaatattatgctaagtgagagaagccagtcacatattatatgaatctagttatatgcaatgtccagattgggcaaatccatagagacaaaaagtataatagattagtggttgcttagacatgagggggatggggagatgaagg

SEQ ID NO: 401858 - DNA, 416 bp, Homo sapiens
gcctctcaggcacctcaaatactacctgtccaaacttaagctcattgtcatctccctaaaacctgctcctttttatttcccgtaggttagtgacatcattatacactcaagccagaaatctctccaactttttcatgctactcattcaagcaaccagacatcaggttccactactatcttcttcagaaaagctttccagatcaaagcagaagcccaactctcttctgctgcgtttcaacagggactgcttacgtccagatcatcccagaggattcctgtgttagctctatcagttctaccttccttgagaactgctacatagctaccattcaataaaataaatctcagcgtataaccttacttctcgacacttccacaaatgtcttagtaccgtggggttagggtgcataacctga

SEQ ID NO: 401859 - DNA, 433 bp, Homo sapiens
aacttgtccatgactgtagtgcccattttgctgaagtcttcctcccttgctggctttgaggaagctagctgcaatgttgaggaactccatgtggcacgaaactacaggtggtttccagaagctgagaacagactctagccaacatcctatgaaggtctccagccagcaccctgcaataaagagaatccctcacttctgcgattgcaaggaactgaattctgccagcagtctgaatgagcttggaagtggatacttccttctgttgagcctcagttgagactgaagctctggctgacaccttgattgtgagaccccacctaagtcaagcctggactcctgattcacagaaactggtagataatgaatgtatactgctttataccactaagattgtggtaaggttagacagcaataaataactaatacacagttt

SEQ ID NO: 401860 - DNA, 772 bp, Homo sapiens
cacttagcagctcaaaagacttaaaaaacaaaacagaaaacctagtgactcatgtcacgctttgtagatactttactaagtagacttggaatgctctatttaactgtcaatgcgttgttgcattgaggattttgggggtggtgaaaccagaagcttttccaagatcccatgaccaaaataaactattttcctttttattaaaaaatgggaaaagagagagtattttcctaaaactggcttaaaaagattcagtccacgaacttagtctaggtaaaataataatcatatgcttccccaaactgaaacatttttaatgctttggtttctttaacttttttaaaaactcagaacaagatgatcacttagaaatatgaaattgaaattcgcatgggactccagtaaaacatctttgcaaactgcgtagcacattgaagacagtgcatcagatgtattatatgtaacatgatagaccagccaaaatggacaatgaatagatatttttatttcgatcaactgaactgcatattacaaggtgaaaaaagaaaactccgattacttaagactggttcacaaagcaccttataaattggatactggtcctgatctgtagggatttccccctgggcccattctctttctaatccagattattctctaagaaaaagttaactgaattaaattaattgattcttctgcagtgccgctaaatggtctcaactgcagatgagccaaatacaggtcttttctcaccaggcctgcactccgacccctg

SEQ ID NO: 401861 - DNA, 394 bp, Homo sapiens
gctttcagaactggatgtaaaaccttagcctccttattgcaagagagcacaaatgaagttaaatgtaagcatgtttgaatctgatacaatttattttataatcgcatgctgagaagttaacccagacaataggggataagcttaagttgaaatcgattcttctaaaaatagatcctttttcatttgcattcaccaaaagtgcactcctccatttattaactattttattagtaaataaagtactgtatttaagtgcatatgttagtcagatgggaacaataactttttggagctcaaagcatgttctcttattcagcattatggcctatttgactaagatgtaccttgaattaattaatgcatgatttcagtaataaaaattttaaaagtaata

SEQ ID NO: 401862 - DNA, 819 bp, Homo sapiens
gggctccagccttgggaggacccctttcctgtttcttaaccatgcttgatggtgtcctcaaaggagccctgctcagtggcagaactgctttctcagcctcttccccgccaaggttgttttcaagtcccagcagtcacagactttcatcctgggctcttctttcttttgcaattcagctctcgaaatgactctgtggtctgcgggtgactccactccacgtgcctacagccacgcccacagcgccacctccggacgctgctgagctgcgcacctgtgcctgacacctggctttgggaaactcagcagcagtgcccagcgtcatgaccctgggggcaggagggcatctggatccaggatggcaccctcaccacaatctgtcttggctctgtgcccgcccgtggggtacacaggagggctctttcagccctaagtccttgtgttcctgacctttgttcctcttccacccagcttgcaagtgcagaatttttttttagctcgtcgcttccctgcagtcccttgtccaatgcagcctccggccgatactcaggccagtgttgtttcccaacctctccactagatacgcacacttagctcacggtctgcctcatgagtcatcccagttgagctttaccaaatgttttgccccacctaacagcctgcccacattccaaatcctggcaggtcgcacgttttattagcacagcacccctctcctagcggccagcttctctattaggccacgttatgctccagccacacaactatgaagcgcagacgtctcacacaacaaagctttctcatgctgcaggcccacctcag

SEQ ID NO: 401863 - DNA, 136 bp, Homo sapiens
tgtctttctcctttgggaacttgcaggttgctaggtggagtggggacggtgatgagggtgaggagctggcagtagccccctcacatgggctttgcattactaactctcccttcttgttcccacagaacactctgct

SEQ ID NO: 401864 - DNA, 261 bp, Homo sapiens
cagaactggagttgtattcacattttttattgccactccaactattagattctagagttcctttccctgggaaagctagggtctggtgcagtctttcctgtccatcaggaagcaggattttgatttgtttatttgttttctcattcatttcagtggatttagctcagcttaataaagttcaagtaacctgtccaaaatcataaattagcattagtggttcaagattactgatttcctcagggttctgccagaatttatagc

SEQ ID NO: 401865 - DNA, 1187 bp, Homo sapiens
atcacggtttacttgcccatttcccttttgctaccttctttcctatctggagattcatattctagagtccctggtcaaccctacggatgcgaagaagagatggcagttcacagcaactgcatagagtagggagcagctttcctcccaccatcctaggctggggaccttctttgcttctcacaccactgtggttggctcagctcaagtaagcacgttctctctgtatgctagagctactgacatcatctctactagaattgttttaaatatcttttgatgggaaataccaggttgaacttcaagcatcatggaaacaaaggttctagctgcaagagagtaaagttctaggtgtttgtatgccaaggtttatatgtacacagatccaacacatactgtaagaaagacttgagtacacaaggttttcaggttttaatgcccattgggaccgtgaacaaatgagaagaatgggagcattgtcttgcctcgcttggaaggacgccttccggcatctgatccacatggattcacttttaggatgcagttctttgggggccagatttggctgcagattcaccctgaagagaactatccaatgggcctggtggggcttgggtgcctgccttttttgttggaggctcagacttctagagcagagcaaagttgggaagaatgaggtcttaggattctcattccccagagagccccagcctcgcttctgatcattactccccaagtctgaatctactgtgaaggtgaagttatcaattttttcttgtttgagtcctttaaacccacaaatgtatatgctttattttatattatttattatgtacatatgcctgttagtacttcgtctgtgactaggacaaggtctgtcttgaagcttcctcatccatggatcctagggttctgctgtcctttaaggcgggtgagagggtagtgttgttttttataaacaggttgctgcttttatgttggccctagcatccccagcccctttagttgggcccacctgtattccttatgaccagtgttttggatgaggatggaggcaggtctcctaccttgtgggcagggcctctcaagtacctccatgaaatatttccaaggtggtttcttggtgacaggctctcttcccttcttgaggctccagtccctgtggctgttccttcccatacctcctctct

SEQ ID NO: 401866 - DNA, 361 bp, Homo sapiens
tgtctttttatcttaaatgctttattggctgttgtctgttgccaccacgagaccctaagtttcatgagcaaaaggacttggactgtcttgtctatcacaatatcctcggttcctaaaaggggcctaaattcagggctgaatgaataaatgaatgaatggaagtgcctttcccaaaagacaggaaactaaaccgttttgaaatacagtcaccccagtccaaggtcttctaaactttcctgataagagtcatccgaggtacttatttaaaaaacatatattcccagcccttctgaatcagattctcctacaaaggggcctgggaagcttcaagcttgatgagcaccccaggggatttgtatct

SEQ ID NO: 401867 - DNA, 335 bp, Homo sapiens
aagggtcatggggcacatcctggctgcctttaaaaggaagatgctcaaaagctaccctaggccaggcacagtgcctcacacctgtaatcccaacactttgggaggccaaggcgggaggactgcttgagcccaggagtactagaccaggctgggctttggtgacactccttctctacaaaaactacaaaaatagctgggtgtagtggcacaggcctgtagtcccagctactcaggaggctgaggtggaaggaattgcttaagcccaggagattgaggctgcagtgagctgttaccacgccattagactatagcctgggcaacagagtgagatctca

SEQ ID NO: 401868 - DNA, 138 bp, Homo sapiens
aaaagtcggggaggggagtggaaagattgcttacaaacctgtgcaaaatgcctctgcagatagaatattgtttactctgggagaacaagaaagtctagtagcctgaattgacttacaaagttaaaagcaatctggtaa

SEQ ID NO: 401869 - DNA, 395 bp, Homo sapiens
aaagcaatgggatgtcaattctgtgagtatgtaaaattgtaacttccatcttgcaagccaactctcttctttgctggctttcatgacgcaatataccatgttggaggggctcgcgtggcgaagaactgagaggcctgtaggaacaaagtccaatagccaggtaggaaggagtccctcagtcccacaacccaaggaaactgaattctgtcaactaacacgcatgtaagtgagcttggaagtgacttcttccccaagtgagtcttcagatgaggtcctagccaactttttgattgcagcttgtgacagaccctgaagcaaaggactcagctaagttgtgtcctaattcctccactgtgagaaaataaatgtgtgttttttaaaatgctaaatttgtg

SEQ ID NO: 401870 - DNA, 276 bp, Homo sapiens
tttttagcttggataactgggtaaatgctaatgaccctatctgacataaggaatacagagagaaaaccaggggatgacagcaggttcaatgtaagacatgtcatatgcaaggtttctgcgagacagagagctttgtttacgcaagcaatagcaaatatgggtctgtgactcagtttaagctggagacacagatatttcagaggagaggcaagccaagaagactagaggtgatcagccctaccctgcatcctatttataaagcagcagtgtcactcc

SEQ ID NO: 401871 - DNA, 505 bp, Homo sapiens
ggcagcgggtgcaccaacctgaacaacaacagcagtggcaccactgcgtggagggccgcgagcgcagtgggcgcgacggctgtggagacaagcaggagagtggcagcgtcgcggaccaaggcgaaggacaccgcgggcagccgggtggcgcaaatgcatagccttttccgccatctgttcccctcattccaggaccgttgacagggacagagactggagagctaggaggggctgtgacactgtggcgatggctaggtcctgggttgtcccgggttccaccgaaggagaggcgccttggacgctgcttgggcctgcaaggaacagaacacgtcggggtccgactcaggtacttgtctcaggtctcctgtaaccaccggcctggaggacccggggactcgggcaccacctcaccaagagagagtgaaggaccaagctggcctggctccgagttccaaagctacaggactaaggagttgggagcagggagcgtggtcctgcttgggag

SEQ ID NO: 401872 - DNA, 296 bp, Homo sapiens
acaatgtctcttctccattaagaaaacctacttcaacatctccattggttctcaacatagaggaggaaaataatcatatttcatcacagtatttaagtaaggatcaaagactctaagataactgaaagcactaaattaattttcttcaccaagatcacaggaaaaacagaaactacaaggagaaatggaaaaagctggaccttccctatggacatggggaaaagtggctatctggaagtcaagggaaaagagagatttttctttataaaataaaagaaatgcctgaaccaccaaac

SEQ ID NO: 401873 - DNA, 653 bp, Homo sapiens
cagagttttgccatgttgcccaggctggtcttgaactcctgacctcaggtgatccacccgcctcggcctcccaaagcactgggattgcaggcataagccactgtgcctggctgctcgaattattttctaatgtatcagtcatgttgcaacaaattcacatttatagactaagcctttcaacagaactcatttgtcttgaaatttggtcattgccttctatttacattgatttagatgctagattagtcatttatttattgaataagtcacgtattctttggttcacttgagcagtcaaattaggatgtttggaacattgacaggtgtggtgttatggtaaaaacaccagacttaaaattaagatctagtttaaatcctagctttgcaatttcagttttgtcatcttaaggaaagatttctgagtttttaacataatctgttttagctacaaaagtatctcaacaggattgtagatattctgtaactttatcatgtgatgtttaaagctgttgtagattaggtaatatataaatgtaagattttgtacattatttcatcagtcatctgggcccaaggctagatatctggaaaaaatgtatggatggacttaattttattgatacttaagctgcctctactgatgcttttctagg

SEQ ID NO: 401874 - DNA, 430 bp, Homo sapiens
ctatagccccctattgccaacaaaattaaagcctttctcttcattggcattagaagcccctgtaacccattgcttttccatttccagcctctttccaaaattaccaaacaaactctgtatcctgcagccaccaaactgtactagttgtaatatattcactaagaacagtggtctctcatttgtctctcttttctctcttcttatatcagttagaatgtaacagacaacccagctaacacagaggctcatttttcttatgtgacaagaagtctgtagataaagagttgctagtgttttcttgggggttcagtgatatcacctctgtgattcagttgaccttcatatcatagttgcaaaatggctgccgtaagtacaaaaaccacactgactgctgggtgggaaggcaacagaaaatttgttcttggtgagt

SEQ ID NO: 401875 - DNA, 443 bp, Homo sapiens
aggccatgaccagtatggagtgggcaggatgatcgctcccctcattctgcacatcagacttctggcggtgtagccagggtccaggcattctatctccgtgcccatctccatctttcagggtggtcctggagttctctccatatagccctgttgacctcagtggtctgcaaggccctccaggcaggggccttgtcttatatgctcagcgcccagcacaccataggtgcttcatgatagaccctgcaacgaatgcctcaattcctcttgttggcttttcatgtcccacggagtcactctaaactgactgtgccctgagccctgtgtgtgtcacctgtgcctactcccatcctggaatgcccagccagactttgacccacaagagtgcccgggtctctgcaccggcttctgtggggcggttttccccgaaggagaagaagggctcc

SEQ ID NO: 401876 - DNA, 411 bp, Homo sapiens
gcaaaaccttattagaaaaaaaagaaagagaaaaattagccgggcatggcggtgcgtgcctgtagtcccagctactagggagactaaggtgggagagtcgcttgagcctgggaggttgaggctgcagtgagctgtgatactacaacctgagcatcagagtgagaccgtgtcttaaaacaaacaaacaaaaaacataggtacagtgatgttaaggcagtgtgaattaacgttgcatatacttagctctgtaatgaacagtgagtttattaaatagccaattaacccaactattctaaagcaggtactacagattgaagctttgaagttctatgactttgacttttattaaggaaatgcagagctgaggctaacatctctttttttttctaataaagtgagggatcctgctag

SEQ ID NO: 401877 - DNA, 777 bp, Homo sapiens
gcgagaagtcggccggcagtggggccgccttcttttcttcctcctgcttggacgactgtcttccgcctcaactgtggagcctcgccgaccgttagtcctcacagacacctcaggggcaaccgacgcagcgccacctcatcgtgtccgccatcttggggcgacggccagaagtccagggctaggagcctcagccggcggacgccaggaaacaggtctaggttaatagcaggtaattgtgacaagtccagtgtgggttactggtcatgaagaatccattgttgatgacatcccagaagagaacactaagtcttagctttcatcttacccctgaacttcccttcctctgaagcactcattaggtgaataaacaatattccctatacctatagagtggaataccacccagcatcctctcacatacaaagaaagaacaaattgctgatagacacagatgtccatcaatctcaaaagtcgtcatgaaacctctggaagaattgagctggtcgactatgcaaacagttgtcaagagcctataaaatatgcagcataaaatttttcctttgtagtcaaacctgattattcctcttagatactgggaacagaatttcacagtcgtcagagaatataccttttgtatcttcgtattaaatatgtactcctattacttaacaattgtagtttaactccttttttaggtaaaattctaatttttctcttctgttaaaaatttccagttcaacacgaagataataaagaatattaattttatccttatta

SEQ ID NO: 401878 - DNA, 1190 bp, Homo sapiens
gcgagaagtcggccggcagtggggccgccttcttttcttcctcctgcttggacgactgtcttccgcctcaactgtggagcctcgccgaccgttagtcctcacagacacctcaggggcaaccgacgcagcgccacctcatcgtgtccgccatcttggggcgacggccagaagtccagggctaggagcctcagccggcggacgccaggaaacagcagttactgatgctacaatattcctttatgaagccaagaactgaaccaaaatacaaacaacataaactaccacttgatgagaagaacttcaaagtcaaattgcaaaaggtgactaaaaaaggagagtactttcagccgttttcaaaataatctatgatatgtactggaaaacttctaataatccttgtcattttacaactttcccacagttagatcatcagcaaatgtcacttggatccctagctaaattgttcttcccagaaaatagttatctccactatggaaagtattttatcagaagaattcgtagaagtagaatctgtttgtcttcagttaaacaaaagaagaacctcattgctttccaactgggccccggccattttccagttgaaacatcaaatattttatttgtgtctttcactgccaattaaagggcaacagaaatggtacaggctccctctgcagtggaattacccttatgtcttttctgtctatgctgatccacctgatcttgaactggtgctattccatggggaaaattggaacatggggcaattaacactttctccactttatcccatcaacaggaaattgaaatataaccaactaactcaggagacatcatggaagatgtcacacagtgaatgatgatgaagcagaatttttaaaatgtgtaggattacgagaagtggggtcatttttctttgtgtatggtattgctgatgcagtttaatgctccattacttctaaattttcatcataagctagattttccagttgtggtttctataaagaaaaacaaacattctgaagacagtttttccagatttattccagatatcgatgattaacttttgaagctcctctgttgatttgaacatccgctgaagcttatttttcacctcagaatagcatcaacattatttgaaattcaattgtactttctcgttacattaataaatcatggaagttgagaaa

SEQ ID NO: 401879 - DNA, 1020 bp, Homo sapiens
gcgagaagtcggccggcagtggggccgccttcttttcttcctcctgcttggacgactgtcttccgcctcaactgtggagcctcgccgaccgttagtcctcacagacacctcaggggcaaccgacgcagcgccacctcatcgtgtccgccatcttggggcgacggccagaagtccagggctaggagcctcagccggcggacgccaggaaacagcactcattaggtgaataaacaatattccctatacctatagagtggaataccacccagcatcctctcacatacaaagaaagaacaaattgctgatagacacagatgtccatcaatctcaaaagtcgtcatggaggcctacatgcctaccaccagtgctgccatcatgtctctagtcatccctgagaagttccagcatattttgcgagtactcaataccaacatcaatggggggtggaaaacagcctctgccatcactatctttaaggatgtaggtcaaaggagtgaagcctagagctatatttcttcgacacaactgccaacagcattttgggttagatttccatattaagaagcatgtaatatttggaaggcagaagagaaggaaataccatcagcctccaaagagaacagaatgattttgatcagcatgtaggcatcttcatgcacatcatctatttgatgctactactagccaatgagattatgaggttattttctgatatttctgcagcatactgatatttagaagtcagtacaatgttctccacctttggcttccccattcttcaagggattctgtaagccttgaattccctattaactactgtttctgcctcctatacataggaaaatatctgtgttcttgtctgaacctcaaggacaatgcatgtatgaattcccaaattacattggtggctgttgttgttttgagcttcagaaaaggatattaaactcaaaattgtcctatgtgacttgctttttcaccaacaccatatgcctattatttatctatggtattttacatata

SEQ ID NO: 401880 - DNA, 1114 bp, Homo sapiens
gcgagaagtcggccggcagtggggccgccttcttttcttcctcctgcttggacgactgtcttccgcctcaactgtggagcctcgccgaccgttagtcctcacagacacctcaggggcaaccgacgcagcgccacctcatcgtgtccgccatcttggggcgacggccagaagtccagggctaggagcctcagccggcggacgccaggaaacagcagttactgatgctacaatattcctttatgaagccaagaactgaaccaaaatacaaacaacataaactaccacttgatgagaagaacttcaaagtcaaattgcaaaaggtgactaaaaaaggagagtactttcagccgttttcaaaataatctatgatatgtactggaaaacttctaataatccttgtcattttacaactttcccacagttagatcatcagcaaatgtcacttggatccctagctaaattgttcttcccagaaaatagttatctccactatggaaagtattttatcagaagaattcgtagaagtagaatctgtttgtcttcagttaaacaaaagaagaacctcattgctttccaactgggccccggccattttccagttgaaacatcaaatattttatttgtgtctttcactgccaattaaagggcaacagaaatggtacaggctccctctgcagtggaattacccttatgtcttttctgtctatgctgatccacctgatcttgaactggtgctattccatggggaaaattggaacatggggcaattaacactttctccactttatcccatcaacaggaaattgaaatataaccaactaactcaggagacatcatggaagatgtcacacagtgaatgatgatgaagcagaatttttaaaatgtgtaggattacgagaagtggattttccagttgtggtttctataaagaaaaacaaacattctgaagacagtttttccagatttattccagatatcgatgattaacttttgaagctcctctgttgatttgaacatccgctgaagcttatttttcacctcagaatagcatcaacattatttgaaattcaattgtactttctcgttacattaataaatcatggaagttgagaaa

SEQ ID NO: 401881 - DNA, 379 bp, Homo sapiens
ccaacttgcaggaattcacagctctttagttttagatttctctgcctcccatttcagaatagtgcagcagaatgcattattttgaattctgcaatgtttaatttgtgattattccaataaaggttgctttgcatgaatatactacagtgtaaaaccatgtgcaaataaatgcataagatatttaaaaacagaagtgttaataaaaaacgcatgtaaagatgaatacagattaaagaaactattttcacatgtcaggaagctggtatacaaataaaagatcaaaatcggatgtgtatgttaactctcattccaatcttcctttcaatatcaattctcgttaatcacttttagtgtcctgacttaaaaacaacattgcatt

SEQ ID NO: 401882 - DNA, 492 bp, Homo sapiens
gggcatggcgttctagaggatcccttctggtggtgatgaaataaacatccgtgaggtcagtggaggtgggcttgaggagtgtagcagaaggttttgcgtccctagcgtctcttctacttggatgacccccagtctaattctcgggactatggggatttacataaacataagaagagttaattttcccgcctcctggcacgcaagcgtgcaatccactagaacaggggtcccaaacccccgggccacagaccgatacctgtccgtggcctgttaggaactgggccacacagcaggaggtgagtgaagcttcatctgtatttacagccactcctcattgcttacattactgccagagctccaactcctgtcagatcagaagaagcactagattctcacaagagtttgaaccctaatgtgaactgtgcatgcgagggatctaggttgcatgttccttacgagaatctaaggcctggtgatctgtcactgcttccc

SEQ ID NO: 401883 - DNA, 461 bp, Homo sapiens
gggcatggcgttctagaggatcccttctggtggtgatgaaataaacatccgtgaggtcagtggaggtgggcttgaggagtgtagcagaaggttttgcgtccctagcgtctcttctacttggatgacccccagtctaattctcgggactatggggatttacataaacataagaagagttaattttcccgcctcctggcacgcaagcgtgcaatccactagaacaggggtcccaaacccccgggccacagaccgatacctgtccgtggcctgttaggaactgggccacacagcaggaggtgagtgaagcttcatctgtatttacagccactcctcattgcttacattactgccccaccatgatcaatatttgctttgaatccccgcagcaacttacatgaaatctgggctcttcacatcctggcacaggctctctctctctctcatgtgcctgataagtccta

SEQ ID NO: 401884 - DNA, 610 bp, Homo sapiens
atgagtgttctgaaaaatcctccttctaccaaaaagcctacatacagtgaactgcaaacggaactagtaagctagcctgtaaccacagctaccctaaagatatctgccaagatgaggaactacagtcaacttatagatatctgccaatatcagaaagaagagccttaaatttttttattctggagttggggtctcactatgttgcctagcctggacttaaactcctgggttcaagcgatcttcctgcctcagcctcccaaatagctggtactacagacacacgccaccacacctggctgttggattttgatggcaccccgagggacagaagacaacgccttaggcccatataaggtggggagacagattctagacattgcagagtaacccgaacagactaacctatcctcagttagcaactataaaacctagacaaaacaaaaaaaataggtatttgaaggtgtggaagagtgaccaaaagtaagtatgaactggatgaagtctatatgtgaaaagagatttgctggagggcaacttcccaaacagcatggctcatgaaggcagaaagccacaggcttactggcttgaggaattagtgcaaagtgggcag

SEQ ID NO: 401885 - DNA, 231 bp, Homo sapiens
cgtcagccgctcaccagctctctctcttcccctcctcagtttgttgaagttgaaggacagatcacatccttggttgatctttacccatccttcctaaggaagggttatcgtcgggaaatcttcatcgccttcgtgtgtagcatcagctacctgctggggctgacgatggtgacggagggtggaacgtatgtgtttccatgacaacctccctcactatgggatcctgcgggg

SEQ ID NO: 401886 - DNA, 4863 bp, Homo sapiens
gtgatgctgagagctgcctgctcagacaacagacacgcgaggtcaggaagaagccgcttataaattaccgcttccttcgcgccgccgccaacgccgagccccgaggaccgcaagcccagaggacaagctgcgccaagagggagtgcggagcgttcacccagcgggtcagagagcgagcgggcaggcagcccccggccggcggaacccggcacagccgagcagagcgcgggcggcgccgcagccaccccagatccagaaccagaaccacagcccttctgaggagctcccaaacaaagcaaggagatggccaccaaggagaagctgcagtgtctgaaagatttccacaaggacatcctgaagccctcaccagggaagagcccaggcacgcggcctgaggacgaggctgagggaaaacctccgcagagggagaagtggtctagcaagatcgactttgtgctctctgtggctggcggcttcgtgggcttgggcaacgtctggcgcttcccgtacctctgctacaagaatggtggaggtgcgtttctcataccgtattttattttcctgtttgggagcggcctgcctgtgtttttcttggagatcatcataggccagtacacctctgaagggggcatcacctgctgggaaaagatctgccccttgttctctggtatcggctatgcctccgttgtaattgtgtccctcctgaatgtctactacatcgtcatcctggcctgggccacatactacctgttccagtccttccagaaggagctgccctgggcacactgcaaccacagctggaacacacctcactgcatggaggacaccatgcgcaagaacaagagtgtctggatcaccatcagctccaccaacttcacctcccctgtcatcgagttctgggagcgcaacgtgctgagcttgtcccctggaatcgaccacccaggctctctgaaatgggacctcgctctctgccttcttttagtctggctagtgtgtttcttctgcatctggaagggcgtcaggtccactgggaaggtcgtctacttcacagccacttttccattcgccatgctcctggtgctgctggtccgagggctgacgctgccgggcgcgggcgcaggcatcaagttctatctgtatcctgacatcacccgccttgaggacccacaggtgtggattgacgctgggactcagatattcttctcttatgccatctgcctgggggctatgacctcgctggggagctacaacaagtacaagtataactcgtacagggactgtatgctgctgggatgcctgaacagtggtaccagttttgtgtctggcttcgcaattttttccatcctgggcttcatggcacaagagcaaggggtggacattgctgatgtggctgagtcaggtcctggcctggccttcattgcctacccaaaagctgtgacaatgatgccgctgcccacattttggtccattcttttttttattatgcttctcttgcttggactggatagccagtttgttgaagttgaaggacagatcacatccttggttgatctttacccatccttcctaaggaagggttatcgtcgggaaatcttcatcgccttcgtgtgtagcatcagctacctgctggggctgacgatggtgacggagggtggcatgtatgtgtttcagctctttgactactatgcagctagcggtgtatgccttttgtgggttgcattctttgaatgttttgttattgcctggatatatggaggtgataacctttatgatggtattgaggacatgattggctatcggcccgggccctggatgaagtacagctgggctgtgatcactccagttctctgtgttggatgtttcatcttctcgctcgtcaagtacgtacccctgacctacaacaaaacatacgtgtaccccaactgggccattgggctgggctggagcctggccctttcctccatgctctgcgttcccttggtcatcgtcatccgcctctgccagactgaggggccgttccttgtgagagtcaagtacctgctgaccccaagggaacccaaccgctgggctgtggagcgcgagggagccacaccttacaactctcgcaccgtcatgaacggcgctctcgtgaaaccgacccacatcattgtggagaccatgatgtgagctctctcgggtcgacggggccggcggctttcctgctgtttactaacattagattctcataggaccaggtttacagagctttatatttgcactaggatttttttttttttgtaattgtcacagaaaatgtaattgtgggtgtgtgtgcgtgcgtgtgtgtgtgtgtgtgtatcgtgtgtgtgtgttttgttttgatttgggggatattttgtacaaaaagaaaacccacgggaagatgtccgtggagaggcagagctttcatactgaattagatgtattttatgggaatttggtaaatttttctttgtatttttttttttacatataagtatatatacacttagagattgtcatatacttttaccacttgaattgatcttcttgccagcaatagatctcattttcaaaagcaattcttcggtgctgtgtagctggcagaaagttctgtccagtaaacgcaggatggaattttcctgggactctacacccatcttaaggtggtataccttccaaatcctggttcagatggaagaaatagcaggagagaggacccattagctggcagacccagggggaagaaaggagggctgtgaggagatacctcattaaacttggcttagtgaagaagagagatgccaaaggaatgaaccaacccttcacataaaggagactggctgaagctgaatgaggaggccctatagcagaagtctgattctaagagcagtagaaacttgtaccagaagcaaaatcccacttttaattttgagatggtgagtggatagtcagtagaccgtcagaaccactggccagagagggagctgctagagatccaagaaggctggcaggaatgaggctcacaactcagcctcgcaagaggtggcagaggcacaggaggccacagtccttcctggggcattccaggcagagaaggagcagaggctctcccggcaggagctggggtctcagggctcagatgagtctgttgcatttgaatggggtcatagcaggttctggtcattccccaagcaacatctcagcatctcttaaagttgcctgcaggaatgaagcatgacatacctgttgagggactaggggagtggtggggaggtgagtggaccaaaggatataggccccaggcatgcagatgggcccggtgtcggggaggggtgctttctttcctcatctccccactccccactctcagcctgggagactcctgccaagccctcattaaagatgccaccctgggctgccctggcacctagcaaggcacaccaagaacagcttttgagtcgtatcctccactggggaagtgctcccagttcagaacaagggcagcccgtggtgctgacctaggatataacaaagctcttcacttcaaaacccctgcaatagctgggtttacagacatttaccacctggggacccaaaagagaaggcctaggagagttttctagaaggttgggattgtcagggtcctggccccccagaactggcttgatcaagggccttatgtggagcagaggttgtctctgaaccaggagagaaggtactatacctttcaaatccccagggcagacacacccccacccagcccctatttggacctaaactgtgccatttgaacagtcacttccaagctcagtctaaatgaaaccgaaacgtgaccacgcacaaaggcagtcactgctcgaggggtgcagaccgcagaattttcacagcaggggctcttggaactctggaaacccccttcttaaatttgggaggaggagtatgcctttggtgtccccctcccaaggggcaattctgaaccccatctttggcaggcatacatatttcactgtttccaaagctatctactctgccaaacaacacccagtcctattccaaactctcaacgattctatcttgttcctgtttttctatgtatttatggttgccgtttgtgtctgatttgattttactgttttttccctgattttatggagtagcattgtgacctgttttcctttgtcttatataactttagtaaactaaccactgtcaatgattgagggcaggtggcacgtggggaagaggggacttggcacgcagtggctacctgggcatttgtggtcatttcagtttccatctccccagcgggggctccctgggtgaaaggccacagtattttgggttggtaggcaaattgcaacattctggacatggcctgaggaaggcctcttcttataagattctcagaccaaattctagaccaaagacacaggcagaccaagtccccaggccccgcctggaaggaagtcgttcctcaactctccccaaggcacctgtctccaatcagagccctctcgcccagccagccctggctctgtgtgcagagcatagctctgcgagtacctgtgtaataatgctcaaccttcatgtctccgtataaacgaaactttccatgagagctcatgactctggtccacctgtctatagagaatgggcaaagtccttcacctgctttctgcttgggatgggtcagaaatgctgatgcccgcacatagcccagccagccagatctggaaaggaagcgagggggttgtttaaatcaattttttaagatgaagaagtgggagacactgcgttgagatgggccatgctagggccacagagatttcctgacggtcagggagagaagggcctccagggtcc

SEQ ID NO: 401887 - DNA, 4521 bp, Homo sapiens
gtgatgctgagagctgcctgctcagacaacagacacgcgaggtcaggaagaagccgcttataaattaccgcttccttcgcgccgccgccaacgccgagccccgaggaccgcaagcccagaggacaagctgcgccaagagggagtgcggagcgttcacccagcgggtcagagagcgagcgggcaggcagcccccggccggcggaacccggcacagccgagcagagcgcgggcggcgccgcagccaccccagatccagaaccagaaccacagcccttctgaggagctcccaaacaaagcaaggagatggccaccaaggagaagctgcagtgtctgaaagatttccacaaggacatcctgaagccctcaccagggaagagcccaggcacgcggcctgaggacgaggctgagggaaaacctccgcagagggagaagtggtctagcaagatcgactttgtgctctctgtggctggcggcttcgtgggcttgggcaacgtctggcgcttcccgtacctctgctacaagaatggtggaggtgcgtttctcataccgtattttattttcctgtttgggagcggcctgcctgtgtttttcttggagatcatcataggccagtacacctctgaagggggcatcacctgctgggaaaagatctgccccttgttctctggtatcggctatgcctccgttgtaattgtgtccctcctgaatgtctactacatcgtcatcctggcctgggccacatactacctgttccagtccttccagaaggagctgccctgggcacactgcaaccacagctggaacacacctcactgcatggaggacaccatgcgcaagaacaagagtgtctggatcaccatcagctccaccaacttcacctcccctgtcatcgagttctgggagcgcaacgtgctgagcttgtcccctggaatcgaccacccaggctctctgaaatgggacctcgctctctgccttcttttagtctggctagtgtgtttcttctgcatctggaagggcgtcaggtccactgggaaggtcgtctacttcacagccacttttccattcgccatgctcctggtgctgctggtccgagggctgacgctgccgggcgcgggcgcaggcatcaagttctatctgtatcctgacatcacccgccttgaggacccacaggtgtggattgacgctgggactcagatattcttctcttatgccatctgcctgggggctatgacctcgctggggagctacaacaagtacaagtataactcgtacagggactgtatgctgctgggatgcctgaacagtggtaccagttttgtgtctggcttcgcaattttttccatcctgggcttcatggcacaagagcaaggggtggacattgctgatgtggctgagtcaggtcctggcctggccttcattgcctacccaaaagctgtgacaatgatgccgctgcccacattttggtccattcttttttttattatgcttctcttgcttggactggatagccagggatgtttcatcttctcgctcgtcaagtacgtacccctgacctacaacaaaacatacgtgtaccccaactgggccattgggctgggctggagcctggccctttcctccatgctctgcgttcccttggtcatcgtcatccgcctctgccagactgaggggccgttccttgtgagagtcaagtacctgctgaccccaagggaacccaaccgctgggctgtggagcgcgagggagccacaccttacaactctcgcaccgtcatgaacggcgctctcgtgaaaccgacccacatcattgtggagaccatgatgtgagctctctcgggtcgacggggccggcggctttcctgctgtttactaacattagattctcataggaccaggtttacagagctttatatttgcactaggatttttttttttttgtaattgtcacagaaaatgtaattgtgggtgtgtgtgcgtgcgtgtgtgtgtgtgtgtgtatcgtgtgtgtgtgttttgttttgatttgggggatattttgtacaaaaagaaaacccacgggaagatgtccgtggagaggcagagctttcatactgaattagatgtattttatgggaatttggtaaatttttctttgtatttttttttttacatataagtatatatacacttagagattgtcatatacttttaccacttgaattgatcttcttgccagcaatagatctcattttcaaaagcaattcttcggtgctgtgtagctggcagaaagttctgtccagtaaacgcaggatggaattttcctgggactctacacccatcttaaggtggtataccttccaaatcctggttcagatggaagaaatagcaggagagaggacccattagctggcagacccagggggaagaaaggagggctgtgaggagatacctcattaaacttggcttagtgaagaagagagatgccaaaggaatgaaccaacccttcacataaaggagactggctgaagctgaatgaggaggccctatagcagaagtctgattctaagagcagtagaaacttgtaccagaagcaaaatcccacttttaattttgagatggtgagtggatagtcagtagaccgtcagaaccactggccagagagggagctgctagagatccaagaaggctggcaggaatgaggctcacaactcagcctcgcaagaggtggcagaggcacaggaggccacagtccttcctggggcattccaggcagagaaggagcagaggctctcccggcaggagctggggtctcagggctcagatgagtctgttgcatttgaatggggtcatagcaggttctggtcattccccaagcaacatctcagcatctcttaaagttgcctgcaggaatgaagcatgacatacctgttgagggactaggggagtggtggggaggtgagtggaccaaaggatataggccccaggcatgcagatgggcccggtgtcggggaggggtgctttctttcctcatctccccactccccactctcagcctgggagactcctgccaagccctcattaaagatgccaccctgggctgccctggcacctagcaaggcacaccaagaacagcttttgagtcgtatcctccactggggaagtgctcccagttcagaacaagggcagcccgtggtgctgacctaggatataacaaagctcttcacttcaaaacccctgcaatagctgggtttacagacatttaccacctggggacccaaaagagaaggcctaggagagttttctagaaggttgggattgtcagggtcctggccccccagaactggcttgatcaagggccttatgtggagcagaggttgtctctgaaccaggagagaaggtactatacctttcaaatccccagggcagacacacccccacccagcccctatttggacctaaactgtgccatttgaacagtcacttccaagctcagtctaaatgaaaccgaaacgtgaccacgcacaaaggcagtcactgctcgaggggtgcagaccgcagaattttcacagcaggggctcttggaactctggaaacccccttcttaaatttgggaggaggagtatgcctttggtgtccccctcccaaggggcaattctgaaccccatctttggcaggcatacatatttcactgtttccaaagctatctactctgccaaacaacacccagtcctattccaaactctcaacgattctatcttgttcctgtttttctatgtatttatggttgccgtttgtgtctgatttgattttactgttttttccctgattttatggagtagcattgtgacctgttttcctttgtcttatataactttagtaaactaaccactgtcaatgattgagggcaggtggcacgtggggaagaggggacttggcacgcagtggctacctgggcatttgtggtcatttcagtttccatctccccagcgggggctccctgggtgaaaggccacagtattttgggttggtaggcaaattgcaacattctggacatggcctgaggaaggcctcttcttataagattctcagaccaaattctagaccaaagacacaggcagaccaagtccccaggccccgcctggaaggaagtcgttcctcaactctccccaaggcacctgtctccaatcagagccctctcgcccagccagccctggctctgtgtgcagagcatagctctgcgagtacctgtgtaataatgctcaaccttcatgtctccgtataaacgaaactttccatgagagctcatgactctggtccacctgtctatagagaatgggcaaagtccttcacctgctttctgcttgggatgggtcagaaatgctgatgcccgcacatagcccagccagccagatctggaaaggaagcgagggggttgtttaaatcaattttttaagatgaagaagtgggagacactgcgttgagatgggccatgctagggccacagagatttcctgacggtcagggagagaagggcctccagggtcc

SEQ ID NO: 401888 - DNA, 1181 bp, Homo sapiens
gtgatgctgagagctgcctgctcagacaacagacacgcgaggtcaggaagaagccgcttataaattaccgcttccttcgcgccgccgccaacgccgagccccgaggaccgcaagcccagaggacaagctgcgccaagagggagtgcggagcgttcacccagcgggtcagagagcgagcgggcaggcagcccccggccggcggaacccggcacagccgagcagagcgcgggcggcgccgcagccaccccagatccagaaccagaaccacagcccttctgaggagctcccaaacaaagcaaggagatggccaccaaggagaagctgcagtgtctgaaagatttccacaaggacatcctgaagccctcaccagggaagagcccaggcacgcggcctgaggacgaggctgagggaaaacctccgcagagggagaagtggtctagcaagatcgactttgtgctctctgtggctggcggcttcgtgggcttgggcaacgtctggcgcttcccgtacctctgctacaagaatggtggaggtgcgtttctcataccgtattttattttcctgtttgggagcggcctgcctgtgtttttcttggagatcatcataggccagtacacctctgaagggggcatcacctgctgggaaaagatctgccccttgttctctggtatcggctatgcctccgttgtaattgtgtccctcctgaatgtctactacatcgtcatcctggcctgggccacatactacctgttccagtccttccagaaggagctgccctgggcacactgcaaccacagctggaacacacctcactgcatggaggacaccatgcgcaagaacaagagtgtctggatcaccatcagctccaccaacttcacctcccctgtcatcgagttctgggagtaaggccacctcattgaagcaaggaggaggacatgggtggggcagagaggatggcccacttccttatctcctcccctgggatacaggagccactgtcttcgggggagtgggaggagggtgcagatctggagataaatttatgcctttggccatagacaggactggaatcccagttctgccacttactggctgtttgaccttaggcaagccactcctcctttctgagcctcagtttctttacctgtaagataaaaagaatgaatcattactaccctgtg

SEQ ID NO: 401889 - DNA, 1078 bp, Homo sapiens
gtgatgctgagagctgcctgctcagacaacagacacgcgaggtcaggaagaagccgcttataaattaccgcttccttcgcgccgccgccaacgccgagccccgaggaccgcaagcccagaggacaagctgcgccaagagggagtgcggagcgttcacccagcgggtcagagagcgagcgggcaggcagcccccggccggcggaacccggcacagccgagcagagcgcgggcggcgccgcagccaccccagatccagaaccagaaccacagcccttctgaggagctcccaaacaaagcaaggagatggccaccaaggagaagctgcagtgtctgaaagatttccacaaggacatcctgaagccctcaccagggaagagcccaggcacgcggcctgaggacgaggctgagggaaaacctccgcagagggagaagtggtctagcaagatcgactttgtgctctctgtggctggcggcttcgtgggcttgggcaacgtctggcgcttcccgtacctctgctacaagaatggtggaggtgcgtttctcataccgtattttattttcctgtttgggagcggcctgcctgtgtttttcttggagatcatcataggccagtacacctctgaagggggcatcacctgctgggaaaagatctgccccttgttctctggtatcggctatgcctccgttgtaattgtgtccctcctgaatgtctactacatcgtcatcctggcctgggccacatactacctgttccagtccttccagaaggagctgccctgggcacactgcaaccacagctggaacacacctcactgcatggaggacaccatgcgcaagaacaagagtgtctggatcaccatcagctccaccaacttcacctcccctgtcatcgagttctgggagcgcaacgtgctgagcttgtcccctggaatcgaccacccaggctctctgaaatgggacctcgctctctgccttcttttagtctggctagtgtttatacgacgcatccatggaacaagcgtcaagtccatccagggaagattctagaggataccccccatctcgtcgcaccaaacca

SEQ ID NO: 401890 - DNA, 451 bp, Homo sapiens
cctgtttgggagcggcctgcctgtgtttttcttggagatcatcataggccagtacacctctgaagggggcatcacctgctgggaaaagatctgccccttgttctctggtgagtatgggacggaggtcacttggggcctggcactcatcagttccacacatttttattgagcacctattgtctgccaggtccattggagcctcatgcacatcacttagctctatgctgacacaagatagcagccagtacagtaccagtgtgatgcggatgctgctgcttaggagtacggggaaaggagatgtggcaagtgcctagcacgcagtagctgctcagtaaggcccagcatgcccacttccctaggttgttgcatagagaagcctgcagctgcactgttcacagtagcaaagacatggaatcagcctaggtgcccatcggtggtggactggataaag

SEQ ID NO: 401891 - DNA, 4937 bp, Homo sapiens
gcccaaagaactcaaacaaatttacaagaaacaaacaaccccatcaacaagtggccgaagatatgaacagacacgtctcagaagaaggcatttatggagacaacagacacgcgaggtcaggaagaagccgcttataaattaccgcttccttcgcgccgccgccaacgccgagccccgaggaccgcaagcccagaggacaagctgcgccaagagggagtgcggagcgttcacccagcgggtcagagagcgagcgggcaggcagcccccggccggcggaacccggcacagccgagcagagcgcgggcggcgccgcagccaccccagatccagaaccagaaccacagcccttctgaggagctcccaaacaaagcaaggagatggccaccaaggagaagctgcagtgtctgaaagatttccacaaggacatcctgaagccctcaccagggaagagcccaggcacgcggcctgaggacgaggctgagggaaaacctccgcagagggagaagtggtctagcaagatcgactttgtgctctctgtggctggcggcttcgtgggcttgggcaacgtctggcgcttcccgtacctctgctacaagaatggtggaggtgcgtttctcataccgtattttattttcctgtttgggagcggcctgcctgtgtttttcttggagatcatcataggccagtacacctctgaagggggcatcacctgctgggaaaagatctgccccttgttctctggtatcggctatgcctccgttgtaattgtgtccctcctgaatgtctactacatcgtcatcctggcctgggccacatactacctgttccagtccttccagaaggagctgccctgggcacactgcaaccacagctggaacacacctcactgcatggaggacaccatgcgcaagaacaagagtgtctggatcaccatcagctccaccaacttcacctcccctgtcatcgagttctgggagcgcaacgtgctgagcttgtcccctggaatcgaccacccaggctctctgaaatgggacctcgctctctgccttcttttagtctggctagtgtgtttcttctgcatctggaagggcgtcaggtccactgggaaggtcgtctacttcacagccacttttccattcgccatgctcctggtgctgctggtccgagggctgacgctgccgggcgcgggcgcaggcatcaagttctatctgtatcctgacatcacccgccttgaggacccacaggtgtggattgacgctgggactcagatattcttctcttatgccatctgcctgggggctatgacctcgctggggagctacaacaagtacaagtataactcgtacagggactgtatgctgctgggatgcctgaacagtggtaccagttttgtgtctggcttcgcaattttttccatcctgggcttcatggcacaagagcaaggggtggacattgctgatgtggctgagtcaggtcctggcctggccttcattgcctacccaaaagctgtgacaatgatgccgctgcccacattttggtccattcttttttttattatgcttctcttgcttggactggatagccagtttgttgaagttgaaggacagatcacatccttggttgatctttacccatccttcctaaggaagggttatcgtcgggaaatcttcatcgccttcgtgtgtagcatcagctacctgctggggctgacgatggtgacggagggtggcatgtatgtgtttcagctctttgactactatgcagctagcggtgtatgccttttgtgggttgcattctttgaatgttttgttattgcctggatatatggaggtgataacctttatgatggtattgaggacatgattggctatcggcccgggccctggatgaagtacagctgggctgtgatcactccagttctctgtgttggatgtttcatcttctcgctcgtcaagtacgtacccctgacctacaacaaaacatacgtgtaccccaactgggccattgggctgggctggagcctggccctttcctccatgctctgcgttcccttggtcatcgtcatccgcctctgccagactgaggggccgttccttgtgagagtcaagtacctgctgaccccaagggaacccaaccgctgggctgtggagcgcgagggagccacaccttacaactctcgcaccgtcatgaacggcgctctcgtgaaaccgacccacatcattgtggagaccatgatgtgagctctctcgggtcgacggggccggcggctttcctgctgtttactaacattagattctcataggaccaggtttacagagctttatatttgcactaggatttttttttttttgtaattgtcacagaaaatgtaattgtgggtgtgtgtgcgtgcgtgtgtgtgtgtgtgtgtatcgtgtgtgtgtgttttgttttgatttgggggatattttgtacaaaaagaaaacccacgggaagatgtccgtggagaggcagagctttcatactgaattagatgtattttatgggaatttggtaaatttttctttgtatttttttttttacatataagtatatatacacttagagattgtcatatacttttaccacttgaattgatcttcttgccagcaatagatctcattttcaaaagcaattcttcggtgctgtgtagctggcagaaagttctgtccagtaaacgcaggatggaattttcctgggactctacacccatcttaaggtggtataccttccaaatcctggttcagatggaagaaatagcaggagagaggacccattagctggcagacccagggggaagaaaggagggctgtgaggagatacctcattaaacttggcttagtgaagaagagagatgccaaaggaatgaaccaacccttcacataaaggagactggctgaagctgaatgaggaggccctatagcagaagtctgattctaagagcagtagaaacttgtaccagaagcaaaatcccacttttaattttgagatggtgagtggatagtcagtagaccgtcagaaccactggccagagagggagctgctagagatccaagaaggctggcaggaatgaggctcacaactcagcctcgcaagaggtggcagaggcacaggaggccacagtccttcctggggcattccaggcagagaaggagcagaggctctcccggcaggagctggggtctcagggctcagatgagtctgttgcatttgaatggggtcatagcaggttctggtcattccccaagcaacatctcagcatctcttaaagttgcctgcaggaatgaagcatgacatacctgttgagggactaggggagtggtggggaggtgagtggaccaaaggatataggccccaggcatgcagatgggcccggtgtcggggaggggtgctttctttcctcatctccccactccccactctcagcctgggagactcctgccaagccctcattaaagatgccaccctgggctgccctggcacctagcaaggcacaccaagaacagcttttgagtcgtatcctccactggggaagtgctcccagttcagaacaagggcagcccgtggtgctgacctaggatataacaaagctcttcacttcaaaacccctgcaatagctgggtttacagacatttaccacctggggacccaaaagagaaggcctaggagagttttctagaaggttgggattgtcagggtcctggccccccagaactggcttgatcaagggccttatgtggagcagaggttgtctctgaaccaggagagaaggtactatacctttcaaatccccagggcagacacacccccacccagcccctatttggacctaaactgtgccatttgaacagtcacttccaagctcagtctaaatgaaaccgaaacgtgaccacgcacaaaggcagtcactgctcgaggggtgcagaccgcagaattttcacagcaggggctcttggaactctggaaacccccttcttaaatttgggaggaggagtatgcctttggtgtccccctcccaaggggcaattctgaaccccatctttggcaggcatacatatttcactgtttccaaagctatctactctgccaaacaacacccagtcctattccaaactctcaacgattctatcttgttcctgtttttctatgtatttatggttgccgtttgtgtctgatttgattttactgttttttccctgattttatggagtagcattgtgacctgttttcctttgtcttatataactttagtaaactaaccactgtcaatgattgagggcaggtggcacgtggggaagaggggacttggcacgcagtggctacctgggcatttgtggtcatttcagtttccatctccccagcgggggctccctgggtgaaaggccacagtattttgggttggtaggcaaattgcaacattctggacatggcctgaggaaggcctcttcttataagattctcagaccaaattctagaccaaagacacaggcagaccaagtccccaggccccgcctggaaggaagtcgttcctcaactctccccaaggcacctgtctccaatcagagccctctcgcccagccagccctggctctgtgtgcagagcatagctctgcgagtacctgtgtaataatgctcaaccttcatgtctccgtataaacgaaactttccatgagagctcatgactctggtccacctgtctatagagaatgggcaaagtccttcacctgctttctgcttgggatgggtcagaaatgctgatgcccgcacatagcccagccagccagatctggaaaggaagcgagggggttgtttaaatcaattttttaagatgaagaagtgggagacactgcgttgagatgggccatgctagggccacagagatttcctgacggtcagggagagaagggcctccagggtcc

SEQ ID NO: 401892 - DNA, 4650 bp, Homo sapiens
gcccaaagaactcaaacaaatttacaagaaacaaacaaccccatcaacaagtggccgaagatatgaacagacacgtctcagaagaaggcatttatggagacaacagacacgcgaggtcaggaagaagccgcttataaattaccgcttccttcgcgccgccgccaacgccgagccccgaggaccgcaagcccagaggacaagctgcgccaagagggagtgcggagcgttcacccagcgggtcagagagcgagcgggcaggcagcccccggccggcggaacccggcacagccgagcagagcgcgggcggcgccgcagccaccccagatccagaaccagaaccacagcccttctgaggagctcccaaacaaagcaaggagatggccaccaaggagaagctgcagtgtctgaaagatttccacaaggacatcctgaagccctcaccagggaagagcccaggcacgcggcctgaggacgaggctgagggaaaacctccgcagagggagaagtggtctagcaagatcgactttgtgctctctgtggctggcggcttcgtgggcttgggcaacgtctggcgcttcccgtacctctgctacaagaatggtggaggtgcgtttctcataccgtattttattttcctgtttgggagcggcctgcctgtgtttttcttggagatcatcataggccagtacacctctgaagggggcatcacctgctgggaaaagatctgccccttgttctctggtatcggctatgcctccgttgtaattgtgtccctcctgaatgtctactacatcgtcatcctggcctgggccacatactacctgttccagtccttccagaaggagctgccctgggcacactgcaaccacagctggaacacacctcactgcatggaggacaccatgcgcaagaacaagagtgtctggatcaccatcagctccaccaacttcacctcccctgtcatcgagttctgggagcgcaacgtgctgagcttgtcccctggaatcgaccacccaggctctctgaaatgggacctcgctctctgccttcttttagtctggctagtgtgtttcttctgcatctggaagggcgtcaggtccactgggaaggtcgtctacttcacagccacttttccattcgccatgctcctggtgctgctggtccgagggctgacgctgccgggcgcgggcgcaggcatcaagttctatctgtatcctgacatcacccgccttgaggacccacaggtgtggattgacgctgggactcagatattcttctcttatgccatctgcctgggggctatgacctcgctggggagctacaacaagtacaagtataactcgtacagggactgtatgctgctgggatgcctgaacagtggtaccagttttgtgtctggcttcgcaattttttccatcctgggcttcatggcacaagagcaaggggtggacattgctgatgtggctgagtcaggtcctggcctggccttcattgcctacccaaaagctgtgacaatgatgccgctgcccacattttggtccattcttttttttattatgcttctcttgcttggactggatagccagtttgttgaagttgaaggacagatcacatccttggttgatctttacccatccttcctaaggaagggttatcgtcgggaaatcttcatcgccttcgtgtgtagcatcagctacctgctggggctgacgatggtgacggagggtggcatgtatgtgtttcagctctttgactactatgcagctagcggtgtatgccttttgtgggttgcattctttgaatgttttgttattgcctggatatatggaggtgataacctttatgatggtattgaggacatgattggctatcggcccgggccctggatgaagtacagctgggctgtgatcactccagttctctgtgttggatgtttcatcttctcgctcgtcaagtacgtacccctgacctacaacaaaacatacgtgtaccccaactgggccattgggctgggctggagcctggccctttcctccatgctctgcgttcccttggtcatcgtcatccgcctctgccagactgaggggccgttccttgtgagagtcaagtacctgctgaccccaagggaacccaaccgctgggctgtggagcgcgagggagccacaccttacaactctcgcaccgtcatgaacggcgctctcgtgaaaccgacccacatcattgtggagaccatgatgtgagctctctcgggtcgacggggccggcggctttcctgctgtttactaacattagattctcataggaccaggtttacagagctttatatttgcactaggatttttttttttttgtaattgtcacagaaaatgtaattgtgggtgtgtgtgcgtgcgtgtgtgtgtgtgtgtgtatcgtgtgtgtgtgttttgttttgatttgggggatattttgtacaaaaagaaaacccacgggaagatgtccgtggagaggcagagctttcatactgaattagatgtattttatgggaatttggtaaatttttctttgtatttttttttttacatataagtatatatacacttagagattgtcatatacttttaccacttgaattgatcttcttgccagcaatagatctcattttcaaaagcaattcttcggtgctgtgtagctggcagaaagttctgtccagtaaacgcaggatggaattttcctgggactctacacccatcttaaggtggtataccttccaaatcctggttcagatggaagaaatagcaggagagaggacccattagctggcagacccagggggaagaaaggagggctgtgaggagatacctcattaaacttggcttagtgaagaagagagatgccaaaggaatgaaccaacccttcacataaaggagactggctgaagctgaatgaggaggccctatagcagaagtctgattctaagagcagtagaaacttgtaccagaagcaaaatcccacttttaattttgagatggtgagtggatagtcagtagaccgtcagaaccactggccagagagggagctgctagagatccaagaaggctggcaggaatgaggctcacaactcagcctcgcaagaggtggcagaggcacaggaggccacagtccttcctggggcattccaggcagagaaggagcagaggctctcccggcaggagctggggtctcagggctcagatgagtctgttgcatttgaatggggtcatagcaggttctggtcattccccaagcaacatctcagcatctcttaaagttgcctgcaggaatgaagcatgacatacctgttgagggactaggggagtggtggggaggtgagtggaccaaaggatataggccccaggcatgcagatgggcccggtgtcggggaggggtgctttctttcctcatctccccactccccactctcagcctgggagactcctgccaagccctcattaaagatgccaccctgggctgccctggcacctagcaaggcacaccaagaacagcttttgagtcgtatcctccactggggaagtgctcccagttcagaacaagggcagcccgtggtgctgacctaggatataacaaagctcttcacttcaaaacccctgcaatagctgggtttacagacatttaccacctggggacccaaaagagaaggcctaggagagttttctagaaggttgggattgtcagggtcctggccccccagaactggcttgatcaagggccttatgtggagcagaggttgtctctgaaccaggagagaaggtactatacctttcaaatccccagggcagacacacccccacccagcccctatttggacctaaactgtgccatttgaacagtcacttccaagctcagtctaaatgaaaccgaaacgtgaccacgcacaaaggcagtcactgctcgaggggtgcagaccgcagaattttcacagcaggggctcttggaactctggaaacccccttcttaaatttgggaggaggagtatgcctttggtgtccccctcccaaggggcaattctgaaccccatctttggcaggcatacatatttcactgtttccaaagctatctactctgccaaacaacacccagtcctattccaaactctcaacgattctatcttgttcctgtttttctatgtatttatggttgccgtttgtgtctgatttgattttactgttttttccctgattttatggagtagcattgtgacctgttttcctttgtcttatataactttagtaaactaaccactgtctccaatcagagccctctcgcccagccagccctggctctgtgtgcagagcatagctctgcgagtacctgtgtaataatgctcaaccttcatgtctccgtataaacgaaactttccatgagagctcatgactctggtccacctgtctatagagaatgggcaaagtccttcacctgctttctgcttgggatgggtcagaaatgctgatgcccgcacatagcccagccagccagatctggaaaggaagcgagggggttgtttaaatcaattttttaagatgaagaagtgggagacactgcgttgagatgggccatgctagggccacagagatttcctgacggtcagggagagaagggcctccagggtcc

SEQ ID NO: 401893 - DNA, 3248 bp, Homo sapiens
cggcatgtaccacttggtctactcgtggaataaagcctttatcaaacatgtcagcttcatcgaagcctgactgacggagcgcttgtgatgatggcgttgtggcaagcccatttgagttttgtattgcctggatatatggaggtgataacctttatgatggtattgaggacatgattggctatcggcccgggccctggatgaagtacagctgggctgtgatcactccagttctctgtgttggatgtttcatcttctcgctcgtcaagtacgtacccctgacctacaacaaaacatacgtgtaccccaactgggccattgggctgggctggagcctggccctttcctccatgctctgcgttcccttggtcatcgtcatccgcctctgccagactgaggggccgttccttgtgagagtcaagtacctgctgaccccaagggaacccaaccgctgggctgtggagcgcgagggagccacaccttacaactctcgcaccgtcatgaacggcgctctcgtgaaaccgacccacatcattgtggagaccatgatgtgagctctctcgggtcgacggggccggcggctttcctgctgtttactaacattagattctcataggaccaggtttacagagctttatatttgcactaggatttttttttttttgtaattgtcacagaaaatgtaattgtgggtgtgtgtgcgtgcgtgtgtgtgtgtgtgtgtatcgtgtgtgtgtgttttgttttgatttgggggatattttgtacaaaaagaaaacccacgggaagatgtccgtggagaggcagagctttcatactgaattagatgtattttatgggaatttggtaaatttttctttgtatttttttttttacatataagtatatatacacttagagattgtcatatacttttaccacttgaattgatcttcttgccagcaatagatctcattttcaaaagcaattcttcggtgctgtgtagctggcagaaagttctgtccagtaaacgcaggatggaattttcctgggactctacacccatcttaaggtggtataccttccaaatcctggttcagatggaagaaatagcaggagagaggacccattagctggcagacccagggggaagaaaggagggctgtgaggagatacctcattaaacttggcttagtgaagaagagagatgccaaaggaatgaaccaacccttcacataaaggagactggctgaagctgaatgaggaggccctatagcagaagtctgattctaagagcagtagaaacttgtaccagaagcaaaatcccacttttaattttgagatggtgagtggatagtcagtagaccgtcagaaccactggccagagagggagctgctagagatccaagaaggctggcaggaatgaggctcacaactcagcctcgcaagaggtggcagaggcacaggaggccacagtccttcctggggcattccaggcagagaaggagcagaggctctcccggcaggagctggggtctcagggctcagatgagtctgttgcatttgaatggggtcatagcaggttctggtcattccccaagcaacatctcagcatctcttaaagttgcctgcaggaatgaagcatgacatacctgttgagggactaggggagtggtggggaggtgagtggaccaaaggatataggccccaggcatgcagatgggcccggtgtcggggaggggtgctttctttcctcatctccccactccccactctcagcctgggagactcctgccaagccctcattaaagatgccaccctgggctgccctggcacctagcaaggcacaccaagaacagcttttgagtcgtatcctccactggggaagtgctcccagttcagaacaagggcagcccgtggtgctgacctaggatataacaaagctcttcacttcaaaacccctgcaatagctgggtttacagacatttaccacctggggacccaaaagagaaggcctaggagagttttctagaaggttgggattgtcagggtcctggccccccagaactggcttgatcaagggccttatgtggagcagaggttgtctctgaaccaggagagaaggtactatacctttcaaatccccagggcagacacacccccacccagcccctatttggacctaaactgtgccatttgaacagtcacttccaagctcagtctaaatgaaaccgaaacgtgaccacgcacaaaggcagtcactgctcgaggggtgcagaccgcagaattttcacagcaggggctcttggaactctggaaacccccttcttaaatttgggaggaggagtatgcctttggtgtccccctcccaaggggcaattctgaaccccatctttggcaggcatacatatttcactgtttccaaagctatctactctgccaaacaacacccagtcctattccaaactctcaacgattctatcttgttcctgtttttctatgtatttatggttgccgtttgtgtctgatttgattttactgttttttccctgattttatggagtagcattgtgacctgttttcctttgtcttatataactttagtaaactaaccactgtcaatgattgagggcaggtggcacgtggggaagaggggacttggcacgcagtggctacctgggcatttgtggtcatttcagtttccatctccccagcgggggctccctgggtgaaaggccacagtattttgggttggtaggcaaattgcaacattctggacatggcctgaggaaggcctcttcttataagattctcagaccaaattctagaccaaagacacaggcagaccaagtccccaggccccgcctggaaggaagtcgttcctcaactctccccaaggcacctgtctccaatcagagccctctcgcccagccagccctggctctgtgtgcagagcatagctctgcgagtacctgtgtaataatgctcaaccttcatgtctccgtataaacgaaactttccatgagagctcatgactctggtccacctgtctatagagaatgggcaaagtccttcacctgctttctgcttgggatgggtcagaaatgctgatgcccgcacatagcccagccagccagatctggaaaggaagcgagggggttgtttaaatcaattttttaagatgaagaagtgggagacactgcgttgagatgggccatgctagggccacagagatttcctgacggtcagggagagaagggcctccagggtcc

SEQ ID NO: 401894 - DNA, 1263 bp, Homo sapiens
gtgatgctgagagctgcctgctcagacaacagacacgcgaggtcaggaagaagccgcttataaattaccgcttccttcgcgccgccgccaacgccgagccccgaggaccgcaagcccagaggacaagctgcgccaagagggagtgcggagcgttcacccagcgggtcagagagcgagcgggcaggcagcccccggccggcggaacccggcacagccgagcagagcgcgggcggcgccgcagccaccccagatccagaaccagaaccacagcccttctgaggagctcccaaacaaagcaaggagatggccaccaaggagaagctgcagtgtctgaaagatttccacaaggacatcctgaagccctcaccagggaagagcccaggcacgcggcctgaggacgaggctgagggaaaacctccgcagagggagaagtggtctagcaagatcgactttgtgctctctgtggctggcggcttcgtgggcttgggcaacgtctggcgcttcccgtacctctgctacaagaatggtggaggtgcgtttctcataccgtattttattttcctgtttgggagcggcctgcctgtgtttttcttggagatcatcataggccagtacacctctgaagggggcatcacctgctgggaaaagatctgccccttgttctctggtatcggctatgcctccgttgtaattgtgtccctcctgaatgtctactacatcgtcatcctggcctgggccacatactacctgttccagtccttccagaaggagctgccctgggcacactgcaaccacagctggaacacacctcactgcatggaggacaccatgcgcaagaacaagagtgtctggatcaccatcagctccaccaacttcacctcccctgtcatcgagttctgggagtaaggccacctcattgaagcaaggaggaggacatgggtggggcagagaggatggcccacttccttatctcctcccctgggatacaggagccactgtcttcgggggagtgggaggagggtgcagatctggagataaatttatgcctttggccatagacaggactggaatcccagttctgccacttactggctgtttgaccttaggcaagccactcctcctttctgagcctcagtttctttacctgtaagataaaaagaatgaatcattactaccctgtgaggcaggtatgcatacttatgttgtctaaaaatgatacagttttcttaatgtattttaggaaaaaatatattctgttattgc

SEQ ID NO: 401895 - DNA, 382 bp, Homo sapiens
ttggtctcccccattccacatccatcttgctttcttgactcttgctttgtgagccttaagctccagcataaaacatgaagaacagccttgcagatatgaagaaatacagataaacagtgactctgcttttctgattgaacccagctgatacacaagcctacctgcatatacaaataagaacatatttatgtatgcatattatatgtatatatattcatatatattatatatattcatgtttatataatatatacattttatttttgtataaacatttatatatttatgcttatatgtacaaacagaaacatatgtaaatgtatttgaaatgttaaaagaaatcaaataaattgttaacaattattaaacctagatagtgagt

SEQ ID NO: 401896 - DNA, 204 bp, Homo sapiens
tcccacagcccctctgctcccagccccagccacctccatactaccttccgtctctaagaatgcgaccactccagccacatgagtggagccatagagcatttctctgtgacgggctcactctacttggcatcacgtcctcaaggctcatccatgttacagcatgtggcagactctccttccttttgaaggctgagtaatactcca

SEQ ID NO: 401897 - DNA, 449 bp, Homo sapiens
ttccacttcagcccctcaagtagctgagacaacaggcatgtgccaccatgcctggctaatttttgtattttatgtagagatggggtctccctatgttcttcaggcttgtcttgaactcctgggctcaaacagtccacccaactctccctcccaaagtgctgagactacaaacgtgagtcaccgcacagagctaagacctcattctttacacgtggagctccagcgaagtttgtgaaggagagagaagattaatactgtaactcagaaagtttgatgagccaggattgatggacagattctcttaagagagggttgtttacagacccagagttttattaatacttagattagagagaaagtaatggtgtgaatcggggaatgaaactgtgtgactcgcatgtagatataggttcatttcacattaaaaaaataaaaataattgattttta

SEQ ID NO: 401898 - DNA, 590 bp, Homo sapiens
atgggtccatgggaaaaaataaaataaataagctgccaattccacaggaaatataatatggaaaaatacatacttattatgggttgggttacatttataaataaactagaactaacgtgtataataatttggtatcaaatctacgtttcagggaatactaagaaatacactgagtttttaaataattcataatcaagttccgacttattaaatggcttccaaattatataatactattttgctgaaagagtaacaaactatgattaagactaattttaagcatatctacttcattttcacgtctaaaaatgtctgaaatagttaataaataactggttaaacagcaggcctctaaactagcaaacatttgtcaaagcaaaaacattctgtctgacgggaaaatgtaatttatgaaaatgatcaaaacatagagtccttcaaagaattttacaatcagttgagacaagttaacaaagctgtaaggttccagtgagtatttaaatctaacctgtgataaggaaagagacttttatccacataacctcccaccacgcaaaacaaaagcattctgaatcaggaagtagttagcg

SEQ ID NO: 401899 - DNA, 221 bp, Homo sapiens
agagaggcagatcccttacaaaatggagatttcctttatagatgtaaatttcttacagagtttcaaagtagccagctgagtgccagaaatgtaggcccttgtacgttttatttagcagtataaagtgagtcaaggatgccaccaggttcctggcttatgttaatgggtagttaacatccactgagataagaaatacaggacacttgttgctgtttatttgg

SEQ ID NO: 401900 - DNA, 177 bp, Homo sapiens
tcacgcggcaggaaattgatagaaaatctcgaaccaatggtttattttcttctccatcactttaaagcacacaatagaggacggagacaaagaatcaaaaacaaaggatgatcagttcctccaaatagaaatgcacaaaggtatttaataagggcaaattatttttaaaataaacgt

SEQ ID NO: 401901 - DNA, 212 bp, Homo sapiens
tgagggaaaggatctatggactggagaccttgaggcaggggattctacagtttaatcatctgtagccacagtgaactgggttaccaacctttcagcaggagctgaaggtagagcacgttcgaagactgccaagtccaggacataccttttgcagacaattacgacaaacttggctccttggctttctgccatccagtattttgggagtaaca

SEQ ID NO: 401902 - DNA, 470 bp, Homo sapiens
tcgactactacttctctctctctctccccctctctctcccctctctctctttctctcttcctctctctttttttaagacagggtctctatctgttgcccaggccagagtgcaatggtgtcatcgtggcccactgaagcctccaacggctggcctcaagccattctcccaccttggcttcccaaagtgttgggattataggtgtgagacaccacacctagcctagtcctttctcttaaaggaagctgtgctgctcaaaaactatagcagaaatgtgttccttgtgtggtccgcttccctgtgccttccttctgtgaaggtgttccccgaactcacaaggagtccgcaaattctgcaggtccttcctagttcccaccccacttctccaatgatcctctggttcctgttgtgaggatgtaaaaatgcacttgctgctgaaatgaagctgaatcagagatgatgtttttctccc

SEQ ID NO: 401903 - DNA, 220 bp, Homo sapiens
aaacacaacataccaaaacttatgggacacagaaaaatcgatgctaaggggagaaatttatggctataagcatttacactaaaaaagagaaagatctcaggccgggcatggtggcttatgcctgtaatcccagcactttgggaggccaaagtgggcggatcacctgagatcgggagttcgagactagcctgaccaacatggagaaaccccgtctctacta

SEQ ID NO: 401904 - DNA, 579 bp, Homo sapiens
cggagatggaacttttctctgcatttctccagttgcttttttccccctgctactttctcggcttcattcgctgtctctgcaaatcctccatccactctctactttgccatctgcttacggctctccctcaatcttcttttctccttcaaaatttttctctttcttctccctcgctctccgtctctctttctgcacacattcacatggaaggaattgggatccgatgtccacaagcagaacaccttttcagtggggtgttatttggcccgcaagaacactggatgtcaagagacagagtaagtcacctccccacacgcagggttaggagaagcggtgtctgggaagaggaggcctggggagtagcggggccccgtatcaaggagggtaaaggtagggtctggatcaagagatgggtggcgtctgcagaatcccagcactgggcagaagacgcggcttctcctggattgagattggagcgctgtgctccagggccaacaaaggcgaggcttgggggaccgcatagaccggaatccgcctagcgggggaggactttacgctgtgcggggcggatgtaagcat

SEQ ID NO: 401905 - DNA, 425 bp, Homo sapiens
gtgtgagagcagaggaaaaacatggtttgcgagttttgtgctaaaaaaccctgagataccaaaatgtgtgatgctcaagtcccttactattggccttcatatccatggtttctatatctgcaggtatagaaagcccagaaagaccaggccatggttagaagcacagaattgtcagcaccaaccaccatcctccaggaagggtacaggggctggagactgagttaataccaatcatgcctaagtaatgaagcctccataaaagttcctgagagcttccacatgctgaacacgtgcggtgggcctcaagggcggcacacccagtgaatcttcccatgtgcctcgccttgtgaatctcctcatctggctgtccatctgtatccttggaaacatccttcctcatgaaccaataaacataacgaagtgtt

SEQ ID NO: 401906 - DNA, 598 bp, Homo sapiens
cggagatggaacttttctctgcatttctccagttgcttttttccccctgctactttctcggcttcattcgctgtctctgcaaatcctccatccactctctactttgccatctgcttacggctctccctcaatcttcttttctccttcaaaatttttctctttcttctccctcgctctccgtctctctttctgcacacattcacatggaaggaattgggatccgatgtccacaagcagaacaccttttcagtggggtgttatttggcccgcaagaacactggatgtcaagagacagagtatagaaagcccagaaagaccaggccatggttagaagcacagaattgtcagcaccaaccaccatcctccaggaagggtacaggggctggagactgagttaataccaatcatgcctaagtaatgaagcctccataaaagttcctgagagcttccacatgctgaacacgtgcggtgggcctcaagggcggcacacccagtgaatcttcccatgtgcctcgccttgtgaatctcctcatctggctgtccatctgtatccttggaaacatccttcctcatgaaccaataaacataacgaagtgtt

SEQ ID NO: 401907 - DNA, 2540 bp, Homo sapiens
gggcttggtttcctgggcgaccaccgctggctagtccgttagaggcgtgcgggcttcggaggcgtgcgggcttcggaggcgtgcgggcttcgggtgccatggggactcctcccggcctgcagaccgactgcgaggcgctgctcagccgcttccaggagacggacagtgtacgcttcgaggacttcacggagctctggagaaacatgaagttcgggactatcttctgtggcagaatgagaaatttagaaaagaacatgtttacaaaagaagctttagctttggcttggcgatattttttacctccatacaccttccagatcagagttggtgctttgtatctgctatatggattatataatacccaactgtgtcaaccaaaacaaaagatcagagttgccctgaaggattgggatgaagttttaaaatttcagcaagatttagtaaatgcacagcattttgatgcagcttatatttttaggaagctacgactagacagagcatttcactttacagcaatgcccaaattgctgtcatataggatgaagaaaaaaattcaccgagctgaagttacagaagaatttaaggacccaagtgatcgtgtgatgaaacttatcacttctgatgtattagaggaaatgctgaatgttcatgatcattatcagaacatgaaacatgtaatttcagttgataagtccaagccagataaagccctcagcttgataaaggatgatttttttgacaatattaagaacatagttttggagcatcagcagtggcacaaagacagaaagaatccatccttaaagtcaaaaactaatgatggagaagaaaaaatggaaggaaattcacaagaaacggagagatgtgaaagggcagaatcattagcgaaaataaaatcaaaggccttttcagttgtcatacaggcatccaaatcaagaaggcatcgtcaagtcaaactcgactcttctgactctgattctgcatctggtcaagggcaagtcaaagcaactaggaaaaaagagaagaaagaaagattgaaaccagcaggaaggaagatgtctctcagaaacaaaggcaatgtgcagaatatacacaaggaagataaacctttaagtctgagtatgcctgtaattacagaagaagaagagaatgaaagtttgagtggaacagagttcactgcatccaagaagaggagaaaacactgaacaaagagcctggtgtagtttttaattttgagttttctgacagaagaaaagattgatattttgtgtattgaacaggaagactgccagtattaaaaaaatccttctgggaatctgtaggttatttcttggaaattgcaatacgtagttctagaataaaagtacaaaaaattagaataagaattctttaacattttctttaatgatttgcataaatggagataaaacttgtatttagtatgtaatagaaaaaattctgttattcgcagattgttactatttcctataaggttttgtgatactatactgtcctaatacagtctggtaatactattctattttatttaaaatattttttattgaaatattaatgtttattacatgcaaataactattttgtatctacagtcggataatggattttttattttgtatatttattctattttgtatattgttaagtgcaataaagtttttgccttgctttattttttaatacataaaacttacattctcataacgtgattgataacttaggaagttcacaatgtattttctacttctgcaattaaatattctttagtgcttgtttattattactaaatactaattaagtactaacaagtacttaaatactaatgtattaagtatttaagtactttctaataaaatctttaacaataataatgtaaatttcagaatgtgtctctggtacagaatagttgatattaacagaaaaaaaaaaatctgtagcttcatgaatatgccactctgttaatttcttgttccagacattttaatagagattgcttgagccatgttgtttgaattgctgccaatagcagaccatatccctatcatgttgttggctcaactgttttttttttttccctaatagagatggagtatcgctatgttgctcaggctggtcttgaactcctgggctcaagctatcctcctgcctcagcctcccaaagtactgggattataggtgtgagctactgtacccagccttaacctgtttcacagttgattatacttcatgctgtttcccagcatggtattattaagggatttaaagttggggttgcatgcctgtaatcccagcattttgggaggccgaggtgggcggatcacgaggtcaggagatcgagaccatcgtgactaacacagtgaaaccccgtctctaataaaaatacgaaaaattagccaggcgtggtggcgggcgcctgtaatcccagctactcgggaagctgaggcaggagaatggtgtgaacccagtgagccgagatcgtgccactgcactccagcctgggcaacagagtgagacttcgtctc

SEQ ID NO: 401908 - DNA, 2047 bp, Homo sapiens
gactgaagagagagaagacagacgggagaggaactttagcacctgagggaggacctgggtttcctttttgcttcacacatcccaaactagataatggggaaggtggcaagctggaagtgccgatcagtgcagaccaaaaagaccctgagaagagctgctctcttttaacaaagaatctaagaaggaaaggggcaacctagcaagacagaacattttttagacaataacctctctactccagggaaccaccacataaaagccttcagcctcacatcagcagtggcacaaagacagaaagaatccatccttaaagtcaaaaactaatgatggagaagaaaaaatggaaggaaattcacaagaaacggagagatgtgaaagggcagaatcattagcgaaaataaaatcaaaggccttttcagttgtcatacaggcatccaaatcaagaaggcatcgtcaagtcaaactcgactcttctgactctgattctgcatctggtcaagggcaagtcaaagcaactaggaaaaaagagaagaaagaaagattgaaaccagcaggaaggaagatgtctctcagaaacaaaggcaatgtgcagaatatacacaaggaagataaacctttaagtctgagtatgcctgtaattacagaagaagaagagaatgaaagtttgagtggaacagagttcactgcatccaagaagaggagaaaacactgaacaaagagcctggtgtagtttttaattttgagttttctgacagaagaaaagattgatattttgtgtattgaacaggaagactgccagtattaaaaaaatccttctgggaatctgtaggttatttcttggaaattgcaatacgtagttctagaataaaagtacaaaaaattagaataagaattctttaacattttctttaatgatttgcataaatggagataaaacttgtatttagtatgtaatagaaaaaattctgttattcgcagattgttactatttcctataaggttttgtgatactatactgtcctaatacagtctggtaatactattctattttatttaaaatattttttattgaaatattaatgtttattacatgcaaataactattttgtatctacagtcggataatggattttttattttgtatatttattctattttgtatattgttaagtgcaataaagtttttgccttgctttattttttaatacataaaacttacattctcataacgtgattgataacttaggaagttcacaatgtattttctacttctgcaattaaatattctttagtgcttgtttattattactaaatactaattaagtactaacaagtacttaaatactaatgtattaagtatttaagtactttctaataaaatctttaacaataataatgtaaatttcagaatgtgtctctggtacagaatagttgatattaacagaaaaaaaaaaatctgtagcttcatgaatatgccactctgttaatttcttgttccagacattttaatagagattgcttgagccatgttgtttgaattgctgccaatagcagaccatatccctatcatgttgttggctcaactgttttttttttttccctaatagagatggagtatcgctatgttgctcaggctggtcttgaactcctgggctcaagctatcctcctgcctcagcctcccaaagtactgggattataggtgtgagctactgtacccagccttaacctgtttcacagttgattatacttcatgctgtttcccagcatggtattattaagggatttaaagttggggttgcatgcctgtaatcccagcattttgggaggccgaggtgggcggatcacgaggtcaggagatcgagaccatcgtgactaacacagtgaaaccccgtctctaataaaaatacgaaaaattagccaggcgtggtggcgggcgcctgtaatcccagctactcgggaagctgaggcaggagaatggtgtgaacccagtgagccgagatcgtgccactgcactccagcctgggcaacagagtgagacttcgtctc

SEQ ID NO: 401909 - DNA, 2464 bp, Homo sapiens
agtgtttactaaaggacaagtcaccacaggacagtacaggatgcttgccaaaagaggtggatatgtctgggttgaaactcaagcaactgtcatatataacaccaagaattctcaaccacagtgcattgtatgtgtgaattacgttgtgagtggcagaatgagaaatttagaaaagaacatgtttacaaaagaagctttagctttggcttggcgatattttttacctccatacaccttccagatcagagttggtgctttgtatctgctatatggattatataatacccaactgtgtcaaccaaaacaaaagatcagagttgccctgaaggattgggatgaagttttaaaatttcagcaagatttagtaaatgcacagcattttgatgcagcttatatttttaggaagctacgactagacagagcatttcactttacagcaatgcccaaattgctgtcatataggatgaagaaaaaaattcaccgagctgaagttacagaagaatttaaggacccaagtgatcgtgtgatgaaacttatcacttctgatgtattagaggaaatgctgaatgttcatgatcattatcagaacatgaaacatgtaatttcagttgataagtccaagccagataaagccctcagcttgataaaggatgatttttttgacaatattaagaacatagttttggagcatcagcagtggcacaaagacagaaagaatccatccttaaagtcaaaaactaatgatggagaagaaaaaatggaaggaaattcacaagaaacggagagatgtgaaagggcagaatcattagcgaaaataaaatcaaaggccttttcagttgtcatacaggcatccaaatcaagaaggcatcgtcaagtcaaactcgactcttctgactctgattctgcatctggtcaagggcaagtcaaagcaactaggaaaaaagagaagaaagaaagattgaaaccagcaggaaggaagatgtctctcagaaacaaaggcaatgtgcagaatatacacaaggaagataaacctttaagtctgagtatgcctgtaattacagaagaagaagagaatgaaagtttgagtggaacagagttcactgcatccaagaagaggagaaaacactgaacaaagagcctggtgtagtttttaattttgagttttctgacagaagaaaagattgatattttgtgtattgaacaggaagactgccagtattaaaaaaatccttctgggaatctgtaggttatttcttggaaattgcaatacgtagttctagaataaaagtacaaaaaattagaataagaattctttaacattttctttaatgatttgcataaatggagataaaacttgtatttagtatgtaatagaaaaaattctgttattcgcagattgttactatttcctataaggttttgtgatactatactgtcctaatacagtctggtaatactattctattttatttaaaatattttttattgaaatattaatgtttattacatgcaaataactattttgtatctacagtcggataatggattttttattttgtatatttattctattttgtatattgttaagtgcaataaagtttttgccttgctttattttttaatacataaaacttacattctcataacgtgattgataacttaggaagttcacaatgtattttctacttctgcaattaaatattctttagtgcttgtttattattactaaatactaattaagtactaacaagtacttaaatactaatgtattaagtatttaagtactttctaataaaatctttaacaataataatgtaaatttcagaatgtgtctctggtacagaatagttgatattaacagaaaaaaaaaaatctgtagcttcatgaatatgccactctgttaatttcttgttccagacattttaatagagattgcttgagccatgttgtttgaattgctgccaatagcagaccatatccctatcatgttgttggctcaactgttttttttttttccctaatagagatggagtatcgctatgttgctcaggctggtcttgaactcctgggctcaagctatcctcctgcctcagcctcccaaagtactgggattataggtgtgagctactgtacccagccttaacctgtttcacagttgattatacttcatgctgtttcccagcatggtattattaagggatttaaagttggggttgcatgcctgtaatcccagcattttgggaggccgaggtgggcggatcacgaggtcaggagatcgagaccatcgtgactaacacagtgaaaccccgtctctaataaaaatacgaaaaattagccaggcgtggtggcgggcgcctgtaatcccagctactcgggaagctgaggcaggagaatggtgtgaacccagtgagccgagatcgtgccactgcactccagcctgggcaacagagtgagacttcgtctc

SEQ ID NO: 401910 - DNA, 1476 bp, Homo sapiens
agcgattcctcctaaaatggctacaaggccggcggcgcggagtccgcccagtgcgcgttccctgcggcctgcagcctcggcgcccgggacccgccggcctctctagccgccgccgccgccgcctcgatggtgggcagtcgcacgcagcctccagcgccaggagggggcgccaggcagggcctgtcccgcctggggagactgcgcccgggataataggagcgcttggcctctgagactacccggcagaagggacgtccccaaatgacactcggaggccgcctccctgggctccggtgctcggtgccgggaggagcggcacggctttctaccccgcctcaggtgcgccagcacgttttctgggcagcatctgtgtgttaggcgaccggagaggtgggttccttatagggaataagaaaactgaaactgacttccaactgcaggcagaaggaagcagtggtcattgctggaggttaaaactgttctgaccgggcgcagtggctcacgcctgtattcccagcactttgggaggctgaggcgagcagatcacgaagtcaggagatcaagaccatcctggccaacaaggtgaaaccccggctctactaaaaatacaaaaattagctgggcgtggtggcgcgcgccggaagtcccagctacttgggaggatgaggcagaagaatcgcttgaacccgggaggcggaggttgcggtgagccgagatcgcgccattgcactccagcctggcgactcagcgatactccgtccccctctccccgccccaagaaaaatctgttcagtggggagcgacaaggaaggagctttcagcccgactggggtcgcagggaagaattcaagatggcgtgtttaggagctctagctccttgacaaattagtaaaatgttagtcttaggagaagaacgaaaaggctctcctaggctaagaaacagcatacacagtgagaaacctcagaagaaataaaattcaaggaagatagcaacaacgaaaacatcagaaggaacactaaagtagtcaaatcagcctagcagaaacaaagtacgttaaccaatggaaaactgacggagagaaataaactgtttttgcacagctaaatggaaatgacttttgaattatctgctttggaagattatccatgacactgttctgccctgctctgctctaacaacatttgctggtgcctctgccgagatcacccttttattccttatttggtagactcctactcatccttcaagactcagctttaagaaaactttatcttctttaagaaaacttccctggaacctgatatttcatgtcctgatgggttcaacatctttcctccgagctgcaacgtatagatctctagcatttgtccccatgtaactctctatttttattaattatatttataataaaatttttcttcatttttatccccttaactagactataaagttactgatttttcttttttgtcttt

SEQ ID NO: 401911 - DNA, 1314 bp, Homo sapiens
aaaaagggcaaagacagccctagggttgggagggatccaggttttttatgaaaattagtggaatccctaagatacttacctttgtattataagtatttgcatgtctccttctagaaacgtttatcactctgtgttacacagaccagcagtgttggcgtcaactgggagcctgttagaaatgcagaatcaggccccatccccagggttctgaatctgcattttaacaagatcacattaaagtgtgtgagaagcaatgctttgacagctggcagagagcagatccagatttgataccttttcatattctgcatgtaccttatacagagtaggcttttgcatttgcggaatgaaggatacaggaatactgtttactgtaatccatttctaaccagatatgccacttaggcttaaacacggccaatgatggggaaccccaagttacataggccaccctttctgagtgagcagctctatttgctgaaacgttcatttttatattatgaagttgacatcccacttaagtacaacaaattcactactcccctattctttgctctgcctcttataaactcattctttggctcataaaccaaagacagtttacaggaagaaaaaaaaaaggtacgattttactgcaacttcttgctcacccctccaaaatctttatgtctgagtacatgctttttggttatccctacttttctccctccacccctcaattccttaccataggacactgaagcaaggcccttgaagatacataatacattaaaccttgacttgtgtagtattcagttttctgaccccaaggtggtttcaccatgccaaataatatgtccttggtatgtatttccttgcagtagtcaaatcagcctagcagaaacaaagtacgttaaccaatggaaaactgacggagagaaataaactgtttttgcacagctaaatggaaatgacttttgaattatctgctttggaagattatccatgacactgttctgccctgctctgctctaacaacatttgctggtgcctctgccgagatcacccttttattccttatttggtagactcctactcatccttcaagactcagctttaagaaaactttatcttctttaagaaaacttccctggaacctgatatttcatgtcctgatgggttcaacatctttcctccgagctgcaacgtatagatctctagcatttgtccccatgtaactctctatttttattaattatatttataataaaatttttcttcatttttatccccttaactagactataaagttactgatttttcttttttgtcttt

SEQ ID NO: 401912 - DNA, 251 bp, Homo sapiens
tctactatatttgcttgttacagatacttatctagatactatagatattatttttatagctagaagattttgggtgttttgaagcattcttaagttttatcagtaggttctaagaacctatcagtagtttctaagtagtgataaggaaatggcaatttggtttggtttattgaaagtagtgataacagaagctttattttaaaatagttttctaaatataatgcttgatgagtagcaattttatattacag

SEQ ID NO: 401913 - DNA, 338 bp, Homo sapiens
cctgggctcaagccgtccttctgcctcagccttccagagtgctaggattataggcatgagccactgcacctggtgcaaaattctcataatgcaaatatttaaggcttttgatatatactgataagtcatccctctggagaggctgtctgaagtggtgctcccacctaccatgtctggaagtttctattttattaccatccaaggtggtgaatgtcttatgattattgaccattggtatctgtaaatttcttgtttgatatttttttcggcgtgttcaccttctagtttttttgttttcgaaagaacccttgcgctggaaaggatggtaactgactctt

SEQ ID NO: 401914 - DNA, 444 bp, Homo sapiens
ctgggtgaaatatgtcccacctcagagtgaatgaatgccctaaagataggatgaaacctggggacctgatcattagggttttaccttgaatgagaatcaggtcataaggcccccagggatttattgaatgagaatcaggtcatagtatgagagctccccaggaatttatttcccaaaactcttaaagagggagttgaaagcctcaggtgaggacccagatatttgtatgtaggtgtacaaagcaaaacaaaatgaatttgagattataacatagagtgatcaatatgatgtcttaggtgtcaccacagttggtgggctaggactcatgcttataatgcatcggtggaagggtatgtcccattcagaagtagcagacctgccatgaagggcggtgtagcagcaccatgtgtcaaagagagattcccctgtgtggaaggacagcca

SEQ ID NO: 401915 - DNA, 296 bp, Homo sapiens
  misc_feature (245)..(245): n is a, c, g, or t
ctcatatgtggaagggacttgccttgcctcagatgagattttggacttggacttttgagtaaagactggaatgaattaagactttggggacttgtcaggaaggctggattggttttgaaatgttttgtctccagatttttctgaaaatattaatgaagccagctgggaagaggagcagtttggatgagactgggataagaagtggttaataaaatctggttatctattctggaaaaaataaaccntgatgcggccgaaacccggtcacacgattgccgctgcgcgaatctgcttat

SEQ ID NO: 401916 - DNA, 432 bp, Homo sapiens
ctcatatgtggaagggacttgccttgcctcagatgagattttggacttggacttttgagtaaagactggaatgaattaagactttggggacttgtcaggaaggctggattggttttgaaatgttttgtctccagatttttctgaaaatattaatgaagccagctgggaagaggagcagtttggatgagactgggataagaagtggttaataaaatctggttatctattctggaaaaaataaacagctgataccaccattctgaactattacagtgaattccacataggcactgaaggtgcaagctttcatgaattgcttgcctttgagtcaggtactgtgttaaggacattatgtttaggactagatttacttctccaaaaagctaattccatgagttctggaggttgggaagtccaagataaagatgccag

SEQ ID NO: 401917 - DNA, 640 bp, Homo sapiens
ctcatatgtggaagggacttgccttgcctcagatgagattttggacttggacttttgagtaaagactggaatgaattaagactttggggacttgtcaggaaggctggattggttttgaaatgttttgtctccagatttttctgaaaatattaatgaagccagctgggaagaggagcagtttggatgagactgggataagaagtggttaataaaatctggttatctattctggaaaaaataaacagctgataccaccattctgaactattacagtgaattccacataggcactgaaggtgcaagctttcatgaattgcttgcctttgagtcagaatctggaacgctgaggaggtctctttccagtaacttggaccagagacaactgtaaatgtgctggaagccagaagatgttggggaagctggcaaagagaaaacctgagagttatttactgctcagcctgcagcatccatgagtgactgaagggagtatctggacctttttctcacttccaaaagcaagtgctaccagaaaggaagaagaaaaccttgaagttatcttagcctacaacagtgatatcatccatatctttattgtcatggatgaaaatgggaaataaaagattctgatggctcctaactc

SEQ ID NO: 401918 - DNA, 155 bp, Homo sapiens
gcttccctccacagggagatggagaaaagtaggctgtagggatccattggttccatggaaacagaattctggagacaccaagaaatggaggccccttaaagggtttcactcacccattattcctttcctttttttttttttttttttttgagaca

SEQ ID NO: 401919 - DNA, 829 bp, Homo sapiens
ctggtctcgaactcctgacctcaagcaatctgcctgcctcagcctcccaaagtcgtgggattacaggtgtgagccaccccaccaagcctggctaatttttatatttttagtagagacggggtttcaccatgttggccaggctggtctcgaattcctgacttcaagtgatgggcctgcctcaatgtccaaaattgctgggattccaggagtgagccaccacgtccggtcctgccatcattcttaacaagagcgcccccaccatcgtccagggagagatggaatatccagagaagaacagagctcacagaaggtttaaaaaacaaaatggccaaggctctccccaggtgtcgatggggtgggaggcatggcccaactcctgaagatgtcatggcacagtgggcagccaccatggggaatccggccgggatgacagagacagccctgcagcacggcactgctcatagtggggccaggccctggaggagtctcctgaagccacaaacatacatagtccgcaccctcccctgccccaaactcagcgtgtagcagatcaacctctgtactatcagccaagccaatacaacaagcacagtgattgtggactactccccaagaacaaaacatcgaagaacagccaagctagcacgctggctcacgcctgtaatcctagcacttttcaaggccgaggcaggcggatcccttgagcccaggagttcgagaccagccttggcaacatgatgaaaccctgtttctacaaaaggcacaaaaattagctaggcgttgtgggaggatcacttgagccaaggaggtagagtttgcagtgagcctt

SEQ ID NO: 401920 - DNA, 527 bp, Homo sapiens
tgtagacctcagaaaagcacgatgattatttacagatttccagaatctctactggattctttgcttttcctttctcacaaggaaactttccaggatacagagcacaacaggatctgaatggcagtgaattctctttaacatatctcttcagggtgatgggggcttcactggtatagaggggtcagggtcagcccctgttgtttctgcttatgggttggagaccccctatatgtgcaagaaatacactaagccaacttactccattaatgatgatagcatggctttgtatattaggatgtgtgtgcatatgtgaatgataggatatacgttaatagtttgtaataataaaagattgaaagcaacataaatctgcattaaagacacttattaaaaaaaccgtggtatatccacacaatggaatactatgcagctataaacaagatgcaccaatatggaatgaactccaacacttacttgtaaaaagcaaggtacaaagtagagcatatacatgaatattgattgtcttt

SEQ ID NO: 401921 - DNA, 606 bp, Homo sapiens
gccaggtgcaatggctcacacctgtaatcccagcactttgggaggccgaggtgggcggatcatttgacatcaggagttcaagaccagcctggccaacatggcaaaacactgtctccactgaaaagtccaaccttaaaggtacactgatttatctttacaaataccaattctggtggagcataatagcatggttaaaacaacgttctccctaaatggcgacgatctacggggcggaaatatgcttggaactgacggtactgcctgcaggcgtgtgctcgtcagaatctattcccaacacagtagaagcggaggtttcaggaggtgcagagtgactagaccacagcatgtgtgtaagaaaactgacactgaatgaaaacaacacaaaacaaacttcatctcagtcagtgctttctgtttgttgcctgtcaccactcagcgtttagagaaaacgtccttgcctctgtaaatcaaagtggctcacgagggcattgaaacttttcgtatgtgagtgctctataaattttggttgcattttattcagacttcactagaaacttccagttattcaatgaatgttgtgccagaaaacatcagttttgtaaggga

SEQ ID NO: 401922 - DNA, 286 bp, Homo sapiens
tgctgggattacaggtgtgagccaccgcacccaggctactctcatctttttaaacttggaatccaaaatcctctataatctgacccttactgaagtcctgaacactggtgaacaacgttggtctttgccgaggggccagatttctttttcagaccatgttgcagctgaccttgaccctgagtatctgagggaggagctttggggcacaggcagctctgtgtgccattcttgctttcagaagagtctcccatgtttgggtcccagaaaagtgatctgtggtccaggc

SEQ ID NO: 401923 - DNA, 514 bp, Homo sapiens
gcgtggtcccagattcctcactcttgaccttataatgctaagaaaggggcatggagtggataggaacagagcctgagatgcctggggacaacagggaaagatagaaaatatttatagggtagaatgtggtcactgtgccagggcacttttacaaacatgatgacatcaaagtttcacagtaaactctgaaggtagatattaccttcgttttagaaaacaggctcaaggcttcgagtaattttgcctgtgatcaaacagctggcagtagggcccagggcccaacttgtctccaggtcttctgatttcaagactgttgtttttgttttgttttgttttgctttgctttgttttgagacagagtctcactctgttgcccaggttggaatgcaatggggtaatcatgactcactgcagcctcaatctcctaggtctaagcaatcctcccacctcagcctcccaagtagctgagactacaggtgtgtgccaccacaccaggctaatttttatattttta

SEQ ID NO: 401924 - DNA, 334 bp, Homo sapiens
ccctttttattgagtagtattccattgtatgaatataccacagttggtttaaccatgtaatagctaaaggacatgttccatttggggccattataaataaaatcactgtaaacatttgcatatgggtgtttatgtgaacataagtttttatctcccttaggtgagtacctgggagtgggactgctggcttatggcaagaatttaacttcagtagaaactactggccgggcgcggtggctcactcctataatcccagcactttgggaggccgaggcaggcggattacctgaggtcagaagttcaagaccagcctggccaacatggtgaaaccctg

SEQ ID NO: 401925 - DNA, 439 bp, Homo sapiens
ggaattgaagcattgccccaggttctagagggtcaactcctgtgaggaaacttgttactgcataaattgggactaaagccagacctccaagttcctgtcccactgtcttttcacttatctgtctcatccatttttcaagtccacctttgtctttaggagagataattatgtccctcacacaatacgctatactgagaatgggctgtggggatgaacaatgtgaaaactgaaaagaggaagaacacatcttaggaaaaaaatcgtcatattttctctaagaaaataaataacttcataaagtttattgtacaggaagacttggatcattcttgaattttcattgcaaatcaaaaacaggaatttgactttattatcttgggagaaataggaatagaaaagtgtataaaaaataaactttttttaaccaagaataaattgc

SEQ ID NO: 401926 - DNA, 949 bp, Homo sapiens
gacagcgtttcaccatgttggccaggctggtctcgatctcctgacctcaagtaatcagcacacctcggccttccagagtgctaggattaccggatgacccacacgcccggcccatttttgtatttttagtagatacagggtttcaccatgttggccaggctgctctcaaactcctcaggtcaagtgatcctcccacctatgcctcctaagtagctgggaccacagacacacagacgtgcaccaccatacctggcgaagttttgtatttttggtagagatggggtttcaccatgttgctcaggctgttctcaaactcctgagttcaagcgatctacctgccacagcctcctagagtgctgggatgacaggcatgagccaccgcacccagcctctgcgtggggtttcgtcagggctgggtctgtgccctgaaggggagctcattccagcccagctccccactgctgcagcttgtgtgtggactcctccagaaggggagcgggagtttccctgtaggagtttatcatccatggtgaggagggcagcagggggcactatttcctcagggtgaggtctttagttaggcctctgagcccaagctaagccatcatatcccctgtgacctgcacgtatacatccagatagcctgaagcaactgtaaaaatatccttaactgatgacattccaatattgtgatttgtttctgccctaccctgactgatcaatgtgctttgtaatctcccccacccttcagaaggctctttgtaatcctccccacccttgagaatggacttggtgagatcaacccgctgcctgcaaagcattgcccctaactccaccgcctgtcccaaaactatgagaactaatgataatcccaccaaatttgctgactctcttccagactcagcccggtgcaccaggtgaaataaacagcctcgttgctcacacaaag

SEQ ID NO: 401927 - DNA, 183 bp, Homo sapiens
tcgtaacagcagctgatgatatactccctaatgaaaaatcactcatatatagaagatagtgcatgtcctcaccagccaagaagatttttgtttaccttctctagtttgtattttgaaaataataaatatttttaattctctgaacacaaaattatgctattaaacatggtttttaaaaatata

SEQ ID NO: 401928 - DNA, 101 bp, Homo sapiens
atttcctcatgtctgttataatggcattctagcccaacataatcatgtccatctcttggaatgcattgtgtagactttaacttatatggttctgctctact

SEQ ID NO: 401929 - DNA, 207 bp, Homo sapiens
agtagagatggggtttcaccatgttggtcaggctggtctcgaactcccgacctcaggtgatccgcccgcctcgacctcccaaagtgctgggattacaggcttgagccaccacacccggccccttttactctattaatgtgccatttaagtgtgaagtccacttaagtgtgaagtgaactaatttctttcttaatatttttggcttct

SEQ ID NO: 401930 - DNA, 1944 bp, Homo sapiens
  misc_feature (1011)..(1011): n is a, c, g, or t
aaaaggtaatgtatggaaaggaaccaaccatctgaaataatagtcctaaatccaactagataatcttttaaagctgtaagagtcagagatggagatttctaaactttcaaagaaaacttgattgcaaatgagaaacctgtgcatttttgaatgcttattgaatttgaatgtctgtgtgggccaaaaagaatcagagggacaaatggaaggcaggaaagaaaaggtgtaaattttagatgtgttttaaattaatgtatttaatgacatattagactcattacaattttattgactttccctttacatttgaatgtaattttttactagccgatgcaagctgcaaaatggcgagtcttctaaggtgcctttccttccctgggatcctcatcttagaatgagcagaggcacatcgataagaactggaccttgatttcacaacctcatacaaagccaggcaattcttgagccaaacaaagggggtgtaagctatttcatttattttgataatcctcctcttgcacgggagcattttgctgtctttgtcaaagtgaatgacaacaatttggccaactctctctgagctgcactcaacagtgacaggcaaattatcagaggccctgcacttcttattatcagaggagaagccatcagggggacgcatggaggatacctctcccttgtcactatttgtcagtgggacaagggccactgctatgggtagctgacaggtaatttcaacaataacaattactcctattactggtgtcataaacaattcgcccaaggcatgacaatagcaaagctttataattcaatgccatataaataaatgccagcaggtaacaagtaatttagctccaatcaagctttcaccccggcattaatattgttattgcaagaaaatggaaaattgaaaaaattcaatatgttaatgaattaagagaggttcaagggctagacaagacgagttggaaaaaggaaacaaaaattattgtggtatcatatttggtnccatcctggaggccaaacatcagtataattactttaagacaagaaggggaactggagtgccttagatctcagagcagggaaaaatgtgacatgagctttcaaaaaatccacctaactccaatttctgaagaatataaggagaaatatgagagtgtatatatataatgtagcatttcactggctttctttttctacctgaaatatttcatatgaagcagaagcatgagtatcaaagaaacgtttccatctgtttaagaaaattgtatcagcacctgcttcctttacattaagtctcataatgaaactattttaataatccttttttttttaatctggggtgaaggtaaagctgaaagtcatctttgctctccagctgtccaccttttggaagtggactagaggatacagtgttatcttcatacgtaaaacttcctgatcaagccaatttgcaattttagtatttgtccagcaagacaatgtgccatcatggtgacagcagtaaaagaatttgaaaatctctaattaggagagctgcacaccaattaacgcatgtcaaatttcacttcatcaagtgccactctaattttccctctaaaaattaatggattttttttcttttggtatgtgtgtgtgtccccttaaggcaatgttgattcaaatctgctcgagatgcagtgttgcacagctaagcatcttcttgattacaatccgccacacttctaactgcgctcattcgcactgccacggatactttgtcaacagtcaaattacaccacgctgataacaatgcataatggtgttcctcctccagtcccctgtcaggagaggggcttcataaaaatgtgatgttttcttctcaactgtatctaaaggaagtttgtatgaccaggtccccagtcaggtgttgatttttaaaattagtttgttaatttc

SEQ ID NO: 401931 - DNA, 535 bp, Homo sapiens
tgagttgcccagagcccacagtgtttgctttctcaccactccggactccacctttgagctctttgcgagagatgtggatttccagctttgaacaatccaagaaagaagcccaggcactaagttcaactatatttatatgaagcaatgtgtagaaagtagtcctttagtacctattcagcaggaatggctggatcacatgttaaggctgatacctgagtctttaaaggaagggaaagaaagagaagaacttcttgaaagtctcataaatgaggtgtcaagtgactttgaaaacagcatgaagagatatttggtgcagagcgttcttgtgaaaccaccagttaaatcgcttgaagatgaaggaggtcctttacctgaatctcctgtaggcctagattattctaatccttggcattctagctatgtgcaggcaagaaatcaaatattctctaatttgcacattattcatccaactatgaaaatgttactggaccttggttatacaacatttgctgatacagttttgttggacttcaca

SEQ ID NO: 401932 - DNA, 2219 bp, Homo sapiens
gacagtgtacataagagtttcttgttgctttacaataaaacatgagaacctgcagcttgtgatgttgtggcagtggcagcctccgcggctggtgccaccacctttgcccaggcccccgcagcagcacctgcctcccaggccactcctagactcacgtgcctggccgccccacccaggggcttctgccagccctggcggcgccttggtgctgtgtgggtgtcattggcatgttgaccaacagcctcctgccctgcccagctggagctgtgcccccagctgcgctgcctgaggcctgtgggtgggtgggaggaccagggacggggacagggagatctgggagcctcggcctccaccgcagggtgagcaggtggagcagcagcaggagatgctgggtagggagtgtggctggtcctacctgcgctgccttgctttccctgaagggattctgctcagggaggcagagtctaggcgacctaatttctaggggcgaggacaagaacacagccgcaccgggatgtggctgaccgtctacctccctcctagggggctggcaggggcttctgggacggttttgggacaggtctggggcaccagaaccggctcaggcaggtctcccaccccttaccctgggggtccccatgggaatgaaagccaggagttcatcaggcacccagctgagtcgagggggcgggacccagtgcagcccggcccctccctggcccaggacctcaaataccggcccctgccttggtgccagagctactgccagagggagtcagtgcagtcctgtgtcggacacgcccgcagcctggacccgggatccccatccccctaggatctctgagcctcgggcctctgcacccacatccaaggtgagtctctcggctgccctgagctggggctggatgggccggaccctccattccggctgcagcttcccgcgcagtgagaaggcagcggtccctgagagcccagcagtgccctgggagcctgcagaacgcaggggcggattccgcgtcgcactggccgtcaaggggcggccgcggagggaaggggtgggtcggtgggtctgacagcgggtctgcgtaggcggcagcgtctgtccctcccagcctctcgctccgcgccatgggcgggccccgggctctgctggccgcactctgggcgctggaagccgccgggaccgccgcgcttcgcatcggagccttcaacattcagagcttcggtgacagcaaagtgtcggaccccgcttgcggcagcatcatcgcgaagatcctggctggctatgacctcgcgctggtgcaggaggtgcgagacccagacctcagcgccgtgtccgcgctcatggagcagatcaacagcgtgtccgagcacgagtacagctttgtgagcagccagcccctgggccgggaccagtacaaggagatgtacctgttcgtgtacaggaaagacgcggtgtcggtcgtggacacctacctgtacccagaccccgaggacgtcttcagccgcgagcccttcgtggtcaagttctcgggccccgggaccggtgagcgggccccgcccctcccctcccgccgagctctgacgcccccaccccttcccgcagcagcacagaacctggtgctgatcccgctgcacgcggcgccgcatcaagccgtggcggagatcgacgcgctctacgacgtgtacctggacgtgatcgacaagtggggcaccgacgacatgctgttcctgggcgacttcaacgccgactgcagctatgtgcgggcgcaggactgggccgccatccgtctgaggagcagtgaggtcttcaagtggctcatccctgacagcgccgacaccacggtgggcaactcagactgcgcctacgaccgcattgtggcctgtggcgcccgcctgcgccggagcctgaagccccagtcggccaccgtgcacgacttccaggaggaattcggcctggaccagactcaggctcttgccatcagcgaccactttccagtggaggtgaccctcaagttccaccgatgactcgaggcctgactggggcatgccacctgcagaccctggctctgaggaatggcccaacagtggccccttcagggtggcagccacccttcagtgaggccccaaggcagagtcggctgggcgtggaccaggggcatggacacgtgatgtgctgctctgtacctccgttccccatctgtgggacgggctggatc

SEQ ID NO: 401933 - DNA, 1245 bp, Homo sapiens
tggcagggcctgggttacctcgggctcccgcgcaattttgggatgtgcagtcctgtgtcggacacgcccgcagcctggacccgggatccccatccccctaggatctctgagcctcgggcctctgcacccacatccaagcctctcgctccgcgccatgggcgggccccgggctctgctggccgcactctgggcgctggaagccgccgggaccgccgcgcttcgcatcggagccttcaacattcagagcttcggtgacagcaaagtgtcggaccccgcttgcggcagcatcatcgcgaagatcctggctggctatgacctcgcgctggtgcaggaggtgcgagacccagacctcagcgccgtgtccgcgctcatggagcagatcaacagcgtgtccgagcacgagtacagctttgtgagcagccagcccctgggccgggaccagtacaaggagatgtacctgttcgtgtacaggaaagacgcggtgtcggtcgtggacacctacctgtacccagaccccgaggacgtcttcagccgcgagcccttcgtggtcaagttctcgggccccgggaccggtgagcgggccccgcccctcccctcccgccgagctctgacgcccccaccccttcccgcagcagcacagaacctggtgctgatcccgctgcacgcggcgccgcatcaagccgtggcggagatcgacgcgctctacgacgtgtacctggacgtgatcgacaagtggggcaccgacgacatgctgttcctgggcgacttcaacgccgactgcagctatgtgcgggcgcaggactgggccgccatccgtctgaggagcagtgaggtcttcaagtggctcatccctgacagcgccgacaccacggtgggcaactcagactgcgcctacgaccgcattgtggcctgtggcgcccgcctgcgccggagcctgaagccccagtcggccaccgtgcacgacttccaggaggaattcggcctggaccagactcaggctcttgccatcagcgaccactttccagtggaggtgaccctcaagttccaccgatgactcgaggcctgactggggcatgccacctgcagaccctggctctgaggaatggcccaacagtggccccttcagggtggcagccacccttcagtgaggccccaaggcagagtcggctgggcgtggaccaggggcatggacacgtgatgtgctgctctgtacctccgttccccatctgtgggacgggctggatc

SEQ ID NO: 401934 - DNA, 1268 bp, Homo sapiens
tggcagggcctgggttacctcgggctcccgcgcaattttgggatgtgcagtcctgtgtcggacacgcccgcagcctggacccgggatccccatccccctaggatctctgagcctcgggcctctgcacccacatccaaggcggcagcgtctgtccctcccagcctctcgctccgcgccatgggcgggccccgggctctgctggccgcactctgggcgctggaagccgccgggaccgccgcgcttcgcatcggagccttcaacattcagagcttcggtgacagcaaagtgtcggaccccgcttgcggcagcatcatcgcgaagatcctggctggctatgacctcgcgctggtgcaggaggtgcgagacccagacctcagcgccgtgtccgcgctcatggagcagatcaacagcgtgtccgagcacgagtacagctttgtgagcagccagcccctgggccgggaccagtacaaggagatgtacctgttcgtgtacaggaaagacgcggtgtcggtcgtggacacctacctgtacccagaccccgaggacgtcttcagccgcgagcccttcgtggtcaagttctcgggccccgggaccggtgagcgggccccgcccctcccctcccgccgagctctgacgcccccaccccttcccgcagcagcacagaacctggtgctgatcccgctgcacgcggcgccgcatcaagccgtggcggagatcgacgcgctctacgacgtgtacctggacgtgatcgacaagtggggcaccgacgacatgctgttcctgggcgacttcaacgccgactgcagctatgtgcgggcgcaggactgggccgccatccgtctgaggagcagtgaggtcttcaagtggctcatccctgacagcgccgacaccacggtgggcaactcagactgcgcctacgaccgcattgtggcctgtggcgcccgcctgcgccggagcctgaagccccagtcggccaccgtgcacgacttccaggaggaattcggcctggaccagactcaggctcttgccatcagcgaccactttccagtggaggtgaccctcaagttccaccgatgactcgaggcctgactggggcatgccacctgcagaccctggctctgaggaatggcccaacagtggccccttcagggtggcagccacccttcagtgaggccccaaggcagagtcggctgggcgtggaccaggggcatggacacgtgatgtgctgctctgtacctccgttccccatctgtgggacgggctggatc

SEQ ID NO: 401935 - DNA, 302 bp, Homo sapiens
gcggccgcggagggaaggggtgggtcggtgggtctgacagcgggtctgcgtaggcggcagcgtctgtccctcccagcctctcgctccgcgccatgggcgggccccgggctctgctggccgcactctgggcgctggaagccgccgggaccgccgcgcttcgcatcggagccttcaacattcagagcttcggtgacagcaaagtgtcggaccccgcttgcggcagcatcatcgcgaaggtggggcccgggccggggcggggcggcgtttaggggtgctgaccgcgctgacccccgcacccgccg

SEQ ID NO: 401936 - DNA, 505 bp, Homo sapiens
cttgcttttttgtcttttttttttaaatgtatatttttatcttcatcataaagtggagacatcttacccctttttctctcaagaggaaagaaacaggaggtcatttgcatcatggctgtagcccctgagtcttacatgtctcttgtattgcaactgctgcctccaacccaattaacctctgggttcctgtgaaccatatgaaattgccgtttctagaggccataaagggttagagatcggcaatcacatatggttcagcctaatagcaagttaatggccctccattttaatgtggtatcttttagcttatcattgatctgttgttcatggctcaaagataggatttttctggtgactcttctgtctgatgacagtatggctcaacaaaatacaaatgtttttccgcagtccagttgagaggcaaagcgtatccctaaaatagtctgccagctttaacgctggtgccgttgcgtatgtgcatttgctcacagctgtaacatttgta

SEQ ID NO: 401937 - DNA, 396 bp, Homo sapiens
tgagatagactccaacacaataatggttggggacctcaaccattgtcagcatcggacagatcatgtagacagaaaataaacattggattgaaactgcgctttagaccaaattggcctaacagacatttacagaacattttatctaacagctggagaatgcacattctttttatcagcacatgtaacattctccaggatagaccatgtgttaggccataaaacaagtctcaacaaaattttaaaaatagaaattatatcaagtatcttcttagaccacaaaggaaaaaactagaattcaataacaagaacaactttggaagctgtacaaatacatggaaagtaaacaaaatgctcatgaccaactattgggtcagtgaagaaattatgaaggaaata

SEQ ID NO: 401938 - DNA, 497 bp, Homo sapiens
ggggctggaacacgggaaggtctgaaagcgcctccgcgcgtgtagaggggcagtgccgcggaggagcgcctcaggaagggcatgccctcgcagcacgggcttttgctgtgtcacgtgtcagaaagccacggtgaccaccaccccgccagggaggccagaagaagttctgcggcgacaattctctaaagcagggcttaagtccaggctcggtactgacagccgtgtcccttcttgggtcaacactggggctaactctaccatgtctcctcccagcaaccccgaaagtcgcatgggggacacgaccctctgtcgagctccacaccgacagtctgaccgggggcgggaccagcgcctggtctcgcggctttgctgtcgcctcccgcgcccacgggcacctccgccaccgtggcagccgtcacggagcccttccgcgtcccgagcgccaaggcacctgcgagcagccgctccagggctcgagattgggtgacaagcggccg

SEQ ID NO: 401939 - DNA, 401 bp, Homo sapiens
agttagatatgctggagctgaagtacacaataggagatctaaaatatttaagagaaagctttaacaggagactccgttatacaggaaaaaaaaaatcagcaaatgtaaaagttatttgaaagttcctagttagaatttaaaaaaagaatgcgagtgaataaagcatttgtcccccatatttcataatcaatggtaaggatgtacaattttaggaggttcatgagaaagaaaaaaatttttaaattgtttaaagatataatgtcttaaattcttcccaatcttggaaggaatatagatattaaatttaaaagctcaaaatgtctatagcaagaagaatctaacagaaattgtccagaacacattataattaaactgccaaaattcaaagacaaacaaaaaag

SEQ ID NO: 401940 - DNA, 560 bp, Homo sapiens
gtgttgcattcactgagctcatttgtctgttttttcattatgcaaatctcctcttacctcttcagagtgaccttcacagacaacctagtgaaagcacacttgcacccagcatactttctatcaggccaccctgttttccctaattatagcatatatttcttttattttcttgtttcttattgccaaacattctagttccttgaaggcaggactccactggtctgttctagcactgttcaatagaaatattgtgtgagacataaatgtactttgaaaatggctgggtgcggtggctcacacctgtaatcccagcactttgggaggccgaggcaggtggatcacttgaggtcaggagtttgagaccagtctggccagcatggtgaaaccccatctctacaaaaatacaaaattagtggggcatcatggcgggtggctgtaatcccagctacttggtaggctgagggaggagaatcacttgaacctgggaggcagaggttgcagtgagccgagatcatgccagtgcactccagcctgggtgacagagcgagaccctgtctcaa

SEQ ID NO: 401941 - DNA, 396 bp, Homo sapiens
gctttctaggtaagtgggcacccagggccaggacctctgacccaggatctcttggcgatgcccactgtaccccctagcctcggaagccaccaatggggggggttctacaagtgcactgcctggtgacggtcactggctattcactgtgccttcgtagggcggcgttactggtggttctaattcatgggatgaatcttgttgagttcccagtggtctctctgcccagccccctgtaccttattgccaccaaggcccacacacaattggtgtgtggaagcatcaagtaaccccagattcacagcaggggaggcctctgcggagttaggggaccattggccacatccaccactagggcccggggactcccacctttgaccctgaatgccccacacctct

SEQ ID NO: 401942 - DNA, 428 bp, Homo sapiens
caataattttgtaggtacttcctcaaatttaactcaatggaggtttagattgggtttagattgagtcattagttgcaggtcatttgttgaatcattgaatacttttggttgttaaggtgactgaaatactcagttgatgtcctttaagatcactgaaaatatttaaaatcagcttacatatggtattttggaaatgccacatacgtaatggattaaaacccacaactatatttgctgcctttcctatgcatgtcctgtcaaaattattttttggtggactataagccctaaaacaacatggaccttgttttcctctccattatattctcattacttatactcagcattgtttaaaaaaaagtttgttgatgtaataaatgtgcagttgatataataatgtaataaatgtatactgccataacaaacta

SEQ ID NO: 401943 - DNA, 423 bp, Homo sapiens
ccacctagccggccaggagtatgggtttgccagaggcatgagatgtattgaagcagaaaaggaagaaaaaagattaaggagacaaattgttcgtgataaggggtttcctgataaactcagaaacagcaactaccagttatggagcacttaaactgacactatctcattaatcctcacaacggtcctgtgcaggtggtggttttgttttttaccatcctaaatgccagagctgcacttggtatgtaacaaaggcagcatttgaaccctggcctgctcataccagagcgagggcatctaactgcacccacaaaggacaatggaggaagactgtgtcattgtaatatgagcaaatggggaaaagacaaaacaaatgctttcattatgcccaggttgtaaatgtataaacataaatgaaacacacat

SEQ ID NO: 401944 - DNA, 605 bp, Homo sapiens
aagaaaagtgaaatcggtccagtgtatttaaactactggctgagtatatgtttgaaatctggatctgcctaacaggggttcaatggagtttgcagttgggctaactgggaagggaaataattttgatcgtttaaagaatggaacagaaagcaaaggaaagatgaagcccacttcctatcaatttgtctcaggttcttactgtatcttcccctcatcttgggcaaatatttttctaccctttggccgaaataggtcatctcctcttctattagccatggcctcaaattaggtttaagacagtctgggctgtgaaagatcagaatttgtgtattgcacccgagccactgataactgccaaaggctaggagttccattcaacatcctcaaagatacaaactaagattaatcttaaactcattattttaacagagaaaagggaacacggtttggggttcatttaacatcaccattttctatgttgtcaggaggactaatcattttaaggccaatttggcagttctcactcgtgagaaacaaaactctgctgaaataaatgaagggctttgtatgtgtaaaaatgctagacttcttgaggacagatgaga

SEQ ID NO: 401945 - DNA, 411 bp, Homo sapiens
ctctcctatactctccaatttcatatcactcttttaaaaacttgatgccttaaattagaagatgcacactttgccaacaataatagaaaaactttcagctctccggactatttcctatcaagtgagttctccaaacagcagtttcatgtgagtaggcactctagagagatttctgctattatctctgctttttgttttcataaatctcttgccttttatatttatagtttccccatatattctcctgtcatttcccaagtctcctctaccttcctgagcaactggttctcacctctcagttttctgttttggataccatctatcttgcacccaggagggcctcagtaagtacctgttgaataactgagcacactgagtttgcaacataggaaaataacacacgtgtaagcc

SEQ ID NO: 401946 - DNA, 479 bp, Homo sapiens
gtggggcatggcaagcagaaactaaatatgctatcagaacaagaattttggaattagagcacacagtggtattcagcttggcgtccagtaattagaccattaaggattggattgaggctgaggatctagagctctaaaaatcaagtcagaatttctcttaggagttagggatgcccagattctgtggatgtgtttaaagtggcagcaactgcaaagaggatcgctgcagagactgggcgtgaggctgccattagttgcttcatttctcagtcacctgtaaccattcttcattccatgatactagatctactattccctgataaatcagctgaacagacgagcctaccaaactcatggtttgatgccctctgcaataccaagtttcatctgtgtccttatggctgataactgacttgcatatctagcttcccgacttctggcttaatcttaacctcttaaatttgcctgcccctacaaat

SEQ ID NO: 401947 - DNA, 325 bp, Homo sapiens
ctgcgctccagcctgggcaacagaaccagaccccctctttgtatttcttacaccaacccaatgagacaagtaccactgacccaattctatatgtataggaaactaaggttcacagggagttgtccaaggtttcagtgattagtttacattcctggttctgcagcctatacaagtttgtctgcctatatctatattttttcctgcctccaaagcaggtgacacttggatatttacacagaaatttgtcaggcagttgtttggtaagaggaccagagaaacgcactgggctggagtctgtgacagagtacagccttgagagaagtac

SEQ ID NO: 401948 - DNA, 2682 bp, Homo sapiens
agcggagtctcaagctctggtaggcaagtgcatgcagtgtgcctaaaacctgccagcagtacttttgagttttttttttggtttggttttactttagcatttattattcatggattgaagaaatcaaaatggctgaagataaagagacaaagcatggaggacacaagaatgggaggaaaggcggactctcaggaacttcattcttcacgtggtttatggtgattgcattgctgggcgtctggacatctgtagctgtcgtttggtttgatcttgttgactatgaggaagttctagccaaagcaaaggacttccgttataacttatcagaggtgcttcaaggaaaactaggaatctatgatgctgatggtgatggagattttgatgtggatgatgccaaagttttattaggacttaaagagagatctacttcagagccagcagtcccgccagaagaggctgagccacacactgagcccgaggagcaggttcctgtggaggcagaaccccagaatatcgaagatgaagcaaaagaacaaattcagtcccttctccatgaaatggtacacgcagaacatgttgagggagaagacttgcaacaagaagatggacccacaggagaaccacaacaagaggatgatgagtttcttatggcgactgatgtagatgatagatttgagaccctggaacctgaagtatctcatgaagaaaccgagcatagttaccacgtggaagagacagtttcacaagactgtaatcaggatatggaagagatgatgtctgagcaggaaaatccagattccagtgaaccagtagtagaagatgaaagattgcaccatgatacagatgatgtaacataccaagtctatgaggaacaagcagtatatgaacctctagaaaatgaagggatagaaatcacagaagtaactgctccccctgaggataatcctgtagaagattcacaggtaattgtagaagaagtaagcatttttcctgtggaagaacagcaggaagtaccaccagatacttaaagcttcaaaaagactgcccctaccaccacaggaggaccagcctaaccatacgctccaaaagatggctgtgatagatcttgtgaagcaattactgagcagatcaagatctttgggaaggaacactaaagatgttttgaatgaattatagtccactggcattttagtgtatttttttttctttttagaaacacacatttctaaaaatgtcatgttacattcctgcatgtcccttttgatagcattagtggatccattggatttcttttttctttttgtgagacagcttttagtcttacctgaatttatgtgtgtttttccgacagtggttaataattatattggtgatgtagcagcaattgtgttggcagggttttcatatattattagtaattaacactaactgttggactgacttgtgtacactgtgttaaacatgatttaaaagctattaagagtactttgtgttagcactcttaaaaacgctaacagagatcatcattagctgtgaagatttgagttgtatatacctgcactgatattcttatcaaaaatttctacattagctttaagtgttcagattaacacttttgaaatttttgtagcttttagctgattaattagaaaaattaatatttcagtgaaagttttaaattatcatttatttatttttttaaatgagaggggaaagctgaaattccttgttaagacacaaggaaaaagaatggccctactattatcatgcaaaaatgcctttgttggcacctcagattaatcatataatagctatagtctcttcagcattttgtttaaattttagaaaacctgtataaattactggtgcataacttaaagattattctgcctttggctaattgagtaattcccctccagcactagagaccgctcagtgctcttactagatgaactcagtaacgccttgagctgggttgattgaggatgtgtgaaaaatggtggtttattttgggctcagaaataattgctctgttgaaaataatcctttgtcagaaaagaaggtagctaccacatcattttgaaaggaccatgagcaactataagcaaagccataagaagtggtttgatcgatatattaggggtagctcttgattttgttaacattaagataaggtgactttttccccctgcttttaggattaaaatcaaagatacttctatatttttatcactatagatcatagttattatacaatggtagtgagtcctgcatggggtactcgatgtgtaatgaaaacctggaaataataagataataagaaaagcaataattttctaaagctgtgctgtcggtgatacagagacgatactcaaattataataaaactcttcattttgtgaattatagaagctactttttataaagccatatttttttagggaaactaaggagtgacatagaactgatgaatgagcaaaagtaagttttgctggatttttgtagaactctggacgttgaggattcattatgctgtggttaactttaaatatttttgaattccaaatatctgaattaatgagccttgtgtttacaaatatgtgccattgtgcaacatcggtggattttctaaaaataatgtaaatgtcttctattaaatgttgagtgcaataaaatccagaa

SEQ ID NO: 401949 - DNA, 1344 bp, Homo sapiens
agcggagtctcaagctctggtaggcaagtgcatgcagtgtgcctaaaacctgccagcagtacttttgagttttttttttggtttggttttactttagcatttattattcatggattgaagaaatcaaaatggctgaagataaagagacaaagcatggaggacacaagaatgggaggaaaggcggactctcaggaacttcattcttcacgtggtttatggtgattgcattgctgggcgtctggacatctgtagctgtcgtttggtttgatcttgttgactatgaggaagttctagccaaagcaaaggacttccgttataacttatcagaggtgcttcaaggaaaactaggaatctatgatgctgatggtgatggagattttgatgtggatgatgccaaagttttattaggagaaggacccagtggggtagccaagagaaaaactaaggctaaagttaaagaactcactaaagaagagctcaagaaggagaaagagaaacctgagtcaaggaaggaaagtaagaatgaagagagaaaaaaggggaagaaagaggatgtccgaaaggataagaaaattgctgatgcagacctatccaggaaggagtctcctaagggtaaaaaggacagagaaaaagagaaagtggacctagaaaaaagtgctaaaaccaaggaaaataggaaaaaatcaacaaatatgaaggatgtttctagtaaaatggcatcccgagacaaagatgacagaaaggaaagtagaagttctaccagatatgcacacttaacaaagggaaatacccagaaaagaaacggctaaagctctggcatcatcatcccagaacatggtcatgttccagattgcagtttgttacaaaaaagcatggaaaatgtaatattgctctgattggtgagggtgtgtaaattagccattgaatgtatcattggtgcttagcaagtaaattacctgaaatttaaatataccgtctcatacttctaaatgtaaaaacattttaaaaatgtcacagaatatgatgtaataacttctatttattgatcatttattgatcatgtattcagataaatgtatatgtatcatgaatttttatggattaatatattgaatactttcattgacgttaaataagaatattaagattttaaatgttaccctgtgcataatgccttgtaactttttcaagtatgctaaatactcagggagatggatttgctcgttgttttcttccctccttccccttcctgcttccctgttttctctttcgtggacacctccccaggctcatgtgccaccaccttccctcctctccagccctcccagccctcccgcagccttt

SEQ ID NO: 401950 - DNA, 1151 bp, Homo sapiens
ggaaggggcgtggccgtcgggcggcgagccgcgcgctctcgccccgggagggagtcacaggttcgtacacgcgaggccgggcgcgcgcagccggcaggcgggtgaagtcttcccaggtgctgcaggcggtgctgaggcacagggtctgctgcaggagcagcggcccgaacccgctccagcggcccgccgccgccagcggctcccgcgtcgcgtgtgtacccccgcgcactgaaggaggtccaccagccctcaccagcccccgcggaccgtgcaatggcccagcgtaagaatgccaagagcagcggcaacagcagcagcagcggctccggcagcggtagcacgagtgcgggcagcagcagccccggggcccggagagagacaaagcatggaggacacaagaatgggaggaaaggcggactctcaggaacttcattcttcacgtggtttatggtgattgcattgctgggcgtctggacatctgtagctgtcgtttggtttgatcttgttgactatgaggaagttctagccaaagcaaaggacttccgttataacttatcagaggtgcttcaaggaaaactaggaatctatgatgctgatggtgatggagattttgatgtggatgatgccaaagttttattaggcctgaccaaagatggcagtaatgaaaatattgattctcttgaggaagtccttaatattttagcagaggaaagttcagattggttttatggtttcctctcatttctctatgatataatgactccttttgaaatgctagaagaagaagaagaagaaagcgaaaccgcagatggtgttgatggtacgtcacagaatgaaggggttcagggaaagacttgtgtcatattggatttacataaccagtaaccttgattcagggactgaagtcattggctaatgaacacctgaagcagcctcctttttcttttctttccttggcttatgcagggcttaatgtgcagtggggtggttgtgatcttaccgtgcaagtcaaccatgtgatcttgcccagtacagctactagctagtcccttgctcgctcagctcccccaacttctattgaagaaaatggtactcctcattcttgtagtcagctacaaagtacactgaaaatgatgttcttggtggtataa

SEQ ID NO: 401951 - DNA, 1455 bp, Homo sapiens
cagttttacactttttattcagtaggttgttatttctgtattgtttgcttcatattgttttctaagtataattaaaaccagaaaggttacctttttaaataagccagctacaacgggacaaaaaattcacaatactaggtagttgggagtcagaagctgttttcgggaagacctgaaaagggaaaattaagtactaaaaatgtaagtttattttgccatacccctaacaacattttatttaaattatattgtgacttgattacaaatcttttaaatgacattattggcatatttttcttaaactttgtaagaaaaagataacatttcacattttagtagcaaaatcattgttaagagatagtcaattttgtgaaaatatttgagtgctaatcaatttttccaggatgatcttctatcctttaatatttagatacttccttttgaagcacttacatcatcatcaaatttttggtcatttgttgtgtcatctaatttctgtttcattttctaatggcttcgtatgtgaatgaattttagttattcctaacgtcattggtagccactcttttgaattttttttttaaacaagtctttcaattttattttataggtaatttgcattgtatatagatgatcgtctcaaaatttcacaatgagagactgatgaaattgacataaatcaatcagcatgaacacttgaattaatccagaggactacttaagttaattctgtaggtggttgctttattgagaatattttgtattatgacctgcttagctatgcaagtttgtaacttcagaggtcctcataatgatacttggataataaagattccccatagacacttccattgaaaaagaaaagaagtaaacaagtgtcatttgtaatttgaaatgttttaagttaactgtcatgttactgtccatgaaatggatctggtgacttaggctctatctcctgacattgatttctttctcctgtgtcctcaattatttcttctcctgttaatgcccactggtaataattctcaaaatcgattgctcagaatattccattgtaaaatgcaccttggaaatggttgttttcctcatttgtaaattgaagacaatgcctattcctcaaggtggttgtgagaaccagtcaatgttgcatatgtgtaaacagccagcacatggttgggcattcagtttccctttatcattggtagaataagaatagtaatactcaaccaaaacgtctcagtcaggggttaaaaacttggaagcactgaaactgtgcttcctattcctacttaggtcaacagattgcaaaacaaatatttcagtcctttatcctttgtaatgaatgtgtctttgtgaaatgagtatagtggagcctgatttattctattgagatcattgagggggcaaatgcaaataattataaatgttgcacatgagtgaagccgtaagaat

SEQ ID NO: 401952 - DNA, 962 bp, Homo sapiens
ggaaggggcgtggccgtcgggcggcgagccgcgcgctctcgccccgggagggagtcacaggttcgtacacgcgaggccgggcgcgcgcagccggcaggcgggtgaagtcttcccaggtgctgcaggcggtgctgaggcacagggtctgctgcaggagcagcggcccgaacccgctccagcggcccgccgccgccagcggctcccgcgtcgcgtgtgtacccccgcgcactgaaggaggtccaccagccctcaccagcccccgcggaccgtgcaatggcccagcgtaagaatgccaagagcagcggcaacagcagcagcagcggctccggcagcggtagcacgagtgcgggcagcagcagccccggggcccggagagagacaaagcatggaggacacaagaatgggaggaaaggcggactctcaggaacttcattcttcacgtggtttatggtgattgcattgctgggcgtctggacatctgtagctgtcgtttggtttgatcttgttgactatgaggaagttctaggaaaactaggaatctatgatgctgatggtgatggagattttgatgtggatgatgccaaagttttattaggtaggcaagtacacattttatgttttttgttagtggtgataaaatgctggaaacaattatttttgctttaataatatctatctcaatagtatatatcttacaggagacttttctcccttaaatcatatatttcattactgttaaaattttaaatggcttatttttccacactctttcatgtcaatttacttttatcaatgaataagtgtatatctcttacacatatatcttttgataagtataataatttcatgtgtgtttccagatttaaagtacttcttattctgaacttagaatttgaatagataatatcctagtctgtttttagatatggtaattatagccatttttcattaacattacacat

SEQ ID NO: 401953 - DNA, 416 bp, Homo sapiens
  misc_feature (391)..(391): n is a, c, g, or t
acatctgtagctgtcgttggtttgatcttgttgactatgaggaagttctaggaaaactaggaatctatgatgctgatggtgatggagattttgatgtggatgatgccaaagttttattagagacaaagcatggaggacacaagaatgggaggaaaggcggactctcaggaacttcattcttcacgtggtttatggtgattgcattgctgggcgtctggacatctgtagctgtcgtttggtttgatcttgttgactatgaggaagttctagccaaagcaaaggacttccgttataacttatcagaggtgcttcaaggaaaactaggaatctatgatgctgatggtgatggagattttgatgtggatgatgccaaagttttattagagacaangcatggagacacacggggaggaacg

SEQ ID NO: 401954 - DNA, 579 bp, Homo sapiens
ctcgctgccctacctggcccacctgaggataatcctgtagaagattcacaggtaattgtagaagaagtaagcatttttcctgtggaagaacagcaggaagtaccaccagaaacaaatagaaaaacagatgatccagaacaaaaagcaaaaggagttaagaaaaagaagcctaaacttttaaataaatttgataagactattaaagctgaacttgatgctgcagaaaaactccgtaaaaggggaaaaattgaggaagcagtgaatgcatttaaagaactagtacgcaaataccctcagagtccacgagcaagatatgggaaggcgcaggtattctgagacccttctccttaggacacttttttgatgttcatgtgttttgtgtgattgaattttttactcctcactattttccctttctaatttctctacagaatcagtttctcatgtatatgcataagcaagaaatacaattatcactattgcatgctgctgaatttagtaacatttttttctgctccccctccatatgacttctctctggctttgaaaagaaaataaacagtaacacttttgtcattg

SEQ ID NO: 401955 - DNA, 430 bp, Homo sapiens
agcggagtctcaagctctggtaggcaagtgcatgcagtgtgcctaaaacctgccagcagtacttttgagttttttttttggtttggttttactttagcatttattattcatggattgaagaaatcaaaatggctgaagataaagaatcaatgtgaaaccagttactgtcttgtactgaagattatttgaaggactgtcagggattctgcctgaaagtttcatcataaatgacttcccaccactcagcttttctgacttcctgggcctgctcttgctgagagatctgtgcactcgataggcttttcctctgtcaccactctgttgctttgactcattgggttagattgtgtctgaaatgtagagttttgtgcatagagctagaaaacttaattgaagttgttagaatcacatctaaaataaaaatgtaaac

SEQ ID NO: 401956 - DNA, 5208 bp, Homo sapiens
tcgcggaatactctgctgctcgcggaattctccgccgccgccagcggctcccgcgtcgcgtgtgtacccccgcgcactgaaggaggtccaccagccctcaccagcccccgcggaccgtgcaatggcccagcgtaagaatgccaagagcagcggcaacagcagcagcagcggctccggcagcggtagcacgagtgcgggcagcagcagccccggggcccggagagagacaaagcatggaggacacaagaatgggaggaaaggcggactctcaggaacttcattcttcacgtggtttatggtgattgcattgctgggcgtctggacatctgtagctgtcgtttggtttgatcttgttgactatgaggaagttctaggaaaactaggaatctatgatgctgatggtgatggagattttgatgtggatgatgccaaagttttattaggacttaaagagagatctacttcagagccagcagtcccgccagaagaggctgagccacacactgagcccgaggagcaggttcctgtggaggcagaaccccagaatatcgaagatgaagcaaaagaacaaattcagtcccttctccatgaaatggtacacgcagaacatgttgagggagaagacttgcaacaagaagatggacccacaggagaaccacaacaagaggatgatgagtttcttatggcgactgatgtagatgatagatttgagaccctggaacctgaagtatctcatgaagaaaccgagcatagttaccacgtggaagagacagtttcacaagactgtaatcaggatatggaagagatgatgtctgagcaggaaaatccagattccagtgaaccagtagtagaagatgaaagattgcaccatgatacagatgatgtaacataccaagtctatgaggaacaagcagtatatgaacctctagaaaatgaagggatagaaatcacagaagtaactgctccccctgaggataatcctgtagaagattcacaggtaattgtagaagaagtaagcatttttcctgtggaagaacagcaggaagtaccaccagaaacaaatagaaaaacagatgatccagaacaaaaagcaaaagttaagaaaaagaagcctaaacttttaaataaatttgataagactattaaagctgaacttgatgctgcagaaaaactccgtaaaaggggaaaaattgaggaagcagtgaatgcatttaaagaactagtacgcaaataccctcagagtccacgagcaagatatgggaaggcgcagtgtgaggatgatttggctgagaagaggagaagtaatgaggtgctacgtggagccatcgagacctaccaagaggtggccagcctacctgatgtccctgcagacctgctgaagctgagtttgaagcgtcgctcagacaggcaacaatttctaggtcatatgagaggttccctgcttaccctgcagagattagttcaactatttcccaatgatacttccttaaaaaatgaccttggcgtgggatacctcttgataggagataatgacaatgcaaagaaagtttatgaagaggtgctgagtgtgacacctaatgatggctttgctaaagtccattatggcttcatcctgaaggcacagaacaaaattgctgagagcatcccatatttaaaggaaggaatagaatccggagatcctggcactgatgatgggagattttatttccacctgggggatgccatgcagagggttgggaacaaagaggcatataagtggtatgagcttgggcacaagagaggacactttgcatctgtctggcaacgctcactctacaatgtgaatggactgaaagcacagccttggtggaccccaaaagaaacgggctacacagagttagtaaagtctttagaaagaaactggaagttaatccgagatgaaggccttgcagtgatggataaagccaaaggtctcttcctgcctgaggatgaaaacctgagggaaaaaggggactggagccagttcacgctgtggcagcaaggaagaagaaatgaaaatgcctgcaaaggagctcctaaaacctgtaccttactagaaaagttccccgagacaacaggatgcagaagaggacagatcaaatattccatcatgcaccccgggactcacgtgtggccgcacacagggcccacaaactgcaggctccgaatgcacctgggcttggtgattcccaaggaaggctgcaagattcgatgtgccaacgagaccaagacctgggaggaaggcaaggtgctcatctttgatgactcctttgagcacgaggtatggcaggatgcctcatctttccggctgatattcatcgtggatgtgtggcatccggaactgacaccacagcagagacgcagccttccagcaatttagcatgaattcatgcaagcttgggaaactctggagagaggctgcctttctggttccatctccttgggtgtgaggatagaatttcgaacaccaagagtcaattcccttgacttgcagcccgagtaattcaaagcctcctcctagggtcagaagacactaaagggaatatttgcctcgctgcaattcatttaggaaacaccctgctgtgtgtcatctcatgacagcactggtcttctgccagtatttaaggtgaacatttgatagcttctaccttaccagccaaagatattttttccacatagaataggtctaattcaatgtataatgagaacatatgtagaaactgtgaatggattgctttagtttgtaatttttctatgcagttatatttttctagtgtagctagactattttgtcatcatgtaccactacatttttgtttattttaatgacaagctgtataaatgctttacttctagctatttaatggtagcattactggggaactcagacttccctcttttaattcttcttagtaaaagatactcatgaaaaaagcagttttattttcctaacaaaaaagaaagagctcattatgtcagtgtctatgaactgtacccatcccaactctcaaatcgtttggttttttttatcttgattgagatcctcttctcactatgctagtggtggagatattgacaaaatcctatttctttcaaagaggaacttttcacaccgaaaaaagagcatggaattattttatattgttataaaaatcccagatgcaaatttttttaatgccaattattagagcttctggggaaaaagtatagttcacggaaataaaactatgttctttcagggttgggtggataggtggctgctagggtgtctggctcctggcggctttgccatccatgaggcaagggctgggaacacagtgtctttgcctatggtagatccatgtgaatgtcaggaagccagctcttcagtcttggagatgatttctgctacaattctgtagaaagattaaggatggcagagtaaaaggttaccaagaatgccaggatgtttttcttgggcgtaggaggtccagattactttcctttttgatgaaagagtttggaagactgtcccatctctctggcttgagaaatctctgccattttaaacatcactgtgaaatagcaattattatcatctgtatttagttttaacattacccacaacatagaaataataggtaaaaatcgtcttgcctactcattccaaagatgatcaagtcattaatctagcaaagtattcatgtatcagattttgtatattttgaatcaaagctaactaggaatgttagatataagaatgtaatgatattcatgcactgaattctaagccaatatgaacaaaaatgctgcatgaatggcacatataggtcaccaaagttcattcacaggtagaaaaaacttgtgctttcttttccatctaaaaacaaaaggagactttctttatctcatttaaagaacagctctttgaaattgaaattgaccctttttgcttgaccttaaggagattagcttccagtagatgagtttgcaaaatacttttcctgttcttttgttttgctggtattgaaaacatcccactaaatcagatgaagaggcatgggaggaaaaatatccaaattaattactaaaatcgagaagagaaggcaaactcttgaaaagtaaaaaggtgtttgtgaccttcagtatttattgaacagaggaaataactgacaagggcaatacaattcaatgttcatgtagtaacattcatgtcacttgttgaatttggttctcatatgtatattgcatacacataaattcaaactataagtcgtcatttttgagccatcatcttacattcatgtaatgaaattatggaagagagtaaaaactagctcttaacttagtaaatataatatggtatttaaaatcaggtcactacagtaaggttctaagtattgccaattgaaaagctagaaatggtattactgttgcaaagtgttgtcaataattgactccaatagcattgtaaatacttgtatcccacaactattttaaacccaagcaataaaatggattttctaattcacttcaattctttatttctcttacctatctatgtcttggtacataagaaaagtgtttccatcactgcattggtagaattatttcagtgttattatttttgtgatttcgtatgtctacacaaaaatgaattagtttaatttatattgtgatacagttgtttgagaaatatttttaattctgtttcaactttatttctccaagtgtataatataaaaattacttctgttattgttctctaccaataggggaaaaaattaaaacattagatccattgagaaagagatgatgtaataaataattaagattagtaataatattatcaggggtgattatgaccagttgaataatctctttcccttgaattatttagctaacaaattaactctcccaaatatttaaaataatgtaaaatcatattttactgcccattattaactaaaatatttttgtttgactttgagcaccaactggtaatactaataaatacccatgtcatgcagatggctgggcgaataagagatgtctaaaaatatgcactggtcttggaaaacatggcacaagtaaggatatcatatatgatgtctgtttattttatgtctgatttcttttgaatgagtagttggggactccatttctaaggagactaggtaaataaaatgacctttgacatttcaaaaaaca

SEQ ID NO: 401957 - DNA, 4679 bp, Homo sapiens
ggaaggggcgtggccgtcgggcggcgagccgcgcgctctcgccccgggagggagtcacaggttcgtacacgcgaggccgggcgcgcgcagccggcaggcgggtgaagtcttcccaggtgctgcaggcggtgctgaggcacagggtctgctgcaggagcagcggcccgaacccgctccagcggcccgccgccgccagcggctcccgcgtcgcgtgtgtacccccgcgcactgaaggaggtccaccagccctcaccagcccccgcggaccgtgcaatggcccagcgtaagaatgccaagagcagcggcaacagcagcagcagcggctccggcagcggtagcacgagtgcgggcagcagcagccccggggcccggagagagacaaagcatggaggacacaagaatgggaggaaaggcggactctcaggaacttcattcttcacgtggtttatggtgattgcattgctgggcgtctggacatctgtagctgtcgtttggtttgatcttgttgactatgaggaagttctaggaaaactaggaatctatgatgctgatggtgatggagattttgatgtggatgatgccaaagttttattaggacttaaagagagatctacttcagagccagcagtcccgccagaagaggctgagccacacactgagcccgaggagcaggttcctgtggaggcagaaccccagaatatcgaagatgaagcaaaagaacaaattcagtcccttctccatgaaatggtacacgcagaacatgttgagggagaagacttgcaacaagaagatggacccacaggagaaccacaacaagaggatgatgagtttcttatggcgactgatgtagatgatagatttgagaccctggaacctgaagtatctcatgaagaaaccgagcatagttaccacgtggaagagacagtttcacaagactgtaatcaggatatggaagagatgatgtctgagcaggaaaatccagattccagtgaaccagtagtagaagatgaaagattgcaccatgatacagatgatgtaacataccaagtctatgaggaacaagcagtatatgaacctctagaaaatgaagggatagaaatcacagaagtaactgctccccctgaggataatcctgtagaagattcacaggtaattgtagaagaagtaagcatttttcctgtggaagaacagcaggaagtaccaccagaaacaaatagaaaaacagatgatccagaacaaaaagcaaaagttaagaaaaagaagcctaaacttttaaataaatttgataagactattaaagctgaacttgatgctgcagaaaaactccgtaaaaggggaaaaattgaggaagcagtgaatgcatttaaagaactagtacgcaaataccctcagagtccacgagcaagatatgggaaggcgcagtgtgaggatgatttggctgagaagaggagaagtaatgaggtgctacgtggagccatcgagacctaccaagaggtggccagcctacctgatgtccctgcagacctgctgaagctgagtttgaagcgtcgctcagacaggcaacaatttctaggtcatatgagaggttccctgcttaccctgcagagattagttcaactatttcccaatgatacttccttaaaaaatgaccttggcgtgggatacctcttgataggagataatgacaatgcaaagaaagtttatgaagaggtgctgagtgtgacacctaatgatggctttgctaaagtccattatggcttcatcctgaaggcacagaacaaaattgctgagagcatcccatatttaaaggaaggaatagaatccggagatcctggcactgatgatgggagattttatttccacctgggggatgccatgcagagggttgggaacaaagaggcatataagtggtatgagcttgggcacaagagaggacactttgcatctgtctggcaacgctcactctacaatgtgaatggactgaaagcacagccttggtggaccccaaaagaaacgggctacacagagttagtaaagtctttagaaagaaactggaagttaatccgagatgaaggccttgcagtgatggataaagccaaaggtctcttcctgcctgaggatgaaaacctgagggaaaaaggggactggagccagttcacgctgtggcagcaaggaagaagaaatgaaaatgcctgcaaaggagctcctaaaacctgtaccttactagaaaagttccccgagacaacaggatgcagaagaggacagatcaaatattccatcatgcaccccgggactcacgtgtggccgcacacagggcccacaaactgcaggctccgaatgcacctgggcttggtgattcccaaggaaggctgcaagattcgatgtgccaacgagaccaagacctgggaggaaggcaaggtgctcatctttgatgactcctttgagcacgaggtatggcaggatgcctcatctttccggctgatattcatcgtggatgtgtggcatccggaactgacaccacagcagagacgcagccttccagcaatttagcatgaattcatgcaagcttgggaaactctggagagaggctgcctttctggttccatctccttgggtgtgaggatagaatttcgaacaccaagagtcaattcccttgacttgcagcccgagtaattcaaagcctcctcctagggtcagaagacactaaagggaatatttgcctcgctgcaattcatttaggaaacaccctgctgtgtgtcatctcatgacagcactggtcttctgccagtatttaaggtgaacatttgatagcttctaccttaccagccaaagatattttttccacatagaataggtctaattcaatgtataatgagaacatatgtagaaactgtgaatggattgctttagtttgtaatttttctatgcagttatatttttctagtgtagctagactattttgtcatcatgtaccactacatttttgtttattttaatgacaagctgtataaatgctttacttctagctatttaatggtagcattactggggaactcagacttccctcttttaattcttcttagtaaaagatactcatgaaaaaagcagttttattttcctaacaaaaaagaaagagctcattatgtcagtgtctatgaactgtacccatcccaactctcaaatcgtttggttttttttatcttgattgagatcctcttctcactatgctagtggtggagatattgacaaaatcctatttctttcaaagaggaacttttcacaccgaaaaaagagcatggaattattttatattgttataaaaatcccagatgcaaatttttttaatgccaattattagagcttctggggaaaaagtatagttcacggaaataaaactatgttctttcagggttgggtggataggtggctgctagggtgtctggctcctggcggctttgccatccatgaggcaagggctgggaacacagtgtctttgcctatggtagatccatgtgaatgtcaggaagccagctcttcagtcttggagatgatttctgctacaattctgtagaaagattaaggatggcagagtaaaaggttaccaagaatgccaggatgtttttcttgggcgtaggaggtccagattactttcctttttgatgaaagagtttggaagactgtcccatctctctggcttgagaaatctctgccattttaaacatcactgtgaaatagcaattattatcatctgtatttagttttaacattacccacaacatagaaataataggtaaaaatcgtcttgcctactcattccaaagatgatcaagtcattaatctagcaaagtattcatgtatcagattttgtatattttgaatcaaagctaactaggaatgttagatataagaatgtaatgatattcatgcactgaattctaagccaatatgaacaaaaatgctgcatgaatggcacatataggtcaccaaagttcattcacaggtagaaaaaacttgtgctttcttttccatctaaaaacaaaaggagactttctttatctcatttaaagaacagctctttgaaattgaaattgaccctttttgcttgaccttaaggagattagcttccagtagatgagtttgcaaaatacttttcctgttcttttgttttgctggtattgaaaacatcccactaaatcagatgaagaggcatgggaggaaaaatatccaaattaattactaaaatcgagaagagaaggcaaactcttgaaaagtaaaaaggtgtttgtgaccttcagtatttattgaacagaggaaataactgacaagggcaatacaattcaatgttcatgtagtaacattcatgtcacttgttgaatttggttctcatatgtatattgcatacacataaattcaaactataagtcgtcatttttgagccatcatcttacattcatgtaatgaaattatggaagagagtaaaaactagctcttaacttagtaaatataatatggtatttaaaatcaggtcactacagtaaggttctaagtattgccaattgaaaagctagaaatggtattactgttgcaaagtgttgtcaataattgactccaatagcattgtaaatacttgtatcccacaactattttaaacccaagcaataaaatggattttctaattc

SEQ ID NO: 401958 - DNA, 5302 bp, Homo sapiens
ggaaggggcgtggccgtcgggcggcgagccgcgcgctctcgccccgggagggagtcacaggttcgtacacgcgaggccgggcgcgcgcagccggcaggcgggtgaagtcttcccaggtgctgcaggcggtgctgaggcacagggtctgctgcaggagcagcggcccgaacccgctccagcggcccgccgccgccagcggctcccgcgtcgcgtgtgtacccccgcgcactgaaggaggtccaccagccctcaccagcccccgcggaccgtgcaatggcccagcgtaagaatgccaagagcagcggcaacagcagcagcagcggctccggcagcggtagcacgagtgcgggcagcagcagccccggggcccggagagagacaaagcatggaggacacaagaatgggaggaaaggcggactctcaggaacttcattcttcacgtggtttatggtgattgcattgctgggcgtctggacatctgtagctgtcgtttggtttgatcttgttgactatgaggaagttctaggaaaactaggaatctatgatgctgatggtgatggagattttgatgtggatgatgccaaagttttattaggacttaaagagagatctacttcagagccagcagtcccgccagaagaggctgagccacacactgagcccgaggagcaggttcctgtggaggcagaaccccagaatatcgaagatgaagcaaaagaacaaattcagtcccttctccatgaaatggtacacgcagaacatgttgagggagaagacttgcaacaagaagatggacccacaggagaaccacaacaagaggatgatgagtttcttatggcgactgatgtagatgatagatttgagaccctggaacctgaagtatctcatgaagaaaccgagcatagttaccacgtggaagagacagattccagtgaaccagtagtagaagatgaaagattgcaccatgatacagatgatgtaacataccaagtctatgaggaacaagcagtatatgaacctctagaaaatgaagggatagaaatcacagaagtaactgctccccctgaggataatcctgtagaagattcacaggtaattgtagaagaagtaagcatttttcctgtggaagaacagcaggaagtaccaccagaaacaaatagaaaaacagatgatccagaacaaaaagcaaaagttaagaaaaagaagcctaaacttttaaataaatttgataagactattaaagctgaacttgatgctgcagaaaaactccgtaaaaggggaaaaattgaggaagcagtgaatgcatttaaagaactagtacgcaaataccctcagagtccacgagcaagatatgggaaggcgcagtgtgaggatgatttggctgagaagaggagaagtaatgaggtgctacgtggagccatcgagacctaccaagaggtggccagcctacctgatgtccctgcagacctgctgaagctgagtttgaagcgtcgctcagacaggcaacaatttctaggtcatatgagaggttccctgcttaccctgcagagattagttcaactatttcccaatgatacttccttaaaaaatgaccttggcgtgggatacctcttgataggagataatgacaatgcaaagaaagtttatgaagaggtgctgagtgtgacacctaatgatggctttgctaaagtccattatggcttcatcctgaaggcacagaacaaaattgctgagagcatcccatatttaaaggaaggaatagaatccggagatcctggcactgatgatgggagattttatttccacctgggggatgccatgcagagggttgggaacaaagaggcatataagtggtatgagcttgggcacaagagaggacactttgcatctgtctggcaacgctcactctacaatgtgaatggactgaaagcacagccttggtggaccccaaaagaaacgggctacacagagttagtaaagtctttagaaagaaactggaagttaatccgagatgaaggccttgcagtgatggataaagccaaaggtctcttcctgcctgaggatgaaaacctgagggaaaaaggggacacgcagaagatcctggtggactcccgggaagccacctctgtgccccacatctacgccattggtgacgtggtggaggggcggcctgagctgacacccacagcgatcatggccgggagtgaatcggttgagccgacatgcaccccgggactcacgtgtggccgcacacagggcccacaaactgcaggctccgaatgcacctgggcttggtgattcccaaggaaggctgcaagattcgatgtgccaacgagaccaagacctgggaggaaggcaaggtgctcatctttgatgactcctttgagcacgaggtatggcaggatgcctcatctttccggctgatattcatcgtggatgtgtggcatccggaactgacaccacagcagagacgcagccttccagcaatttagcatgaattcatgcaagcttgggaaactctggagagaggctgcctttctggttccatctccttgggtgtgaggatagaatttcgaacaccaagagtcaattcccttgacttgcagcccgagtaattcaaagcctcctcctagggtcagaagacactaaagggaatatttgcctcgctgcaattcatttaggaaacaccctgctgtgtgtcatctcatgacagcactggtcttctgccagtatttaaggtgaacatttgatagcttctaccttaccagccaaagatattttttccacatagaataggtctaattcaatgtataatgagaacatatgtagaaactgtgaatggattgctttagtttgtaatttttctatgcagttatatttttctagtgtagctagactattttgtcatcatgtaccactacatttttgtttattttaatgacaagctgtataaatgctttacttctagctatttaatggtagcattactggggaactcagacttccctcttttaattcttcttagtaaaagatactcatgaaaaaagcagttttattttcctaacaaaaaagaaagagctcattatgtcagtgtctatgaactgtacccatcccaactctcaaatcgtttggttttttttatcttgattgagatcctcttctcactatgctagtggtggagatattgacaaaatcctatttctttcaaagaggaacttttcacaccgaaaaaagagcatggaattattttatattgttataaaaatcccagatgcaaatttttttaatgccaattattagagcttctggggaaaaagtatagttcacggaaataaaactatgttctttcagggttgggtggataggtggctgctagggtgtctggctcctggcggctttgccatccatgaggcaagggctgggaacacagtgtctttgcctatggtagatccatgtgaatgtcaggaagccagctcttcagtcttggagatgatttctgctacaattctgtagaaagattaaggatggcagagtaaaaggttaccaagaatgccaggatgtttttcttgggcgtaggaggtccagattactttcctttttgatgaaagagtttggaagactgtcccatctctctggcttgagaaatctctgccattttaaacatcactgtgaaatagcaattattatcatctgtatttagttttaacattacccacaacatagaaataataggtaaaaatcgtcttgcctactcattccaaagatgatcaagtcattaatctagcaaagtattcatgtatcagattttgtatattttgaatcaaagctaactaggaatgttagatataagaatgtaatgatattcatgcactgaattctaagccaatatgaacaaaaatgctgcatgaatggcacatataggtcaccaaagttcattcacaggtagaaaaaacttgtgctttcttttccatctaaaaacaaaaggagactttctttatctcatttaaagaacagctctttgaaattgaaattgaccctttttgcttgaccttaaggagattagcttccagtagatgagtttgcaaaatacttttcctgttcttttgttttgctggtattgaaaacatcccactaaatcagatgaagaggcatgggaggaaaaatatccaaattaattactaaaatcgagaagagaaggcaaactcttgaaaagtaaaaaggtgtttgtgaccttcagtatttattgaacagaggaaataactgacaagggcaatacaattcaatgttcatgtagtaacattcatgtcacttgttgaatttggttctcatatgtatattgcatacacataaattcaaactataagtcgtcatttttgagccatcatcttacattcatgtaatgaaattatggaagagagtaaaaactagctcttaacttagtaaatataatatggtatttaaaatcaggtcactacagtaaggttctaagtattgccaattgaaaagctagaaatggtattactgttgcaaagtgttgtcaataattgactccaatagcattgtaaatacttgtatcccacaactattttaaacccaagcaataaaatggattttctaattcacttcaattctttatttctcttacctatctatgtcttggtacataagaaaagtgtttccatcactgcattggtagaattatttcagtgttattatttttgtgatttcgtatgtctacacaaaaatgaattagtttaatttatattgtgatacagttgtttgagaaatatttttaattctgtttcaactttatttctccaagtgtataatataaaaattacttctgttattgttctctaccaataggggaaaaaattaaaacattagatccattgagaaagagatgatgtaataaataattaagattagtaataatattatcaggggtgattatgaccagttgaataatctctttcccttgaattatttagctaacaaattaactctcccaaatatttaaaataatgtaaaatcatattttactgcccattattaactaaaatatttttgtttgactttgagcaccaactggtaatactaataaatacccatgtcatgcagatggctgggcgaataagagatgtctaaaaatatgcactggtcttggaaaacatggcacaagtaaggatatcatatatgatgtctgtttattttatgtctgatttcttttgaatgagtagttggggactccatttctaaggagactaggtaaataaaatgacctttgacatttcaaaaaaca

SEQ ID NO: 401959 - DNA, 4874 bp, Homo sapiens
ggaaggggcgtggccgtcgggcggcgagccgcgcgctctcgccccgggagggagtcacaggttcgtacacgcgaggccgggcgcgcgcagccggcaggcgggtgaagtcttcccaggtgctgcaggcggtgctgaggcacagggtctgctgcaggagcagcggcccgaacccgctccagcggcccgccgccgccagcggctcccgcgtcgcgtgtgtacccccgcgcactgaaggaggtccaccagccctcaccagcccccgcggaccgtgcaatggcccagcgtaagaatgccaagagcagcggcaacagcagcagcagcggctccggcagcggtagcacgagtgcgggcagcagcagccccggggcccggagagagacaaagcatggaggacacaagaatgggaggaaaggcggactctcaggaacttcattcttcacgtggtttatggtgattgcattgctgggcgtctggacatctgtagctgtcgtttggtttgatcttgttgactatgaggaagttctaggaaaactaggaatctatgatgctgatggtgatggagattttgatgtggatgatgccaaagttttattaggacttaaagagagatctacttcagagccagcagtcccgccagaagaggctgagccacacactgagcccgaggagcaggttcctgtggaggcagaaccccagaatatcgaagatgaagcaaaagaacaaattcagtcccttctccatgaaatggtacacgcagaacatgttgagggagaagacttgcaacaagaagatggacccacaggagaaccacaacaagaggatgatgagtttcttatggcgactgatgtagatgatagatttgagaccctggaacctgaagtatctcatgaagaaaccgagcatagttaccacgtggaagagacagattccagtgaaccagtagtagaagatgaaagattgcaccatgatacagatgatgtaacataccaagtctatgaggaacaagcagtatatgaacctctagaaaatgaagggatagaaatcacagaagtaactgctccccctgaggataatcctgtagaagattcacaggtaattgtagaagaagtaagcatttttcctgtggaagaacagcaggaagtaccaccagaaacaaatagaaaaacagatgatccagaacaaaaagcaaaagttaagaaaaagaagcctaaacttttaaataaatttgataagactattaaagctgaacttgatgctgcagaaaaactccgtaaaaggggaaaaattgaggaagcagtgaatgcatttaaagaactagtacgcaaataccctcagagtccacgagcaagatatgggaaggcgcagtgtgaggatgatttggctgagaagaggagaagtaatgaggtgctacgtggagccatcgagacctaccaagaggtggccagcctacctgatgtccctgcagacctgctgaagctgagtttgaagcgtcgctcagacaggcaacaatttctaggtcatatgagaggttccctgcttaccctgcagagattagttcaactatttcccaatgatacttccttaaaaaatgaccttggcgtgggatacctcttgataggagataatgacaatgcaaagaaagtttatgaagaggtgctgagtgtgacacctaatgatggctttgctaaagtccattatggcttcatcctgaaggcacagaacaaaattgctgagagcatcccatatttaaaggaaggaatagaatccggagatcctggcactgatgatgggagattttatttccacctgggggatgccatgcagagggttgggaacaaagaggcatataagtggtatgagcttgggcacaagagaggacactttgcatctgtctggcaacgctcactctacaatgtgaatggactgaaagcacagccttggtggaccccaaaagaaacgggctacacagagttagtaaagtctttagaaagaaactggaagttaatccgagatgaaggccttgcagtgatggataaagccaaaggtctcttcctgcctgaggatgaaaacctgagggaaaaaggggactggagccagttcacgctgtggcagcaaggaagaagaaatgaaaatgcctgcaaaggagctcctaaaacctgtaccttactagaaaagttccccgagtaattcaaagcctcctcctagggtcagaagacactaaagggaatatttgcctcgctgcaattcatttaggaaacaccctgctgtgtgtcatctcatgacagcactggtcttctgccagtatttaaggtgaacatttgatagcttctaccttaccagccaaagatattttttccacatagaataggtctaattcaatgtataatgagaacatatgtagaaactgtgaatggattgctttagtttgtaatttttctatgcagttatatttttctagtgtagctagactattttgtcatcatgtaccactacatttttgtttattttaatgacaagctgtataaatgctttacttctagctatttaatggtagcattactggggaactcagacttccctcttttaattcttcttagtaaaagatactcatgaaaaaagcagttttattttcctaacaaaaaagaaagagctcattatgtcagtgtctatgaactgtacccatcccaactctcaaatcgtttggttttttttatcttgattgagatcctcttctcactatgctagtggtggagatattgacaaaatcctatttctttcaaagaggaacttttcacaccgaaaaaagagcatggaattattttatattgttataaaaatcccagatgcaaatttttttaatgccaattattagagcttctggggaaaaagtatagttcacggaaataaaactatgttctttcagggttgggtggataggtggctgctagggtgtctggctcctggcggctttgccatccatgaggcaagggctgggaacacagtgtctttgcctatggtagatccatgtgaatgtcaggaagccagctcttcagtcttggagatgatttctgctacaattctgtagaaagattaaggatggcagagtaaaaggttaccaagaatgccaggatgtttttcttgggcgtaggaggtccagattactttcctttttgatgaaagagtttggaagactgtcccatctctctggcttgagaaatctctgccattttaaacatcactgtgaaatagcaattattatcatctgtatttagttttaacattacccacaacatagaaataataggtaaaaatcgtcttgcctactcattccaaagatgatcaagtcattaatctagcaaagtattcatgtatcagattttgtatattttgaatcaaagctaactaggaatgttagatataagaatgtaatgatattcatgcactgaattctaagccaatatgaacaaaaatgctgcatgaatggcacatataggtcaccaaagttcattcacaggtagaaaaaacttgtgctttcttttccatctaaaaacaaaaggagactttctttatctcatttaaagaacagctctttgaaattgaaattgaccctttttgcttgaccttaaggagattagcttccagtagatgagtttgcaaaatacttttcctgttcttttgttttgctggtattgaaaacatcccactaaatcagatgaagaggcatgggaggaaaaatatccaaattaattactaaaatcgagaagagaaggcaaactcttgaaaagtaaaaaggtgtttgtgaccttcagtatttattgaacagaggaaataactgacaagggcaatacaattcaatgttcatgtagtaacattcatgtcacttgttgaatttggttctcatatgtatattgcatacacataaattcaaactataagtcgtcatttttgagccatcatcttacattcatgtaatgaaattatggaagagagtaaaaactagctcttaacttagtaaatataatatggtatttaaaatcaggtcactacagtaaggttctaagtattgccaattgaaaagctagaaatggtattactgttgcaaagtgttgtcaataattgactccaatagcattgtaaatacttgtatcccacaactattttaaacccaagcaataaaatggattttctaattcacttcaattctttatttctcttacctatctatgtcttggtacataagaaaagtgtttccatcactgcattggtagaattatttcagtgttattatttttgtgatttcgtatgtctacacaaaaatgaattagtttaatttatattgtgatacagttgtttgagaaatatttttaattctgtttcaactttatttctccaagtgtataatataaaaattacttctgttattgttctctaccaataggggaaaaaattaaaacattagatccattgagaaagagatgatgtaataaataattaagattagtaataatattatcaggggtgattatgaccagttgaataatctctttcccttgaattatttagctaacaaattaactctcccaaatatttaaaataatgtaaaatcatattttactgcccattattaactaaaatatttttgtttgactttgagcaccaactggtaatactaataaatacccatgtcatgcagatggctgggcgaataagagatgtctaaaaatatgcactggtcttggaaaacatggcacaagtaaggatatcatatatgatgtctgtttattttatgtctgatttcttttgaatgagtagttggggactccatttctaaggagactaggtaaataaaatgacctttgacatttcaaaaaaca

SEQ ID NO: 401960 - DNA, 5128 bp, Homo sapiens
agcggagtctcaagctctggtaggcaagtgcatgcagtgtgcctaaaacctgccagcagtacttttgagttttttttttggtttggttttactttagcatttattattcatggattgaagaaatcaaaatggctgaagataaagagacaaagcatggaggacacaagaatgggaggaaaggcggactctcaggaacttcattcttcacgtggtttatggtgattgcattgctgggcgtctggacatctgtagctgtcgtttggtttgatcttgttgactatgaggaagttctaggaaaactaggaatctatgatgctgatggtgatggagattttgatgtggatgatgccaaagttttattaggacttaaagagagatctacttcagagccagcagtcccgccagaagaggctgagccacacactgagcccgaggagcaggttcctgtggaggcagaaccccagaatatcgaagatgaagcaaaagaacaaattcagtcccttctccatgaaatggtacacgcagaacatgttgagggagaagacttgcaacaagaagatggacccacaggagaaccacaacaagaggatgatgagtttcttatggcgactgatgtagatgatagatttgagaccctggaacctgaagtatctcatgaagaaaccgagcatagttaccacgtggaagagacagtttcacaagactgtaatcaggatatggaagagatgatgtctgagcaggaaaatccagattccagtgaaccagtagtagaagatgaaagattgcaccatgatacagatgatgtaacataccaagtctatgaggaacaagcagtatatgaacctctagaaaatgaagggatagaaatcacagaagtaactgctccccctgaggataatcctgtagaagattcacaggtaattgtagaagaagtaagcatttttcctgtggaagaacagcaggaagtaccaccagaaacaaatagaaaaacagatgatccagaacaaaaagcaaaagttaagaaaaagaagcctaaacttttaaataaatttgataagactattaaagctgaacttgatgctgcagaaaaactccgtaaaaggggaaaaattgaggaagcagtgaatgcatttaaagaactagtacgcaaataccctcagagtccacgagcaagatatgggaaggcgcagtgtgaggatgatttggctgagaagaggagaagtaatgaggtgctacgtggagccatcgagacctaccaagaggtggccagcctacctgatgtccctgcagacctgctgaagctgagtttgaagcgtcgctcagacaggcaacaatttctaggtcatatgagaggttccctgcttaccctgcagagattagttcaactatttcccaatgatacttccttaaaaaatgaccttggcgtgggatacctcttgataggagataatgacaatgcaaagaaagtttatgaagaggtgctgagtgtgacacctaatgatggctttgctaaagtccattatggcttcatcctgaaggcacagaacaaaattgctgagagcatcccatatttaaaggaaggaatagaatccggagatcctggcactgatgatgggagattttatttccacctgggggatgccatgcagagggttgggaacaaagaggcatataagtggtatgagcttgggcacaagagaggacactttgcatctgtctggcaacgctcactctacaatgtgaatggactgaaagcacagccttggtggaccccaaaagaaacgggctacacagagttagtaaagtctttagaaagaaactggaagttaatccgagatgaaggccttgcagtgatggataaagccaaaggtctcttcctgcctgaggatgaaaacctgagggaaaaaggggactggagccagttcacgctgtggcagcaaggaagaagaaatgaaaatgcctgcaaaggagctcctaaaacctgtaccttactagaaaagttccccgagacaacaggatgcagaagaggacagatcaaatattccatcatgcaccccgggactcacgtgtggccgcacacagggcccacaaactgcaggctccgaatgcacctgggcttggtgattcccaaggaaggctgcaagattcgatgtgccaacgagaccaagacctgggaggaaggcaaggtgctcatctttgatgactcctttgagcacgaggtatggcaggatgcctcatctttccggctgatattcatcgtggatgtgtggcatccggaactgacaccacagcagagacgcagccttccagcaatttagcatgaattcatgcaagcttgggaaactctggagagaggctgcctttctggttccatctccttgggtgtgaggatagaatttcgaacaccaagagtcaattcccttgacttgcagcccgagtaattcaaagcctcctcctagggtcagaagacactaaagggaatatttgcctcgctgcaattcatttaggaaacaccctgctgtgtgtcatctcatgacagcactggtcttctgccagtatttaaggtgaacatttgatagcttctaccttaccagccaaagatattttttccacatagaataggtctaattcaatgtataatgagaacatatgtagaaactgtgaatggattgctttagtttgtaatttttctatgcagttatatttttctagtgtagctagactattttgtcatcatgtaccactacatttttgtttattttaatgacaagctgtataaatgctttacttctagctatttaatggtagcattactggggaactcagacttccctcttttaattcttcttagtaaaagatactcatgaaaaaagcagttttattttcctaacaaaaaagaaagagctcattatgtcagtgtctatgaactgtacccatcccaactctcaaatcgtttggttttttttatcttgattgagatcctcttctcactatgctagtggtggagatattgacaaaatcctatttctttcaaagaggaacttttcacaccgaaaaaagagcatggaattattttatattgttataaaaatcccagatgcaaatttttttaatgccaattattagagcttctggggaaaaagtatagttcacggaaataaaactatgttctttcagggttgggtggataggtggctgctagggtgtctggctcctggcggctttgccatccatgaggcaagggctgggaacacagtgtctttgcctatggtagatccatgtgaatgtcaggaagccagctcttcagtcttggagatgatttctgctacaattctgtagaaagattaaggatggcagagtaaaaggttaccaagaatgccaggatgtttttcttgggcgtaggaggtccagattactttcctttttgatgaaagagtttggaagactgtcccatctctctggcttgagaaatctctgccattttaaacatcactgtgaaatagcaattattatcatctgtatttagttttaacattacccacaacatagaaataataggtaaaaatcgtcttgcctactcattccaaagatgatcaagtcattaatctagcaaagtattcatgtatcagattttgtatattttgaatcaaagctaactaggaatgttagatataagaatgtaatgatattcatgcactgaattctaagccaatatgaacaaaaatgctgcatgaatggcacatataggtcaccaaagttcattcacaggtagaaaaaacttgtgctttcttttccatctaaaaacaaaaggagactttctttatctcatttaaagaacagctctttgaaattgaaattgaccctttttgcttgaccttaaggagattagcttccagtagatgagtttgcaaaatacttttcctgttcttttgttttgctggtattgaaaacatcccactaaatcagatgaagaggcatgggaggaaaaatatccaaattaattactaaaatcgagaagagaaggcaaactcttgaaaagtaaaaaggtgtttgtgaccttcagtatttattgaacagaggaaataactgacaagggcaatacaattcaatgttcatgtagtaacattcatgtcacttgttgaatttggttctcatatgtatattgcatacacataaattcaaactataagtcgtcatttttgagccatcatcttacattcatgtaatgaaattatggaagagagtaaaaactagctcttaacttagtaaatataatatggtatttaaaatcaggtcactacagtaaggttctaagtattgccaattgaaaagctagaaatggtattactgttgcaaagtgttgtcaataattgactccaatagcattgtaaatacttgtatcccacaactattttaaacccaagcaataaaatggattttctaattcacttcaattctttatttctcttacctatctatgtcttggtacataagaaaagtgtttccatcactgcattggtagaattatttcagtgttattatttttgtgatttcgtatgtctacacaaaaatgaattagtttaatttatattgtgatacagttgtttgagaaatatttttaattctgtttcaactttatttctccaagtgtataatataaaaattacttctgttattgttctctaccaataggggaaaaaattaaaacattagatccattgagaaagagatgatgtaataaataattaagattagtaataatattatcaggggtgattatgaccagttgaataatctctttcccttgaattatttagctaacaaattaactctcccaaatatttaaaataatgtaaaatcatattttactgcccattattaactaaaatatttttgtttgactttgagcaccaactggtaatactaataaatacccatgtcatgcagatggctgggcgaataagagatgtctaaaaatatgcactggtcttggaaaacatggcacaagtaaggatatcatatatgatgtctgtttattttatgtctgatttcttttgaatgagtagttggggactccatttctaaggagactaggtaaataaaatgacctttgacatttcaaaaaaca

SEQ ID NO: 401961 - DNA, 4916 bp, Homo sapiens
ctcgctgccctacctggcccacctgaggataatcctgtagaagattcacaggtaattgtagaagaagtaagcatttttcctgtggaagaacagcaggaagtaccaccagaaacaaatagaaaaacagatgatccagaacaaaaagcaaaaggacttaaagagagatctacttcagagccagcagtcccgccagaagaggctgagccacacactgagcccgaggagcaggttcctgtggaggcagaaccccagaatatcgaagatgaagcaaaagaacaaattcagtcccttctccatgaaatggtacacgcagaacatgttgagggagaagacttgcaacaagaagatggacccacaggagaaccacaacaagaggatgatgagtttcttatggcgactgatgtagatgatagatttgagaccctggaacctgaagtatctcatgaagaaaccgagcatagttaccacgtggaagagacagtttcacaagactgtaatcaggatatggaagagatgatgtctgagcaggaaaatccagattccagtgaaccagtagtagaagatgaaagattgcaccatgatacagatgatgtaacataccaagtctatgaggaacaagcagtatatgaacctctagaaaatgaagggatagaaatcacagaagtaactgctccccctgaggataatcctgtagaagattcacaggtaattgtagaagaagtaagcatttttcctgtggaagaacagcaggaagtaccaccagaaacaaatagaaaaacagatgatccagaacaaaaagcaaaagttaagaaaaagaagcctaaacttttaaataaatttgataagactattaaagctgaacttgatgctgcagaaaaactccgtaaaaggggaaaaattgaggaagcagtgaatgcatttaaagaactagtacgcaaataccctcagagtccacgagcaagatatgggaaggcgcagtgtgaggatgatttggctgagaagaggagaagtaatgaggtgctacgtggagccatcgagacctaccaagaggtggccagcctacctgatgtccctgcagacctgctgaagctgagtttgaagcgtcgctcagacaggcaacaatttctaggtcatatgagaggttccctgcttaccctgcagagattagttcaactatttcccaatgatacttccttaaaaaatgaccttggcgtgggatacctcttgataggagataatgacaatgcaaagaaagtttatgaagaggtgctgagtgtgacacctaatgatggctttgctaaagtccattatggcttcatcctgaaggcacagaacaaaattgctgagagcatcccatatttaaaggaaggaatagaatccggagatcctggcactgatgatgggagattttatttccacctgggggatgccatgcagagggttgggaacaaagaggcatataagtggtatgagcttgggcacaagagaggacactttgcatctgtctggcaacgctcactctacaatgtgaatggactgaaagcacagccttggtggaccccaaaagaaacgggctacacagagttagtaaagtctttagaaagaaactggaagttaatccgagatgaaggccttgcagtgatggataaagccaaaggtctcttcctgcctgaggatgaaaacctgagggaaaaaggggactggagccagttcacgctgtggcagcaaggaagaagaaatgaaaatgcctgcaaaggagctcctaaaacctgtaccttactagaaaagttccccgagacaacaggatgcagaagaggacagatcaaatattccatcatgcaccccgggactcacgtgtggccgcacacagggcccacaaactgcaggctccgaatgcacctgggcttggtgattcccaaggaaggctgcaagattcgatgtgccaacgagaccaagacctgggaggaaggcaaggtgctcatctttgatgactcctttgagcacgaggtatggcaggatgcctcatctttccggctgatattcatcgtggatgtgtggcatccggaactgacaccacagcagagacgcagccttccagcaatttagcatgaattcatgcaagcttgggaaactctggagagaggctgcctttctggttccatctccttgggtgtgaggatagaatttcgaacaccaagagtcaattcccttgacttgcagcccgagtaattcaaagcctcctcctagggtcagaagacactaaagggaatatttgcctcgctgcaattcatttaggaaacaccctgctgtgtgtcatctcatgacagcactggtcttctgccagtatttaaggtgaacatttgatagcttctaccttaccagccaaagatattttttccacatagaataggtctaattcaatgtataatgagaacatatgtagaaactgtgaatggattgctttagtttgtaatttttctatgcagttatatttttctagtgtagctagactattttgtcatcatgtaccactacatttttgtttattttaatgacaagctgtataaatgctttacttctagctatttaatggtagcattactggggaactcagacttccctcttttaattcttcttagtaaaagatactcatgaaaaaagcagttttattttcctaacaaaaaagaaagagctcattatgtcagtgtctatgaactgtacccatcccaactctcaaatcgtttggttttttttatcttgattgagatcctcttctcactatgctagtggtggagatattgacaaaatcctatttctttcaaagaggaacttttcacaccgaaaaaagagcatggaattattttatattgttataaaaatcccagatgcaaatttttttaatgccaattattagagcttctggggaaaaagtatagttcacggaaataaaactatgttctttcagggttgggtggataggtggctgctagggtgtctggctcctggcggctttgccatccatgaggcaagggctgggaacacagtgtctttgcctatggtagatccatgtgaatgtcaggaagccagctcttcagtcttggagatgatttctgctacaattctgtagaaagattaaggatggcagagtaaaaggttaccaagaatgccaggatgtttttcttgggcgtaggaggtccagattactttcctttttgatgaaagagtttggaagactgtcccatctctctggcttgagaaatctctgccattttaaacatcactgtgaaatagcaattattatcatctgtatttagttttaacattacccacaacatagaaataataggtaaaaatcgtcttgcctactcattccaaagatgatcaagtcattaatctagcaaagtattcatgtatcagattttgtatattttgaatcaaagctaactaggaatgttagatataagaatgtaatgatattcatgcactgaattctaagccaatatgaacaaaaatgctgcatgaatggcacatataggtcaccaaagttcattcacaggtagaaaaaacttgtgctttcttttccatctaaaaacaaaaggagactttctttatctcatttaaagaacagctctttgaaattgaaattgaccctttttgcttgaccttaaggagattagcttccagtagatgagtttgcaaaatacttttcctgttcttttgttttgctggtattgaaaacatcccactaaatcagatgaagaggcatgggaggaaaaatatccaaattaattactaaaatcgagaagagaaggcaaactcttgaaaagtaaaaaggtgtttgtgaccttcagtatttattgaacagaggaaataactgacaagggcaatacaattcaatgttcatgtagtaacattcatgtcacttgttgaatttggttctcatatgtatattgcatacacataaattcaaactataagtcgtcatttttgagccatcatcttacattcatgtaatgaaattatggaagagagtaaaaactagctcttaacttagtaaatataatatggtatttaaaatcaggtcactacagtaaggttctaagtattgccaattgaaaagctagaaatggtattactgttgcaaagtgttgtcaataattgactccaatagcattgtaaatacttgtatcccacaactattttaaacccaagcaataaaatggattttctaattcacttcaattctttatttctcttacctatctatgtcttggtacataagaaaagtgtttccatcactgcattggtagaattatttcagtgttattatttttgtgatttcgtatgtctacacaaaaatgaattagtttaatttatattgtgatacagttgtttgagaaatatttttaattctgtttcaactttatttctccaagtgtataatataaaaattacttctgttattgttctctaccaataggggaaaaaattaaaacattagatccattgagaaagagatgatgtaataaataattaagattagtaataatattatcaggggtgattatgaccagttgaataatctctttcccttgaattatttagctaacaaattaactctcccaaatatttaaaataatgtaaaatcatattttactgcccattattaactaaaatatttttgtttgactttgagcaccaactggtaatactaataaatacccatgtcatgcagatggctgggcgaataagagatgtctaaaaatatgcactggtcttggaaaacatggcacaagtaaggatatcatatatgatgtctgtttattttatgtctgatttcttttgaatgagtagttggggactccatttctaaggagactaggtaaataaaatgacctttgacatttcaaaaaaca

SEQ ID NO: 401962 - DNA, 5044 bp, Homo sapiens
agcggagtctcaagctctggtaggcaagtgcatgcagtgtgcctaaaacctgccagcagtacttttgagttttttttttggtttggttttactttagcatttattattcatggattgaagaaatcaaaatggctgaagataaagagacaaagcatggaggacacaagaatgggaggaaaggcggactctcaggaacttcattcttcacgtggtttatggtgattgcattgctgggcgtctggacatctgtagctgtcgtttggtttgatcttgttgactatgaggaagttctagccaaagcaaaggacttccgttataacttatcagaggtgcttcaaggaaaactaggaatctatgatgctgatggtgatggagattttgatgtggatgatgccaaagttttattaggacttaaagagagatctacttcagagccagcagtcccgccagaagaggctgagccacacactgagcccgaggagcaggttcctgtggaggcagaaccccagaatatcgaagatgaagcaaaagaacaaattcagtcccttctccatgaaatggtacacgcagaacatgaaaccgagcatagttaccacgtggaagagacagtttcacaagactgtaatcaggatatggaagagatgatgtctgagcaggaaaatccagattccagtgaaccagtagtagaagatgaaagattgcaccatgatacagatgatgtaacataccaagtctatgaggaacaagcagtatatgaacctctagaaaatgaagggatagaaatcacagaagtaactgctccccctgaggataatcctgtagaagattcacaggtaattgtagaagaagtaagcatttttcctgtggaagaacagcaggaagtaccaccagaaacaaatagaaaaacagatgatccagaacaaaaagcaaaagttaagaaaaagaagcctaaacttttaaataaatttgataagactattaaagctgaacttgatgctgcagaaaaactccgtaaaaggggaaaaattgaggaagcagtgaatgcatttaaagaactagtacgcaaataccctcagagtccacgagcaagatatgggaaggcgcagtgtgaggatgatttggctgagaagaggagaagtaatgaggtgctacgtggagccatcgagacctaccaagaggtggccagcctacctgatgtccctgcagacctgctgaagctgagtttgaagcgtcgctcagacaggcaacaatttctaggtcatatgagaggttccctgcttaccctgcagagattagttcaactatttcccaatgatacttccttaaaaaatgaccttggcgtgggatacctcttgataggagataatgacaatgcaaagaaagtttatgaagaggtgctgagtgtgacacctaatgatggctttgctaaagtccattatggcttcatcctgaaggcacagaacaaaattgctgagagcatcccatatttaaaggaaggaatagaatccggagatcctggcactgatgatgggagattttatttccacctgggggatgccatgcagagggttgggaacaaagaggcatataagtggtatgagcttgggcacaagagaggacactttgcatctgtctggcaacgctcactctacaatgtgaatggactgaaagcacagccttggtggaccccaaaagaaacgggctacacagagttagtaaagtctttagaaagaaactggaagttaatccgagatgaaggccttgcagtgatggataaagccaaaggtctcttcctgcctgaggatgaaaacctgagggaaaaaggggactggagccagttcacgctgtggcagcaaggaagaagaaatgaaaatgcctgcaaaggagctcctaaaacctgtaccttactagaaaagttccccgagacaacaggatgcagaagaggacagatcaaatattccatcatgcaccccgggactcacgtgtggccgcacacagggcccacaaactgcaggctccgaatgcacctgggcttggtgattcccaaggaaggctgcaagattcgatgtgccaacgagaccaagacctgggaggaaggcaaggtgctcatctttgatgactcctttgagcacgaggtatggcaggatgcctcatctttccggctgatattcatcgtggatgtgtggcatccggaactgacaccacagcagagacgcagccttccagcaatttagcatgaattcatgcaagcttgggaaactctggagagaggctgcctttctggttccatctccttgggtgtgaggatagaatttcgaacaccaagagtcaattcccttgacttgcagcccgagtaattcaaagcctcctcctagggtcagaagacactaaagggaatatttgcctcgctgcaattcatttaggaaacaccctgctgtgtgtcatctcatgacagcactggtcttctgccagtatttaaggtgaacatttgatagcttctaccttaccagccaaagatattttttccacatagaataggtctaattcaatgtataatgagaacatatgtagaaactgtgaatggattgctttagtttgtaatttttctatgcagttatatttttctagtgtagctagactattttgtcatcatgtaccactacatttttgtttattttaatgacaagctgtataaatgctttacttctagctatttaatggtagcattactggggaactcagacttccctcttttaattcttcttagtaaaagatactcatgaaaaaagcagttttattttcctaacaaaaaagaaagagctcattatgtcagtgtctatgaactgtacccatcccaactctcaaatcgtttggttttttttatcttgattgagatcctcttctcactatgctagtggtggagatattgacaaaatcctatttctttcaaagaggaacttttcacaccgaaaaaagagcatggaattattttatattgttataaaaatcccagatgcaaatttttttaatgccaattattagagcttctggggaaaaagtatagttcacggaaataaaactatgttctttcagggttgggtggataggtggctgctagggtgtctggctcctggcggctttgccatccatgaggcaagggctgggaacacagtgtctttgcctatggtagatccatgtgaatgtcaggaagccagctcttcagtcttggagatgatttctgctacaattctgtagaaagattaaggatggcagagtaaaaggttaccaagaatgccaggatgtttttcttgggcgtaggaggtccagattactttcctttttgatgaaagagtttggaagactgtcccatctctctggcttgagaaatctctgccattttaaacatcactgtgaaatagcaattattatcatctgtatttagttttaacattacccacaacatagaaataataggtaaaaatcgtcttgcctactcattccaaagatgatcaagtcattaatctagcaaagtattcatgtatcagattttgtatattttgaatcaaagctaactaggaatgttagatataagaatgtaatgatattcatgcactgaattctaagccaatatgaacaaaaatgctgcatgaatggcacatataggtcaccaaagttcattcacaggtagaaaaaacttgtgctttcttttccatctaaaaacaaaaggagactttctttatctcatttaaagaacagctctttgaaattgaaattgaccctttttgcttgaccttaaggagattagcttccagtagatgagtttgcaaaatacttttcctgttcttttgttttgctggtattgaaaacatcccactaaatcagatgaagaggcatgggaggaaaaatatccaaattaattactaaaatcgagaagagaaggcaaactcttgaaaagtaaaaaggtgtttgtgaccttcagtatttattgaacagaggaaataactgacaagggcaatacaattcaatgttcatgtagtaacattcatgtcacttgttgaatttggttctcatatgtatattgcatacacataaattcaaactataagtcgtcatttttgagccatcatcttacattcatgtaatgaaattatggaagagagtaaaaactagctcttaacttagtaaatataatatggtatttaaaatcaggtcactacagtaaggttctaagtattgccaattgaaaagctagaaatggtattactgttgcaaagtgttgtcaataattgactccaatagcattgtaaatacttgtatcccacaactattttaaacccaagcaataaaatggattttctaattcacttcaattctttatttctcttacctatctatgtcttggtacataagaaaagtgtttccatcactgcattggtagaattatttcagtgttattatttttgtgatttcgtatgtctacacaaaaatgaattagtttaatttatattgtgatacagttgtttgagaaatatttttaattctgtttcaactttatttctccaagtgtataatataaaaattacttctgttattgttctctaccaataggggaaaaaattaaaacattagatccattgagaaagagatgatgtaataaataattaagattagtaataatattatcaggggtgattatgaccagttgaataatctctttcccttgaattatttagctaacaaattaactctcccaaatatttaaaataatgtaaaatcatattttactgcccattattaactaaaatatttttgtttgactttgagcaccaactggtaatactaataaatacccatgtcatgcagatggctgggcgaataagagatgtctaaaaatatgcactggtcttggaaaacatggcacaagtaaggatatcatatatgatgtctgtttattttatgtctgatttcttttgaatgagtagttggggactccatttctaaggagactaggtaaataaaatgacctttgacatttcaaaaaaca

SEQ ID NO: 401963 - DNA, 3015 bp, Homo sapiens
  misc_feature (53)..(53): n is a, c, g, or t
acccaaaactcgcccaaggtctcaagaaccaatgcaaaaacaaaaaaacttanggacctgggaggaaggcaaggtgctcatctttgatgactcctttgagcacgaggtatggcaggatgcctcatctttccggctgatattcatcgtggatgtgtggcatccggaactgacaccacagcagagacgcagccttccagcaatttagcatgaattcatgcaagcttgggaaactctggagagaggctgcctttctggttccatctccttgggtgtgaggatagaatttcgaacaccaagagtcaattcccttgacttgcagcccgagtaattcaaagcctcctcctagggtcagaagacactaaagggaatatttgcctcgctgcaattcatttaggaaacaccctgctgtgtgtcatctcatgacagcactggtcttctgccagtatttaaggtgaacatttgatagcttctaccttaccagccaaagatattttttccacatagaataggtctaattcaatgtataatgagaacatatgtagaaactgtgaatggattgctttagtttgtaatttttctatgcagttatatttttctagtgtagctagactattttgtcatcatgtaccactacatttttgtttattttaatgacaagctgtataaatgctttacttctagctatttaatggtagcattactggggaactcagacttccctcttttaattcttcttagtaaaagatactcatgaaaaaagcagttttattttcctaacaaaaaagaaagagctcattatgtcagtgtctatgaactgtacccatcccaactctcaaatcgtttggttttttttatcttgattgagatcctcttctcactatgctagtggtggagatattgacaaaatcctatttctttcaaagaggaacttttcacaccgaaaaaagagcatggaattattttatattgttataaaaatcccagatgcaaatttttttaatgccaattattagagcttctggggaaaaagtatagttcacggaaataaaactatgttctttcagggttgggtggataggtggctgctagggtgtctggctcctggcggctttgccatccatgaggcaagggctgggaacacagtgtctttgcctatggtagatccatgtgaatgtcaggaagccagctcttcagtcttggagatgatttctgctacaattctgtagaaagattaaggatggcagagtaaaaggttaccaagaatgccaggatgtttttcttgggcgtaggaggtccagattactttcctttttgatgaaagagtttggaagactgtcccatctctctggcttgagaaatctctgccattttaaacatcactgtgaaatagcaattattatcatctgtatttagttttaacattacccacaacatagaaataataggtaaaaatcgtcttgcctactcattccaaagatgatcaagtcattaatctagcaaagtattcatgtatcagattttgtatattttgaatcaaagctaactaggaatgttagatataagaatgtaatgatattcatgcactgaattctaagccaatatgaacaaaaatgctgcatgaatggcacatataggtcaccaaagttcattcacaggtagaaaaaacttgtgctttcttttccatctaaaaacaaaaggagactttctttatctcatttaaagaacagctctttgaaattgaaattgaccctttttgcttgaccttaaggagattagcttccagtagatgagtttgcaaaatacttttcctgttcttttgttttgctggtattgaaaacatcccactaaatcagatgaagaggcatgggaggaaaaatatccaaattaattactaaaatcgagaagagaaggcaaactcttgaaaagtaaaaaggtgtttgtgaccttcagtatttattgaacagaggaaataactgacaagggcaatacaattcaatgttcatgtagtaacattcatgtcacttgttgaatttggttctcatatgtatattgcatacacataaattcaaactataagtcgtcatttttgagccatcatcttacattcatgtaatgaaattatggaagagagtaaaaactagctcttaacttagtaaatataatatggtatttaaaatcaggtcactacagtaaggttctaagtattgccaattgaaaagctagaaatggtattactgttgcaaagtgttgtcaataattgactccaatagcattgtaaatacttgtatcccacaactattttaaacccaagcaataaaatggattttctaattcacttcaattctttatttctcttacctatctatgtcttggtacataagaaaagtgtttccatcactgcattggtagaattatttcagtgttattatttttgtgatttcgtatgtctacacaaaaatgaattagtttaatttatattgtgatacagttgtttgagaaatatttttaattctgtttcaactttatttctccaagtgtataatataaaaattacttctgttattgttctctaccaataggggaaaaaattaaaacattagatccattgagaaagagatgatgtaataaataattaagattagtaataatattatcaggggtgattatgaccagttgaataatctctttcccttgaattatttagctaacaaattaactctcccaaatatttaaaataatgtaaaatcatattttactgcccattattaactaaaatatttttgtttgactttgagcaccaactggtaatactaataaatacccatgtcatgcagatggctgggcgaataagagatgtctaaaaatatgcactggtcttggaaaacatggcacaagtaaggatatcatatatgatgtctgtttattttatgtctgatttcttttgaatgagtagttggggactccatttctaaggagactaggtaaataaaatgacctttgacatttcaaaaaaca

SEQ ID NO: 401964 - DNA, 2949 bp, Homo sapiens
ggaaggggcgtggccgtcgggcggcgagccgcgcgctctcgccccgggagggagtcacaggttcgtacacgcgaggccgggcgcgcgcagccggcaggcgggtgaagtcttcccaggtgctgcaggcggtgctgaggcacagggtctgctgcaggagcagcggcccgaacccgctccagcggcccgccgccgccagcggctcccgcgtcgcgtgtgtacccccgcgcactgaaggaggtccaccagccctcaccagcccccgcggaccgtgcaatggcccagcgtaagaatgccaagagcagcggcaacagcagcagcagcggctccggcagcggtagcacgagtgcgggcagcagcagccccggggcccggagagagacaaagcatggaggacacaagaatgggaggaaaggcggactctcaggaacttcattcttcacgtggtttatggtgattgcattgctgggcgtctggacatctgtagctgtcgtttggtttgatcttgttgactatgaggaagttctaggaaaactaggaatctatgatgctgatggtgatggagattttgatgtggatgatgccaaagttttattaggacttaaagagagatctacttcagagccagcagtcccgccagaagaggctgagccacacactgagcccgaggagcaggttcctgtggaggcagaaccccagaatatcgaagatgaagcaaaagaacaaattcagtcccttctccatgaaatggtacacgcagaacatgttgagggagaagacttgcaacaagaagatggacccacaggagaaccacaacaagaggatgatgagtttcttatggcgactgatgtagatgatagatttgagaccctggaacctgaagtatctcatgaagaaaccgagcatagttaccacgtggaagagacagtttcacaagactgtaatcaggatatggaagagatgatgtctgagcaggaaaatccagattccagtgaaccagtagtagaagatgaaagattgcaccatgatacagatgatgtaacataccaagtctatgaggaacaagcagtatatgaacctctagaaaatgaagggatagaaatcacagaagtaactgctccccctgaggataatcctgtagaagattcacaggtaattgtagaagaagtaagcatttttcctgtggaagaacagcaggaagtaccaccagatacttaaagcttcaaaaagactgcccctaccaccacaggaggaccagcctaaccatacgctccaaaagatggctgtgatagatcttgtgaagcaattactgagcagatcaagatctttgggaaggaacactaaagatgttttgaatgaattatagtccactggcattttagtgtatttttttttctttttagaaacacacatttctaaaaatgtcatgttacattcctgcatgtcccttttgatagcattagtggatccattggatttcttttttctttttgtgagacagcttttagtcttacctgaatttatgtgtgtttttccgacagtggttaataattatattggtgatgtagcagcaattgtgttggcagggttttcatatattattagtaattaacactaactgttggactgacttgtgtacactgtgttaaacatgatttaaaagctattaagagtactttgtgttagcactcttaaaaacgctaacagagatcatcattagctgtgaagatttgagttgtatatacctgcactgatattcttatcaaaaatttctacattagctttaagtgttcagattaacacttttgaaatttttgtagcttttagctgattaattagaaaaattaatatttcagtgaaagttttaaattatcatttatttatttttttaaatgagaggggaaagctgaaattccttgttaagacacaaggaaaaagaatggccctactattatcatgcaaaaatgcctttgttggcacctcagattaatcatataatagctatagtctcttcagcattttgtttaaattttagaaaacctgtataaattactggtgcataacttaaagattattctgcctttggctaattgagtaattcccctccagcactagagaccgctcagtgctcttactagatgaactcagtaacgccttgagctgggttgattgaggatgtgtgaaaagctcacagagcccgatgcctgctgctatttcacggcaatgagcctttttctttctacactgaagattttcttcttatttaatggtggtttattttgggctcagaaataattgctctgttgaaaataatcctttgtcagaaaagaaggtagctaccacatcattttgaaaggaccatgagcaactataagcaaagccataagaagtggtttgatcgatatattaggggtagctcttgattttgttaacattaagataaggtgactttttccccctgcttttaggattaaaatcaaagatacttctatatttttatcactatagatcatagttattatacaatggtagtgagtcctgcatggggtactcgatgtgtaatgaaaacctggaaataataagataataagaaaagcaataattttctaaagctgtgctgtcggtgatacagagacgatactcaaattataataaaactcttcattttgtgaattatagaagctactttttataaagccatatttttttagggaaactaaggagtgacatagaactgatgaatgagcaaaagtaagttttgctggatttttgtagaactctggacgttgaggattcattatgctgtggttaactttaaatatttttgaattccaaatatctgaattaatgagccttgtgtttacaaatatgtgccattgtgcaacatcggtggattttctaaaaataatgtaaatgtcttctattaaatgttgagtgcaataaaatccagaa

SEQ ID NO: 401965 - DNA, 2892 bp, Homo sapiens
ggaaggggcgtggccgtcgggcggcgagccgcgcgctctcgccccgggagggagtcacaggttcgtacacgcgaggccgggcgcgcgcagccggcaggcgggtgaagtcttcccaggtgctgcaggcggtgctgaggcacagggtctgctgcaggagcagcggcccgaacccgctccagcggcccgccgccgccagcggctcccgcgtcgcgtgtgtacccccgcgcactgaaggaggtccaccagccctcaccagcccccgcggaccgtgcaatggcccagcgtaagaatgccaagagcagcggcaacagcagcagcagcggctccggcagcggtagcacgagtgcgggcagcagcagccccggggcccggagagagacaaagcatggaggacacaagaatgggaggaaaggcggactctcaggaacttcattcttcacgtggtttatggtgattgcattgctgggcgtctggacatctgtagctgtcgtttggtttgatcttgttgactatgaggaagttctaggaaaactaggaatctatgatgctgatggtgatggagattttgatgtggatgatgccaaagttttattaggacttaaagagagatctacttcagagccagcagtcccgccagaagaggctgagccacacactgagcccgaggagcaggttcctgtggaggcagaaccccagaatatcgaagatgaagcaaaagaacaaattcagtcccttctccatgaaatggtacacgcagaacatgttgagggagaagacttgcaacaagaagatggacccacaggagaaccacaacaagaggatgatgagtttcttatggcgactgatgtagatgatagatttgagaccctggaacctgaagtatctcatgaagaaaccgagcatagttaccacgtggaagagacagattccagtgaaccagtagtagaagatgaaagattgcaccatgatacagatgatgtaacataccaagtctatgaggaacaagcagtatatgaacctctagaaaatgaagggatagaaatcacagaagtaactgctccccctgaggataatcctgtagaagattcacaggtaattgtagaagaagtaagcatttttcctgtggaagaacagcaggaagtaccaccagatacttaaagcttcaaaaagactgcccctaccaccacaggaggaccagcctaaccatacgctccaaaagatggctgtgatagatcttgtgaagcaattactgagcagatcaagatctttgggaaggaacactaaagatgttttgaatgaattatagtccactggcattttagtgtatttttttttctttttagaaacacacatttctaaaaatgtcatgttacattcctgcatgtcccttttgatagcattagtggatccattggatttcttttttctttttgtgagacagcttttagtcttacctgaatttatgtgtgtttttccgacagtggttaataattatattggtgatgtagcagcaattgtgttggcagggttttcatatattattagtaattaacactaactgttggactgacttgtgtacactgtgttaaacatgatttaaaagctattaagagtactttgtgttagcactcttaaaaacgctaacagagatcatcattagctgtgaagatttgagttgtatatacctgcactgatattcttatcaaaaatttctacattagctttaagtgttcagattaacacttttgaaatttttgtagcttttagctgattaattagaaaaattaatatttcagtgaaagttttaaattatcatttatttatttttttaaatgagaggggaaagctgaaattccttgttaagacacaaggaaaaagaatggccctactattatcatgcaaaaatgcctttgttggcacctcagattaatcatataatagctatagtctcttcagcattttgtttaaattttagaaaacctgtataaattactggtgcataacttaaagattattctgcctttggctaattgagtaattcccctccagcactagagaccgctcagtgctcttactagatgaactcagtaacgccttgagctgggttgattgaggatgtgtgaaaagctcacagagcccgatgcctgctgctatttcacggcaatgagcctttttctttctacactgaagattttcttcttatttaatggtggtttattttgggctcagaaataattgctctgttgaaaataatcctttgtcagaaaagaaggtagctaccacatcattttgaaaggaccatgagcaactataagcaaagccataagaagtggtttgatcgatatattaggggtagctcttgattttgttaacattaagataaggtgactttttccccctgcttttaggattaaaatcaaagatacttctatatttttatcactatagatcatagttattatacaatggtagtgagtcctgcatggggtactcgatgtgtaatgaaaacctggaaataataagataataagaaaagcaataattttctaaagctgtgctgtcggtgatacagagacgatactcaaattataataaaactcttcattttgtgaattatagaagctactttttataaagccatatttttttagggaaactaaggagtgacatagaactgatgaatgagcaaaagtaagttttgctggatttttgtagaactctggacgttgaggattcattatgctgtggttaactttaaatatttttgaattccaaatatctgaattaatgagccttgtgtttacaaatatgtgccattgtgcaacatcggtggattttctaaaaataatgtaaatgtcttctattaaatgttgagtgcaataaaatccagaa

SEQ ID NO: 401966 - DNA, 1448 bp, Homo sapiens
ggaaggggcgtggccgtcgggcggcgagccgcgcgctctcgccccgggagggagtcacaggttcgtacacgcgaggccgggcgcgcgcagccggcaggcgggtgaagtcttcccaggtgctgcaggcggtgctgaggcacagggtctgctgcaggagcagcggcccgaacccgctccagcggcccgccgccgccagcggctcccgcgtcgcgtgtgtacccccgcgcactgaaggaggtccaccagccctcaccagcccccgcggaccgtgcaatggcccagcgtaagaatgccaagagcagcggcaacagcagcagcagcggctccggcagcggtagcacgagtgcgggcagcagcagccccggggcccggagagagacaaagcatggaggacacaagaatgggaggaaaggcggactctcaggaacttcattcttcacgtggtttatggtgattgcattgctgggcgtctggacatctgtagctgtcgtttggtttgatcttgttgactatgaggaagttctaggaaaactaggaatctatgatgctgatggtgatggagattttgatgtggatgatgccaaagttttattaggacttaaagagagatctacttcagagccagcagtcccgccagaagaggctgagccacacactgagcccgaggagcaggttcctgtggaggcagaaccccagaatatcgaagatgaagcaaaagaacaaattcagtcccttctccatgaaatggtacacgcagaacatgttgagggagaagacttgcaacaagaagatggacccacaggagaaccacaacaagaggatgatgagtttcttatggcgactgatgtagatgatagatttgagaccctggaacctgaagtatctcatgaaaggtagaacacttttttttcaagttttaggataaaatataatcaatgacttctaattactgaagtttttcttaaacccctttaaaactgatatttaacttttgcttagatttttaaaagttgaagcttaaagcttcaattaaagcaaattttttcttaaaatagataccttgattttggttcaaagcacttttcagggaaactcagaatatacaaatttcttataaatagtgagtcaaatacttgaggaaactagttttactatattcttctgcttagggtgctatttgttaaataaaattcaaacaactgatgaaatattggacttgataatctatcacaggctcatgttcacacatgaactctgtaattacagtgagcaaaacacaattcttagcttctgtaccaggcattggcaaacttttttttgtaaatagccagagagtaaatatttcaggttttctggatcgtacagactctgttcagctactcaactctgccatcacagcgtaaaagcagcctttgatagttcctaggtgggtcagaacataagctgtg

SEQ ID NO: 401967 - DNA, 2820 bp, Homo sapiens
ggaaggggcgtggccgtcgggcggcgagccgcgcgctctcgccccgggagggagtcacaggttcgtacacgcgaggccgggcgcgcgcagccggcaggcgggtgaagtcttcccaggtgctgcaggcggtgctgaggcacagggtctgctgcaggagcagcggcccgaacccgctccagcggcccgccgccgccagcggctcccgcgtcgcgtgtgtacccccgcgcactgaaggaggtccaccagccctcaccagcccccgcggaccgtgcaatggcccagcgtaagaatgccaagagcagcggcaacagcagcagcagcggctccggcagcggtagcacgagtgcgggcagcagcagccccggggcccggagagagacaaagcatggaggacacaagaatgggaggaaaggcggactctcaggaacttcattcttcacgtggtttatggtgattgcattgctgggcgtctggacatctgtagctgtcgtttggtttgatcttgttgactatgaggaagttctaggaaaactaggaatctatgatgctgatggtgatggagattttgatgtggatgatgccaaagttttattaggacttaaagagagatctacttcagagccagcagtcccgccagaagaggctgagccacacactgagcccgaggagcaggttcctgtggaggcagaaccccagaatatcgaagatgaagcaaaagaacaaattcagtcccttctccatgaaatggtacacgcagaacatgaaaccgagcatagttaccacgtggaagagacagtttcacaagactgtaatcaggatatggaagagatgatgtctgagcaggaaaatccagattccagtgaaccagtagtagaagatgaaagattgcaccatgatacagatgatgtaacataccaagtctatgaggaacaagcagtatatgaacctctagaaaatgaagggatagaaatcacagaagtaactgctccccctgaggataatcctgtagaagattcacaggtaattgtagaagaagtaagcatttttcctgtggaagaacagcaggaagtaccaccagatacttaaagcttcaaaaagactgcccctaccaccacaggaggaccagcctaaccatacgctccaaaagatggctgtgatagatcttgtgaagcaattactgagcagatcaagatctttgggaaggaacactaaagatgttttgaatgaattatagtccactggcattttagtgtatttttttttctttttagaaacacacatttctaaaaatgtcatgttacattcctgcatgtcccttttgatagcattagtggatccattggatttcttttttctttttgtgagacagcttttagtcttacctgaatttatgtgtgtttttccgacagtggttaataattatattggtgatgtagcagcaattgtgttggcagggttttcatatattattagtaattaacactaactgttggactgacttgtgtacactgtgttaaacatgatttaaaagctattaagagtactttgtgttagcactcttaaaaacgctaacagagatcatcattagctgtgaagatttgagttgtatatacctgcactgatattcttatcaaaaatttctacattagctttaagtgttcagattaacacttttgaaatttttgtagcttttagctgattaattagaaaaattaatatttcagtgaaagttttaaattatcatttatttatttttttaaatgagaggggaaagctgaaattccttgttaagacacaaggaaaaagaatggccctactattatcatgcaaaaatgcctttgttggcacctcagattaatcatataatagctatagtctcttcagcattttgtttaaattttagaaaacctgtataaattactggtgcataacttaaagattattctgcctttggctaattgagtaattcccctccagcactagagaccgctcagtgctcttactagatgaactcagtaacgccttgagctgggttgattgaggatgtgtgaaaagctcacagagcccgatgcctgctgctatttcacggcaatgagcctttttctttctacactgaagattttcttcttatttaatggtggtttattttgggctcagaaataattgctctgttgaaaataatcctttgtcagaaaagaaggtagctaccacatcattttgaaaggaccatgagcaactataagcaaagccataagaagtggtttgatcgatatattaggggtagctcttgattttgttaacattaagataaggtgactttttccccctgcttttaggattaaaatcaaagatacttctatatttttatcactatagatcatagttattatacaatggtagtgagtcctgcatggggtactcgatgtgtaatgaaaacctggaaataataagataataagaaaagcaataattttctaaagctgtgctgtcggtgatacagagacgatactcaaattataataaaactcttcattttgtgaattatagaagctactttttataaagccatatttttttagggaaactaaggagtgacatagaactgatgaatgagcaaaagtaagttttgctggatttttgtagaactctggacgttgaggattcattatgctgtggttaactttaaatatttttgaattccaaatatctgaattaatgagccttgtgtttacaaatatgtgccattgtgcaacatcggtggattttctaaaaataatgtaaatgtcttctattaaatgttgagtgcaataaaatccagaa

SEQ ID NO: 401968 - DNA, 1444 bp, Homo sapiens
ggaaggggcgtggccgtcgggcggcgagccgcgcgctctcgccccgggagggagtcacaggttcgtacacgcgaggccgggcgcgcgcagccggcaggcgggtgaagtcttcccaggtgctgcaggcggtgctgaggcacagggtctgctgcaggagcagcggcccgaacccgctccagcggcccgccgccgccagcggctcccgcgtcgcgtgtgtacccccgcgcactgaaggaggtccaccagccctcaccagcccccgcggaccgtgcaatggcccagcgtaagaatgccaagagcagcggcaacagcagcagcagcggctccggcagcggtagcacgagtgcgggcagcagcagccccggggcccggagagagacaaagcatggaggacacaagaatgggaggaaaggcggactctcaggaacttcattcttcacgtggtttatggtgattgcattgctgggcgtctggacatctgtagctgtcgtttggtttgatcttgttgactatgaggaagttctaggaaaactaggaatctatgatgctgatggtgatggagattttgatgtggatgatgccaaagttttattaggtaggtaatttgcattgtatatagatgatcgtctcaaaatttcacaatgagagactgatgaaattgacataaatcaatcagcatgaacacttgaattaatccagaggactacttaagttaattctgtaggtggttgctttattgagaatattttgtattatgacctgcttagctatgcaagtttgtaacttcagaggtcctcataatgatacttggataataaagattccccatagacacttccattgaaaaagaaaagaagtaaacaagtgtcatttgtaatttgaaatgttttaagttaactgtcatgttactgtccatgaaatggatctggtgacttaggctctatctcctgacattgatttctttctcctgtgtcctcaattatttcttctcctgttaatgcccactggtaataattctcaaaatcgattgctcagaatattccattgtaaaatgcaccttggaaatggttgttttcctcatttgtaaattgaagacaatgcctattcctcaaggtggttgtgagaaccagtcaatgttgcatatgtgtaaacagccagcacatggttgggcattcagtttccctttatcattggtagaataagaatagtaatactcaaccaaaacgtctcagtcaggggttaaaaacttggaagcactgaaactgtgcttcctattcctacttaggtcaacagattgcaaaacaaatatttcagtcctttatcctttgtaatgaatgtgtctttgtgaaatgagtatagtggagcctgatttattctattgagatcattgagggggcaaatgcaaataattataaatgttgcacatgagtgaagccgtaagaat

SEQ ID NO: 401969 - DNA, 585 bp, Homo sapiens
  misc_feature (554)..(554): n is a, c, g, or t
  misc_feature (556)..(556): n is a, c, g, or t
ggaaggggcgtggccgtcgggcggcgagccgcgcgctctcgccccgggagggagtcacaggttcgtacacgcgaggccgggcgcgcgcagccggcaggcgggtgaagtcttcccaggtgctgcaggcggtgctgaggcacagggtctgctgcaggagcagcggcccgaacccgctccagcggcccgccgccgccagcggctcccgcgtcgcgtgtgtacccccgcgcactgaaggaggtccaccagccctcaccagcccccgcggaccgtgcaatggcccagcgtaagaatgccaagagcagcggcaacagcagcagcagcggctccggcagcggtagcacgagtgcgggcagcagcagccccggggcccggagagagacaaagcatggaggacacaagaatgggaggaaaggcggactctcaggaacttcattcttcacgtggtttatggtgattgcattgctgggcgtctggacatctgtagctgtcgtttggtttgatcttgttgactatgaggaagttctaggaaaactaggaatctatgatgctgactncntgatgggctgctacgctgtgatggggggg

SEQ ID NO: 401970 - DNA, 672 bp, Homo sapiens
  misc_feature (647)..(647): n is a, c, g, or t
ggaaggggcgtggccgtcgggcggcgagccgcgcgctctcgccccgggagggagtcacaggttcgtacacgcgaggccgggcgcgcgcagccggcaggcgggtgaagtcttcccaggtgctgcaggcggtgctgaggcacagggtctgctgcaggagcagcggcccgaacccgctccagcggcccgccgccgccagcggctcccgcgtcgcgtgtgtacccccgcgcactgaaggaggtccaccagccctcaccagcccccgcggaccgtgcaatggcccagcgtaagaatgccaagagcagcggcaacagcagcagcagcggctccggcagcggtagcacgagtgcgggcagcagcagccccggggcccggagagagacaaagcatggaggacacaagaatgggaggaaaggcggactctcaggaacttcattcttcacgtggtttatggtgattgcattgctgggcgtctggacatctgtagctgtcgtttggtttgatcttgttgactatgaggaagttctagccaaagcaaaggacttccgttataacttatcagaggtgcttcaaggaaaactaggaatctatgatgctgatggtgatggagattttgatgtggatgatgccaaagttttattagagacaangcatggagacacacggggaggaacg

SEQ ID NO: 401971 - DNA, 1296 bp, Homo sapiens
agcggagtctcaagctctggtaggcaagtgcatgcagtgtgcctaaaacctgccagcagtacttttgagttttttttttggtttggttttactttagcatttattattcatggattgaagaaatcaaaatggctgaagataaagagacaaagcatggaggacacaagaatgggaggaaaggcggactctcaggaacttcattcttcacgtggtttatggtgattgcattgctgggcgtctggacatctgtagctgtcgtttggtttgatcttgttgactatgaggaagttctaggaaaactaggaatctatgatgctgatggtgatggagattttgatgtggatgatgccaaagttttattagaaggacccagtggggtagccaagagaaaaactaaggctaaagttaaagaactcactaaagaagagctcaagaaggagaaagagaaacctgagtcaaggaaggaaagtaagaatgaagagagaaaaaaggggaagaaagaggatgtccgaaaggataagaaaattgctgatgcagacctatccaggaaggagtctcctaagggtaaaaaggacagagaaaaagagaaagtggacctagaaaaaagtgctaaaaccaaggaaaataggaaaaaatcaacaaatatgaaggatgtttctagtaaaatggcatcccgagacaaagatgacagaaaggaaagtagaagttctaccagatatgcacacttaacaaagggaaatacccagaaaagaaacggctaaagctctggcatcatcatcccagaacatggtcatgttccagattgcagtttgttacaaaaaagcatggaaaatgtaatattgctctgattggtgagggtgtgtaaattagccattgaatgtatcattggtgcttagcaagtaaattacctgaaatttaaatataccgtctcatacttctaaatgtaaaaacattttaaaaatgtcacagaatatgatgtaataacttctatttattgatcatttattgatcatgtattcagataaatgtatatgtatcatgaatttttatggattaatatattgaatactttcattgacgttaaataagaatattaagattttaaatgttaccctgtgcataatgccttgtaactttttcaagtatgctaaatactcagggagatggatttgctcgttgttttcttccctccttccccttcctgcttccctgttttctctttcgtggacacctccccaggctcatgtgccaccaccttccctcctctccagccctcccagccctcccgcagccttt

SEQ ID NO: 401972 - DNA, 965 bp, Homo sapiens
agcggagtctcaagctctggtaggcaagtgcatgcagtgtgcctaaaacctgccagcagtacttttgagttttttttttggtttggttttactttagcatttattattcatggattgaagaaatcaaaatggctgaagataaagagacaaagcatggaggacacaagaatgggaggaaaggcggactctcaggaacttcattcttcacgtggtttatggtgattgcattgctgggcgtctggacatctgtagctgtcgtttggtttgatcttgttgactatgaggaagttctagccaaagcaaaggacttccgttataacttatcagaggtgcttcaaggaaaactaggaatctatgatgctgatggtgatggagattttgatgtggatgatgccaaagttttattaggagaaggacccagtggggtagccaagagaaaaactaaggctaaagttaaagaactcactaaagaagagctcaagaaggagaaagagaaacctgagtcaaggaaggaaagtaagaatgaagagagaaaaaaggggaagaaagaggatgtccgaaaggataagaaaattgctgatgcagacctatccaggaaggagtctcctaagggtaaaaaggacagagaaaaagagaaagtggacctagaaaaaagtgctaaaaccaaggaaaataggaaaaaatcaacaaatatgaaggatgtttctagtaaaatggcatcccgagacaaagatgacagaaaggaaagtagaagttctaccagatatgcacacttaacaaagggaaatacccagaaaagaaacggctaaagctctggcatcatcatcccagaacatggtcatgttccagattgcagtttgttacaaaaaagcatggaaaatgtaatattgctctgattggtgagggtgtgtaaattagccattgaatgtatcattggtgcttagcaagtaaattacctgaaattt

SEQ ID NO: 401973 - DNA, 919 bp, Homo sapiens
agcggagtctcaagctctggtaggcaagtgcatgcagtgtgcctaaaacctgccagcagtacttttgagttttttttttggtttggttttactttagcatttattattcatggattgaagaaatcaaaatggctgaagataaagagacaaagcatggaggacacaagaatgggaggaaaggcggactctcaggaacttcattcttcacgtggtttatggtgattgcattgctgggcgtctggacatctgtagctgtcgtttggtttgatcttgttgactatgaggaagttctagccaaagcaaaggacttccgttataacttatcagaggtgcttcaaggaaaactaggaatctatgatgctgatggtgatggagattttgatgtggatgatgccaaagttttattaggcctgaccaaagatggcagtaatgaaaatattgattctcttgaggaagtccttaatattttagcagaggaaagttcagattggttttatggtttcctctcatttctctatgatataatgactccttttgaaatgctagaagaagaagaagaagaaagcgaaaccgcagatggtgttgatggtacgtcacagaatgaaggggttcagggaaagacttgtgtcatattggatttacataaccagtaaccttgattcagggactgaagtcattggctaatgaacacctgaagcagcctcctttttcttttctttccttggcttatgcagggcttaatgtgcagtggggtggttgtgatcttaccgtgcaagtcaaccatgtgatcttgcccagtacagctactagctagtcccttgctcgctcagctcccccaacttctattgaagaaaatggtactcctcattcttgtagtcagctacaaagtacactgaaaatgatgttcttggtggtataa

SEQ ID NO: 401974 - DNA, 5360 bp, Homo sapiens
ggaaggggcgtggccgtcgggcggcgagccgcgcgctctcgccccgggagggagtcacaggttcgtacacgcgaggccgggcgcgcgcagccggcaggcgggtgaagtcttcccaggtgctgcaggcggtgctgaggcacagggtctgctgcaggagcagcggcccgaacccgctccagcggcccgccgccgccagcggctcccgcgtcgcgtgtgtacccccgcgcactgaaggaggtccaccagccctcaccagcccccgcggaccgtgcaatggcccagcgtaagaatgccaagagcagcggcaacagcagcagcagcggctccggcagcggtagcacgagtgcgggcagcagcagccccggggcccggagagagacaaagcatggaggacacaagaatgggaggaaaggcggactctcaggaacttcattcttcacgtggtttatggtgattgcattgctgggcgtctggacatctgtagctgtcgtttggtttgatcttgttgactatgaggaagttctaggaaaactaggaatctatgatgctgatggtgatggagattttgatgtggatgatgccaaagttttattaggacttaaagagagatctacttcagagccagcagtcccgccagaagaggctgagccacacactgagcccgaggagcaggttcctgtggaggcagaaccccagaatatcgaagatgaagcaaaagaacaaattcagtcccttctccatgaaatggtacacgcagaacatgttgagggagaagacttgcaacaagaagatggacccacaggagaaccacaacaagaggatgatgagtttcttatggcgactgatgtagatgatagatttgagaccctggaacctgaagtatctcatgaagaaaccgagcatagttaccacgtggaagagacagtttcacaagactgtaatcaggatatggaagagatgatgtctgagcaggaaaatccagattccagtgaaccagtagtagaagatgaaagattgcaccatgatacagatgatgtaacataccaagtctatgaggaacaagcagtatatgaacctctagaaaatgaagggatagaaatcacagaagtaactgctccccctgaggataatcctgtagaagattcacaggtaattgtagaagaagtaagcatttttcctgtggaagaacagcaggaagtaccaccagaaacaaatagaaaaacagatgatccagaacaaaaagcaaaagttaagaaaaagaagcctaaacttttaaataaatttgataagactattaaagctgaacttgatgctgcagaaaaactccgtaaaaggggaaaaattgaggaagcagtgaatgcatttaaagaactagtacgcaaataccctcagagtccacgagcaagatatgggaaggcgcagtgtgaggatgatttggctgagaagaggagaagtaatgaggtgctacgtggagccatcgagacctaccaagaggtggccagcctacctgatgtccctgcagacctgctgaagctgagtttgaagcgtcgctcagacaggcaacaatttctaggtcatatgagaggttccctgcttaccctgcagagattagttcaactatttcccaatgatacttccttaaaaaatgaccttggcgtgggatacctcttgataggagataatgacaatgcaaagaaagtttatgaagaggtgctgagtgtgacacctaatgatggctttgctaaagtccattatggcttcatcctgaaggcacagaacaaaattgctgagagcatcccatatttaaaggaaggaatagaatccggagatcctggcactgatgatgggagattttatttccacctgggggatgccatgcagagggttgggaacaaagaggcatataagtggtatgagcttgggcacaagagaggacactttgcatctgtctggcaacgctcactctacaatgtgaatggactgaaagcacagccttggtggaccccaaaagaaacgggctacacagagttagtaaagtctttagaaagaaactggaagttaatccgagatgaaggccttgcagtgatggataaagccaaaggtctcttcctgcctgaggatgaaaacctgagggaaaaaggggactggagccagttcacgctgtggcagcaaggaagaagaaatgaaaatgcctgcaaaggagctcctaaaacctgtaccttactagaaaagttccccgagacaacaggatgcagaagaggacagatcaaatattccatcatgcaccccgggactcacgtgtggccgcacacagggcccacaaactgcaggctccgaatgcacctgggcttggtgattcccaaggaaggctgcaagattcgatgtgccaacgagaccaagacctgggaggaaggcaaggtgctcatctttgatgactcctttgagcacgaggtatggcaggatgcctcatctttccggctgatattcatcgtggatgtgtggcatccggaactgacaccacagcagagacgcagccttccagcaatttagcatgaattcatgcaagcttgggaaactctggagagaggctgcctttctggttccatctccttgggtgtgaggatagaatttcgaacaccaagagtcaattcccttgacttgcagcccgagtaattcaaagcctcctcctagggtcagaagacactaaagggaatatttgcctcgctgcaattcatttaggaaacaccctgctgtgtgtcatctcatgacagcactggtcttctgccagtatttaaggtgaacatttgatagcttctaccttaccagccaaagatattttttccacatagaataggtctaattcaatgtataatgagaacatatgtagaaactgtgaatggattgctttagtttgtaatttttctatgcagttatatttttctagtgtagctagactattttgtcatcatgtaccactacatttttgtttattttaatgacaagctgtataaatgctttacttctagctatttaatggtagcattactggggaactcagacttccctcttttaattcttcttagtaaaagatactcatgaaaaaagcagttttattttcctaacaaaaaagaaagagctcattatgtcagtgtctatgaactgtacccatcccaactctcaaatcgtttggttttttttatcttgattgagatcctcttctcactatgctagtggtggagatattgacaaaatcctatttctttcaaagaggaacttttcacaccgaaaaaagagcatggaattattttatattgttataaaaatcccagatgcaaatttttttaatgccaattattagagcttctggggaaaaagtatagttcacggaaataaaactatgttctttcagggttgggtggataggtggctgctagggtgtctggctcctggcggctttgccatccatgaggcaagggctgggaacacagtgtctttgcctatggtagatccatgtgaatgtcaggaagccagctcttcagtcttggagatgatttctgctacaattctgtagaaagattaaggatggcagagtaaaaggttaccaagaatgccaggatgtttttcttgggcgtaggaggtccagattactttcctttttgatgaaagagtttggaagactgtcccatctctctggcttgagaaatctctgccattttaaacatcactgtgaaatagcaattattatcatctgtatttagttttaacattacccacaacatagaaataataggtaaaaatcgtcttgcctactcattccaaagatgatcaagtcattaatctagcaaagtattcatgtatcagattttgtatattttgaatcaaagctaactaggaatgttagatataagaatgtaatgatattcatgcactgaattctaagccaatatgaacaaaaatgctgcatgaatggcacatataggtcaccaaagttcattcacaggtagaaaaaacttgtgctttcttttccatctaaaaacaaaaggagactttctttatctcatttaaagaacagctctttgaaattgaaattgaccctttttgcttgaccttaaggagattagcttccagtagatgagtttgcaaaatacttttcctgttcttttgttttgctggtattgaaaacatcccactaaatcagatgaagaggcatgggaggaaaaatatccaaattaattactaaaatcgagaagagaaggcaaactcttgaaaagtaaaaaggtgtttgtgaccttcagtatttattgaacagaggaaataactgacaagggcaatacaattcaatgttcatgtagtaacattcatgtcacttgttgaatttggttctcatatgtatattgcatacacataaattcaaactataagtcgtcatttttgagccatcatcttacattcatgtaatgaaattatggaagagagtaaaaactagctcttaacttagtaaatataatatggtatttaaaatcaggtcactacagtaaggttctaagtattgccaattgaaaagctagaaatggtattactgttgcaaagtgttgtcaataattgactccaatagcattgtaaatacttgtatcccacaactattttaaacccaagcaataaaatggattttctaattcacttcaattctttatttctcttacctatctatgtcttggtacataagaaaagtgtttccatcactgcattggtagaattatttcagtgttattatttttgtgatttcgtatgtctacacaaaaatgaattagtttaatttatattgtgatacagttgtttgagaaatatttttaattctgtttcaactttatttctccaagtgtataatataaaaattacttctgttattgttctctaccaataggggaaaaaattaaaacattagatccattgagaaagagatgatgtaataaataattaagattagtaataatattatcaggggtgattatgaccagttgaataatctctttcccttgaattatttagctaacaaattaactctcccaaatatttaaaataatgtaaaatcatattttactgcccattattaactaaaatatttttgtttgactttgagcaccaactggtaatactaataaatacccatgtcatgcagatggctgggcgaataagagatgtctaaaaatatgcactggtcttggaaaacatggcacaagtaaggatatcatatatgatgtctgtttattttatgtctgatttcttttgaatgagtagttggggactccatttctaaggagactaggtaaataaaatgacctttgacatttcaaaaaaca

SEQ ID NO: 401975 - DNA, 4976 bp, Homo sapiens
  misc_feature (4866)..(4867): n is a, c, g, or t
ggaaggggcgtggccgtcgggcggcgagccgcgcgctctcgccccgggagggagtcacaggttcgtacacgcgaggccgggcgcgcgcagccggcaggcgggtgaagtcttcccaggtgctgcaggcggtgctgaggcacagggtctgctgcaggagcagcggcccgaacccgctccagcggcccgccgccgccagcggctcccgcgtcgcgtgtgtacccccgcgcactgaaggaggtccaccagccctcaccagcccccgcggaccgtgcaatggcccagcgtaagaatgccaagagcagcggcaacagcagcagcagcggctccggcagcggtagcacgagtgcgggcagcagcagccccggggcccggagagagacaaagcatggaggacacaagaatgggaggaaaggcggactctcaggaacttcattcttcacgtggtttatggtgattgcattgctgggcgtctggacatctgtagctgtcgtttggtttgatcttgttgactatgaggaagttctaggaaaactaggaatctatgatgctgatggtgatggagattttgatgtggatgatgccaaagttttattaggacttaaagagagatctacttcagagccagcagtcccgccagaagaggctgagccacacactgagcccgaggagcaggttcctgtggaggcagaaccccagaatatcgaagatgaagcaaaagaacaaattcagtcccttctccatgaaatggtacacgcagaacatgttgagggagaagacttgcaacaagaagatggacccacaggagaaccacaacaagaggatgatgagtttcttatggcgactgatgtagatgatagatttgagaccctggaacctgaagtatctcatgaagaaaccgagcatagttaccacgtggaagagacagtttcacaagactgtaatcaggatatggaagagatgatgtctgagcaggaaaatccagattccagtgaaccagtagtagaagatgaaagattgcaccatgatacagatgatgtaacataccaagtctatgaggaacaagcagtatatgaacctctagaaaatgaagggatagaaatcacagaagtaactgctccccctgaggataatcctgtagaagattcacaggtaattgtagaagaagtaagcatttttcctgtggaagaacagcaggaagtaccaccagaaacaaatagaaaaacagatgatccagaacaaaaagcaaaagttaagaaaaagaagcctaaacttttaaataaatttgataagactattaaagctgaacttgatgctgcagaaaaactccgtaaaaggggaaaaattgaggaagcagtgaatgcatttaaagaactagtacgcaaataccctcagagtccacgagcaagatatgggaaggcgcagtgtgaggatgatttggctgagaagaggagaagtaatgaggtgctacgtggagccatcgagacctaccaagaggtggccagcctacctgatgtccctgcagacctgctgaagctgagtttgaagcgtcgctcagacaggcaacaatttctaggtcatatgagaggttccctgcttaccctgcagagattagttcaactatttcccaatgatacttccttaaaaaatgaccttggcgtgggatacctcttgataggagataatgacaatgcaaagaaagtttatgaagaggtgctgagtgtgacacctaatgatggctttgctaaagtccattatggcttcatcctgaaggcacagaacaaaattgctgagagcatcccatatttaaaggaaggaatagaatccggagatcctggcactgatgatgggagattttatttccacctgggggatgccatgcagagggttgggaacaaagaggcatataagtggtatgagcttgggcacaagagaggacactttgcatctgtctggcaacgctcactctacaatgtgaatggactgaaagcacagccttggtggaccccaaaagaaacgggctacacagagttagtaaagtctttagaaagaaactggaagttaatccgagatgaaggccttgcagtgatggataaagccaaaggtctcttcctgcctgaggatgaaaacctgagggaaaaaggggactggagccagttcacgctgtggcagcaaggaagaagaaatgaaaatgcctgcaaaggagctcctaaaacctgtaccttactagaaaagttccccgagacaacaggatgcagaagaggacagatcaaatattccatcatgcaccccgggactcacgtgtggccgcacacagggcccacaaactgcaggctccgaatgcacctgggcttggtgattcccaaggaaggctgcaagattcgatgtgccaacgagaccaagacctgggaggaaggcaaggtgctcatctttgatgactcctttgagcacgaggtatggcaggatgcctcatctttccggctgatattcatcgtggatgtgtggcatccggaactgacaccacagcagagacgcagccttccagcaatttagcatgaattcatgcaagcttgggaaactctggagagaggctgcctttctggttccatctccttgggtgtgaggatagaatttcgaacaccaagagtcaattcccttgacttgcagcccgagtaattcaaagcctcctcctagggtcagaagacactaaagggaatatttgcctcgctgcaattcatttaggaaacaccctgctgtgtgtcatctcatgacagcactggtcttctgccagtatttaaggtgaacatttgatagcttctaccttaccagccaaagatattttttccacatagaataggtctaattcaatgtataatgagaacatatgtagaaactgtgaatggattgctttagtttgtaatttttctatgcagttatatttttctagtgtagctagactattttgtcatcatgtaccactacatttttgtttattttaatgacaagctgtataaatgctttacttctagctatttaatggtagcattactggggaactcagacttccctcttttaattcttcttagtaaaagatactcatgaaaaaagcagttttattttcctaacaaaaaagaaagagctcattatgtcagtgtctatgaactgtacccatcccaactctcaaatcgtttggttttttttatcttgattgagatcctcttctcactatgctagtggtggagatattgacaaaatcctatttctttcaaagaggaacttttcacaccgaaaaaagagcatggaattattttatattgttataaaaatcccagatgcaaatttttttaatgccaattattagagcttctggggaaaaagtatagttcacggaaataaaactatgttctttcagggttgggtggataggtggctgctagggtgtctggctcctggcggctttgccatccatgaggcaagggctgggaacacagtgtctttgcctatggtagatccatgtgaatgtcaggaagccagctcttcagtcttggagatgatttctgctacaattctgtagaaagattaaggatggcagagtaaaaggttaccaagaatgccaggatgtttttcttgggcgtaggaggtccagattactttcctttttgatgaaagagtttggaagactgtcccatctctctggcttgagaaatctctgccattttaaacatcactgtgaaatagcaattattatcatctgtatttagttttaacattacccacaacatagaaataataggtaaaaatcgtcttgcctactcattccaaagatgatcaagtcattaatctagcaaagtattcatgtatcagattttgtatattttgaatcaaagctaactaggaatgttagatataagaatgtaatgatattcatgcactgaattctaagccaatatgaacaaaaatgctgcatgaatggcacatataggtcaccaaagttcattcacaggtagaaaaaacttgtgctttcttttccatctaaaaacaaaaggagactttctttatctcatttaaagaacagctctttgaaattgaaattgaccctttttgcttgaccttaaggagattagcttccagtagatgagtttgcaaaatacttttcctgttcttttgttttgctggtattgaaaacatcccactaaatcagatgaagaggcatgggaggaaaaatatccaaattaattactaaaatcgagaagagaaggcaaactcttgaaaagtaaaaaggtgtttgtgaccttcagtatttattgaacagaggaaataactgacaagggcaatacaattcaatgttcatgtagtaacattcatgtcacttgttgaatttggttctcatatgtatattgcatacacataaattcaaactataagtcgtcatttttgagccatcatcttacattcatgtaatgaaattatggaagagagtaaaaactagctcttaacttagtaaatataatatggtatttaaaatcaggtcactacagtaaggttctaagtattgccaattgaaaagctagaaatggtattactgttgcaaagtgttgtcaataattgactccaatagcattgtaaatacttgtatcccacaactattttaaacccaagcaataaaatggattttctaattcacttcaattctttatttctcttacctatctatgtcttggtacataagaaaagtgtttccatcactgcattggtagaattatttcagtgttattatttttgtgatttcgtatgtctacacaaaaatgaattagtttaatttatattgtgatacagttgtttgagaaatatttttaattctgtttcacnnttttctccccaggtgttttttcccacttcttctggttttgtctctaccttggggggccacatttccctttgtccttgcgcacacgtgtgctcctccttctcgcttgccc

SEQ ID NO: 401976 - DNA, 5303 bp, Homo sapiens
ggaaggggcgtggccgtcgggcggcgagccgcgcgctctcgccccgggagggagtcacaggttcgtacacgcgaggccgggcgcgcgcagccggcaggcgggtgaagtcttcccaggtgctgcaggcggtgctgaggcacagggtctgctgcaggagcagcggcccgaacccgctccagcggcccgccgccgccagcggctcccgcgtcgcgtgtgtacccccgcgcactgaaggaggtccaccagccctcaccagcccccgcggaccgtgcaatggcccagcgtaagaatgccaagagcagcggcaacagcagcagcagcggctccggcagcggtagcacgagtgcgggcagcagcagccccggggcccggagagagacaaagcatggaggacacaagaatgggaggaaaggcggactctcaggaacttcattcttcacgtggtttatggtgattgcattgctgggcgtctggacatctgtagctgtcgtttggtttgatcttgttgactatgaggaagttctaggaaaactaggaatctatgatgctgatggtgatggagattttgatgtggatgatgccaaagttttattaggacttaaagagagatctacttcagagccagcagtcccgccagaagaggctgagccacacactgagcccgaggagcaggttcctgtggaggcagaaccccagaatatcgaagatgaagcaaaagaacaaattcagtcccttctccatgaaatggtacacgcagaacatgttgagggagaagacttgcaacaagaagatggacccacaggagaaccacaacaagaggatgatgagtttcttatggcgactgatgtagatgatagatttgagaccctggaacctgaagtatctcatgaagaaaccgagcatagttaccacgtggaagagacagattccagtgaaccagtagtagaagatgaaagattgcaccatgatacagatgatgtaacataccaagtctatgaggaacaagcagtatatgaacctctagaaaatgaagggatagaaatcacagaagtaactgctccccctgaggataatcctgtagaagattcacaggtaattgtagaagaagtaagcatttttcctgtggaagaacagcaggaagtaccaccagaaacaaatagaaaaacagatgatccagaacaaaaagcaaaagttaagaaaaagaagcctaaacttttaaataaatttgataagactattaaagctgaacttgatgctgcagaaaaactccgtaaaaggggaaaaattgaggaagcagtgaatgcatttaaagaactagtacgcaaataccctcagagtccacgagcaagatatgggaaggcgcagtgtgaggatgatttggctgagaagaggagaagtaatgaggtgctacgtggagccatcgagacctaccaagaggtggccagcctacctgatgtccctgcagacctgctgaagctgagtttgaagcgtcgctcagacaggcaacaatttctaggtcatatgagaggttccctgcttaccctgcagagattagttcaactatttcccaatgatacttccttaaaaaatgaccttggcgtgggatacctcttgataggagataatgacaatgcaaagaaagtttatgaagaggtgctgagtgtgacacctaatgatggctttgctaaagtccattatggcttcatcctgaaggcacagaacaaaattgctgagagcatcccatatttaaaggaaggaatagaatccggagatcctggcactgatgatgggagattttatttccacctgggggatgccatgcagagggttgggaacaaagaggcatataagtggtatgagcttgggcacaagagaggacactttgcatctgtctggcaacgctcactctacaatgtgaatggactgaaagcacagccttggtggaccccaaaagaaacgggctacacagagttagtaaagtctttagaaagaaactggaagttaatccgagatgaaggccttgcagtgatggataaagccaaaggtctcttcctgcctgaggatgaaaacctgagggaaaaaggggactggagccagttcacgctgtggcagcaaggaagaagaaatgaaaatgcctgcaaaggagctcctaaaacctgtaccttactagaaaagttccccgagacaacaggatgcagaagaggacagatcaaatattccatcatgcaccccgggactcacgtgtggccgcacacagggcccacaaactgcaggctccgaatgcacctgggcttggtgattcccaaggaaggctgcaagattcgatgtgccaacgagaccaagacctgggaggaaggcaaggtgctcatctttgatgactcctttgagcacgaggtatggcaggatgcctcatctttccggctgatattcatcgtggatgtgtggcatccggaactgacaccacagcagagacgcagccttccagcaatttagcatgaattcatgcaagcttgggaaactctggagagaggctgcctttctggttccatctccttgggtgtgaggatagaatttcgaacaccaagagtcaattcccttgacttgcagcccgagtaattcaaagcctcctcctagggtcagaagacactaaagggaatatttgcctcgctgcaattcatttaggaaacaccctgctgtgtgtcatctcatgacagcactggtcttctgccagtatttaaggtgaacatttgatagcttctaccttaccagccaaagatattttttccacatagaataggtctaattcaatgtataatgagaacatatgtagaaactgtgaatggattgctttagtttgtaatttttctatgcagttatatttttctagtgtagctagactattttgtcatcatgtaccactacatttttgtttattttaatgacaagctgtataaatgctttacttctagctatttaatggtagcattactggggaactcagacttccctcttttaattcttcttagtaaaagatactcatgaaaaaagcagttttattttcctaacaaaaaagaaagagctcattatgtcagtgtctatgaactgtacccatcccaactctcaaatcgtttggttttttttatcttgattgagatcctcttctcactatgctagtggtggagatattgacaaaatcctatttctttcaaagaggaacttttcacaccgaaaaaagagcatggaattattttatattgttataaaaatcccagatgcaaatttttttaatgccaattattagagcttctggggaaaaagtatagttcacggaaataaaactatgttctttcagggttgggtggataggtggctgctagggtgtctggctcctggcggctttgccatccatgaggcaagggctgggaacacagtgtctttgcctatggtagatccatgtgaatgtcaggaagccagctcttcagtcttggagatgatttctgctacaattctgtagaaagattaaggatggcagagtaaaaggttaccaagaatgccaggatgtttttcttgggcgtaggaggtccagattactttcctttttgatgaaagagtttggaagactgtcccatctctctggcttgagaaatctctgccattttaaacatcactgtgaaatagcaattattatcatctgtatttagttttaacattacccacaacatagaaataataggtaaaaatcgtcttgcctactcattccaaagatgatcaagtcattaatctagcaaagtattcatgtatcagattttgtatattttgaatcaaagctaactaggaatgttagatataagaatgtaatgatattcatgcactgaattctaagccaatatgaacaaaaatgctgcatgaatggcacatataggtcaccaaagttcattcacaggtagaaaaaacttgtgctttcttttccatctaaaaacaaaaggagactttctttatctcatttaaagaacagctctttgaaattgaaattgaccctttttgcttgaccttaaggagattagcttccagtagatgagtttgcaaaatacttttcctgttcttttgttttgctggtattgaaaacatcccactaaatcagatgaagaggcatgggaggaaaaatatccaaattaattactaaaatcgagaagagaaggcaaactcttgaaaagtaaaaaggtgtttgtgaccttcagtatttattgaacagaggaaataactgacaagggcaatacaattcaatgttcatgtagtaacattcatgtcacttgttgaatttggttctcatatgtatattgcatacacataaattcaaactataagtcgtcatttttgagccatcatcttacattcatgtaatgaaattatggaagagagtaaaaactagctcttaacttagtaaatataatatggtatttaaaatcaggtcactacagtaaggttctaagtattgccaattgaaaagctagaaatggtattactgttgcaaagtgttgtcaataattgactccaatagcattgtaaatacttgtatcccacaactattttaaacccaagcaataaaatggattttctaattcacttcaattctttatttctcttacctatctatgtcttggtacataagaaaagtgtttccatcactgcattggtagaattatttcagtgttattatttttgtgatttcgtatgtctacacaaaaatgaattagtttaatttatattgtgatacagttgtttgagaaatatttttaattctgtttcaactttatttctccaagtgtataatataaaaattacttctgttattgttctctaccaataggggaaaaaattaaaacattagatccattgagaaagagatgatgtaataaataattaagattagtaataatattatcaggggtgattatgaccagttgaataatctctttcccttgaattatttagctaacaaattaactctcccaaatatttaaaataatgtaaaatcatattttactgcccattattaactaaaatatttttgtttgactttgagcaccaactggtaatactaataaatacccatgtcatgcagatggctgggcgaataagagatgtctaaaaatatgcactggtcttggaaaacatggcacaagtaaggatatcatatatgatgtctgtttattttatgtctgatttcttttgaatgagtagttggggactccatttctaaggagactaggtaaataaaatgacctttgacatttcaaaaaaca

SEQ ID NO: 401977 - DNA, 4014 bp, Homo sapiens
ggaaggggcgtggccgtcgggcggcgagccgcgcgctctcgccccgggagggagtcacaggttcgtacacgcgaggccgggcgcgcgcagccggcaggcgggtgaagtcttcccaggtgctgcaggcggtgctgaggcacagggtctgctgcaggagcagcggcccgaacccgctccagcggcccgccgccgccagcggctcccgcgtcgcgtgtgtacccccgcgcactgaaggaggtccaccagccctcaccagcccccgcggaccgtgcaatggcccagcgtaagaatgccaagagcagcggcaacagcagcagcagcggctccggcagcggtagcacgagtgcgggcagcagcagccccggggcccggagagagacaaagcatggaggacacaagaatgggaggaaaggcggactctcaggaacttcattcttcacgtggtttatggtgattgcattgctgggcgtctggacatctgtagctgtcgtttggtttgatcttgttgactatgaggaagttctaggaaaactaggaatctatgatgctgatggtgatggagattttgatgtggatgatgccaaagttttattaggacttaaagagagatctacttcagagccagcagtcccgccagaagaggctgagccacacactgagcccgaggagcaggttcctgtggaggcagaaccccagaatatcgaagatgaagcaaaagaacaaattcagtcccttctccatgaaatggtacacgcagaacatgttgagggagaagacttgcaacaagaagatggacccacaggagaaccacaacaagaggatgatgagtttcttatggcgactgatgtagatgatagatttgagaccctggaacctgaagtatctcatgaagaaaccgagcatagttaccacgtggaagagacagattccagtgaaccagtagtagaagatgaaagattgcaccatgatacagatgatgtaacataccaagtctatgaggaacaagcagtatatgaacctctagaaaatgaagggatagaaatcacagaagtaactgctccccctgaggataatcctgtagaagattcacaggtaattgtagaagaagtaagcatttttcctgtggaagaacagcaggaagtaccaccagaaacaaatagaaaaacagatgatccagaacaaaaagcaaaagttaagaaaaagaagcctaaacttttaaataaatttgataagactattaaagctgaacttgatgctgcagaaaaactccgtaaaaggggaaaaattgaggaagcagtgaatgcatttaaagaactagtacgcaaataccctcagagtccacgagcaagatatgggaaggcgcggaatatttgcctcgctgcaattcatttaggaaacaccctgctgtgtgtcatctcatgacagcactggtcttctgccagtatttaaggtgaacatttgatagcttctaccttaccagccaaagatattttttccacatagaataggtctaattcaatgtataatgagaacatatgtagaaactgtgaatggattgctttagtttgtaatttttctatgcagttatatttttctagtgtagctagactattttgtcatcatgtaccactacatttttgtttattttaatgacaagctgtataaatgctttacttctagctatttaatggtagcattactggggaactcagacttccctcttttaattcttcttagtaaaagatactcatgaaaaaagcagttttattttcctaacaaaaaagaaagagctcattatgtcagtgtctatgaactgtacccatcccaactctcaaatcgtttggttttttttatcttgattgagatcctcttctcactatgctagtggtggagatattgacaaaatcctatttctttcaaagaggaacttttcacaccgaaaaaagagcatggaattattttatattgttataaaaatcccagatgcaaatttttttaatgccaattattagagcttctggggaaaaagtatagttcacggaaataaaactatgttctttcagggttgggtggataggtggctgctagggtgtctggctcctggcggctttgccatccatgaggcaagggctgggaacacagtgtctttgcctatggtagatccatgtgaatgtcaggaagccagctcttcagtcttggagatgatttctgctacaattctgtagaaagattaaggatggcagagtaaaaggttaccaagaatgccaggatgtttttcttgggcgtaggaggtccagattactttcctttttgatgaaagagtttggaagactgtcccatctctctggcttgagaaatctctgccattttaaacatcactgtgaaatagcaattattatcatctgtatttagttttaacattacccacaacatagaaataataggtaaaaatcgtcttgcctactcattccaaagatgatcaagtcattaatctagcaaagtattcatgtatcagattttgtatattttgaatcaaagctaactaggaatgttagatataagaatgtaatgatattcatgcactgaattctaagccaatatgaacaaaaatgctgcatgaatggcacatataggtcaccaaagttcattcacaggtagaaaaaacttgtgctttcttttccatctaaaaacaaaaggagactttctttatctcatttaaagaacagctctttgaaattgaaattgaccctttttgcttgaccttaaggagattagcttccagtagatgagtttgcaaaatacttttcctgttcttttgttttgctggtattgaaaacatcccactaaatcagatgaagaggcatgggaggaaaaatatccaaattaattactaaaatcgagaagagaaggcaaactcttgaaaagtaaaaaggtgtttgtgaccttcagtatttattgaacagaggaaataactgacaagggcaatacaattcaatgttcatgtagtaacattcatgtcacttgttgaatttggttctcatatgtatattgcatacacataaattcaaactataagtcgtcatttttgagccatcatcttacattcatgtaatgaaattatggaagagagtaaaaactagctcttaacttagtaaatataatatggtatttaaaatcaggtcactacagtaaggttctaagtattgccaattgaaaagctagaaatggtattactgttgcaaagtgttgtcaataattgactccaatagcattgtaaatacttgtatcccacaactattttaaacccaagcaataaaatggattttctaattcacttcaattctttatttctcttacctatctatgtcttggtacataagaaaagtgtttccatcactgcattggtagaattatttcagtgttattatttttgtgatttcgtatgtctacacaaaaatgaattagtttaatttatattgtgatacagttgtttgagaaatatttttaattctgtttcaactttatttctccaagtgtataatataaaaattacttctgttattgttctctaccaataggggaaaaaattaaaacattagatccattgagaaagagatgatgtaataaataattaagattagtaataatattatcaggggtgattatgaccagttgaataatctctttcccttgaattatttagctaacaaattaactctcccaaatatttaaaataatgtaaaatcatattttactgcccattattaactaaaatatttttgtttgactttgagcaccaactggtaatactaataaatacccatgtcatgcagatggctgggcgaataagagatgtctaaaaatatgcactggtcttggaaaacatggcacaagtaaggatatcatatatgatgtctgtttattttatgtctgatttcttttgaatgagtagttggggactccatttctaaggagactaggtaaataaaatgacctttgacatttcaaaaaaca

SEQ ID NO: 401978 - DNA, 5166 bp, Homo sapiens
tcgcggaatactctgctgctcgcggaattctccgccgccgccagcggctcccgcgtcgcgtgtgtacccccgcgcactgaaggaggtccaccagccctcaccagcccccgcggaccgtgcaatggcccagcgtaagaatgccaagagcagcggcaacagcagcagccccggggcccggagagagacaaagcatggaggacacaagaatgggaggaaaggcggactctcaggaacttcattcttcacgtggtttatggtgattgcattgctgggcgtctggacatctgtagctgtcgtttggtttgatcttgttgactatgaggaagttctaggaaaactaggaatctatgatgctgatggtgatggagattttgatgtggatgatgccaaagttttattaggacttaaagagagatctacttcagagccagcagtcccgccagaagaggctgagccacacactgagcccgaggagcaggttcctgtggaggcagaaccccagaatatcgaagatgaagcaaaagaacaaattcagtcccttctccatgaaatggtacacgcagaacatgttgagggagaagacttgcaacaagaagatggacccacaggagaaccacaacaagaggatgatgagtttcttatggcgactgatgtagatgatagatttgagaccctggaacctgaagtatctcatgaagaaaccgagcatagttaccacgtggaagagacagtttcacaagactgtaatcaggatatggaagagatgatgtctgagcaggaaaatccagattccagtgaaccagtagtagaagatgaaagattgcaccatgatacagatgatgtaacataccaagtctatgaggaacaagcagtatatgaacctctagaaaatgaagggatagaaatcacagaagtaactgctccccctgaggataatcctgtagaagattcacaggtaattgtagaagaagtaagcatttttcctgtggaagaacagcaggaagtaccaccagaaacaaatagaaaaacagatgatccagaacaaaaagcaaaagttaagaaaaagaagcctaaacttttaaataaatttgataagactattaaagctgaacttgatgctgcagaaaaactccgtaaaaggggaaaaattgaggaagcagtgaatgcatttaaagaactagtacgcaaataccctcagagtccacgagcaagatatgggaaggcgcagtgtgaggatgatttggctgagaagaggagaagtaatgaggtgctacgtggagccatcgagacctaccaagaggtggccagcctacctgatgtccctgcagacctgctgaagctgagtttgaagcgtcgctcagacaggcaacaatttctaggtcatatgagaggttccctgcttaccctgcagagattagttcaactatttcccaatgatacttccttaaaaaatgaccttggcgtgggatacctcttgataggagataatgacaatgcaaagaaagtttatgaagaggtgctgagtgtgacacctaatgatggctttgctaaagtccattatggcttcatcctgaaggcacagaacaaaattgctgagagcatcccatatttaaaggaaggaatagaatccggagatcctggcactgatgatgggagattttatttccacctgggggatgccatgcagagggttgggaacaaagaggcatataagtggtatgagcttgggcacaagagaggacactttgcatctgtctggcaacgctcactctacaatgtgaatggactgaaagcacagccttggtggaccccaaaagaaacgggctacacagagttagtaaagtctttagaaagaaactggaagttaatccgagatgaaggccttgcagtgatggataaagccaaaggtctcttcctgcctgaggatgaaaacctgagggaaaaaggggactggagccagttcacgctgtggcagcaaggaagaagaaatgaaaatgcctgcaaaggagctcctaaaacctgtaccttactagaaaagttccccgagacaacaggatgcagaagaggacagatcaaatattccatcatgcaccccgggactcacgtgtggccgcacacagggcccacaaactgcaggctccgaatgcacctgggcttggtgattcccaaggaaggctgcaagattcgatgtgccaacgagaccaagacctgggaggaaggcaaggtgctcatctttgatgactcctttgagcacgaggtatggcaggatgcctcatctttccggctgatattcatcgtggatgtgtggcatccggaactgacaccacagcagagacgcagccttccagcaatttagcatgaattcatgcaagcttgggaaactctggagagaggctgcctttctggttccatctccttgggtgtgaggatagaatttcgaacaccaagagtcaattcccttgacttgcagcccgagtaattcaaagcctcctcctagggtcagaagacactaaagggaatatttgcctcgctgcaattcatttaggaaacaccctgctgtgtgtcatctcatgacagcactggtcttctgccagtatttaaggtgaacatttgatagcttctaccttaccagccaaagatattttttccacatagaataggtctaattcaatgtataatgagaacatatgtagaaactgtgaatggattgctttagtttgtaatttttctatgcagttatatttttctagtgtagctagactattttgtcatcatgtaccactacatttttgtttattttaatgacaagctgtataaatgctttacttctagctatttaatggtagcattactggggaactcagacttccctcttttaattcttcttagtaaaagatactcatgaaaaaagcagttttattttcctaacaaaaaagaaagagctcattatgtcagtgtctatgaactgtacccatcccaactctcaaatcgtttggttttttttatcttgattgagatcctcttctcactatgctagtggtggagatattgacaaaatcctatttctttcaaagaggaacttttcacaccgaaaaaagagcatggaattattttatattgttataaaaatcccagatgcaaatttttttaatgccaattattagagcttctggggaaaaagtatagttcacggaaataaaactatgttctttcagggttgggtggataggtggctgctagggtgtctggctcctggcggctttgccatccatgaggcaagggctgggaacacagtgtctttgcctatggtagatccatgtgaatgtcaggaagccagctcttcagtcttggagatgatttctgctacaattctgtagaaagattaaggatggcagagtaaaaggttaccaagaatgccaggatgtttttcttgggcgtaggaggtccagattactttcctttttgatgaaagagtttggaagactgtcccatctctctggcttgagaaatctctgccattttaaacatcactgtgaaatagcaattattatcatctgtatttagttttaacattacccacaacatagaaataataggtaaaaatcgtcttgcctactcattccaaagatgatcaagtcattaatctagcaaagtattcatgtatcagattttgtatattttgaatcaaagctaactaggaatgttagatataagaatgtaatgatattcatgcactgaattctaagccaatatgaacaaaaatgctgcatgaatggcacatataggtcaccaaagttcattcacaggtagaaaaaacttgtgctttcttttccatctaaaaacaaaaggagactttctttatctcatttaaagaacagctctttgaaattgaaattgaccctttttgcttgaccttaaggagattagcttccagtagatgagtttgcaaaatacttttcctgttcttttgttttgctggtattgaaaacatcccactaaatcagatgaagaggcatgggaggaaaaatatccaaattaattactaaaatcgagaagagaaggcaaactcttgaaaagtaaaaaggtgtttgtgaccttcagtatttattgaacagaggaaataactgacaagggcaatacaattcaatgttcatgtagtaacattcatgtcacttgttgaatttggttctcatatgtatattgcatacacataaattcaaactataagtcgtcatttttgagccatcatcttacattcatgtaatgaaattatggaagagagtaaaaactagctcttaacttagtaaatataatatggtatttaaaatcaggtcactacagtaaggttctaagtattgccaattgaaaagctagaaatggtattactgttgcaaagtgttgtcaataattgactccaatagcattgtaaatacttgtatcccacaactattttaaacccaagcaataaaatggattttctaattcacttcaattctttatttctcttacctatctatgtcttggtacataagaaaagtgtttccatcactgcattggtagaattatttcagtgttattatttttgtgatttcgtatgtctacacaaaaatgaattagtttaatttatattgtgatacagttgtttgagaaatatttttaattctgtttcaactttatttctccaagtgtataatataaaaattacttctgttattgttctctaccaataggggaaaaaattaaaacattagatccattgagaaagagatgatgtaataaataattaagattagtaataatattatcaggggtgattatgaccagttgaataatctctttcccttgaattatttagctaacaaattaactctcccaaatatttaaaataatgtaaaatcatattttactgcccattattaactaaaatatttttgtttgactttgagcaccaactggtaatactaataaatacccatgtcatgcagatggctgggcgaataagagatgtctaaaaatatgcactggtcttggaaaacatggcacaagtaaggatatcatatatgatgtctgtttattttatgtctgatttcttttgaatgagtagttggggactccatttctaaggagactaggtaaataaaatgacctttgacatttcaaaaaaca

SEQ ID NO: 401979 - DNA, 5405 bp, Homo sapiens
ggaaggggcgtggccgtcgggcggcgagccgcgcgctctcgccccgggagggagtcacaggttcgtacacgcgaggccgggcgcgcgcagccggcaggcgggtgaagtcttcccaggtgctgcaggcggtgctgaggcacagggtctgctgcaggagcagcggcccgaacccgctccagcggcccgccgccgccagcggctcccgcgtcgcgtgtgtacccccgcgcactgaaggaggtccaccagccctcaccagcccccgcggaccgtgcaatggcccagcgtaagaatgccaagagcagcggcaacagcagcagcagcggctccggcagcggtagcacgagtgcgggcagcagcagccccggggcccggagagagacaaagcatggaggacacaagaatgggaggaaaggcggactctcaggaacttcattcttcacgtggtttatggtgattgcattgctgggcgtctggacatctgtagctgtcgtttggtttgatcttgttgactatgaggaagttctagccaaagcaaaggacttccgttataacttatcagaggtgcttcaaggaaaactaggaatctatgatgctgatggtgatggagattttgatgtggatgatgccaaagttttattaggacttaaagagagatctacttcagagccagcagtcccgccagaagaggctgagccacacactgagcccgaggagcaggttcctgtggaggcagaaccccagaatatcgaagatgaagcaaaagaacaaattcagtcccttctccatgaaatggtacacgcagaacatgttgagggagaagacttgcaacaagaagatggacccacaggagaaccacaacaagaggatgatgagtttcttatggcgactgatgtagatgatagatttgagaccctggaacctgaagtatctcatgaagaaaccgagcatagttaccacgtggaagagacagtttcacaagactgtaatcaggatatggaagagatgatgtctgagcaggaaaatccagattccagtgaaccagtagtagaagatgaaagattgcaccatgatacagatgatgtaacataccaagtctatgaggaacaagcagtatatgaacctctagaaaatgaagggatagaaatcacagaagtaactgctccccctgaggataatcctgtagaagattcacaggtaattgtagaagaagtaagcatttttcctgtggaagaacagcaggaagtaccaccagaaacaaatagaaaaacagatgatccagaacaaaaagcaaaagttaagaaaaagaagcctaaacttttaaataaatttgataagactattaaagctgaacttgatgctgcagaaaaactccgtaaaaggggaaaaattgaggaagcagtgaatgcatttaaagaactagtacgcaaataccctcagagtccacgagcaagatatgggaaggcgcagtgtgaggatgatttggctgagaagaggagaagtaatgaggtgctacgtggagccatcgagacctaccaagaggtggccagcctacctgatgtccctgcagacctgctgaagctgagtttgaagcgtcgctcagacaggcaacaatttctaggtcatatgagaggttccctgcttaccctgcagagattagttcaactatttcccaatgatacttccttaaaaaatgaccttggcgtgggatacctcttgataggagataatgacaatgcaaagaaagtttatgaagaggtgctgagtgtgacacctaatgatggctttgctaaagtccattatggcttcatcctgaaggcacagaacaaaattgctgagagcatcccatatttaaaggaaggaatagaatccggagatcctggcactgatgatgggagattttatttccacctgggggatgccatgcagagggttgggaacaaagaggcatataagtggtatgagcttgggcacaagagaggacactttgcatctgtctggcaacgctcactctacaatgtgaatggactgaaagcacagccttggtggaccccaaaagaaacgggctacacagagttagtaaagtctttagaaagaaactggaagttaatccgagatgaaggccttgcagtgatggataaagccaaaggtctcttcctgcctgaggatgaaaacctgagggaaaaaggggactggagccagttcacgctgtggcagcaaggaagaagaaatgaaaatgcctgcaaaggagctcctaaaacctgtaccttactagaaaagttccccgagacaacaggatgcagaagaggacagatcaaatattccatcatgcaccccgggactcacgtgtggccgcacacagggcccacaaactgcaggctccgaatgcacctgggcttggtgattcccaaggaaggctgcaagattcgatgtgccaacgagaccaagacctgggaggaaggcaaggtgctcatctttgatgactcctttgagcacgaggtatggcaggatgcctcatctttccggctgatattcatcgtggatgtgtggcatccggaactgacaccacagcagagacgcagccttccagcaatttagcatgaattcatgcaagcttgggaaactctggagagaggctgcctttctggttccatctccttgggtgtgaggatagaatttcgaacaccaagagtcaattcccttgacttgcagcccgagtaattcaaagcctcctcctagggtcagaagacactaaagggaatatttgcctcgctgcaattcatttaggaaacaccctgctgtgtgtcatctcatgacagcactggtcttctgccagtatttaaggtgaacatttgatagcttctaccttaccagccaaagatattttttccacatagaataggtctaattcaatgtataatgagaacatatgtagaaactgtgaatggattgctttagtttgtaatttttctatgcagttatatttttctagtgtagctagactattttgtcatcatgtaccactacatttttgtttattttaatgacaagctgtataaatgctttacttctagctatttaatggtagcattactggggaactcagacttccctcttttaattcttcttagtaaaagatactcatgaaaaaagcagttttattttcctaacaaaaaagaaagagctcattatgtcagtgtctatgaactgtacccatcccaactctcaaatcgtttggttttttttatcttgattgagatcctcttctcactatgctagtggtggagatattgacaaaatcctatttctttcaaagaggaacttttcacaccgaaaaaagagcatggaattattttatattgttataaaaatcccagatgcaaatttttttaatgccaattattagagcttctggggaaaaagtatagttcacggaaataaaactatgttctttcagggttgggtggataggtggctgctagggtgtctggctcctggcggctttgccatccatgaggcaagggctgggaacacagtgtctttgcctatggtagatccatgtgaatgtcaggaagccagctcttcagtcttggagatgatttctgctacaattctgtagaaagattaaggatggcagagtaaaaggttaccaagaatgccaggatgtttttcttgggcgtaggaggtccagattactttcctttttgatgaaagagtttggaagactgtcccatctctctggcttgagaaatctctgccattttaaacatcactgtgaaatagcaattattatcatctgtatttagttttaacattacccacaacatagaaataataggtaaaaatcgtcttgcctactcattccaaagatgatcaagtcattaatctagcaaagtattcatgtatcagattttgtatattttgaatcaaagctaactaggaatgttagatataagaatgtaatgatattcatgcactgaattctaagccaatatgaacaaaaatgctgcatgaatggcacatataggtcaccaaagttcattcacaggtagaaaaaacttgtgctttcttttccatctaaaaacaaaaggagactttctttatctcatttaaagaacagctctttgaaattgaaattgaccctttttgcttgaccttaaggagattagcttccagtagatgagtttgcaaaatacttttcctgttcttttgttttgctggtattgaaaacatcccactaaatcagatgaagaggcatgggaggaaaaatatccaaattaattactaaaatcgagaagagaaggcaaactcttgaaaagtaaaaaggtgtttgtgaccttcagtatttattgaacagaggaaataactgacaagggcaatacaattcaatgttcatgtagtaacattcatgtcacttgttgaatttggttctcatatgtatattgcatacacataaattcaaactataagtcgtcatttttgagccatcatcttacattcatgtaatgaaattatggaagagagtaaaaactagctcttaacttagtaaatataatatggtatttaaaatcaggtcactacagtaaggttctaagtattgccaattgaaaagctagaaatggtattactgttgcaaagtgttgtcaataattgactccaatagcattgtaaatacttgtatcccacaactattttaaacccaagcaataaaatggattttctaattcacttcaattctttatttctcttacctatctatgtcttggtacataagaaaagtgtttccatcactgcattggtagaattatttcagtgttattatttttgtgatttcgtatgtctacacaaaaatgaattagtttaatttatattgtgatacagttgtttgagaaatatttttaattctgtttcaactttatttctccaagtgtataatataaaaattacttctgttattgttctctaccaataggggaaaaaattaaaacattagatccattgagaaagagatgatgtaataaataattaagattagtaataatattatcaggggtgattatgaccagttgaataatctctttcccttgaattatttagctaacaaattaactctcccaaatatttaaaataatgtaaaatcatattttactgcccattattaactaaaatatttttgtttgactttgagcaccaactggtaatactaataaatacccatgtcatgcagatggctgggcgaataagagatgtctaaaaatatgcactggtcttggaaaacatggcacaagtaaggatatcatatatgatgtctgtttattttatgtctgatttcttttgaatgagtagttggggactccatttctaaggagactaggtaaataaaatgacctttgacatttcaaaaaaca

SEQ ID NO: 401980 - DNA, 3072 bp, Homo sapiens
tggtcctgcagtttgtgggcctgtgtgcggcacaaactgcaggctccgaatgcacctgggcttggtgattcccaaggaaggctgcaagattcgatgtgccaacgagaccaagacctgggaggaaggcaaggtgctcatctttgatgactcctttgagcacgaggtatggcaggatgcctcatctttccggctgatattcatcgtggatgtgtggcatccggaactgacaccacagcagagacgcagccttccagcaatttagcatgaattcatgcaagcttgggaaactctggagagaggctgcctttctggttccatctccttgggtgtgaggatagaatttcgaacaccaagagtcaattcccttgacttgcagcccgagtaattcaaagcctcctcctagggtcagaagacactaaagggaatatttgcctcgctgcaattcatttaggaaacaccctgctgtgtgtcatctcatgacagcactggtcttctgccagtatttaaggtgaacatttgatagcttctaccttaccagccaaagatattttttccacatagaataggtctaattcaatgtataatgagaacatatgtagaaactgtgaatggattgctttagtttgtaatttttctatgcagttatatttttctagtgtagctagactattttgtcatcatgtaccactacatttttgtttattttaatgacaagctgtataaatgctttacttctagctatttaatggtagcattactggggaactcagacttccctcttttaattcttcttagtaaaagatactcatgaaaaaagcagttttattttcctaacaaaaaagaaagagctcattatgtcagtgtctatgaactgtacccatcccaactctcaaatcgtttggttttttttatcttgattgagatcctcttctcactatgctagtggtggagatattgacaaaatcctatttctttcaaagaggaacttttcacaccgaaaaaagagcatggaattattttatattgttataaaaatcccagatgcaaatttttttaatgccaattattagagcttctggggaaaaagtatagttcacggaaataaaactatgttctttcagggttgggtggataggtggctgctagggtgtctggctcctggcggctttgccatccatgaggcaagggctgggaacacagtgtctttgcctatggtagatccatgtgaatgtcaggaagccagctcttcagtcttggagatgatttctgctacaattctgtagaaagattaaggatggcagagtaaaaggttaccaagaatgccaggatgtttttcttgggcgtaggaggtccagattactttcctttttgatgaaagagtttggaagactgtcccatctctctggcttgagaaatctctgccattttaaacatcactgtgaaatagcaattattatcatctgtatttagttttaacattacccacaacatagaaataataggtaaaaatcgtcttgcctactcattccaaagatgatcaagtcattaatctagcaaagtattcatgtatcagattttgtatattttgaatcaaagctaactaggaatgttagatataagaatgtaatgatattcatgcactgaattctaagccaatatgaacaaaaatgctgcatgaatggcacatataggtcaccaaagttcattcacaggtagaaaaaacttgtgctttcttttccatctaaaaacaaaaggagactttctttatctcatttaaagaacagctctttgaaattgaaattgaccctttttgcttgaccttaaggagattagcttccagtagatgagtttgcaaaatacttttcctgttcttttgttttgctggtattgaaaacatcccactaaatcagatgaagaggcatgggaggaaaaatatccaaattaattactaaaatcgagaagagaaggcaaactcttgaaaagtaaaaaggtgtttgtgaccttcagtatttattgaacagaggaaataactgacaagggcaatacaattcaatgttcatgtagtaacattcatgtcacttgttgaatttggttctcatatgtatattgcatacacataaattcaaactataagtcgtcatttttgagccatcatcttacattcatgtaatgaaattatggaagagagtaaaaactagctcttaacttagtaaatataatatggtatttaaaatcaggtcactacagtaaggttctaagtattgccaattgaaaagctagaaatggtattactgttgcaaagtgttgtcaataattgactccaatagcattgtaaatacttgtatcccacaactattttaaacccaagcaataaaatggattttctaattcacttcaattctttatttctcttacctatctatgtcttggtacataagaaaagtgtttccatcactgcattggtagaattatttcagtgttattatttttgtgatttcgtatgtctacacaaaaatgaattagtttaatttatattgtgatacagttgtttgagaaatatttttaattctgtttcaactttatttctccaagtgtataatataaaaattacttctgttattgttctctaccaataggggaaaaaattaaaacattagatccattgagaaagagatgatgtaataaataattaagattagtaataatattatcaggggtgattatgaccagttgaataatctctttcccttgaattatttagctaacaaattaactctcccaaatatttaaaataatgtaaaatcatattttactgcccattattaactaaaatatttttgtttgactttgagcaccaactggtaatactaataaatacccatgtcatgcagatggctgggcgaataagagatgtctaaaaatatgcactggtcttggaaaacatggcacaagtaaggatatcatatatgatgtctgtttattttatgtctgatttcttttgaatgagtagttggggactccatttctaaggagactaggtaaataaaatgacctttgacatttcaaaaaaca

SEQ ID NO: 401981 - DNA, 2857 bp, Homo sapiens
ggaaggggcgtggccgtcgggcggcgagccgcgcgctctcgccccgggagggagtcacaggttcgtacacgcgaggccgggcgcgcgcagccggcaggcgggtgaagtcttcccaggtgctgcaggcggtgctgaggcacagggtctgctgcaggagcagcggcccgaacccgctccagcggcccgccgccgccagcggctcccgcgtcgcgtgtgtacccccgcgcactgaaggaggtccaccagccctcaccagcccccgcggaccgtgcaatggcccagcgtaagaatgccaagagcagcggcaacagcagcagcagcggctccggcagcggtagcacgagtgcgggcagcagcagccccggggcccggagagagacaaagcatggaggacacaagaatgggaggaaaggcggactctcaggaacttcattcttcacgtggtttatggtgattgcattgctgggcgtctggacatctgtagctgtcgtttggtttgatcttgttgactatgaggaagttctaggaaaactaggaatctatgatgctgatggtgatggagattttgatgtggatgatgccaaagttttattaggacttaaagagagatctacttcagagccagcagtcccgccagaagaggctgagccacacactgagcccgaggagcaggttcctgtggaggcagaaccccagaatatcgaagatgaagcaaaagaacaaattcagtcccttctccatgaaatggtacacgcagaacatgttgagggagaagacttgcaacaagaagatggacccacaggagaaccacaacaagaggatgatgagtttcttatggcgactgatgtagatgatagatttgagaccctggaacctgaagtatctcatgaagaaaccgagcatagttaccacgtggaagagacagattccagtgaaccagtagtagaagatgaaagattgcaccatgatacagatgatgtaacataccaagtctatgaggaacaagcagtatatgaacctctagaaaatgaagggatagaaatcacagaagtaactgctccccctgaggataatcctgtagaagattcacaggtaattgtagaagaagtaagcatttttcctgtggaagaacagcaggaagtaccaccagaaacaaatagaaaaacagatgatccagaacaaaaagcaaaagttaagaaaaagaagcctaaacttttaaataaatttgataagactattaaagctgaacttgatgctgcagaaaaactccgtaaaaggggaaaaattgaggaagcagtgaatgcatttaaagaactagtacgcaaataccctcagagtccacgagcaagatatgggaaggcgcagtgtgaggatgatttggctgagaagaggagaagtaatgaggtgctacgtggagccatcgagacctaccaagaggtggccagcctacctgatgtccctgcagacctgctgaagctgagtttgaagcgtcgctcagacaggcaacaatttctaggtcatatgagaggttccctgcttaccctgcagagattagttcaactatttcccaatgatacttccttaaaaaatgaccttggcgtgggatacctcttgataggagataatgacaatgcaaagaaagtttatgaagaggtgctgagtgtgacacctaatgatggctttgctaaagtccattatggcttcatcctgaaggcacagaacaaaattgctgagagcatcccatatttaaaggaaggaatagaatccggagatcctggcactgatgatgggagattttatttccacctgggggatgccatgcagagggttgggaacaaagaggcatataagtggtatgagcttgggcacaagagaggacactttgcatctgtctggcaacgctcactctacaatgtgaatggactgaaagcacagccttggtggaccccaaaagaaacgggctacacagagttagtaaagtctttagaaagaaactggaagttaatccgagatgaaggccttgcagtgatggataaagccaaaggtctcttcctgcctgaggatgaaaacctgagggaaaaaggggactggagccagttcacgctgtggcagcaaggaagaagaaatgaaaatgcctgcaaaggagctcctaaaacctgtaccttactagaaaagttccccgagacaacaggatgcagaagaggacagatcaaatattccatcatgcaccccgggactcacgtgtggccgcacacagggcccacaaactgcaggctccgaatgcacctgggcttggtgattcccaaggaaggctgcaagattcgatgtgccaacgagaccaagtatgggtcctctgttatccgtcatatccgtcacctcagaggatgagagtttgttacaacacagttgtgttcctttggattacttatcttcttttgtagctgaagtagactggagcaaagtgatattaatccaaactcttaagtctatatcccttcttggtgctttctattagcctggagacattgcccagctctagggctgccctcctccattatttctcggcagagtacttatctagttgaggagctgccttgtttctctctctgggtagacagatgtgcattcagagtcagccaacatgcattgagccctgcagatgttatgcattgtgcttcctgctttgcaacttgacttattcatgactacaagaagtacccctaactgaagaactcaccccatgatatttatacgttttgatatagaggagatggtatggtgcaatggaagctggctgcctttttcaaatcccagctctaacacctaacctgtgtaaccttggctagttacttaatcc

SEQ ID NO: 401982 - DNA, 1065 bp, Homo sapiens
ggaaggggcgtggccgtcgggcggcgagccgcgcgctctcgccccgggagggagtcacaggttcgtacacgcgaggccgggcgcgcgcagccggcaggcgggtgaagtcttcccaggtgctgcaggcggtgctgaggcacagggtctgctgcaggagcagcggcccgaacccgctccagcggcccgccgccgccagcggctcccgcgtcgcgtgtgtacccccgcgcactgaaggaggtccaccagccctcaccagcccccgcggaccgtgcaatggcccagcgtaagaatgccaagagcagcggcaacagcagcagcagcggctccggcagcggtagcacgagtgcgggcagcagcagccccggggcccggagagagacaaagcatggaggacacaagaatgggaggaaaggcggactctcaggaacttcattcttcacgtggtttatggtgattgcattgctgggcgtctggacatctgtagctgtcgtttggtttgatcttgttgactatgaggaagttctaggaaaactaggaatctatgatgctgatggtgatggagattttgatgtggatgatgccaaagttttattaggacttaaagagagatctacttcagagccagcagtcccgccagaagaggctgagccacacactgagcccgaggagcaggttcctgtggaggcagaaccccagaatatcgaagatgaagcaaaagaacaaattcagtcccttctccatgaaatggtacacgcagaacatgttgagggagaagacttgcaacaagaagatggacccacaggagaaccacaacaagaggatgatgagtttcttatggcgactgatgtagatgatagatttgagaccctggaacctgaagtatctcatgaagaaaccgagcatagttaccacgtggaagagacagtttcacaagactgtaatcaggatatggaagagatgatgtctgagcaggaaaatccagattccagtgaaccagtagtagaagatgaaagattgcaccatgatacagatgatgtaacataccaagtctatgagaactggagg

SEQ ID NO: 401983 - DNA, 1172 bp, Homo sapiens
ggaaggggcgtggccgtcgggcggcgagccgcgcgctctcgccccgggagggagtcacaggttcgtacacgcgaggccgggcgcgcgcagccggcaggcgggtgaagtcttcccaggtgctgcaggcggtgctgaggcacagggtctgctgcaggagcagcggcccgaacccgctccagcggcccgccgccgccagcggctcccgcgtcgcgtgtgtacccccgcgcactgaaggaggtccaccagccctcaccagcccccgcggaccgtgcaatggcccagcgtaagaatgccaagagcagcggcaacagcagcagcagcggctccggcagcggtagcacgagtgcgggcagcagcagccccggggcccggagagagacaaagcatggaggacacaagaatgggaggaaaggcggactctcaggaacttcattcttcacgtggtttatggtgattgcattgctgggcgtctggacatctgtagctgtcgtttggtttgatcttgttgactatgaggaagttctagccaaagcaaaggacttccgttataacttatcagaggtgcttcaaggtaggctattggagttgcatttcaagtctacgtgtgttactctctaatggctcatcctttttctactaatttaattattatctacatcagaatataagtgataggaccaatttcccattatgggtttgtcagaaagggtagtattttctatcttttactgtttcttgaattctgtactctgcatagccttgattagtactttttgttttcttagcagttgaaataacatccttatctcttctttcatcataatcattttaaatgtgtatgtgtttgctaagtcagacttctatatagcaagttaaccattttcctaggtagagcaagggctctggggagataaagattgatcagaactaatctgagccaaaatttctgcctgttcttctgtaattttttaatgtactttgtgttaaagaaatgataacaattgccaaaattttttttagtactaatgctgtatttgagaaagctgtttaaaaaattgctgtacattaacattattatgtttctccacagtcattgtccaataatgaattagaatcatgtagattttaggatgcttttttagggagttgaatatatttgactttttgaaatg

SEQ ID NO: 401984 - DNA, 2342 bp, Homo sapiens
acatctgtagctgtcgttggtttgatcttgttgactatgaggaagttctaggaaaactaggaatctatgatgctgatggtgatggagattttgatgtggatgatgccaaagttttattacttaaagagagatctacttcagagccagcagtcccgccagaagaggctgagccacacactgagcccgaggagcaggttcctgtggaggcagaaccccagaatatcgaagatgaagcaaaagaacaaattcagtcccttctccatgaaatggtacacgcagaacatgaaaccgagcatagttaccacgtggaagagacagtttcacaagactgtaatcaggatatggaagagatgatgtctgagcaggaaaatccagattccagtgaaccagtagtagaagatgaaagattgcaccatgatacagatgatgtaacataccaagtctatgaggaacaagcagtatatgaacctctagaaaatgaagggatagaaatcacagaagtaactgctccccctgaggataatcctgtagaagattcacaggtaattgtagaagaagtaagcatttttcctgtggaagaacagcaggaagtaccaccagatacttaaagcttcaaaaagactgcccctaccaccacaggaggaccagcctaaccatacgctccaaaagatggctgtgatagatcttgtgaagcaattactgagcagatcaagatctttgggaaggaacactaaagatgttttgaatgaattatagtccactggcattttagtgtatttttttttctttttagaaacacacatttctaaaaatgtcatgttacattcctgcatgtcccttttgatagcattagtggatccattggatttcttttttctttttgtgagacagcttttagtcttacctgaatttatgtgtgtttttccgacagtggttaataattatattggtgatgtagcagcaattgtgttggcagggttttcatatattattagtaattaacactaactgttggactgacttgtgtacactgtgttaaacatgatttaaaagctattaagagtactttgtgttagcactcttaaaaacgctaacagagatcatcattagctgtgaagatttgagttgtatatacctgcactgatattcttatcaaaaatttctacattagctttaagtgttcagattaacacttttgaaatttttgtagcttttagctgattaattagaaaaattaatatttcagtgaaagttttaaattatcatttatttatttttttaaatgagaggggaaagctgaaattccttgttaagacacaaggaaaaagaatggccctactattatcatgcaaaaatgcctttgttggcacctcagattaatcatataatagctatagtctcttcagcattttgtttaaattttagaaaacctgtataaattactggtgcataacttaaagattattctgcctttggctaattgagtaattcccctccagcactagagaccgctcagtgctcttactagatgaactcagtaacgccttgagctgggttgattgaggatgtgtgaaaagctcacagagcccgatgcctgctgctatttcacggcaatgagcctttttctttctacactgaagattttcttcttatttaatggtggtttattttgggctcagaaataattgctctgttgaaaataatcctttgtcagaaaagaaggtagctaccacatcattttgaaaggaccatgagcaactataagcaaagccataagaagtggtttgatcgatatattaggggtagctcttgattttgttaacattaagataaggtgactttttccccctgcttttaggattaaaatcaaagatacttctatatttttatcactatagatcatagttattatacaatggtagtgagtcctgcatggggtactcgatgtgtaatgaaaacctggaaataataagataataagaaaagcaataattttctaaagctgtgctgtcggtgatacagagacgatactcaaattataataaaactcttcattttgtgaattatagaagctactttttataaagccatatttttttagggaaactaaggagtgacatagaactgatgaatgagcaaaagtaagttttgctggatttttgtagaactctggacgttgaggattcattatgctgtggttaactttaaatatttttgaattccaaatatctgaattaatgagccttgtgtttacaaatatgtgccattgtgcaacatcggtggattttctaaaaataatgtaaatgtcttctattaaatgttgagtgcaataaaatccagaa

SEQ ID NO: 401985 - DNA, 598 bp, Homo sapiens
atatttccaagagatggcagataggtccctgggggcctgtggccagcctggagagggagagaccaagccagaggctgtggaaagctctagagactttgtactagaaaggctgctgttggtggcagagcttacatggccagggatcccggaggacctggaaggggttttaatggacttttgagaatcaaagtgaactgccagggacaaacaagagtggcgaggaaatggaagcagtcataccactcaggctggaaaatcgctctaggaatggcaagaagggctctttctcacttggatggtctccagaaagtcagctgccatgtcacgaagtgccctgtgagaaggacctgtaaggagggacggagggaggcctctaaatgacagccttcgaggaactgaatcctgctggtgaccatgtgagggagcttggactccggtccccctgtgttgagccttcagatgagttggcagccccagctggtggcatgactgtaacgtcctgaaacaccttcagccagaaagcattcagctaaaccacacctgtatttctgacccaaagaaattgtgagataataaacatttcttctcttgaaaaaaa

SEQ ID NO: 401986 - DNA, 711 bp, Homo sapiens
catcaagaatggtccaggttcttctagatgatctgcacaaatggttcctctcctcctgcctggtgtctgccattagcattggaataaagttcctgctgaaaatccacatctcccctgggtccggtgttctggaagcgagagagacaatgtcacacttcaaggaggcagctctctagacaggaaagttattcacgtcccatgtcaattgagaaatgcaattttatctgctgcctttcattctataccctgcttctgaaccatcgtgttcaactgtgaaactcacactttggtgaccacgactccaaaactcacttaatacacccaaggtcagccccagtgatctgcttcatagcaaggactttgggtgggtctgcccagggagtagggcaccctcagagaatgtggctttggactttatcacagctggggccttttgtgtcacttaagatctaaacttgtaaccatgctagatgtgtttctaatgtgacaacatcacgaaccacgagtccagaagcctaatccttaatcctacctcctcatgatgaagtctcatgctctgtgctcaacgtggttagctgcacaagatgtaaaccaaagcttcactgaaccctcgacccaaatcagtaactcaagtgcgtcaatcataatgaacctccccaaactcagtttttatgattatttttgaggcagggtctcactctgtcgcccaga

SEQ ID NO: 401987 - DNA, 836 bp, Homo sapiens
gcgcgccgcagccccgcgcgtccggccgccgcccgcgcccatccagcagcctcgccggagccacaccgcgggacagacgcggccgcggcgcgtcccggcccggtccagcccagcccagcccagtcccggcaccgggcggcccggcggccggcccgcccccgagggcgccgggcgcggcgggaggatgccgaagccgacgctgctgctgcgcgggggctgggagcgcgagcgcagccccggggactcggagctgggccgccagttccgggactggtgcttgcgcacctacggcgactcggccaaaaccaagacggtgacacgcagcaaataccagcggatcgccgaggtcctgcagggcggcggcgggactggcgcgggcagcggccccgcagccggcgagaaaggcaagttccagttctgggtgcgctccaagggcttccgcctgggcagcggccgggaacccaagatgggccaagtggtgtatgtgccggtcaagacgggctcgctgtgtagtattcaattttatggatgtaccataatttacttatccagtcccctgttaatggacatttggattgtttatgatattctgctctcgcaagacttcagtgaacatccctgaatatggatggccatttcaagcatgggcgagtttataccaaggagttgaattgctgcgtctgagggcatgtgcttttggagatgatacagactgccctccacagacagggaaccaattttcactcccggcaataatgtctagaacgtgagccattcgtgtgatgaccgaggttactgtatattgagcattcagtgtatgctggcactgtgcatcc

SEQ ID NO: 401988 - DNA, 336 bp, Homo sapiens
gccccagcgttgggagacttgaaaggaatcaccaaccaagttaatgcaataaatttccatatatagatcaattggatgttttgtccccagcttcctaggcctttaataaactgaattgttttggtatcactggatgaaaggttctgtaaaagttcaaagtattgttatttggggcattcacacctgcatgtttaaaatgcctttgtgcagaatgtagtccaatctgctttcaaatcagaccttcaaagaagggtagattcatccatgtgacagatccccttaggtgcttctctaaaagaaaaagttaagctagcaggtctacccccactcattatc

SEQ ID NO: 401989 - DNA, 614 bp, Homo sapiens
accctgtctcagggaaaaaaaaaaagtactttgtaatctgtaaggtttatttcaacacacacaaaaaaagtgtatatgctccacaatgcctgtgaatatacacacacacaccacatcatataccaagcctggctgtgtcttctcacaaatgcgctgctaggcaccacccccagttctagaatcacaccagccagttcaccctccagatggttcaccctcaacttcataaaagttctttacctaatctactgacaggctcatccctgacctaattttaaagatttcctaggagctgcaatgggaatcctggacctcagcctggacaaagaacagctgcaggtcattctcatgtgtggacacggaagccctgcctgcctttgctggccagctgggctgagtgggcctgggaaattaaggctgcagggttggtcccaggcagtcttgctgaagcttgccacatcccccagcctcttggatttgccaggatccaagagcatggactttaggaattcctggtggaggagtgaagaaaatgtgacagggtgtcctaagcccgatctacaggaagaaaactggaaataagactgaggacttagtttaagatgttcctactc

SEQ ID NO: 401990 - DNA, 271 bp, Homo sapiens
tgtatgttcaatttattgtatgtcaattataccttaataaagctttaaaaagggggggtaaaaatttggataaactttacctctttgcctcttcaaagaaaaaatggtcaataagcacaggaaaatatgctcaatattattagtcatcaggaaagtcatcagtgatatattactttataaccactagaatgacaaaaaataaaaagaccaggaataccaagtgttggtgaagttgtagagcaactgggcgacagagcaagactccatctca

SEQ ID NO: 401991 - DNA, 203 bp, Homo sapiens
cctctgttttgaggctgtgtgcagtttacatagacaccttcctgttacctaaagaacatctctgtctgtctggatccatctcttgtcgatctagaactcgagtggcaggtgggaaaccatcccccagtgtgttgtgtttgtaatttgaaaattgttttcaagaaatttttgcaaaaacaggaaaaatcttttacacattgatt

SEQ ID NO: 401992 - DNA, 471 bp, Homo sapiens
caggtggaacagctgctaaaccttcccagtatttctggcaaaccctttcttttaaaacttcaaaataagatgactggctgcattgttgcttgttggcattttccagttggaagaacagctcttattgaaaagcctcacctgggctccacaaagtgaggctgtcctgactaatttggctaaattaccttactcttggtacctcacagtcagtgaaaagatttacggcaaccaatgatgggaggctgctatgaaagacatggtaaaatataacaacatacagggcgcaggagtgggaaactacatttccccgtcctttcccagtggaaaaaaacaaccaacaaacatttgggctatgagttttttaaagaatgagctgaatgtttaaaattaattatttacatattattacttggcctatctctagatcatctgtaaaaattatgaaataaaagcttaaaaccactatttatc

SEQ ID NO: 401993 - DNA, 510 bp, Homo sapiens
cttctccagctttctggcaataccaaggggcagacccgggaatgggttgttcagtcactgccgtaccgcccatgagcggcagagggcagcaaaacacactcatcggacgggcatcaagggagcctgaggataaccagagcttgaaaatgcaatcaacccatgaaaatgtttttaaagaccatgattctgttcatcaaggagacatttaaagttataagaatcatctgaagtatgaatgaatatcgtaaggatttcaccaaatctatacagttcattccatcgtcaacatctaaaacaatgctgaaacagagcaagctttccagtcttactttacgagcaaaatcaagatctacatactacaactttcacttacgtttctccatctaacccatcctctctttcaataactgtaactgtttgattgaagactgcatcttggaatacattgccctgtttaagaaaataaaataatcagaaaaatctaaatgcaataaaggaagtaaaacatgt

SEQ ID NO: 401994 - DNA, 5953 bp, Homo sapiens
  misc_feature (1898)..(1898): n is a, c, g, or t
tttgcttctattttggattcctcgtgcgtcttgagaccaagcaggaatatgcactggtactttagaaaacatttcatgttgcacacaaatactttcatgatcagctttaatttaagggacatgtaaataaaaagatgcatttgacaggacagcagactagttcaagcaggaggttagaccagtaacaacaaccaagaaagcaaagtgctcgtttccatcttggctttaccacacttacaaactgatacccaaataacagaaatgtttctcaaagctgcacaagaattttaaggattcatgaccccactttcattaaatagtcccagaagatagctaaataacattttcagatagaacctcacactgcataagtttcataacaaacaaacctaagatatgctgacagaaatcacattgagtttgcaagcactcaaatagaaaacccaagacctccggcaacaaattagaaaatatgaacagaaatattttaaaccacaagtatttcatcccaactaaattccaatttcttcaatgttctctgagttgttagatttcaaagtgaagagaactgaaatctctttttattcatagcagagccaaaactggaagtcacttattaaatacctgtgtacaaaacaccatacttggggctatatgcgatttcaggttggataaacgagtcatgttgaatgacaaaaagttagactggggagatttatggagagaagcaagcacctgtgatttgttggtttggcgttacaataaacactgtaagtgaaaatgagtcacaggcagttagaatggcgttaaggaaaccatttaggtctaaaaatcaggactgaagtgatcaacagttaacagatgaagccatgagaactggcacgctctggaaaggctggtgcagagagcaggacggtgagcctgagtgagcctggagttagtcaacagattcctcaacagaaaaggagtgaggagcagggtcaaagaaatgaaggtgaatttggggggtggtggtcaatgggttaaacgtacaagttgaggccgaggaactgaggctgaagaaggttctggcaagtggagaaccatgagatcctgacagagcaggcttttgtgggcagaagccatattagaagaagagctaaaggaaagctgaaaacctggcgacgaaaaggaagccaagaacataggagatattttgacaaaacggaaaaacaacagaacaggaagtgaggcaggagaaccacagagatggaagccaggaggtgtccaattagacgggcacaagagaaaaacagccagagaccgagaaaacggcgggaaggaaaggttccatctggagaaaaaagcctctcaagactggaagggacaggagctggtgaccatgaagcagttcagactcagctctgagccccttgtgtggaccacaagcagcactgcaaagtcctcgctgtagagagaagaccatagatgcacacagacggggttatcccttgaaaccagatccgggaagccatcagtcaaaaagcctgtgtggtcacagatgcttactggtggttcctgaaatgagtatttctaggcagggggcttcagtataaaccagatgtgtgctagctgggtggacttcaagtaaggagtcaagacaaaacacttagagtgaccttttggccactgctgtgtctgcaggctcagcctgctctagatctgattcccacagtggagggacaaagggccagcagcttgtaggaccaaatgagaaaaatacataatcattatgttttagccagaaaaaggcaacttgattatgaactggatgacatatcaaatgcaaggccttaaaatgcattcactctaataaactgctctgtagaattcaagggaatgaaatccgcttctcatangtaccaaggaccaactgctttgaatcttccactgtggatgatggcaactggtccttttaggagagccattttccagacagtcttgtctttatttatttattttttaattgttagtagcttttacttattatttatgtacttattttttgagacagtctcactctgtcacccaggctggagtgcagtggtgcaaccttgactcactacaacctcctcctcctgggttcaagtgattctcctgcctcagcctcatgagtagctgggattacaggcgtgcaccacctcgctcggctaattgtttttgttcttttttgagatggagtctcgttctatctcccaggctggagtgcagtggcacgatctcagctcaccacaatctccacctcccaggtttaagcaattctcctgcctcagcctcccaagtagctgggattacaggcatgcaccaccacacctggctaatttttgtatttttagtagaggcgaggtttcactatgttcgccaggatggtcttgaactcctgacctcaggtgttctgcccaccttggcctcccaaagtgttgggattacaggtgtgagccaccgtgcccggcctttttgtattttttagtagagatggggtttcaccatgttggccaggctggtcttgaactcctgacctaaagtgatccacccacctcagcctcccaaagtgctggaattacaggagtgagccaccatgccctgcccagtctttataaatgaagcttgactctggactgtgatagcagaaacaaatacaggcagtgcctcagagaatacaaaatatcaagcaaatcctaagtgttgaagctagaacccaggtgagtgcactctgcattactgagaatgtgctccctgccaaaaggctcctaccctattccaaccaagccggaaatggcaacagaccaaacgtgaggagtgagtgcctctgtgctccttgaggctgtttcattacagataacaaggttacctagggcagttgtgaagatgaaatgaggatgtgtgtggaagggcagagcagatgcttgatgttctccatctgaacactactcttgaccacagtatttctcattctcctttctgaaatgcctctaggccttaagcgcctatttctataaatgttgggtgatcagaccaatatggtttctgaaaaaactgttcagaaatagactaattttctttgggtggttcagtctgatgctgaaataaattgcaagatgattttcaaaaataacatgaaccccaacagcttcactgagaaatatggagcctcttcaaacgtgtttttaaaaagaactggatgtgcaggtgtaagagatttattacaaaacaaaaactccccttgccagccttattactctggctcatcattaaaatccagtgctagccatattacatgcccatcttaaaacttttatcctttagttacaaaaagaatactatgtagcttacatattcagaatttacctactaccccaccacatcaaagtccataaggtaccatatactcttccccgccccatgcttcatgggatgttattacagtatggtgctttacagcgaaaatgagagcagtcacttaagcggcttactgagacccaggcaatgttctaagcagctacacacagtaactcctaacaaccttaggaggcaggaaccaaaagctgaagcatcatacaacttgcctccaactaagaggggatctggggttcaaacccaggcagcctgacatgagcgtttcctttttttttttttctcttttgctaagtaaaaagtaggtttaagggaagaatcatttatagtaacactgaattaagtaagggtttgtaggtcacagaatcagactatttagggctgatacttcaagcatatctcaattaacaaaaaagcacattgagactccaaggatgaactgcctttgcttagtggccagggcactgtcaagacccagaggtctcctaattcccacgctagcacaccataccacccctttgttcaacctcacagaattgccaatactagcgtatcaccaggaatacttacgaaccatactaactcacatggaagaatggcaaatgaaaactggcccacattttcttgttccttcttcaaagagtaatagggttctacctaattgtgaactagaagctggggatgaaaaacaagccagatacagagctcacagtccagaaggagatgtcaacaagatgacaggctgccatgggtactgacagaagtctacataagggacagcaggggaacaaaaaaaggcacagtcaaaacatctttgactgcaatttggagactttaaacaaggattatcctttctacaggcatactgaattttctttttaatgcctcactgtgcctattaagcaaaatccgtaatacaacacaccagacagaagccttaccctgtgagccgggcgcagtggctcacgcctgtaagcctgacactttgtgaggccaaggtgggtgaatcacttgagctcaggagttcgagaccagcctggcaacatggtgaaaccccgtctctaccaaaaacaaaacaaaaacattagccaggcctgtggtgtgcgcctgtggtcccaaatacttggaaagctgaagcaggagaatcgcttgagcccaagaggcagaggctgccgtgagctgagatcatgccactgcattccagcctgggcaatacagtgagaccccatgtcaaaaaaaaaagaaaaagaaaaagaaaaaagataaaagcagctttaccctgtaatcttagttctagtactatctggttctgtaacccaagagcagatacttcactctcacctttaacgtgaagatttatctttcaatcctttagagcttgaaaatgcaatcaacccatgaaaatgtttttaaagaccatgattctgttcatcaaggagacatttaaaggtatgtcattaacagaaatttaaaagggtattgtgggtaactgaattatcatagatacaatacagcaagtatatatggtatattcattactgagatgatttgaactttccatattcaatatggaaccttgagcaagctacttaaattcaggttttgtctattccatctacaaaatgggaacagtatcaccttccttcagtgagctgtcgtaaaggtgtgtgatatgatgactagaaaacaaacagaacacagcacgtgattgatgtttaataaatgagttcccttccccctttcttaaactgcagcaaagtggtacccaaacctaagagctattatccctaaatttcaaaatctaaaaaaaaaaccttagaacctcagatgatataattaacataaaagcccaggtttttgtataaatgaaaagggataaaaattcatacaaaatccattagtaacattcataagcacccgaaataaattatttagatgtttgcaagtcagctgcaaggtgttcttcctcctcaaatatcctctaaggatgagcttatagacagattaacttaacaacgaaacctaacattccaccagtaagaatcttgtttgtgtgtgaagctgctttttactaagttggaggtaagagctcaaagtagagttttacttaagaaaattggggcaaacattgattttagttctacagctataaaatgatgccattcaaaaagtgaacagtgggccgggcacagtggctcctaccctattccaaccaagccggaaatggcaacagaccaaacgtgaggagtgagtgcctctgtgctccttgaggctgtttcattacagataacaaggttacctagggcagttgtgaagatgaaatgaggatgtgtgtggaagggcagagcagatgcttgatgttctccatctgaacactactcttgaccacagtatttctcattctcctttctgaaatgcctctaggccttaagcgcctatttctataaatgttgggtgatcagaccaatatggtttctgaaaaaactgttcagaaatagactaattttctttgggtggttcagtctgatgctgaaataaattgcaagatgattttcaaaaa

SEQ ID NO: 401995 - DNA, 5871 bp, Homo sapiens
  misc_feature (1898)..(1898): n is a, c, g, or t
tttgcttctattttggattcctcgtgcgtcttgagaccaagcaggaatatgcactggtactttagaaaacatttcatgttgcacacaaatactttcatgatcagctttaatttaagggacatgtaaataaaaagatgcatttgacaggacagcagactagttcaagcaggaggttagaccagtaacaacaaccaagaaagcaaagtgctcgtttccatcttggctttaccacacttacaaactgatacccaaataacagaaatgtttctcaaagctgcacaagaattttaaggattcatgaccccactttcattaaatagtcccagaagatagctaaataacattttcagatagaacctcacactgcataagtttcataacaaacaaacctaagatatgctgacagaaatcacattgagtttgcaagcactcaaatagaaaacccaagacctccggcaacaaattagaaaatatgaacagaaatattttaaaccacaagtatttcatcccaactaaattccaatttcttcaatgttctctgagttgttagatttcaaagtgaagagaactgaaatctctttttattcatagcagagccaaaactggaagtcacttattaaatacctgtgtacaaaacaccatacttggggctatatgcgatttcaggttggataaacgagtcatgttgaatgacaaaaagttagactggggagatttatggagagaagcaagcacctgtgatttgttggtttggcgttacaataaacactgtaagtgaaaatgagtcacaggcagttagaatggcgttaaggaaaccatttaggtctaaaaatcaggactgaagtgatcaacagttaacagatgaagccatgagaactggcacgctctggaaaggctggtgcagagagcaggacggtgagcctgagtgagcctggagttagtcaacagattcctcaacagaaaaggagtgaggagcagggtcaaagaaatgaaggtgaatttggggggtggtggtcaatgggttaaacgtacaagttgaggccgaggaactgaggctgaagaaggttctggcaagtggagaaccatgagatcctgacagagcaggcttttgtgggcagaagccatattagaagaagagctaaaggaaagctgaaaacctggcgacgaaaaggaagccaagaacataggagatattttgacaaaacggaaaaacaacagaacaggaagtgaggcaggagaaccacagagatggaagccaggaggtgtccaattagacgggcacaagagaaaaacagccagagaccgagaaaacggcgggaaggaaaggttccatctggagaaaaaagcctctcaagactggaagggacaggagctggtgaccatgaagcagttcagactcagctctgagccccttgtgtggaccacaagcagcactgcaaagtcctcgctgtagagagaagaccatagatgcacacagacggggttatcccttgaaaccagatccgggaagccatcagtcaaaaagcctgtgtggtcacagatgcttactggtggttcctgaaatgagtatttctaggcagggggcttcagtataaaccagatgtgtgctagctgggtggacttcaagtaaggagtcaagacaaaacacttagagtgaccttttggccactgctgtgtctgcaggctcagcctgctctagatctgattcccacagtggagggacaaagggccagcagcttgtaggaccaaatgagaaaaatacataatcattatgttttagccagaaaaaggcaacttgattatgaactggatgacatatcaaatgcaaggccttaaaatgcattcactctaataaactgctctgtagaattcaagggaatgaaatccgcttctcatangtaccaaggaccaactgctttgaatcttccactgtggatgatggcaactggtccttttaggagagccattttccagacagtcttgtctttatttatttattttttaattgttagtagcttttacttattatttatgtacttattttttgagacagtctcactctgtcacccaggctggagtgcagtggtgcaaccttgactcactacaacctcctcctcctgggttcaagtgattctcctgcctcagcctcatgagtagctgggattacaggcgtgcaccacctcgctcggctaattgtttttgttcttttttgagatggagtctcgttctatctcccaggctggagtgcagtggcacgatctcagctcaccacaatctccacctcccaggtttaagcaattctcctgcctcagcctcccaagtagctgggattacaggcatgcaccaccacacctggctaatttttgtatttttagtagaggcgaggtttcactatgttcgccaggatggtcttgaactcctgacctcaggtgttctgcccaccttggcctcccaaagtgttgggattacaggtgtgagccaccgtgcccggcctttttgtattttttagtagagatggggtttcaccatgttggccaggctggtcttgaactcctgacctaaagtgatccacccacctcagcctcccaaagtgctggaattacaggagtgagccaccatgccctgcccagtctttataaatgaagcttgactctggactgtgatagcagaaacaaatacaggcagtgcctcagagaatacaaaatatcaagcaaatcctaagtgttgaagctagaacccaggtgagtgcactctgcattactgagaatgtgctccctgccaaaaggctcctaccctattccaaccaagccggaaatggcaacagaccaaacgtgaggagtgagtgcctctgtgctccttgaggctgtttcattacagataacaaggttacctagggcagttgtgaagatgaaatgaggatgtgtgtggaagggcagagcagatgcttgatgttctccatctgaacactactcttgaccacagtatttctcattctcctttctgaaatgcctctaggccttaagcgcctatttctataaatgttgggtgatcagaccaatatggtttctgaaaaaactgttcagaaatagactaattttctttgggtggttcagtctgatgctgaaataaattgcaagatgattttcaaaaataacatgaaccccaacagcttcactgagaaatatggagcctcttcaaacgtgtttttaaaaagaactggatgtgcaggtgtaagagatttattacaaaacaaaaactccccttgccagccttattactctggctcatcattaaaatccagtgctagccatattacatgcccatcttaaaacttttatcctttagttacaaaaagaatactatgtagcttacatattcagaatttacctactaccccaccacatcaaagtccataaggtaccatatactcttccccgccccatgcttcatgggatgttattacagtatggtgctttacagcgaaaatgagagcagtcacttaagcggcttactgagacccaggcaatgttctaagcagctacacacagtaactcctaacaaccttaggaggcaggaaccaaaagctgaagcatcatacaacttgcctccaactaagaggggatctggggttcaaacccaggcagcctgacatgagcgtttcctttttttttttttctcttttgctaagtaaaaagtaggtttaagggaagaatcatttatagtaacactgaattaagtaagggtttgtaggtcacagaatcagactatttagggctgatacttcaagcatatctcaattaacaaaaaagcacattgagactccaaggatgaactgcctttgcttagtggccagggcactgtcaagacccagaggtctcctaattcccacgctagcacaccataccacccctttgttcaacctcacagaattgccaatactagcgtatcaccaggaatacttacgaaccatactaactcacatggaagaatggcaaatgaaaactggcccacattttcttgttccttcttcaaagagtaatagggttctacctaattgtgaactagaagctggggatgaaaaacaagccagatacagagctcacagtccagaaggagatgtcaacaagatgacaggctgccatgggtactgacagaagtctacataagggacagcaggggaacaaaaaaaggcacagtcaaaacatctttgactgcaatttggagactttaaacaaggattatcctttctacaggcatactgaattttctttttaatgcctcactgtgcctattaagcaaaatccgtaatacaacacaccagacagaagccttaccctgtgagccgggcgcagtggctcacgcctgtaagcctgacactttgtgaggccaaggtgggtgaatcacttgagctcaggagttcgagaccagcctggcaacatggtgaaaccccgtctctaccaaaaacaaaacaaaaacattagccaggcctgtggtgtgcgcctgtggtcccaaatacttggaaagctgaagcaggagaatcgcttgagcccaagaggcagaggctgccgtgagctgagatcatgccactgcattccagcctgggcaatacagtgagaccccatgtcaaaaaaaaaagaaaaagaaaaagaaaaaagataaaagcagctttaccctgtaatcttagttctagtactatctggttctgtaacccaagagcagatacttcactctcacctttaacgtgaagatttatctttcaatcctttagagcttgaaaatgcaatcaacccatgaaaatgtttttaaagaccatgattctgttcatcaaggagacatttaaaggtatgtcattaacagaaatttaaaagggtattgtgggtaactgaattatcatagatacaatacagcaagtatatatggtatattcattactgagatgatttgaactttccatattcaatatggaaccttgagcaagctacttaaattcaggttttgtctattccatctacaaaatgggaacagtatcaccttccttcagtgagctgtcgtaaaggtgtgtgatatgatgactagaaaacaaacagaacacagcacgtgattgatgtttaataaatgagttcccttccccctttcttaaactgcagcaaagtggtacccaaacctaagagctattatccctaaatttcaaaatctaaaaaaaaaaccttagaacctcagatgatataattaacataaaagcccaggtttttgtataaatgaaaagggataaaaattcatacaaaatccattagtaacattcataagcacccgaaataaattatttagatgtttgcaagtcagctgcaaggtgttcttcctcctcaaatatcctctaaggatgagcttatagacagattaacttaacaacgaaacctaacattccaccagtaagaatcttgtttgtgtgtgaagctgctttttactaagttggaggtaagagctcaaagtagagttttacttaagaaaattggggcaaacattgattttagttctacagctataaaatgatgccattcaaaaagtgaacagtgggccgggcacagtggctcacgcctgtaatcccagcacactttgggaggccaaggcaggcgtatcacctgtggtcaggagttcaagaccagcctggccaaatgacgaaaccccgtctctactaaaaatgcaaaaattaggcaggtgcggtgacgggcgcctgtaatccaagctactcaggaggctgagacagggagaactgcttgaacccaagaggcagaagttgcagtgagccgagatcgcaccactgcactccagcctgggtgacacagagactccgtctcagggggcaaaaaaaaa

SEQ ID NO: 401996 - DNA, 5721 bp, Homo sapiens
  misc_feature (1666)..(1666): n is a, c, g, or t
gtgactctcgaggatcccctcgaattcgacggtttctcaaagctgcacaagaattttaaggattcatgaccccactttcattaaatagtcccagaagatagctaaataacattttcagatagaacctcacactgcataagtttcataacaaacaaacctaagatatgctgacagaaatcacattgagtttgcaagcactcaaatagaaaacccaagacctccggcaacaaattagaaaatatgaacagaaatattttaaaccacaagtatttcatcccaactaaattccaatttcttcaatgttctctgagttgttagatttcaaagtgaagagaactgaaatctctttttattcatagcagagccaaaactggaagtcacttattaaatacctgtgtacaaaacaccatacttggggctatatgcgatttcaggttggataaacgagtcatgttgaatgacaaaaagttagactggggagatttatggagagaagcaagcacctgtgatttgttggtttggcgttacaataaacactgtaagtgaaaatgagtcacaggcagttagaatggcgttaaggaaaccatttaggtctaaaaatcaggactgaagtgatcaacagttaacagatgaagccatgagaactggcacgctctggaaaggctggtgcagagagcaggacggtgagcctgagtgagcctggagttagtcaacagattcctcaacagaaaaggagtgaggagcagggtcaaagaaatgaaggtgaatttggggggtggtggtcaatgggttaaacgtacaagttgaggccgaggaactgaggctgaagaaggttctggcaagtggagaaccatgagatcctgacagagcaggcttttgtgggcagaagccatattagaagaagagctaaaggaaagctgaaaacctggcgacgaaaaggaagccaagaacataggagatattttgacaaaacggaaaaacaacagaacaggaagtgaggcaggagaaccacagagatggaagccaggaggtgtccaattagacgggcacaagagaaaaacagccagagaccgagaaaacggcgggaaggaaaggttccatctggagaaaaaagcctctcaagactggaagggacaggagctggtgaccatgaagcagttcagactcagctctgagccccttgtgtggaccacaagcagcactgcaaagtcctcgctgtagagagaagaccatagatgcacacagacggggttatcccttgaaaccagatccgggaagccatcagtcaaaaagcctgtgtggtcacagatgcttactggtggttcctgaaatgagtatttctaggcagggggcttcagtataaaccagatgtgtgctagctgggtggacttcaagtaaggagtcaagacaaaacacttagagtgaccttttggccactgctgtgtctgcaggctcagcctgctctagatctgattcccacagtggagggacaaagggccagcagcttgtaggaccaaatgagaaaaatacataatcattatgttttagccagaaaaaggcaacttgattatgaactggatgacatatcaaatgcaaggccttaaaatgcattcactctaataaactgctctgtagaattcaagggaatgaaatccgcttctcatangtaccaaggaccaactgctttgaatcttccactgtggatgatggcaactggtccttttaggagagccattttccagacagtcttgtctttatttatttattttttaattgttagtagcttttacttattatttatgtacttattttttgagacagtctcactctgtcacccaggctggagtgcagtggtgcaaccttgactcactacaacctcctcctcctgggttcaagtgattctcctgcctcagcctcatgagtagctgggattacaggcgtgcaccacctcgctcggctaattgtttttgttcttttttgagatggagtctcgttctatctcccaggctggagtgcagtggcacgatctcagctcaccacaatctccacctcccaggtttaagcaattctcctgcctcagcctcccaagtagctgggattacaggcatgcaccaccacacctggctaatttttgtatttttagtagaggcgaggtttcactatgttcgccaggatggtcttgaactcctgacctcaggtgttctgcccaccttggcctcccaaagtgttgggattacaggtgtgagccaccgtgcccggcctttttgtattttttagtagagatggggtttcaccatgttggccaggctggtcttgaactcctgacctaaagtgatccacccacctcagcctcccaaagtgctggaattacaggagtgagccaccatgccctgcccagtctttataaatgaagcttgactctggactgtgatagcagaaacaaatacaggcagtgcctcagagaatacaaaatatcaagcaaatcctaagtgttgaagctagaacccaggtgagtgcactctgcattactgagaatgtgctccctgccaaaaggctcctaccctattccaaccaagccggaaatggcaacagaccaaacgtgaggagtgagtgcctctgtgctccttgaggctgtttcattacagataacaaggttacctagggcagttgtgaagatgaaatgaggatgtgtgtggaagggcagagcagatgcttgatgttctccatctgaacactactcttgaccacagtatttctcattctcctttctgaaatgcctctaggccttaagcgcctatttctataaatgttgggtgatcagaccaatatggtttctgaaaaaactgttcagaaatagactaattttctttgggtggttcagtctgatgctgaaataaattgcaagatgattttcaaaaataacatgaaccccaacagcttcactgagaaatatggagcctcttcaaacgtgtttttaaaaagaactggatgtgcaggtgtaagagatttattacaaaacaaaaactccccttgccagccttattactctggctcatcattaaaatccagtgctagccatattacatgcccatcttaaaacttttatcctttagttacaaaaagaatactatgtagcttacatattcagaatttacctactaccccaccacatcaaagtccataaggtaccatatactcttccccgccccatgcttcatgggatgttattacagtatggtgctttacagcgaaaatgagagcagtcacttaagcggcttactgagacccaggcaatgttctaagcagctacacacagtaactcctaacaaccttaggaggcaggaaccaaaagctgaagcatcatacaacttgcctccaactaagaggggatctggggttcaaacccaggcagcctgacatgagcgtttcctttttttttttttctcttttgctaagtaaaaagtaggtttaagggaagaatcatttatagtaacactgaattaagtaagggtttgtaggtcacagaatcagactatttagggctgatacttcaagcatatctcaattaacaaaaaagcacattgagactccaaggatgaactgcctttgcttagtggccagggcactgtcaagacccagaggtctcctaattcccacgctagcacaccataccacccctttgttcaacctcacagaattgccaatactagcgtatcaccaggaatacttacgaaccatactaactcacatggaagaatggcaaatgaaaactggcccacattttcttgttccttcttcaaagagtaatagggttctacctaattgtgaactagaagctggggatgaaaaacaagccagatacagagctcacagtccagaaggagatgtcaacaagatgacaggctgccatgggtactgacagaagtctacataagggacagcaggggaacaaaaaaaggcacagtcaaaacatctttgactgcaatttggagactttaaacaaggattatcctttctacaggcatactgaattttctttttaatgcctcactgtgcctattaagcaaaatccgtaatacaacacaccagacagaagccttaccctgtgagccgggcgcagtggctcacgcctgtaagcctgacactttgtgaggccaaggtgggtgaatcacttgagctcaggagttcgagaccagcctggcaacatggtgaaaccccgtctctaccaaaaacaaaacaaaaacattagccaggcctgtggtgtgcgcctgtggtcccaaatacttggaaagctgaagcaggagaatcgcttgagcccaagaggcagaggctgccgtgagctgagatcatgccactgcattccagcctgggcaatacagtgagaccccatgtcaaaaaaaaaagaaaaagaaaaagaaaaaagataaaagcagctttaccctgtaatcttagttctagtactatctggttctgtaacccaagagcagatacttcactctcacctttaacgtgaagatttatctttcaatcctttagagcttgaaaatgcaatcaacccatgaaaatgtttttaaagaccatgattctgttcatcaaggagacatttaaaggtatgtcattaacagaaatttaaaagggtattgtgggtaactgaattatcatagatacaatacagcaagtatatatggtatattcattactgagatgatttgaactttccatattcaatatggaaccttgagcaagctacttaaattcaggttttgtctattccatctacaaaatgggaacagtatcaccttccttcagtgagctgtcgtaaaggtgtgtgatatgatgactagaaaacaaacagaacacagcacgtgattgatgtttaataaatgagttcccttccccctttcttaaactgcagcaaagtggtacccaaacctaagagctattatccctaaatttcaaaatctaaaaaaaaaaccttagaacctcagatgatataattaacataaaagcccaggtttttgtataaatgaaaagggataaaaattcatacaaaatccattagtaacattcataagcacccgaaataaattatttagatgtttgcaagtcagctgcaaggtgttcttcctcctcaaatatcctctaaggatgagcttatagacagattaacttaacaacgaaacctaacattccaccagtaagaatcttgtttgtgtgtgaagctgctttttactaagttggaggtaagagctcaaagtagagttttacttaagaaaattggggcaaacattgattttagttctacagctataaaatgatgccattcaaaaagtgaacagtgggccgggcacagtggctcctaccctattccaaccaagccggaaatggcaacagaccaaacgtgaggagtgagtgcctctgtgctccttgaggctgtttcattacagataacaaggttacctagggcagttgtgaagatgaaatgaggatgtgtgtggaagggcagagcagatgcttgatgttctccatctgaacactactcttgaccacagtatttctcattctcctttctgaaatgcctctaggccttaagcgcctatttctataaatgttgggtgatcagaccaatatggtttctgaaaaaactgttcagaaatagactaattttctttgggtggttcagtctgatgctgaaataaattgcaagatgattttcaaaaa

SEQ ID NO: 401997 - DNA, 4967 bp, Homo sapiens
  misc_feature (1898)..(1898): n is a, c, g, or t
tttgcttctattttggattcctcgtgcgtcttgagaccaagcaggaatatgcactggtactttagaaaacatttcatgttgcacacaaatactttcatgatcagctttaatttaagggacatgtaaataaaaagatgcatttgacaggacagcagactagttcaagcaggaggttagaccagtaacaacaaccaagaaagcaaagtgctcgtttccatcttggctttaccacacttacaaactgatacccaaataacagaaatgtttctcaaagctgcacaagaattttaaggattcatgaccccactttcattaaatagtcccagaagatagctaaataacattttcagatagaacctcacactgcataagtttcataacaaacaaacctaagatatgctgacagaaatcacattgagtttgcaagcactcaaatagaaaacccaagacctccggcaacaaattagaaaatatgaacagaaatattttaaaccacaagtatttcatcccaactaaattccaatttcttcaatgttctctgagttgttagatttcaaagtgaagagaactgaaatctctttttattcatagcagagccaaaactggaagtcacttattaaatacctgtgtacaaaacaccatacttggggctatatgcgatttcaggttggataaacgagtcatgttgaatgacaaaaagttagactggggagatttatggagagaagcaagcacctgtgatttgttggtttggcgttacaataaacactgtaagtgaaaatgagtcacaggcagttagaatggcgttaaggaaaccatttaggtctaaaaatcaggactgaagtgatcaacagttaacagatgaagccatgagaactggcacgctctggaaaggctggtgcagagagcaggacggtgagcctgagtgagcctggagttagtcaacagattcctcaacagaaaaggagtgaggagcagggtcaaagaaatgaaggtgaatttggggggtggtggtcaatgggttaaacgtacaagttgaggccgaggaactgaggctgaagaaggttctggcaagtggagaaccatgagatcctgacagagcaggcttttgtgggcagaagccatattagaagaagagctaaaggaaagctgaaaacctggcgacgaaaaggaagccaagaacataggagatattttgacaaaacggaaaaacaacagaacaggaagtgaggcaggagaaccacagagatggaagccaggaggtgtccaattagacgggcacaagagaaaaacagccagagaccgagaaaacggcgggaaggaaaggttccatctggagaaaaaagcctctcaagactggaagggacaggagctggtgaccatgaagcagttcagactcagctctgagccccttgtgtggaccacaagcagcactgcaaagtcctcgctgtagagagaagaccatagatgcacacagacggggttatcccttgaaaccagatccgggaagccatcagtcaaaaagcctgtgtggtcacagatgcttactggtggttcctgaaatgagtatttctaggcagggggcttcagtataaaccagatgtgtgctagctgggtggacttcaagtaaggagtcaagacaaaacacttagagtgaccttttggccactgctgtgtctgcaggctcagcctgctctagatctgattcccacagtggagggacaaagggccagcagcttgtaggaccaaatgagaaaaatacataatcattatgttttagccagaaaaaggcaacttgattatgaactggatgacatatcaaatgcaaggccttaaaatgcattcactctaataaactgctctgtagaattcaagggaatgaaatccgcttctcatangtaccaaggaccaactgctttgaatcttccactgtggatgatggcaactggtccttttaggagagccattttccagacagtcttgtctttatttatttattttttaattgttagtagcttttacttattatttatgtacttattttttgagacagtctcactctgtcacccaggctggagtgcagtggtgcaaccttgactcactacaacctcctcctcctgggttcaagtgattctcctgcctcagcctcatgagtagctgggattacaggcgtgcaccacctcgctcggctaattgtttttgttcttttttgagatggagtctcgttctatctcccaggctggagtgcagtggcacgatctcagctcaccacaatctccacctcccaggtttaagcaattctcctgcctcagcctcccaagtagctgggattacaggcatgcaccaccacacctggctaatttttgtatttttagtagaggcgaggtttcactatgttcgccaggatggtcttgaactcctgacctcaggtgttctgcccaccttggcctcccaaagtgttgggattacaggtgtgagccaccgtgcccggcctttttgtattttttagtagagatggggtttcaccatgttggccaggctggtcttgaactcctgacctaaagtgatccacccacctcagcctcccaaagtgctggaattacaggagtgagccaccatgccctgcccagtctttataaatgaagcttgactctggactgtgatagcagaaacaaatacaggcagtgcctcagagaatacaaaatatcaagcaaatcctaagtgttgaagctagaacccaggtgagtgcactctgcattactgagaatgtgctccctgccaaaaggctcctaccctattccaaccaagccggaaatggcaacagaccaaacgtgaggagtgagtgcctctgtgctccttgaggctgtttcattacagataacaaggttacctagggcagttgtgaagatgaaatgaggatgtgtgtggaagggcagagcagatgcttgatgttctccatctgaacactactcttgaccacagtatttctcattctcctttctgaaatgcctctaggccttaagcgcctatttctataaatgttgggtgatcagaccaatatggtttctgaaaaaactgttcagaaatagactaattttctttgggtggttcagtctgatgctgaaataaattgcaagatgattttcaaaaataacatgaaccccaacagcttcactgagaaatatggagcctcttcaaacgtgtttttaaaaagaactggatgtgcaggtgtaagagatttattacaaaacaaaaactccccttgccagccttattactctggctcatcattaaaatccagtgctagccatattacatgcccatcttaaaacttttatcctttagttacaaaaagaatactatgtagcttacatattcagaatttacctactaccccaccacatcaaagtccataaggtaccatatactcttccccgccccatgcttcatgggatgttattacagtatggtgctttacagcgaaaatgagagcagtcacttaagcggcttactgagacccaggcaatgttctaagcagctacacacagtaactcctaacaaccttaggaggcaggaaccaaaagctgaagcatcatacaacttgcctccaactaagaggggatctggggttcaaacccaggcagcctgacatgagcgtttcctttttttttttttctcttttgctaagtaaaaagtaggtttaagggaagaatcatttatagtaacactgaattaagtaagggtttgtaggtcacagaatcagactatttagggctgatacttcaagcatatctcaattaacaaaaaagcacattgagactccaaggatgaactgcctttgcttagtggccagggcactgtcaagacccagaggtctcctaattcccacgctagcacaccataccacccctttgttcaacctcacagaattgccaatactagcgtatcaccaggaatacttacgaaccatactaactcacatggaagaatggcaaatgaaaactggcccacattttcttgttccttcttcaaagagtaatagggttctacctaattgtgaactagaagctggggatgaaaaacaagccagatacagagctcacagtccagaaggagatgtcaacaagatgacaggctgccatgggtactgacagaagtctacataagggacagcaggggaacaaaaaaaggcacagtcaaaacatctttgactgcaatttggagactttaaacaaggattatcctttctacaggcatactgaattttctttttaatgcctcactgtgcctattaagcaaaatccgtaatacaacacaccagacagaagccttaccctgtgagccgggcgcagtggctcacgcctgtaagcctgacactttgtgaggccaaggtgggtgaatcacttgagctcaggagttcgagaccagcctggcaacatggtgaaaccccgtctctaccaaaaacaaaacaaaaacattagccaggcctgtggtgtgcgcctgtggtcccaaatacttggaaagctgaagcaggagaatcgcttgagcccaagaggcagaggctgccgtgagctgagatcatgccactgcattccagcctgggcaatacagtgagaccccatgtcaaaaaaaaaagaaaaagaaaaagaaaaaagataaaagcagctttaccctgtaatcttagttctagtactatctggttctgtaacccaagagcagatacttcactctcacctttaacgtgaagatttatctttcaatcctttagagcttgaaaatgcaatcaacccatgaaaatgtttttaaagaccatgattctgttcatcaaggagacatttaaaggtataattaaactttacttcctctctttcttcttcccactcatcctaaccctactcctaatcacataacctattcccccgagcaatctcaattacaatatatacaccaacaaccaagcaacccct

SEQ ID NO: 401998 - DNA, 3511 bp, Homo sapiens
  misc_feature (1898)..(1898): n is a, c, g, or t
tttgcttctattttggattcctcgtgcgtcttgagaccaagcaggaatatgcactggtactttagaaaacatttcatgttgcacacaaatactttcatgatcagctttaatttaagggacatgtaaataaaaagatgcatttgacaggacagcagactagttcaagcaggaggttagaccagtaacaacaaccaagaaagcaaagtgctcgtttccatcttggctttaccacacttacaaactgatacccaaataacagaaatgtttctcaaagctgcacaagaattttaaggattcatgaccccactttcattaaatagtcccagaagatagctaaataacattttcagatagaacctcacactgcataagtttcataacaaacaaacctaagatatgctgacagaaatcacattgagtttgcaagcactcaaatagaaaacccaagacctccggcaacaaattagaaaatatgaacagaaatattttaaaccacaagtatttcatcccaactaaattccaatttcttcaatgttctctgagttgttagatttcaaagtgaagagaactgaaatctctttttattcatagcagagccaaaactggaagtcacttattaaatacctgtgtacaaaacaccatacttggggctatatgcgatttcaggttggataaacgagtcatgttgaatgacaaaaagttagactggggagatttatggagagaagcaagcacctgtgatttgttggtttggcgttacaataaacactgtaagtgaaaatgagtcacaggcagttagaatggcgttaaggaaaccatttaggtctaaaaatcaggactgaagtgatcaacagttaacagatgaagccatgagaactggcacgctctggaaaggctggtgcagagagcaggacggtgagcctgagtgagcctggagttagtcaacagattcctcaacagaaaaggagtgaggagcagggtcaaagaaatgaaggtgaatttggggggtggtggtcaatgggttaaacgtacaagttgaggccgaggaactgaggctgaagaaggttctggcaagtggagaaccatgagatcctgacagagcaggcttttgtgggcagaagccatattagaagaagagctaaaggaaagctgaaaacctggcgacgaaaaggaagccaagaacataggagatattttgacaaaacggaaaaacaacagaacaggaagtgaggcaggagaaccacagagatggaagccaggaggtgtccaattagacgggcacaagagaaaaacagccagagaccgagaaaacggcgggaaggaaaggttccatctggagaaaaaagcctctcaagactggaagggacaggagctggtgaccatgaagcagttcagactcagctctgagccccttgtgtggaccacaagcagcactgcaaagtcctcgctgtagagagaagaccatagatgcacacagacggggttatcccttgaaaccagatccgggaagccatcagtcaaaaagcctgtgtggtcacagatgcttactggtggttcctgaaatgagtatttctaggcagggggcttcagtataaaccagatgtgtgctagctgggtggacttcaagtaaggagtcaagacaaaacacttagagtgaccttttggccactgctgtgtctgcaggctcagcctgctctagatctgattcccacagtggagggacaaagggccagcagcttgtaggaccaaatgagaaaaatacataatcattatgttttagccagaaaaaggcaacttgattatgaactggatgacatatcaaatgcaaggccttaaaatgcattcactctaataaactgctctgtagaattcaagggaatgaaatccgcttctcatangtaccaaggaccaactgctttgaatcttccactgtggatgatggcaactggtccttttaggagagccattttccagacagtcttgtctttatttatttattttttaattgttagtagcttttacttattatttatgtacttattttttgagacagtctcactctgtcacccaggctggagtgcagtggtgcaaccttgactcactacaacctcctcctcctgggttcaagtgattctcctgcctcagcctcatgagtagctgggattacaggcgtgcaccacctcgctcggctaattgtttttgttcttttttgagatggagtctcgttctatctcccaggctggagtgcaagtgagaccccatgtcaaaaaaaaaagaaaaagaaaaagaaaaaagataaaagcagctttaccctgtaatcttagttctagtactatctggttctgtaacccaagagcagatacttcactctcacctttaacgtgaagatttatctttcaatcctttagagcttgaaaatgcaatcaacccatgaaaatgtttttaaagaccatgattctgttcatcaaggagacatttaaaggtatgtcattaacagaaatttaaaagggtattgtgggtaactgaattatcatagatacaatacagcaagtatatatggtatattcattactgagatgatttgaactttccatattcaatatggaaccttgagcaagctacttaaattcaggttttgtctattccatctacaaaatgggaacagtatcaccttccttcagtgagctgtcgtaaaggtgtgtgatatgatgactagaaaacaaacagaacacagcacgtgattgatgtttaataaatgagttcccttccccctttcttaaactgcagcaaagtggtacccaaacctaagagctattatccctaaatttcaaaatctaaaaaaaaaaccttagaacctcagatgatataattaacataaaagcccaggtttttgtataaatgaaaagggataaaaattcatacaaaatccattagtaacattcataagcacccgaaataaattatttagatgtttgcaagtcagctgcaaggtgttcttcctcctcaaatatcctctaaggatgagcttatagacagattaacttaacaacgaaacctaacattccaccagtaagaatcttgtttgtgtgtgaagctgctttttactaagttggaggtaagagctcaaagtagagttttacttaagaaaattggggcaaacattgattttagttctacagctataaaatgatgccattcaaaaagtgaacagtgggccgggcacagtggctcacgcctgtaatcccagcacactttgggaggccaaggcaggcgtatcacctgtggtcaggagttcaagaccagcctggccaaatgacgaaaccccgtctctactaaaaatgcaaaaattaggcaggtgcggtgacgggcgcctgtaatccaagctactcaggaggctgagacagggagaactgcttgaacccaagaggcagaagttgcagtgagccgagatcgcaccactgcactccagcctgggtgacacagagactccgtctcagggggcaaaaaaaaa

SEQ ID NO: 401999 - DNA, 4528 bp, Homo sapiens
  misc_feature (473)..(473): n is a, c, g, or t
cggatcatttctctactcagaaacctgaaacatcggcattatcctcctgcttgcaactatagcaacagcctgcatatccgggaagccatcagtcaaaaagcctgtgtggtcacagatgcttactggtggttcctgaaatgagtatttctaggcagggggcttcagtataaaccagatgtgtgctagctgggtggacttcaagtaaggagtcaagacaaaacacttagagtgaccttttggccactgctgtgtctgcaggctcagcctgctctagatctgattcccacagtggagggacaaagggccagcagcttgtaggaccaaatgagaaaaatacataatcattatgttttagccagaaaaaggcaacttgattatgaactggatgacatatcaaatgcaaggccttaaaatgcattcactctaataaactgctctgtagaattcaagggaatgaaatccgcttctcatangtaccaaggaccaactgctttgaatcttccactgtggatgatggcaactggtccttttaggagagccattttccagacagtcttgtctttatttatttattttttaattgttagtagcttttacttattatttatgtacttattttttgagacagtctcactctgtcacccaggctggagtgcagtggtgcaaccttgactcactacaacctcctcctcctgggttcaagtgattctcctgcctcagcctcatgagtagctgggattacaggcgtgcaccacctcgctcggctaattgtttttgttcttttttgagatggagtctcgttctatctcccaggctggagtgcagtggcacgatctcagctcaccacaatctccacctcccaggtttaagcaattctcctgcctcagcctcccaagtagctgggattacaggcatgcaccaccacacctggctaatttttgtatttttagtagaggcgaggtttcactatgttcgccaggatggtcttgaactcctgacctcaggtgttctgcccaccttggcctcccaaagtgttgggattacaggtgtgagccaccgtgcccggcctttttgtattttttagtagagatggggtttcaccatgttggccaggctggtcttgaactcctgacctaaagtgatccacccacctcagcctcccaaagtgctggaattacaggagtgagccaccatgccctgcccagtctttataaatgaagcttgactctggactgtgatagcagaaacaaatacaggcagtgcctcagagaatacaaaatatcaagcaaatcctaagtgttgaagctagaacccaggtgagtgcactctgcattactgagaatgtgctccctgccaaaaggctcctaccctattccaaccaagccggaaatggcaacagaccaaacgtgaggagtgagtgcctctgtgctccttgaggctgtttcattacagataacaaggttacctagggcagttgtgaagatgaaatgaggatgtgtgtggaagggcagagcagatgcttgatgttctccatctgaacactactcttgaccacagtatttctcattctcctttctgaaatgcctctaggccttaagcgcctatttctataaatgttgggtgatcagaccaatatggtttctgaaaaaactgttcagaaatagactaattttctttgggtggttcagtctgatgctgaaataaattgcaagatgattttcaaaaataacatgaaccccaacagcttcactgagaaatatggagcctcttcaaacgtgtttttaaaaagaactggatgtgcaggtgtaagagatttattacaaaacaaaaactccccttgccagccttattactctggctcatcattaaaatccagtgctagccatattacatgcccatcttaaaacttttatcctttagttacaaaaagaatactatgtagcttacatattcagaatttacctactaccccaccacatcaaagtccataaggtaccatatactcttccccgccccatgcttcatgggatgttattacagtatggtgctttacagcgaaaatgagagcagtcacttaagcggcttactgagacccaggcaatgttctaagcagctacacacagtaactcctaacaaccttaggaggcaggaaccaaaagctgaagcatcatacaacttgcctccaactaagaggggatctggggttcaaacccaggcagcctgacatgagcgtttcctttttttttttttctcttttgctaagtaaaaagtaggtttaagggaagaatcatttatagtaacactgaattaagtaagggtttgtaggtcacagaatcagactatttagggctgatacttcaagcatatctcaattaacaaaaaagcacattgagactccaaggatgaactgcctttgcttagtggccagggcactgtcaagacccagaggtctcctaattcccacgctagcacaccataccacccctttgttcaacctcacagaattgccaatactagcgtatcaccaggaatacttacgaaccatactaactcacatggaagaatggcaaatgaaaactggcccacattttcttgttccttcttcaaagagtaatagggttctacctaattgtgaactagaagctggggatgaaaaacaagccagatacagagctcacagtccagaaggagatgtcaacaagatgacaggctgccatgggtactgacagaagtctacataagggacagcaggggaacaaaaaaaggcacagtcaaaacatctttgactgcaatttggagactttaaacaaggattatcctttctacaggcatactgaattttctttttaatgcctcactgtgcctattaagcaaaatccgtaatacaacacaccagacagaagccttaccctgtgagccgggcgcagtggctcacgcctgtaagcctgacactttgtgaggccaaggtgggtgaatcacttgagctcaggagttcgagaccagcctggcaacatggtgaaaccccgtctctaccaaaaacaaaacaaaaacattagccaggcctgtggtgtgcgcctgtggtcccaaatacttggaaagctgaagcaggagaatcgcttgagcccaagaggcagaggctgccgtgagctgagatcatgccactgcattccagcctgggcaatacagtgagaccccatgtcaaaaaaaaaagaaaaagaaaaagaaaaaagataaaagcagctttaccctgtaatcttagttctagtactatctggttctgtaacccaagagcagatacttcactctcacctttaacgtgaagatttatctttcaatcctttagagcttgaaaatgcaatcaacccatgaaaatgtttttaaagaccatgattctgttcatcaaggagacatttaaaggtatgtcattaacagaaatttaaaagggtattgtgggtaactgaattatcatagatacaatacagcaagtatatatggtatattcattactgagatgatttgaactttccatattcaatatggaaccttgagcaagctacttaaattcaggttttgtctattccatctacaaaatgggaacagtatcaccttccttcagtgagctgtcgtaaaggtgtgtgatatgatgactagaaaacaaacagaacacagcacgtgattgatgtttaataaatgagttcccttccccctttcttaaactgcagcaaagtggtacccaaacctaagagctattatccctaaatttcaaaatctaaaaaaaaaaccttagaacctcagatgatataattaacataaaagcccaggtttttgtataaatgaaaagggataaaaattcatacaaaatccattagtaacattcataagcacccgaaataaattatttagatgtttgcaagtcagctgcaaggtgttcttcctcctcaaatatcctctaaggatgagcttatagacagattaacttaacaacgaaacctaacattccaccagtaagaatcttgtttgtgtgtgaagctgctttttactaagttggaggtaagagctcaaagtagagttttacttaagaaaattggggcaaacattgattttagttctacagctataaaatgatgccattcaaaaagtgaacagtgggccgggcacagtggctcctaccctattccaaccaagccggaaatggcaacagaccaaacgtgaggagtgagtgcctctgtgctccttgaggctgtttcattacagataacaaggttacctagggcagttgtgaagatgaaatgaggatgtgtgtggaagggcagagcagatgcttgatgttctccatctgaacactactcttgaccacagtatttctcattctcctttctgaaatgcctctaggccttaagcgcctatttctataaatgttgggtgatcagaccaatatggtttctgaaaaaactgttcagaaatagactaattttctttgggtggttcagtctgatgctgaaataaattgcaagatgattttcaaaaa

SEQ ID NO: 402000 - DNA, 441 bp, Homo sapiens
agtttatccaaaaagtccagcatggtttacttgagaaggaaatatgttcagaatctctaagcactgcagaaggcacctgcagtgcagaagagttggcagtgaggtctttctcctggggtctgggcggaacatgtgagcagtcgggaaggcacacacagtgggagccagtaagggcccctgtgcatctgcaggagctgaggacagaaggggtgggcctccacggtgggcatgtaggagtgggcacagagaagggccacagatctgagacagagacagacaggacttcttaccctgctgagccctgcagggagccacttcgtctttcagccctgattttgtcatctgtaaggaaatttcctctctcccagggtaatcatgtgaagccaatgaaataataaaaaggaccacatcggatgacccctgaggcaggtctgctcccca

SEQ ID NO: 402001 - DNA, 244 bp, Homo sapiens
tgcagactataaaataacaggggttagccagatttgtaaatccctgttctagagaactttttccttatgttaaagagttacagttaactagtaggggcagggggagattttttaaactgtcagcactttcacttatatgtaagtactaaagtaaatcatcacaaaataaatataaggaagacataactattaattcagatattataaattaagaggctgacagaattcagtttttaagagaaca

SEQ ID NO: 402002 - DNA, 580 bp, Homo sapiens
agcattttatttgagaaaacatttggtttgtttttagttatttttctttcaaagcaattgtaaaagtaggctcttgactttgaagtagtatttgcctttcttttcttgttttcttttttctttttcttttgaaaaaaatctctaaagtctcctggaatcactgcaggatattatgactcagcttgaccttcctccctgtcaccctcagtggccctcacaagctatcctcactcccagaatgggaggctctgggttccctcctaatgcatttgaaggccacaggggtgggggtggcaggtgctgcaacagacatgtacacacacacacacacacacacacgcacactcccctcccccagctacaggcaatccctgagcaacctagggagcaaccctagagctccaaggaacacaagagtttgaggccacttctttagcctttgaactggttattcatcctcattcttacctggcattatttggaatgcttcatttcctctgtacctggccttcactcttgggaagtctagcttgtttgtgcagtttcctactgtttaaacaagagattgtttaaactctag

SEQ ID NO: 402003 - DNA, 328 bp, Homo sapiens
gaaacctcccaggcagggaatcacctcttcacacacagtttgcatctctgcagttgacggcaggagcaaaaaatgtggccagccaggttggaagggtgacaactgatggaggcatggaaccaccttcggcttggggccaacccaggttactaatcacaggtcaggtattcaggtcagatgtccaccattcacacgggctctttgtctgccaaggcctgggtccaggctatgagtgttcaaaaatagaacaggaagttcagaaaaaagcagaagccaagagaaggttacagcatgggagggcaggcttgggagagaggatttatcttgt

SEQ ID NO: 402004 - DNA, 201 bp, Homo sapiens
gtttcatcgataaataatagttttttaggttactatcatttaacaagcatatattacacctgtcactggtctaacatgaattatcccaattctctcaaaagccctatgaaataaattctattattgcttccattttataagatatatgaatattggaggacaaatttaaaaagacttgtccaacatgattctgtctttgca

SEQ ID NO: 402005 - DNA, 345 bp, Homo sapiens
ccacatttgcaggaaaacagggtgaatctcatctaaatacactgtccatcataacagacttagaatgaaagggaaagtaaagaacagtaacaactgaccaactctgagacaaagagagaagatttggaagatggacagatgataattgaagtggggagaaatgaagaaaaaaagtactgaaaaatcacagcaaacaacaacaacaaaagggcaaaaatcagtctcaataaagagacttaggtctcaatgaagagagatagttgcctcaggaactgctatagtacttgccttttttaagaaaatggagatagtgaattcattcattcaacacatcagcgcaaacta

SEQ ID NO: 402006 - DNA, 478 bp, Homo sapiens
gaaaatgtgggttaaaactgtgactcggtgcattcactgtttatctgttgatggcattgtcgttagtccctgctgccaaccccagcccgaagaggcttctctgtggtgtgggaagcaggtgtcgctcccctgattctgccatcagcccacatcaggcatcctaagcgagatggaggctaggcctccactggcaggcgaacccatgaagctcaggagcatgaattggttttcggatgagcctgtgagattcctagcaaggcctggaagggttgggacccaggacaggggagttttgatgatgatgagactgatcagtgcccccagctgttgatactagggagcgcccatgggtgccacagttcactgagagagcaaggaagagcctaagatggccagagtgcatgcatgcacacacacaccacacacacgttcacggtcacactcatgcacatgcatgctcacacatgatcacatacac

SEQ ID NO: 402007 - DNA, 528 bp, Homo sapiens
ttggtcagtctctacaggatcccccctggctaatcacagaaagactctgtactcagctctgtactactgctgtgtactcagcaatagtatagcctcagagccttccttggagtatctgtcagtaacactgacccaacagtcctgtcaaattgtgaccacccttccaatcaagtcatactttcagatcccacactagttctggaacttaagtgcatttcttagttggtaacaatatactgtaagtttacactttatttaagctccagtgctgatttaaaaatcagtatgttaggccaggcacggtggctcatgcctggaatcccaacactttaggagcccaagatgggcagatcacgaggtcagatcgagaccaccctggttaacacggtgaaatcccctctctactaaaaaaaatacaaaaaatacaaaaaaattagccggccatggtggcaggcagctgcagtcccagctactcaggagactgaggcaggagaatggcgtgaatctgggaggcagagcttgcagtga

SEQ ID NO: 402008 - DNA, 541 bp, Homo sapiens
agcctcctcatcttcaaagagcatcaagcactaaaacggtaagagtggccaggtctggagtgcagcggagactcgaggagagataaaaggctgccaagagcacacccagcctctctggggacgtggggtacgtgctatgaatgcaccttgcagtttctcacccacatgaggggggagttgatctctgcggtccccttcagcttaaaaacctcatgctgatcccaggcttccggacttcatctgtcaataacgatgaatgcagggaactgcagcctgtctaccagtagcccttgcaccacagaaaaaggaaggtaaatccacaactggaagaaagcatcatgggctgcaggccacagccatgcctccgtgggcctggcactgtacacttcttggaaagatctaggcctctcggcccccatcatgccgaaattagaggctggctccgtgtggctgcattgcacctgccagcagggttacacctgtatgatcagaaatgtgtaagagcagattttactggactaataaaaattaaaatgacaaa

SEQ ID NO: 402009 - DNA, 363 bp, Homo sapiens
ccatgggagtaggaacatcaggtccaagcctctaagaccaggaaatccatgagcattaaaggaatgagatcagaattggcaggcaaggaggctgagtcatgggggctcacggtctcaacaaggaaatgggtcactggcggggtcagtacaggaccctacgtgaaagaaaggagtttgccacagaccaaccccttttgcctctgcttagaattttttaaaattaatagactttattttttagaccgtttttaggttaacagaatggaacagatagtgcagagagttcccagataccaccttctcccccaatcccctacacaccagtttcccctattttcctatttttaatattgtacatttgaa

SEQ ID NO: 402010 - DNA, 330 bp, Homo sapiens
ctggatgcttcctgccctcgaaaatcagactccaagttcttcaactctgggactcggacctttgaacacagactgaaggctgcactgtcggcttccttacttttgaggctttgggacttggactgacttcctggatcctcagcttgcagatggcctattgtgggacctcaccttgtgatcacgtgagtcagtgctccttaacaaactcccctttgtatatacatctatcctactacttctgtcactctagagaaccttgacgaatacggttatgcatttttattaatgtaaattatgccttaattaacaataaataccttctcaacctcc

SEQ ID NO: 402011 - DNA, 245 bp, Homo sapiens
tatatagatagacagatatgacagactgtcactttgaaaaccattaagaacgaatgcagaaacacaagggactggaggaactggtttcaagaagcaggaactggaggaactggtttcaagaagcaggaactggccagttcctgcttctctggaaatatttgtttctgggcattacgtgtccatgtgatggatgcagtaatgactctgccaggtagagcctgcagctggtctcaggtcaggattct

SEQ ID NO: 402012 - DNA, 440 bp, Homo sapiens
ttaaagaaagaaaatactatggtctgaatgttttccccaaaattcttaaattaagatcctaaatcccaaggtgatggcattaggagaaggggccttttgggaggtgattaagtcatgagagtggagacctcatgaatgggattaatgcccttataaaagaggtccaagggaacttgtttgccccttgtaccatatgaaggtggagaaggtgtagctgtgagctgatggcagtactcacagcacctggagcccagagacagaattcatttcaggctccccagcttctggtggggccatggattctgggtgtccttggcctgaggctgcctcgccccagtctgtgcctccatgtcacatggccatcttcctcctgcctctgcatctcttcttataaggatgttgtcatgttggagttacagcccaccctactttgctatgac

SEQ ID NO: 402013 - DNA, 2707 bp, Homo sapiens
gcacgcagagggggccagggctccacgggcgagcggcgaccctgcctcccggagacggcgcggcctgccctgcgcgcctcagccccgggtgccggcgtctcgggcagcaccaccaagtctctctggaggggaaaggatggtcggatttgccccatgtcccttcctctgacccctccctcaagagtgccccgggacaccccgcctgtggctcagcctcccccgccccgcgctgccatctcctcagggccgggcagcaggctcccgagcgcccacagacccggggtgcggcccagcccacaaccgtcacctcaggggcctcaggcgcccagcggtgctgggcggggctggggcacgaccgggagcatgcgcagagcgcgcgtttcgcccatcgcgcacgcgcacacacctgctccgcccccacgctgcgtgccgctgctgggttccgccacgcccgtcatggcggcggccccggccggctctggccccgcccctcggtgacgcgtcgcgagtcacctgaccaggctgcgggctgaggagatacaagggaagtggctatcgccagagtcggattcgccgccgcagcagccgccgcccccgggagccgccgggaccctcgcgtcgtcgccgccgccgccgcccagatccccgcaccatgccgtcggagaagaccttcaagcagcgccgcaccttcgaacaaagagtagaagatgtccgacttattcgagagcagcatccaaccaaaatcccggtgataatagaacgatacaagggtgagaagcagcttcctgttctggataaaacaaagttccttgtacctgaccatgtcaacatgagtgagctcatcaagataattagaaggcgcttacagctcaatgctaatcaggccttcttcctgttggtgaacggacacagcatggtcagcgtctccacaccaatctcagaggtgtatgagagtgagaaagatgaagatggattcctgtacatggtctatgcctcccaggagacgttcgggatgaaattgtcagtgtaaaaccagaaaaaatgcatctcttctagaattgtttaaacccttaccaaggaaaaaaaaggggtgttaccaactgagatcgatcagttcatccaatcacagatcatgaaacagtagtgttcccacctaggagtgttaggaagttgtgtttgtgtttcaagcagaaaaactgagctccaagtgagcacattcagctttggaaactatattatttaatgtaggctagcttgttttcaaattttaaaagtttaaaaataaaatactttgcattctaagttgccaataaaatagaccttcaagttattttaatgctcttttctcactaataggaacttgtaattccagcagtaatttaaaggctttcagagagaccctgagtcttctcttcaggttcacagaacccgccgcctttttgggtagaagttttctactcagctagagagatctccctaagaggatctttaggcctgagttgtgaagcgcaacccccgcaaaacgcatttgccatcacagttggcacaaacgcagggtaaacgggctgtgtgagaaaacggccctgactgtaaactgctgaaggtccctgactcctaagagaaccacacccaaagtcctcactcttgcaggggtagacatttctggtttggtttgttctctagatagttacacacataaagacaccactcaaaaggaaacttgaataatttataattttgatcgagtttcttaaaagaccctggagaaagagtggcatttcttctgtttcaggttttgtctgagttcaaactagtgcctgtgttgttacggaaagcagcagtgtaccagtgtcactctggagtacagcgggagaaacacaaaatagtataactgaaaacattaacattcagacacactcccttctgccttccggcttaaagctgtggatgatccacgtttttgtttttttaatgttaaatgtgtaactcagtattactgaaaaggtacccacattttgaatagtagttatcactcttaggtcagacagccatcagaattctcccacaccaagtgcatgtcagttgtggagaaaacatagcaaaaagagccgtacgctctttacagatactaatgtcaagagttaaacctcctcaggttcaacctgtgataaaagactagtgcttcccagtacttgcatggggttcactatttatagttttcttgggagtatcacaggaaaatcacaattacaccactttagaccctatgtgtagcaggtcacaacttacccttgtgtgtttagatgtgtatgaaatacctgtatacgttagtgaaagctgtttactgtaacggggaaaaccagattctttgcatctgggccctctactgattgttaaaggagttcctgtcacctgctccccccacccccgcatgcgtctgtccacttggctaacttttaatatgtgtatttttacattatgtatattcttaactggactgtctcgtttagactgtatacatcatatctgacattattgtaactaccgtgtgatcagtaagattcctgtaagaaatactgctttttaagaaaaaaaataacatgctgaggggtgacctatatcccatgtgagtggtcactttatttataggatctttaaaacatttttaatgaactaagttgaataaaggcacaattaaaaactgtca

SEQ ID NO: 402014 - DNA, 456 bp, Homo sapiens
  misc_feature (22)..(22): n is a, c, g, or t
  misc_feature (24)..(24): n is a, c, g, or t
  misc_feature (26)..(26): n is a, c, g, or t
ccttggctgcaggaattcggcncnangtcacaacttacccttgtgtgtttagatgtgtatgaaatacctgtatacgttagtgaaagctgtttactgtaacggggaaaaccagattctttgcatctgggccctctactgattgttaaaggagttcctgtcacctgctccccccacccccgcatgcgtctgtccacttggctaacttttaatatgtgtatttttacattatgtatattcttaactggactgtctcgtttagactgtatacatcatatctgacattattgtaactaccgtgtgatcagtaagattcctgtaagaaatactgctttttaagaaaaaaaataacatgctgaggggtgacctatatcccatgtgagtggtcactttatttataggatctttaaaacatttttaatgaactaagttgaataaaggcacaattaaaaactgtca

SEQ ID NO: 402015 - DNA, 1185 bp, Homo sapiens
gcacgcagagggggccagggctccacgggcgagcggcgaccctgcctcccggagacggcgcggcctgccctgcgcgcctcagccccgggtgccggcgtctcgggcagcaccaccaagtctctctggaggggaaaggatggtcggatttgccccatgtcccttcctctgacccctccctcaagagtgccccgggacaccccgcctgtggctcagcctcccccgccccgcgctgccatctcctcagggccgggcagcaggctcccgagcgcccacagacccggggtgcggcccagcccacaaccgtcacctcaggggcctcaggcgcccagcggtgctgggcggggctggggcacgaccgggagcatgcgcagagcgcgcgtttcgcccatcgcgcacgcgcacacacctgctccgcccccacgctgcgtgccgctgctgggttccgccacgcccgtcatggcggcggccccggccggctctggccccgcccctcggtgacgcgtcgcgagtcacctgaccaggctgcgggctgaggagatacaagggaagtggctatcgccagagtcggattcgccgccgcagcagccgccgcccccgggagccgccgggaccctcgcgtcgtcgccgccgccgccgcccagatccccgcaccatgccgtcggagaagaccttcaagcagcgccgcaccttcgaacaaagagtagaagatgtccgacttattcgagagcagcatccaaccaaaatcccggtgataatagaacgatacaagggtgagaagcagcttcctgttctggataaaacaaagttccttgtacctgaccatgtcaacatgagtgagctcatcaagataattaggtattcagtcacctttgtttcataatatatttcctttgagtaacttcttattctttatgaaacttacagttaaatctttagttctggttaaaatctttaaaaaatatttttcagctgaattcagttctgattcagttatgattaaaacaatttcaacttaaactataaaatgtttctttttttgaggttttatattacttgctagactgcagagcccgtttctttcatcataacatcgtttagatgtttcctgtttaaaatcagtgttacaagttattaaggtattgtacagcaaagctagttaaagagaatgtagactctgtgagtggc

SEQ ID NO: 402016 - DNA, 2227 bp, Homo sapiens
aagaaaagaagcgattggatacatatgaaccccggtggttaaaaaagcaggtgtacgtcgggaatcggatatgtcgacagcgtcgatcgcagatcggatcgcgcgagagcgcccccgggagccgccgggaccctcgcgtcgtcgccgccgccgccgcccagatccccgcaccatgccgtcggagaagaccttcaagcagcgccgcaccttcgaacaaagagtagaagatgtccgacttattcgagagcagcatccaaccaaaatcccggtgataatagaacgatacaagggtgagaagcagcttcctgttctggataaaacaaagttccttgtacctgaccatgtcaacatgagtgagctcatcaagataattagaaggcgcttacagctcaatgctaatcaggccttcttcctgttggtgaacggacacagcatggtcagcgtctccacaccaatctcagaggtgtatgagagtgagaaagatgaagatggattcctgtacatggtctatgcctcccaggagacgttcgggatgaaattgtcagtgtaaaaccagaaaaaatgcatctcttctagaattgtttaaacccttaccaaggaaaaaaaaggggtgttaccaactgagatcgatcagttcatccaatcacagatcatgaaacagtagtgttcccacctaggagtgttaggaagttgtgtttgtgtttcaagcagaaaaactgagctccaagtgagcacattcagctttggaaactatattatttaatgtaggctagcttgttttcaaattttaaaagtttaaaaataaaatactttgcattctaagttgccaataaaatagaccttcaagttattttaatgctcttttctcactaataggaacttgtaattccagcagtaatttaaaggctttcagagagaccctgagtcttctcttcaggttcacagaacccgccgcctttttgggtagaagttttctactcagctagagagatctccctaagaggatctttaggcctgagttgtgaagcgcaacccccgcaaaacgcatttgccatcacagttggcacaaacgcagggtaaacgggctgtgtgagaaaacggccctgactgtaaactgctgaaggtccctgactcctaagagaaccacacccaaagtcctcactcttgcaggggtagacatttctggtttggtttgttctctagatagttacacacataaagacaccactcaaaaggaaacttgaataatttataattttgatcgagtttcttaaaagaccctggagaaagagtggcatttcttctgtttcaggttttgtctgagttcaaactagtgcctgtgttgttacggaaagcagcagtgtaccagtgtcactctggagtacagcgggagaaacacaaaatagtataactgaaaacattaacattcagacacactcccttctgccttccggcttaaagctgtggatgatccacgtttttgtttttttaatgttaaatgtgtaactcagtattactgaaaaggtacccacattttgaatagtagttatcactcttaggtcagacagccatcagaattctcccacaccaagtgcatgtcagttgtggagaaaacatagcaaaaagagccgtacgctctttacagatactaatgtcaagagttaaacctcctcaggttcaacctgtgataaaagactagtgcttcccagtacttgcatggggttcactatttatagttttcttgggagtatcacaggaaaatcacaattacaccactttagaccctatgtgtagcaggtcacaacttacccttgtgtgtttagatgtgtatgaaatacctgtatacgttagtgaaagctgtttactgtaacggggaaaaccagattctttgcatctgggccctctactgattgttaaaggagttcctgtcacctgctccccccacccccgcatgcgtctgtccacttggctaacttttaatatgtgtatttttacattatgtatattcttaactggactgtctcgtttagactgtatacatcatatctgacattattgtaactaccgtgtgatcagtaagattcctgtaagaaatactgctttttaagaaaaaaaataacatgctgaggggtgacctatatcccatgtgagtggtcactttatttataggatctttaaaacatttttaatgaactaagttgaataaaggcacaattaaaaactgtca

SEQ ID NO: 402017 - DNA, 3040 bp, Homo sapiens
  misc_feature (2757)..(2757): n is a, c, g, or t
gcacgcagagggggccagggctccacgggcgagcggcgaccctgcctcccggagacggcgcggcctgccctgcgcgcctcagccccgggtgccggcgtctcgggcagcaccaccaagtctctctggaggggaaaggatggtcggatttgccccatgtcccttcctctgacccctccctcaagagtgccccgggacaccccgcctgtggctcagcctcccccgccccgcgctgccatctcctcagggccgggcagcaggctcccgagcgcccacagacccggggtgcggcccagcccacaaccgtcacctcaggggcctcaggcgcccagcggtgctgggcggggctggggcacgaccgggagcatgcgcagagcgcgcgtttcgcccatcgcgcacgcgcacacacctgctccgcccccacgctgcgtgccgctgctgggttccgccacgcccgtcatggcggcggccccggccggctctggccccgcccctcggtgacgcgtcgcgagtcacctgaccaggctgcgggctgaggagatacaagggaagtggctatcgccagagtcggattcgccgccgcagcagccgccgcccccgggagccgccgggaccctcgcgtcgtcgccgccgccgccgcccagatccccgcaccatgccgtcggagaagaccttcaagcagcgccgcaccttcgaacaaagagtagaagatgtccgacttattcgagagcagcatccaaccaaaatcccggtgataatagaacgatacaagggtgagaagcagcttcctgttctggataaaacaaagttccttgtacctgaccatgtcaacatgagtgagctcatcaagataattagaaggcgcttacagctcaatgctaatcaggccttcttcctgttggtgaacggacacagcatggtcagcgtctccacaccaatctcagaggtgtatgagagtgagaaagatgaagatggattcctgtacatggtctatgcctcccaggagacgttcgggatgaaattgtcagtgtaaaaccagaaaaaatgcatctcttctagaattgtttaaacccttaccaaggaaaaaaaaggggtgttaccaactgagatcgatcagttcatccaatcacagatcatgaaacagtagtgttcccacctaggagtgttaggaagttgtgtttgtgtttcaagcagaaaaactgagctccaagtgagcacattcagctttggaaactatattatttaatgtaggctagcttgttttcaaattttaaaagtttaaaaataaaatactttgcattctaagttgccaataaaatagaccttcaagttattttaatgctcttttctcactaataggaacttgtaattccagcagtaatttaaaggctttcagagagaccctgagtcttctcttcaggttcacagaacccgccgcctttttgggtagaagttttctactcagctagagagatctccctaagaggatctttaggcctgagttgtgaagcgcaacccccgcaaaacgcatttgccatcacagttggcacaaacgcagggtaaacgggctgtgtgagaaaacggccctgactgtaaactgctgaaggtccctgactcctaagagaaccacacccaaagtcctcactcttgcaggggtagacatttctggtttggtttgttctctagatagttacacacataaagacaccactcaaaaggaaacttgaataatttataattttgatcgagtttcttaaaagaccctggagaaagagtggcatttcttctgtttcaggttttgtctgagttcaaactagtgcctgtgttgttacggaaagcagcagtgtaccagtgtcactctggagtacagcgggagaaacacaaaatagtataactgaaaacattaacattcagacacactcccttctgccttccggcttaaagctgtggatgatccacgtttttgtttttttaatgttaaatgtgtaactcagtattactgaaaaggtacccacattttgaatagtagttatcactcttaggtcagacagccatcagaattctcccacaccaagtgcatgtcagttgtggagaaaacatagcaaaaagagccgtacgctctttacagatactaatgtcaagagttaaacctcctcaggttcaacctgtgataaaagactagtgcttcccagtacttgcatggggttcactatttatagttttcttgggagtatcacaggaaaatcacaattacaccactttagaccctatgtgtagcaggtcacaacttacccttgtgtgtttagatgtgtatgaaatacctgtatacgttagtgaaagctgtttactgtaacggggaaaaccagattctttgcatctgggccctctactgattgttaaaggagttcctgtcacctgctccccccacccccgcatgcgtctgtccacttggctaacttttaatatgtgtatttttacattatgtatattcttaactggactgtctcgtttagactgtatacatcatatctgacattattgtaactaccgtgtgatcagtaagattcctgtaagaaatactgctttttaagaaaaaaaataacatgctgaggggtgacctatatcccatgtgagtggtcactttatttataggatctttaaaacatttttaatgaactaagttgaataaaggcacaattaaaaactgtcaaaaaaaaaaaagaaaaaggcaggtttctgtttggttggcgccctaacggncagaactaaagcaccttggcaggaatgaagttgggtctgcaagtcgggctgaatggttggggcgaattgggcataggcgctctggctgcaaatgggccgtaaaggactcactaatggtgccacttcgggacgggcggcaggcctcgaggttggacggcctttccaataattggggctcgaactgcaaccgcggagcttatcgatctgtgttttcacacttgatttggccaagcgccaaagaccctggccgcttcacggaggcggtttcacacgcgtgtacact

SEQ ID NO: 402018 - DNA, 2646 bp, Homo sapiens
gcacgcagagggggccagggctccacgggcgagcggcgaccctgcctcccggagacggcgcggcctgccctgcgcgcctcagccccgggtgccggcgtctcgggcagcaccaccaagtctctctggaggggaaaggatggtcggatttgccccatgtcccttcctctgacccctccctcaagagtgccccgggacaccccgcctgtggctcagcctcccccgccccgcgctgccatctcctcagggccgggcagcaggctcccgagcgcccacagacccggggtgcggcccagcccacaaccgtcacctcaggggcctcaggcgcccagcggtgctgggcggggctggggcacgaccgggagcatgcgcagagcgcgcgtttcgcccatcgcgcacgcgcacacacctgctccgcccccacgctgcgtgccgctgctgggttccgccacgcccgtcatggcggcggccccggccggctctggccccgcccctcggtgacgcgtcgcgagtcacctgaccaggctgcgggctgaggagatacaagggaagtggctatcgccagagtcggattcgccgccgcagcagccgccgcccccgggagccgccgggaccctcgcgtcgtcgccgccgccgccgcccagatccccgcaccatgccgtcggagaagaccttcaagcagcgccgcaccttcgaacaaagagtagaagatgtccgacttattcgagagcagcatccaaccaaaatcccggtgataatagaacgatacaagggtgagaagcagcttcctgttctggataaaacaaagttccttgtacctgaccatgtcaacatgagtgagctcatcaagataattagaaggcgcttacagctcaatgctaatcaggccttcttcctgttggtgaacggacacagcatggtcagcgtctccacaccaatctcagaggtgtatgagagtgagaaagatgaagatggattcctgtacatggtctatgcctcccaggagacgttcgggatgaaattgtcagtgtaaaaccagaaaaaatgcatctcttctagaattgtttaaacccttaccaaggaaaaaaaaggggtgttaccaactgagatcgatcagttcatccaatcacagatcatgaaacagtagtgttcccacctaggagtgttaggaagttgtgtttgtgtttcaagcagaaaaactgagctccaagtgagcacattcagctttggaaactatattatttaatgtaggctagcttgttttcaaattttaaaagttgctcttttctcactaataggaacttgtaattccagcagtaatttaaaggctttcagagagaccctgagtcttctcttcaggttcacagaacccgccgcctttttgggtagaagttttctactcagctagagagatctccctaagaggatctttaggcctgagttgtgaagcgcaacccccgcaaaacgcatttgccatcacagttggcacaaacgcagggtaaacgggctgtgtgagaaaacggccctgactgtaaactgctgaaggtccctgactcctaagagaaccacacccaaagtcctcactcttgcaggggtagacatttctggtttggtttgttctctagatagttacacacataaagacaccactcaaaaggaaacttgaataatttataattttgatcgagtttcttaaaagaccctggagaaagagtggcatttcttctgtttcaggttttgtctgagttcaaactagtgcctgtgttgttacggaaagcagcagtgtaccagtgtcactctggagtacagcgggagaaacacaaaatagtataactgaaaacattaacattcagacacactcccttctgccttccggcttaaagctgtggatgatccacgtttttgtttttttaatgttaaatgtgtaactcagtattactgaaaaggtacccacattttgaatagtagttatcactcttaggtcagacagccatcagaattctcccacaccaagtgcatgtcagttgtggagaaaacatagcaaaaagagccgtacgctctttacagatactaatgtcaagagttaaacctcctcaggttcaacctgtgataaaagactagtgcttcccagtacttgcatggggttcactatttatagttttcttgggagtatcacaggaaaatcacaattacaccactttagaccctatgtgtagcaggtcacaacttacccttgtgtgtttagatgtgtatgaaatacctgtatacgttagtgaaagctgtttactgtaacggggaaaaccagattctttgcatctgggccctctactgattgttaaaggagttcctgtcacctgctccccccacccccgcatgcgtctgtccacttggctaacttttaatatgtgtatttttacattatgtatattcttaactggactgtctcgtttagactgtatacatcatatctgacattattgtaactaccgtgtgatcagtaagattcctgtaagaaatactgctttttaagaaaaaaaataacatgctgaggggtgacctatatcccatgtgagtggtcactttatttataggatctttaaaacatttttaatgaactaagttgaataaaggcacaattaaaaactgtca

SEQ ID NO: 402019 - DNA, 2292 bp, Homo sapiens
  misc_feature (2292)..(2292): n is a, c, g, or t
gcacgcagagggggccagggctccacgggcgagcggcgaccctgcctcccggagacggcgcggcctgccctgcgcgcctcagccccgggtgccggcgtctcgggcagcaccaccaagtctctctggaggggaaaggatggtcggatttgccccatgtcccttcctctgacccctccctcaagagtgccccgggacaccccgcctgtggctcagcctcccccgccccgcgctgccatctcctcagggccgggcagcaggctcccgagcgcccacagacccggggtgcggcccagcccacaaccgtcacctcaggggcctcaggcgcccagcggtgctgggcggggctggggcacgaccgggagcatgcgcagagcgcgcgtttcgcccatcgcgcacgcgcacacacctgctccgcccccacgctgcgtgccgctgctgggttccgccacgcccgtcatggcggcggccccggccggctctggccccgcccctcggtgacgcgtcgcgagtcacctgaccaggctgcgggctgaggagatacaagggaagtggctatcgccagagtcggattcgccgccgcagcagccgccgcccccgggagccgccgggaccctcgcgtcgtcgccgccgccgccgcccagatccccgcaccatgccgtcggagaagaccttcaagcagcgccgcaccttcgaacaaagagtagaagatgtccgacttattcgagagcagcatccaaccaaaatcccggtgataatagaacgatacaagggtgagaagcagcttcctgttctggataaaacaaagttccttgtacctgaccatgtcaacatgagtgagctcatcaagataattagaaggcgcttacagctcaatgctaatcaggccttcttcctgttggtgaacggacacagcatggtcagcgtctccacaccaatctcagaggtgtatgagagtgagaaagatgaagatggattcctgtacatggtctatgcctcccaggagacgttcgggatgaaattgtcagtgtaaaaccagaaaaaatgcatctcttctagaattgtttaaacccttaccaaggaaaaaaaaggggtgttaccaactgagatcgatcagttcatccaatcacagatcatgaaacagtagtgttcccacctaggagtgttaggaagttgtgtttgtgtttcaagcagaaaaactgagctccaagtgagcacattcagctttggaaactatattatttaatgtaggctagcttgttttcaaattttaaaagtttaaaaataaaatactttgcattctaagttgccaataaaatagaccttcaagttattttaatgctcttttctcactaataggaacttgtaattccagcagtaatttaaaggctttcagagagaccctgagtcttctcttcaggttcacagaacccgccgcctttttgggtagaagttttctactcagctagagagatctccctaagaggatctttaggcctgagttgtgaagcgcaacccccgcaaaacgcatttgccatcacagttggcacaaacgcagggtaaacgggctgtgtgagaaaacggccctgactgtaaactgctgaaggtccctgactcctaagagaaccacacccaaagtcctcactcttgcaggggtagacatttctggtttggtttgttctctagatagttacacacataaagacaccactcaaaaggaaacttgaataatttataattttgatcgagtttcttaaaagaccctggagaaagagtggcatttcttctgtttcaggttttgtctgagttcaaactagtgcctgtgttgttacggaaagcagcagtgtaccagtgtcactctggagtacagcgggagaaacacaaaatagtataactgaaaacattaacattcagacacactcccttctgccttccggcttaaagctgtggatgatccacgtttttgtttttttaatgttaaatgtgtaactcagtattactgaaaaggtacccacattttgaatagtagttatcactcttaggtcagacagccatcagaattctcccacaccaagtgcatgtcagttgtggagaaacagttcaaaagcgtgctcttcagattctatgcaagtacaccccttgtgacggaacacgatctcccatcgagtgacattatttcgcggtaagggatcaatacctagcatgtggacaacggtgtatgctacagctaatgagggtagcattagtgctgttaatgatcaacagcaatatgtgcgtattatgcgtgcgtttcgn

SEQ ID NO: 402020 - DNA, 1020 bp, Homo sapiens
  misc_feature (2)..(3): n is a, c, g, or t
  misc_feature (5)..(5): n is a, c, g, or t
  misc_feature (7)..(7): n is a, c, g, or t
tnntntntgcttttaactgacaatttcatcccgaacgtctcctgggaggcatagaccatgtacaggaatccatcttcatctttctcactctcatacacctctgagattggtgtggagacgctgaccatgcctgtgttgttacggaaagcagcagtgtaccagtgtcactctggagtacagcgggagaaacacaaaatagtataactgaaaacattaacattcagacacactcccttctgccttccggcttaaagctgtggatgatccacgtttttgtttttttaatgttaaatgtgtaactcagtattactgaaaaggtacccacattttgaatagtagttatcactcttaggtcagacagccatcagaattctcccacaccaagtgcatgtcagttgtggagaaaacatagcaaaaagagccgtacgctctttacagatactaatgtcaagagttaaacctcctcaggttcaacctgtgataaaagactagtgcttcccagtacttgcatggggttcactatttatagttttcttgggagtatcacaggaaaatcacaattacaccactttagaccctatgtgtagcaggtcacaacttacccttgtgtgtttagatgtgtatgaaatacctgtatacgttagtgaaagctgtttactgtaacggggaaaaccagattctttgcatctgggccctctactgattgttaaaggagttcctgtcacctgctccccccacccccgcatgcgtctgtccacttggctaacttttaatatgtgtatttttacattatgtatattcttaactggactgtctcgtttagactgtatacatcatatctgacattattgtaactaccgtgtgatcagtaagattcctgtaagaaatactgctttttaagaaaaaaaataacatgctgaggggtgacctatatcccatgtgagtggtcactttatttataggatctttaaaacatttttaatgaactaagttgaataaaggcacaattaaaaactgtca

SEQ ID NO: 402021 - DNA, 1648 bp, Homo sapiens
  misc_feature (1365)..(1365): n is a, c, g, or t
gcacgcagagggggccagggctccacgggcgagcggcgaccctgcctcccggagacggcgcggcctgccctgcgcgcctcagccccgggtgccggcgtctcgggcagcaccaccaagtctctctggaggggaaaggatggtcggatttgccccatgtcccttcctctgacccctccctcaagagtgccccgggacaccccgcctgtggctcagcctcccccgccccgcgctgccatctcctcagggccgggcagcaggctcccgagcgcccacagacccggggtgcggcccagcccacaaccgtcacctcaggggcctcaggcgcccagcggtgctgggcggggctggggcacgaccgggagcatgcgcagagcgcgcgtttcgcccatcgcgcacgcgcacacacctgctccgcccccacgctgcgtgccgctgctgggttccgccacgcccgtcatggcggcggccccggccggctctggccccgcccctcggtgacgcgtcgcgagtcacctgaccaggctgcgggctgaggagatacaagggaagtggctatcgccagagtcggattcgccgccgcagcagccgccgcccccgggagccgccgggaccctcgcgtcgtcgccgccgccgccgcccagatccccgcaccatgccgtcggagaagaccttcaagcagcgccgcaccttcgaacaaagagtagaagatgtccgacttattcgagagcagcatccaaccaaaatcccggtgataatagaacgatacaagggtgagaagcagcttcctgttctggataaaacaaagttccttgtacctgaccatgtcaacatgagtgagctcatcaagataattagaaggcgcttacagctcaatgctaatcaggccttcttcctgttggtgaacggacacagcatggtcagcgtctccacaccaatctcagaggtgtatgagagtgagaaagatgaagatggattcctgtacatggtctatgcctcccaggagacgttcgggatgaaattgtcagtgtaaaaccagaaaaaatgcatctcttctagaattgtttaaacccttaccaaggaaaaaaaaggggtgttaccaactgagatcgatcagttcatccaatcacagatcatgaaacagtagtgttcccacctaggagtgttaggaagttgtgtttgtgtttcaagcagaaaaactgagctccaagtgagcacattcagctttggaaactatattatttaatgtaggctagcttgttttcaaattttaaaagtttaaaaataaaatactttgcattctaagttgccaataaaaaaaaaaaaaaagaaaaaggcaggtttctgtttggttggcgccctaacggncagaactaaagcaccttggcaggaatgaagttgggtctgcaagtcgggctgaatggttggggcgaattgggcataggcgctctggctgcaaatgggccgtaaaggactcactaatggtgccacttcgggacgggcggcaggcctcgaggttggacggcctttccaataattggggctcgaactgcaaccgcggagcttatcgatctgtgttttcacacttgatttggccaagcgccaaagaccctggccgcttcacggaggcggtttcacacgcgtgtacact

SEQ ID NO: 402022 - DNA, 1056 bp, Homo sapiens
gcacgcagagggggccagggctccacgggcgagcggcgaccctgcctcccggagacggcgcggcctgccctgcgcgcctcagccccgggtgccggcgtctcgggcagcaccaccaagtctctctggaggggaaaggatggtcggatttgccccatgtcccttcctctgacccctccctcaagagtgccccgggacaccccgcctgtggctcagcctcccccgccccgcgctgccatctcctcagggccgggcagcaggctcccgagcgcccacagacccggggtgcggcccagcccacaaccgtcacctcaggggcctcaggcgcccagcggtgctgggcggggctggggcacgaccgggagcatgcgcagagcgcgcgtttcgcccatcgcgcacgcgcacacacctgctccgcccccacgctgcgtgccgctgctgggttccgccacgcccgtcatggcggcggccccggccggctctggccccgcccctcggtgacgcgtcgcgagtcacctgaccaggctgcgggctgaggagatacaagggaagtggctatcgccagagtcggattcgccgccgcagcagccgccgcccccgggagccgccgggaccctcgcgtcgtcgccgccgccgccgcccagatccccgcaccatgccgtcggagaagaccttcaagcagcgccgcaccttcgaacaaagagtagaagatgtccgacttattcgagagcagcatccaaccaaaatcccggtgataatagaacgatacaagggtgagaagcagcttcctgttctggataaaacaaagttccttgtacctgaccatgtcaacatgagtgagctcatcaagataattagaaggcgcttacagctcaatgctaatcaggccttcttcctgttggtgaacggacacagcatggtcagcgtctccacaccaatctcagaggtgtatgagagtgagaaagatgaagatggattcctgtacatggtctatgcctcccaggagacgttcgggatgaaatgtcgacgcggccgcgaatttagtagtagtagtcgacc

SEQ ID NO: 402023 - DNA, 1112 bp, Homo sapiens
gcacgcagagggggccagggctccacgggcgagcggcgaccctgcctcccggagacggcgcggcctgccctgcgcgcctcagccccgggtgccggcgtctcgggcagcaccaccaagtctctctggaggggaaaggatggtcggatttgccccatgtcccttcctctgacccctccctcaagagtgccccgggacaccccgcctgtggctcagcctcccccgccccgcgctgccatctcctcagggccgggcagcaggctcccgagcgcccacagacccggggtgcggcccagcccacaaccgtcacctcaggggcctcaggcgcccagcggtgctgggcggggctggggcacgaccgggagcatgcgcagagcgcgcgtttcgcccatcgcgcacgcgcacacacctgctccgcccccacgctgcgtgccgctgctgggttccgccacgcccgtcatggcggcggccccggccggctctggccccgcccctcggtgacgcgtcgcgagtcacctgaccaggctgcgggctgaggagatacaagggaagtggctatcgccagagtcggattcgccgccgcagcagccgccgcccccgggagccgccgggaccctcgcgtcgtcgccgccgccgccgcccagatccccgcaccatgccgtcggagaagaccttcaagcagcgccgcaccttcgaacaaagagtagaagatgtccgacttattcgagagcagcatccaaccaaaatcccggtaggtagtctcaggcctcggtttcagtcatgaatgtacgcagaggagagcaccgcataagtgcatccacttgacgggtttttacaggaatcaccagacagccaaaccctgggtgtcagtttcacaacctagagagaggtatcctttttttaagagacagggtctcactctctttcccaggctggagtgcagtggtgcgatcgtagctcagtgcagtctcagccaccttgtgctcaagcagtcctccctcctcagcctcctgagtagctctgactagaggcacacaccactacacctggctaattttttaagttttttgtagagacagggtcttgctatgtttaacaacccaggctgatctcaa

SEQ ID NO: 402024 - DNA, 1315 bp, Homo sapiens
gcacgcagagggggccagggctccacgggcgagcggcgaccctgcctcccggagacggcgcggcctgccctgcgcgcctcagccccgggtgccggcgtctcgggcagcaccaccaagtctctctggaggggaaaggatggtcggatttgccccatgtcccttcctctgacccctccctcaagagtgccccgggacaccccgcctgtggctcagcctcccccgccccgcgctgccatctcctcagggccgggcagcaggctcccgagcgcccacagacccggggtgcggcccagcccacaaccgtcacctcaggggcctcaggcgcccagcggtgctgggcggggctggggcacgaccgggagcatgcgcagagcgcgcgtttcgcccatcgcgcacgcgcacacacctgctccgcccccacgctgcgtgccgctgctgggttccgccacgcccgtcatggcggcggccccggccggctctggccccgcccctcggtgacgcgtcgcgagtcacctgaccaggctgcgggctgaggagatacaagggaagtggctatcgccagagtcggattcgccgccgcagcagccgccgcccccgggagccgccgggaccctcgcgtcgtcgccgccgccgccgcccagatccccgcaccatgccgtcggagaagaccttcaagcagcgccgcaccttcgaacaaagagtagaagatgtccgacttattcgagagcagcatccaaccaaaatcccggtgataatagaacgatacaagggtgagaagcagcttcctgttctggataaaacaaagttccttgtacctgaccatgtcaacatgagtgagctcatcaagataattagaaggcgcttacagctcaatgctaatcaggccttcttcctgttggtgaacggacacagcatggtcagcgtctccacaccaatctcagaggtgtatgagagtgagaaagatgaagatggattcctgtacatggtctatgcctcccaggagacgttcgggatgaaattgtcagtgtaaaaccagaaaaaatgcatctcttctagaattgtttaaacccttaccaaggaaaaaaaaggggtgttaccaactgagatcgatcagttcatccaatcacagatcatgaaacagtagtgttcccacctaggagtgttaggaagttgtgtttgtgtttcaagcagaaaaactgagctccaagtgagcacattcagctttggaaactatattatttaatgtaggctagcttgttttcaaattttaaaagtttaaaaataaaatactttgcattctaagttgccaataaaa

SEQ ID NO: 402025 - DNA, 1186 bp, Homo sapiens
gcacgcagagggggccagggctccacgggcgagcggcgaccctgcctcccggagacggcgcggcctgccctgcgcgcctcagccccgggtgccggcgtctcgggcagcaccaccaagtctctctggaggggaaaggatggtcggatttgccccatgtcccttcctctgacccctccctcaagagtgccccgggacaccccgcctgtggctcagcctcccccgccccgcgctgccatctcctcagggccgggcagcaggctcccgagcgcccacagacccggggtgcggcccagcccacaaccgtcacctcaggggcctcaggcgcccagcggtgctgggcggggctggggcacgaccgggagcatgcgcagagcgcgcgtttcgcccatcgcgcacgcgcacacacctgctccgcccccacgctgcgtgccgctgctgggttccgccacgcccgtcatggcggcggccccggccggctctggccccgcccctcggtgacgcgtcgcgagtcacctgaccaggctgcgggctgaggagatacaagggaagtggctatcgccagagtcggattcgccgccgcagcagccgccgcccccgggagccgccgggaccctcgcgtcgtcgccgccgccgccgcccagatccccgcaccatgccgtcggagaagaccttcaagcagcgccgcaccttcgaacaaagagtagaagatgtccgacttattcgagagcagcatccaaccaaaatcccggtgataatagaacgatacaagggtgagaagcagcttcctgttctggataaaacaaagttccttgtacctgaccatgtcaacatgagtgagctcatcaagataattagaaggcgcttacagctcaatgctaatcaggccttcttcctgttggtgaacggacacagcatggtcagcgtctccacaccaatctcagaggtgtatgagagtgagaaagatgaagatggattcctgtacatggtctatgcctcccaggagacgttcgggatgaaattgtcagtgtaaaaccagaaaaaatgcatctcttctagaattgtttaaacccttaccaaaggacaacacaacggggggtggttcaaccaactggagaattcggatcaaggttcaattccaaatccacaggattcatggaaacccaggtaagtggtttcccaaacctta

SEQ ID NO: 402026 - DNA, 612 bp, Homo sapiens
tccgcggcggggtgcctgccgtaccccggccaccgccgcccccgcaagcgcgctgcgggcgagggtcgcgcttctggggcccaacagcccccggggccgcgctgggccgttcggctctgaagcggggctgcgccgggacccagcgcgtcaccttcagggctggttttcccgtcgagggagcccgcccgggtgcgagtgcctcttacagacctcagtgcctcggtcgagaggaggggaatgtgctgggccccggcctcgccgcgcccgggacggcccacagcggtgttgccagttcctgtctgtagcccaggagctggggtgggagacttctcttgggtttgcgattacgttctcaccttggcaccaggaataccgaatacatcccttttctgccggttcagactggaaacccagcttaggtgtgctggcatttggttaaacgtgcaggtgtcaccatcacaatatttactccacgcagatgatgcgaagtgattatttcccgcttgagcaagagaacgccgcagatccagaacaaagagtagaagatgtccgacttattcgagagcagcatccaaccaaaatcccgggtggaagaattactgtatatagaaa

SEQ ID NO: 402027 - DNA, 3364 bp, Homo sapiens
gcacgcagagggggccagggctccacgggcgagcggcgaccctgcctcccggagacggcgcggcctgccctgcgcgcctcagccccgggtgccggcgtctcgggcagcaccaccaagtctctctggaggggaaaggatggtcggatttgccccatgtcccttcctctgacccctccctcaagagtgccccgggacaccccgcctgtggctcagcctcccccgccccgcgctgccatctcctcagggccgggcagcaggctcccgagcgcccacagacccggggtgcggcccagcccacaaccgtcacctcaggggcctcaggcgcccagcggtgctgggcggggctggggcacgaccgggagcatgcgcagagcgcgcgtttcgcccatcgcgcacgcgcacacacctgctccgcccccacgctgcgtgccgctgctgggttccgccacgcccgtcatggcggcggccccggccggctctggccccgcccctcggtgacgcgtcgcgagtcacctgaccaggctgcgggctgaggagatacaagggaagtggctatcgccagagtcggattcgccgccgcagcagccgccgcccccgggagccgccgggaccctcgcgtcgtcgccgccgccgccgcccagatccccgcaccatgccgtcggagaagaccttcaagcagcgccgcaccttcgaacaaagagtagaagatgtccgacttattcgagagcagcatccaaccaaaatcccggtgataatagaacgatacaagggtgagaagcagcttcctgttctggataaaacaaagttccttgtacctgaccatgtcaacatgagtgagctcatcaagataattagaaggcgcttacagctcaatgctaatcaggccttcttcctgttggtgaacggacacagcatggtcagcgtctccacaccaatctcagaggtgtatgagagtgagaaagatgaagatggattcctgtacatggtctatgcctcccaggagacgttcgggatgaaattgtcagtgtaaaaccagaaaaaatgcatctcttctagaattgtttaaacccttaccaaggaaaaaaaaggggtgttaccaactgagatcgatcagttcatccaatcacagatcatgaaacagtagtgttcccacctaggagtgttaggaagttgtgtttgtgtttcaagcagaaaaactgagctccaagtgagcacattcagctttggaaactatattatttaatgtaggctagcttgttttcaaattttaaaagtttaaaaataaaatactttgcattctaagttgccaataaaatagaccttcaagttattttaatgctcttttctcactaataggaacttgtaattccagcagtaatttaaaggctttcagagagaccctgagtcttctcttcaggttcacagaacccgccgcctttttgggtagaagttttctactcagctagagagatctccctaagaggatctttaggcctgagttgtgaagcgcaacccccgcaaaacgcatttgccatcacagttggcacaaacgcagggtaaacgggctgtgtgagaaaacggccctgactgtaaactgctgaaggtccctgactcctaagagaaccacacccaaagtcctcactcttgcaggggtagacatttctggtttggtttgttctctagatagttacacacataaagacaccactcaaaaggaaacttgaataatttataattttgatcgagtttcttaaaagaccctggagaaagagtggcatttcttctgtttcaggttttgtctgagttcaaactagtgcctgtgttgttacggaaagcagcagtgtaccagtgtcactctggagtacagcgggagaaacacaaaatagtataactgaaaacattaacattcagacacactcccttctgccttccggcttaaagctgtggatgatccacgtttttgtttttttaatgttaaatgtgtaactcagtattactgaaaaggtacccacattttgaatagtagttatcactcttaggtcagacagccatcagaattctcccacaccaagtgcatgtcagttgtggagaaaacatagcaaaaagagccgtacgctctttacagatactaatgtcaagagttaaacctcctcaggttcaacctgtgataaaagactagtgcttcccagtacttgcatggggttcactatttatagttttcttgggagtatcacaggaaaatcacaattacaccactttagaccctatgtgtagcaggtcacaacttacccttgtgtgtttagatgtgtatgaaatacctgtatacgttagtgaaagctgtttactgtaacggggaaaaccagattctttgcatctgggccctctactgattgttaaaggagttcctgtcacctgctccccccacccccgcatgcgtctgtccacttggctaacttttaatatgtgtatttttacattatgtatattcttaactggactgtctcgtttagactgtatacatcatatctgacattattgtaactaccgtgtgatcagtaagattcctgtaagaaatactgctttttaagaaaaaaaataacatgctgaggggtgacctatatcccatgtgagtggtcactttatttataggatctttaaaacatttttaatgaactaagttgaataaaggcacaattaaaaactgtcaaaaaaaaaagggcggccgccccttttttcttgcttgtataatgatcatttatgttctttttcacacttttgcaacaagggctaaaaaggggggggtcataacgggggaataaaccccgctgtcatactgcagcacaattattcggtgttatgaagaacattagacccaactaacagcgggcgacgtcaccccaacgggtattatttgtcacacaaaaaacacttcttttgggaacaaacttttgcaccacaaccagtaattgaggacatcaaaacgcacggggcccccagagtggaaacccccgggcgcaaaaatatgttgcgccacaagcagtttccaaggaacggacaccaagtagttatataacaccagggggaaaaatccccactcgcaccacaaggcgcaacacgcaactatacaaccaggtcaccgagtcgatcaagggggcgaacatttatcacccacccagtcagacaaaccacatatatacaccacacaggatacgtgtgatagaccccttactagacgacaataagattgacccacccgcaacagtaggtcgacccatcaaagacaagaacccccaaaccgtcgaagacacttgccagaaaatgccggcccaatgtctaaccacaaaccagatgtacgagaaatgac

SEQ ID NO: 402028 - DNA, 2346 bp, Homo sapiens
  misc_feature (2346)..(2346): n is a, c, g, or t
gcacgcagagggggccagggctccacgggcgagcggcgaccctgcctcccggagacggcgcggcctgccctgcgcgcctcagccccgggtgccggcgtctcgggcagcaccaccaagtctctctggaggggaaaggatggtcggatttgccccatgtcccttcctctgacccctccctcaagagtgccccgggacaccccgcctgtggctcagcctcccccgccccgcgctgccatctcctcagggccgggcagcaggctcccgagcgcccacagacccggggtgcggcccagcccacaaccgtcacctcaggggcctcaggcgcccagcggtgctgggcggggctggggcacgaccgggagcatgcgcagagcgcgcgtttcgcccatcgcgcacgcgcacacacctgctccgcccccacgctgcgtgccgctgctgggttccgccacgcccgtcatggcggcggccccggccggctctggccccgcccctcggtgacgcgtcgcgagtcacctgaccaggctgcgggctgaggagatacaagggaagtggctatcgccagagtcggattcgccgccgcagcagccgccgcccccgggagccgccgggaccctcgcgtcgtcgccgccgccgccgcccagatccccgcaccatgccgtcggagaagaccttcaagcagcgccgcaccttcgaacaaagagtagaagatgtccgacttattcgagagcagcatccaaccaaaatcccggtgataatagaacgatacaagggtgagaagcagcttcctgttctggataaaacaaagttccttgtacctgaccatgtcaacatgagtgagctcatcaagataattagaaggcgcttacagctcaatgctaatcaggccttcttcctgttggtgaacggacacagcatggtcagcgtctccacaccaatctcagaggtgtatgagagtgagaaagatgaagatggattcctgtacatggtctatgcctcccaggagacgttcgggatgaaattgtcagtgtaaaaccagaaaaaatgcatctcttctagaattgtttaaacccttaccaaggaaaaaaaaggggtgttaccaactgagatcgatcagttcatccaatcacagatcatgaaacagtagtgttcccacctaggagtgttaggaagttgtgtttgtgtttcaagcagaaaaactgagctccaagtgagcacattcagctttggaaactatattatttaatgtaggctagcttgttttcaaattttaaaagttttaaaaacaagctagcctacattaaataatataggctagcttgtttttaaactttaaaaataaaatactttgcattctaagttgccaataaaatagaccttcaagttattttaatgctcttttctcactaataggaacttgtaattccagcagtaatttaaaggctttcagagagaccctgagtcttctcttcaggttcacagaacccgccgcctttttgggtagaagttttctactcagctagagagatctccctaagaggatctttaggcctgagttgtgaagcgcaacccccgcaaaacgcatttgccatcacagttggcacaaacgcagggtaaacgggctgtgtgagaaaacggccctgactgtaaactgctgaaggtccctgactcctaagagaaccacacccaaagtcctcactcttgcaggggtagacatttctggtttggtttgttctctagatagttacacacataaagacaccactcaaaaggaaacttgaataatttataattttgatcgagtttcttaaaagaccctggagaaagagtggcatttcttctgtttcaggttttgtctgagttcaaactagtgcctgtgttgttacggaaagcagcagtgtaccagtgtcactctggagtacagcgggagaaacacaaaatagtataactgaaaacattaacattcagacacactcccttctgccttccggcttaaagctgtggatgatccacgtttttgtttttttaatgttaaatgtgtaactcagtattactgaaaaggtacccacattttgaatagtagttatcactcttaggtcagacagccatcagaattctcccacaccaagtgcatgtcagttgtggagaaacagttcaaaagcgtgctcttcagattctatgcaagtacaccccttgtgacggaacacgatctcccatcgagtgacattatttcgcggtaagggatcaatacctagcatgtggacaacggtgtatgctacagctaatgagggtagcattagtgctgttaatgatcaacagcaatatgtgcgtattatgcgtgcgtttcgn

SEQ ID NO: 402029 - DNA, 1226 bp, Homo sapiens
gcacgcagagggggccagggctccacgggcgagcggcgaccctgcctcccggagacggcgcggcctgccctgcgcgcctcagccccgggtgccggcgtctcgggcagcaccaccaagtctctctggaggggaaaggatggtcggatttgccccatgtcccttcctctgacccctccctcaagagtgccccgggacaccccgcctgtggctcagcctcccccgccccgcgctgccatctcctcagggccgggcagcaggctcccgagcgcccacagacccggggtgcggcccagcccacaaccgtcacctcaggggcctcaggcgcccagcggtgctgggcggggctggggcacgaccgggagcatgcgcagagcgcgcgtttcgcccatcgcgcacgcgcacacacctgctccgcccccacgctgcgtgccgctgctgggttccgccacgcccgtcatggcggcggccccggccggctctggccccgcccctcggtgacgcgtcgcgagtcacctgaccaggctgcgggctgaggagatacaagggaagtggctatcgccagagtcggattcgccgccgcagcagccgccgcccccgggagccgccgggaccctcgcgtcgtcgccgccgccgccgcccagatccccgcaccatgccgtcggagaagaccttcaagcagcgccgcaccttcgaacaaagagtagaagatgtccgacttattcgagagcagcatccaaccaaaatcccggtgataatagaacgatacaagggtgagaagcagcttcctgttctggataaaacaaagttccttgtacctgaccatgtcaacatgagtgagctcatcaagataattagaaggcgcttacagctcaatgctaatcaggccttcttcctgttggtgaacggacacagcatggtcagcgtctccacaccaatctcagaggtgtatgagagtgagaaattgaacgttcttctcaaataacagacaaaaatccaataagctctccatcttactcatgacattcactctttctgtctccctccctgtatctgtctgtccctcatttctaactctgcccgtctgtctacatctctgattaccctgctttctaactctgcctaggtgactgtccctctctgtttttgacttctctgtctctgactgaccctcctctctctctgcctattgcatgtgtctctatgactcgtgtgtgtgttagaattga

SEQ ID NO: 402030 - DNA, 1055 bp, Homo sapiens
gcattcccaaaggccccacctgttcattctaccccattggtagaattcccattgggaattaggcttcaacatacaaatttgggagacactgacatttaggccatagcgcgtcaaaggcaaagtgaggctgagtgtggaaaccatcccagaatctggatgtggcccaggcagaaggaaactcaaagtgatggggtgaccgatggtccctggtctgtgcaggactcagcggtgcggatggccctgggcacggtggcagtggctgttggaggatgatagggaacatgttggtggggggagggtggagcccactatgagtggcaactccctgggggcacaggaaacaaagctagaggtggctcccctctcccctccctgcacacagtgtcacctctgtggtggccctgtcgtccgcctcagttcacaggtgttgctgtaacaactcctgaaattaccttcaaaaaggaggctcgtgcaggtgcctgcaggagccaggaggccgaagtgcatcctgagtgtccggggacaggcagcctggcggggtccacggccccacagtcccaacgactgcctcagaaatgggcagagagcatgcctggttctagctggcaaggcccacatctcagagctgtggacagtcatgaagggtccgtgagcatggagagggggcaaaaatgacccatgaacctcaggccactgtgctgccatccagccaagtggggtaccagcccttcgggcctcgagatcctctacccttctctgggccttgctgatttcctcctccagcccctctgtttgtgtacgcacatacacacatgcacgcacgcacacgcacacccagtgcaatttctctctgctccctgtactccccaaaattcaatgggttcctctttcctcctcagagatatagtcctgggccccatctcagcctgcagaggcctgaacgtttcccaggattgtcttctaattctcaggtccggctttaaaacaaaacctaaactaaaactaaaatgctttctgcaaagaataatacaccaacataaagtccgggtatccta

SEQ ID NO: 402031 - DNA, 338 bp, Homo sapiens
atcctttgttctcattatacatcagaatgtctgtgtacagcagttaaggcataaaggaaagtaaaaatgcagttgaatctcaatactgtattttgcttttcagaactgcaattcttcaatttacattaggcatttaagattgttcaggaagcaaactaaaataataaaacaaaatgtccttaaatgtaatctcctttacttctacatcacgccagtgtgctactgggtatattatatatcctcccaatatatatttaaggaggtggtatgggtccaatagtaagaaaattttcttattttttcctgacaatattctgctaaaaatcatttgaatatgc

SEQ ID NO: 402032 - DNA, 212 bp, Homo sapiens
actcctgacctcaggtgatccaccctcctccacctcccaaagtgctgggattacaggcgtgagtcacaatgcctggctgatactttaattggaggtttttgttttgtttcagttacgaaactttcttctgctccttgaactcttcttttgtactgttttggcctgtctttcgtgttagtgactttatgtaaaaatctggtgattctcagcct

SEQ ID NO: 402033 - DNA, 285 bp, Homo sapiens
gagacaagcaggacaaaattcaaagcaacgagttaaagtaaaaacaaggttaggcatttcatgaccaaagccccttcgcctggcagcaagagagaaattcatacctcaccaagacccacacctctaacccttccccactgacaatccaccgcccagaagaggtatgggtcttctgctcttgcggcccccaagcccactccctgtgctgctgaggcttgacctccattccatcacacctgctgcttttcctcccaagcaggagttcctccacctggcctaggtttg

SEQ ID NO: 402034 - DNA, 472 bp, Homo sapiens
ctgtgggaatctgatgatgatgggtaatggcaactaacatttgagttactataccccaggcactgtgctaaacactttacatggcatatcctcacagctttcccatctagcagggaatattaggtacattttagaggagaacattaaggttgactgagccaaagtagcacacccaaggtgtgatacagcctgcgttcaaacccaggttgtcccatactctagagactgtgatgttaggacaaagtgtgatttcagaagatttgtaaagagaagaaagttgttagaatcacttctctaaagcatgctgattttgagattgctaaaattagaaactgtaccagaatttacatgacactttgtttggttttgaattaagtcattatgaggaagtacattaaaaaatgttaaaaggttcttcctgggaatttgtaatgcattcttcagttctaataaatgtattcttatatgctgg

SEQ ID NO: 402035 - DNA, 350 bp, Homo sapiens
ctgtgggaatctgatgatgatgggtaatggcaactaacatttgagttactataccccaggcactgtgctaaacactttacatggcatatcctcacagctttcccatctagcagggaatattaggtacattttagaggagaacattaaggttgactgagccaaagtagcacacccaaggtgtgatacagcctgcgttcaaacccaggttgtcccatactctagagactgtgatgttaggacaaagtgtgatttcagaagatttgtaaagagaagaaagttgttagaatcacttctctaaagcataagcttttaatgctgtaaaatatagtcgctgaaactttatccacttt

SEQ ID NO: 402036 - DNA, 112 bp, Homo sapiens
gtcttcccctccatcgttgggcaccccaggcaccagggcgtgatggtgggcatgggtcagaaggattcctatgtgggcgacgaggcccagagcaagagaggcatcctcaccc

SEQ ID NO: 402037 - DNA, 387 bp, Homo sapiens
aagcaaattcctaaacctagggatctgtgataatactgatgtcataaaaataatcagatttcagagctaaacatggactgttttagcaacaatgattaaatgttctgcatatggcaagagctccctaacgcactactaatatcactgtaaccatcatttagagtttagtaatcaccatatttaggtcatttttccaaagcaccaaggagactcagactccaaataggtttaatatctcaagaggactctacatggttgttggtgggacactgctgtgttcaggtcccaagaatccaggagtatgtaagtgaagccacttggtatttaacgataccctgagaaaatgaacaacacacacctccctaagaggcctccctttgtcgccgg

SEQ ID NO: 402038 - DNA, 266 bp, Homo sapiens
caatatacgaaaaatacttcctcgattgcctggcatataaaccctcaataaatatgttttaagatatatggttttccccaacatgatgataatttaaggaagggcgagaatcacatcttctgaattctttctaccttgagttactagagaaatatcttgggagtattcgatgctaagtatatgtttaggaaatgggttgatatttaaaataatcattattactaaaaaacacactgggcaaggcaaaattttcatgggctggagaa

SEQ ID NO: 402039 - DNA, 410 bp, Homo sapiens
ggggagaagggacaaggggacaaggtcagaggctgaagaagaaagatgcatcccagaggcagaacctgcagtgatggggctagactatggtggtggccgtggaaggggtgagaaggggcagaacaggacacagtgtgcagccagtgggcttggccggtggaccgagtgtggggcaagagagaggtgtcacggtgatgccagggcttggatgaagcctggagggctgacagtatccatggtacacacctcagtgggctccgaggggcatttgctctgattgattgattgatttttttcagatggagtctcgctgtgtctcccaggctggagtgcagtggtgcgatctcggcgtgagccaccgcgcccaggtttttgtttgtttgtttgtttgtttgtttttagagagggag

SEQ ID NO: 402040 - DNA, 968 bp, Homo sapiens
aatgaattcatcaattttttaaaaagaagcatgagatcaaaggtagaactaagtggtgaatttcacaaagtagacctaggcaatttcaaattggctgctatacttttcaaggtaaaggacacaaaccaaaggtacctatatattcttttcatgatatttatttcaaggagacagatcaaattaaaaacttcaagaatgttttctgcctggtaaataaatattccagcaacccacataggcacagactcagacacttagtccaatagaactccaaagaggttttcctgacactgagaagagggggtgagttttgggggaaaaatttttaaaaataaagtacttccagtctatatattgtaaactcacctattcatggatttgtgaaatttagaaacagcctaataaaaattctaggacaactgagttgtcacaacgtcacaagagcacaaattcatattgagtgacttttctagtaatatgaacaaaaccaacataaatttccctcaacatatcagaaataatatatattctatttagttccaagaaagaaaaaaaacttttataacttgagaaaactcaaaatatatgacaatctgtcactaaattaaaataagctatagtaataagtgactatgtaaaaaacccactacaactatgcgttcatcttcacgtacaaaggctatttctaaatgggtcagagtaaagctttggctgatacatgctgatggcagaatagggccagaaatgagccaaagctgtgtgtattccaaaactcattgatatttaaatctggagtgggtctttgtgcttacatttgaacatgttgtgagaacatgagcctcctgttgctttgtagtaatacatgctcattcttacaaaatgtttgccttgtatggttaaggtatttaactgaggctataaaaggagggcacattactttggtgggggtagaggagaatcaacacaac

SEQ ID NO: 402041 - DNA, 272 bp, Homo sapiens
tgttctggagggtcccggccggtggttataccattgatcagtgcccacgcaccaagaggcaaggattggacggtttctcattgatatttaaatctggagtgggtctttgtgcttacatttgaacatgttgtgagaacatgagcctcctgttgctttgtagtaatacatgctcattcttacaaaatgtttgccttgtatggttaaggtatttaactgaggctataaaaggagggcacattactttggtgggggtagaggagaatcaacacaac

SEQ ID NO: 402042 - DNA, 310 bp, Homo sapiens
cacacacacacacacacacttcactagagcctgtttgcagtaaccaaaaaaatgaaaacagggatctgattaaataaaataatgtacatctatgggactctctgtggcatttaaaagcatacagtggcaggtgcagttgagctctgggtcaccaagatgtcgttcccaaagtatactctatcacgcctggccactgtgcccccgaccctcaacccagccgaatacaacatatctccggacacccgacgggcgcaagttgagcagttggccataagagccgggctgaaatgagagtacctgcttcagtaca

SEQ ID NO: 402043 - DNA, 438 bp, Homo sapiens
gccctgcctgcagccctgttcacactaccctgtcaaagtcagatgccaaaaaagccgcctcaaagacgctgctggagaagagtcagtgcactaaccccagctgccggcagtgctggttctccaacagagtggtgtctagatttatcagagtaacgagaagacaaactccggcactgggtttgctccctgattaaagtgccttcagccaagaccatctctccctcctggtgaagtgtgacttcgaattagtttgcacttcctattggaaggtagagcccactgctcattgtataagccccgaggcctagagtggcagccaagagccatctgaagccacctctctgcctgttcctcccaagaggccagggtggccaggggtggtgagggcagttctgcacccagccaaacacataacaataaaaaccaaactctgtgtca

SEQ ID NO: 402044 - DNA, 1961 bp, Homo sapiens
caaagcttctttcctgagaatttaattttatttgctgtagattcaaaatgaggaagtggtaaatgcattatttactcaaagcataaagtcagccttaggtaggagatgtaacaactcctcaactttacactatccagttaaagccaatttttaaaaccttttttttccttatgatgacccttgagtcatagaaaacttttcattttagaaaatgttaagcatgaacacaaaaagactagataacagtgttataaacactcatgtacccaaggcccagctttaacattcatcacttagcatgtttaaggtagtgcttaggttgaaatttatattgtgtgtatcagaataaagagcagttcttgcagatagctagaattacttcatttttatagagtttagagcataaactaacaagggaatctaggctctttatagtaaatatctaaaagcattttattttacagaattgacagcgtatgccatgactattccatttgtcaggcaacaggtttacaaaaaagtggaagaaaaagtgcgaaagcagactaaaggcctttatcctgcacctctgaaaataattgatgtgagtcttacccaatattcccacttttctcatatttccttcctttatatagatcactcctccttattgccattctggaccatgtatgttgagtactaaatttcttaattctgctattaaagtatttaccaaaaataagggaagggcatagcaagctgtaaggactcatataaagtgatatatttggggaaaatcagtgctggacttactcattgattgatgcagttaaatgtatcagtaacaaaccagaaaaccaggaaaggaacctaagtcatatcagtatcacaaagccattagagtgtcaggcactaaccaaaaagtagttgaaacaaaattgatggctctgttctattcttggtcaacatcattgtcagtacctaaaatccctcaaggacttcttcattgctgtaattataaaaaagatgtaatgatgtagagaagctctgcaaaagatcaatgagaataattaaaatgatcacaggattcaagaaatctccaacagtagactttaaaacttagaacttttcagtgtggaaagtccaagattaagagagtatataaccaaagacttcagaattggtgaatgggtcagtcagcaagtatatcttgagtagaaggcaccaaagcacataaaatatgaaacatgcccccacctgccttcgtctcacaggctggactggggaagttagatatatatatgtgttaaggtggatagcctttaagagatataaggcagcataagattaatgccagatgagtgggacagaggaggcaacaattaccatgagacaaagagatcagtaagtgcctcatgggatctgaccccaaccctgaaagctgggtggaggataggtgaaggagggaaagtattgccaaggagggtgggcatttagagcaaagttatggaagctggaaaacaagctcttcaaggaacattagtgagaccagtatttgtgggggataatgagatgttagtctgaagaaaggcagattgaagctggattttagaaggttggtaataatgaattgagaaattttacctttgtccgataaagattctagagagccattttcatggtagtgggtaaaaatggtttcgaaggagagacaaagtagagcagtgaattagcaaaactgtcctgataatccaggcttgagctttgaataaggccctgagatagaatagtaaaaataggaaagcagcaacaggcttgccaaagagaggttatgagttaggttcagatatatggagttcagatattttgggaaattcaagcaacagtagtttagacagagaagtcagagttagagatgtcaatttgcttatttctaaaaatttgtcattctcataaattatgatagtgagtaagtacagggt

SEQ ID NO: 402045 - DNA, 633 bp, Homo sapiens
tagttgtgcctgcattagttggtttattgaataacttaggcaatcttccactttgactgaaatgattaagatcagtttaccgaaagtcatttcatccttgccttgcaggcatctggctattcttggtgcagggctgatgggagcaggcatcgcccaagtctccgtggataaggggctaaagactatacttaaagatgccaccctcactgcgctagaccgaggacagcaacaagtgttcaaagggtaagcctgctctctctctttgcaagagttagaatgtcctttgtttcttggttagttgttttttgtggtggcttggtgggtttttttgtttgtttgttcttgccatcacggattcctttttcctgaacataatgagttctagatactccgtagtgaagccaagtttcttttgatttttagaaatgccaattccttctttgacttcgttttgttatagatatcatagacaattaacatccttggagtctgtagtctttgaatgcagaagggaaaatcttatctagtagatacttgttaatgccattttacactttcgtatcaggcctgcggattttgatatagtttgcaggtaattgctctattgttaaggattattcaaacagcatgact

SEQ ID NO: 402046 - DNA, 2638 bp, Homo sapiens
agccgcttttctgccttcaggatcctccgctcccgaggttatatatgccgcaattttacagggtcttctgcttgctgaccagaacccatattaactatggagtcaaaggggatgtggcagtgttcgaattaactctcccaattcaaaggtaaatacactgagtaaagagctacattcagagttctcagaagttatgaatgaaatctgggctagtgatcaaatcagaagtgccgtccttatctcatcaaagccaggctgctttattgcaggtgctgatatcaacatgttagccgcttgcaagacccttcaagaagtaacacagctatcacaagaagcacagagaatagttgagaaacttgaaaagtccacaaagcctattgtggctgccatcaatggatcctgcctgggaggaggacttgaggttgccatttcatgccaatacagaatagcaacaaaagacagaaaaacagtattaggtacccctgaagttttgctgggggccttaccaggagcaggaggcacacaaaggctgcccaaaatggtgggtgtgcctgctgctttggacatgatgctgactggtagaagcattcgtgcagacagggcaaagaaaatgggactggttgaccaactggtggaacccctgggaccaggactaaaacctccagaggaacggacaatagaatacctagaagaagttgcaattacttttgccaaaggactagctgataagaagatctctccaaagagagacaagggattggtggaaaaattgacagcgtatgccatgactattccatttgtcaggcaacaggtttacaaaaaagtggaagaaaaagtgcgaaagcagactaaaggcctttatcctgcacctctgaaaataattgatgtggtaaagactggaattgagcaagggagtgatgccggttatctctgtgaatctcagaaatttggagagcttgtaatgaccaaagaatcaaaggccttgatgggactctaccatggtcaggtcctgtgcaagaagaataaatttggagctccacagaaggatgttaagcatctggctattcttggtgcagggctgatgggagcaggcatcgcccaagtctccgtggataaggggctaaagactatacttaaagatgccaccctcactgcgctagaccgaggacagcaacaagtgttcaaaggattgaatgacaaagtgaagaagaaagctctaacatcatttgaaagggattccatcttcagcaacttgactgggcagcttgattaccaaggttttgaaaaggccgacatggtgattgaagctgtgtttgaggaccttagtcttaagcacagagtgctaaaggaagtagaagcggtgattccagatcactgtatctttgccagtaacacatctgctctcccaatcagtgaaatcgctgctgtcagcaaaagacctgagaaggtgattggcatgcactacttctctcccgtggacaagatgcagctgctggagattatcacgaccgagaaaacttccaaagacaccagtgcttcagctgtagcagttggtctcaagcaggggaaggtcatcattgtggttaaggatggacctggcttctatactaccaggtgtcttgcgcccatgatgtctgaagtcatccgaatcctccaggaaggagttgacccgaagaagctggattccctgaccacaagctttggctttcctgtgggtgccgccacactggtggatgaagttggtgtggatgtagcgaaacatgtggcggaagatctgggcaaagtctttggggagcggtttggaggtggaaacccagaactgctgacacagatggtgtccaagggcttcctaggtcgtaaatctgggaagggcttttacatctatcaggagggtgtgaagaggaaggatttgaattctgacatggatagtattttagcgagtctgaagctgcctcctaagtctgaagtctcatcagacgaagacatccagttccgcctggtgacaagatttgtgaatgaggcagtcatgtgcctgcaagaggggatcttggccacacctgcagagggagacatcggagccgtctttgggcttggcttcccgccttgtctgggagggcctttccgctttgtggatctgtatggcgcccagaagatagtggaccggctcaagaaatatgaagctgcctatggaaaacagttcaccccatgccagctgctagctgaccatgctaacagccctaacaagaagttctaccagtgagcaggcctcatgcctcgctcagtcagtgcactaaccccagctgccggcagtgctggttctccaacagagtggtgtctagatttatcagagtaacgagaagacaaactccggcactgggtttgctccctgattaaagtgccttcagccaagaccatctctccctcctggtgaagtgtgacttcgaattagtttgcacttcctattggaaggtagagcccactgctcattgtataagccccgaggcctagagtggcagccaagagccatctgaagccacctctctgcctgttcctcccaagaggccagggtggccaggggtggtgagggcagttctgcacccagccaaacacataacaataaaaaccaaactctgtgtca

SEQ ID NO: 402047 - DNA, 2024 bp, Homo sapiens
gagttgactgatggctgggagctcctagacagtttcaggatgggggctggtggccagaaagaccaaggcatgattagaaggttggaattacttttgccaaaggactagctgataagaagatctctccaaagagagacaagggattggtggaaaaattgacagcgtatgccatgactattccatttgtcaggcaacaggtttacaaaaaagtggaagaaaaagtgcgaaagcagactaaaggcctttatcctgcacctctgaaaataattgatgtggtaaagactggaattgagcaagggagtgatgccggttatctctgtgaatctcagaaatttggagagcttgtaatgaccaaagaatcaaaggccttgatgggactctaccatggtcaggtcctgtgcaagaagaataaatttggagctccacagaaggatgttaagcatctggctattcttggtgcagggctgatgggagcaggcatcgcccaagtctccgtggataaggggctaaagactatacttaaagatgccaccctcactgcgctagaccgaggacagcaacaagtgttcaaaggattgaatgacaaagtgaagaagaaagctctaacatcatttgaaagggattccatcttcagcaacttgactgggcagcttgattaccaaggttttgaaaaggccgacatggtgattgaagctgtgtttgaggaccttagtcttaagcacagagtgctaaaggaagtagaagcggtgattccagatcactgtatctttgccagtaacacatctgctctcccaatcagtgaaatcgctgctgtcagcaaaagacctgagaaggtgattggcatgcactacttctctcccgtggacaagatgcagctgctggagattatcacgaccgagaaaacttccaaagacaccagtgcttcagctgtagcagttggtctcaagcaggggaaggtcatcattgtggttaaggatggacctggcttctatactaccaggtgtcttgcgcccatgatgtctgaagtcatccgaatcctccaggaaggagttgacccgaagaagctggattccctgaccacaagctttggctttcctgtgggtgccgccacactggtggatgaagttggtgtggatgtagcgaaacatgtggcggaagatctgggcaaagtctttggggagcggtttggaggtggaaacccagaactgctgacacagatggtgtccaagggcttcctaggtcgtaaatctgggaagggcttttacatctatcaggagggtgtgaagaggaaggatttgaattctgacatggatagtattttagcgagtctgaagctgcctcctaagtctgaagtctcatcagacgaagacatccagttccgcctggtgacaagatttgtgaatgaggcagtcatgtgcctgcaagaggggatcttggccacacctgcagagggagacatcggagccgtctttgggcttggcttcccgccttgtctgggagggcctttccgctttgtggatctgtatggcgcccagaagatagtggaccggctcaagaaatatgaagctgcctatggaaaacagttcaccccatgccagctgctagctgaccatgctaacagccctaacaagaagttctaccagtgagcaggcctcatgcctcgctcagtcagtgcactaaccccagctgccggcagtgctggttctccaacagagtggtgtctagatttatcagagtaacgagaagacaaactccggcactgggtttgctccctgattaaagtgccttcagccaagaccatctctccctcctggtgaagtgtgacttcgaattagtttgcacttcctattggaaggtagagcccactgctcattgtataagccccgaggcctagagtggcagccaagagccatctgaagccacctctctgcctgttcctcccaagaggccagggtggccaggggtggtgagggcagttctgcacccagccaaacacataacaataaaaaccaaactctgtgtca

SEQ ID NO: 402048 - DNA, 1806 bp, Homo sapiens
  misc_feature (43)..(43): n is a, c, g, or t
acccacgcgtccggacccacgcgtcgcggacgcgtgggtcganccacgcgtcgggtggtaaagactggaattgagcaagggagtgatgccggttatctctgtgaatctcagaaatttggagagcttgtaatgaccaaagaatcaaaggccttgatgggactctaccatggtcaggtcctgtgcaagaagaataaatttggagctccacagaaggatgttaagcatctggctattcttggtgcagggctgatgggagcaggcatcgcccaagtctccgtggataaggggctaaagactatacttaaagatgccaccctcactgcgctagaccgaggacagcaacaagtgttcaaaggattgaatgacaaagtgaagaagaaagctctaacatcatttgaaagggattccatcttcagcaacttgactgggcagcttgattaccaaggttttgaaaaggccgacatggtgattgaagctgtgtttgaggaccttagtcttaagcacagagtgctaaaggaagtagaagcggtgattccagatcactgtatctttgccagtaacacatctgctctcccaatcagtgaaatcgctgctgtcagcaaaagacctgagaaggtgattggcatgcactacttctctcccgtggacaagatgcagctgctggagattatcacgaccgagaaaacttccaaagacaccagtgcttcagctgtagcagttggtctcaagcaggggaaggtcatcattgtggttaaggatggacctggcttctatactaccaggtgtcttgcgcccatgatgtctgaagtcatccgaatcctccaggaaggagttgacccgaagaagctggattccctgaccacaagctttggctttcctgtgggtgccgccacactggtggatgaagttggtgtggatgtagcgaaacatgtggcggaagatctgggcaaagtctttggggagcggtttggaggtggaaacccagaactgctgacacagatggtgtccaagggcttcctaggtcgtaaatctgggaagggcttttacatctatcaggagggtgtgaagaggaaggatttgaattctgacatggatagtattttagcgagtctgaagctgcctcctaagtctgaagtctcatcagacgaagacatccagttccgcctggtgacaagatttgtgaatgaggcagtcatgtgcctgcaagaggggatcttggccacacctgcagagggagacatcggagccgtctttgggcttggcttcccgccttgtctgggagggcctttccgctttgtggatctgtatggcgcccagaagatagtggaccggctcaagaaatatgaagctgcctatggaaaacagttcaccccatgccagctgctagctgaccatgctaacagccctaacaagaagttctaccagtgagcaggcctcatgcctcgctcagtcagtgcactaaccccagctgccggcagtgctggttctccaacagagtggtgtctagatttatcagagtaacgagaagacaaactccggcactgggtttgctccctgattaaagtgccttcagccaagaccatctctccctcctggtgaagtgtgacttcgaattagtttgcacttcctattggaaggtagagcccactgctcattgtataagccccgaggcctagagtggcagccaagagccatctgaagccacctctctgcctgttcctcccaagaggccagggtggccaggggtggtgagggcagttctgcacccagccaaacacataacaataaaaaccaaactctgtgtca

SEQ ID NO: 402049 - DNA, 1582 bp, Homo sapiens
  misc_feature (40)..(40): n is a, c, g, or t
ttcttatgatgcaggagacaatatccccaatcacaggtgnacgggtgctgacattagagaagcaagccattcagcaacagcttaggggaagagctctcaaatgtagtgttttcatactccaaagttcaaaggattgaatgacaaagtgaagaagaaagctctaacatcatttgaaagggattccatcttcagcaacttgactgggcagcttgattaccaaggttttgaaaaggccgacatggtgattgaagctgtgtttgaggaccttagtcttaagcacagagtgctaaaggaagtagaagcggtgattccagatcactgtatctttgccagtaacacatctgctctcccaatcagtgaaatcgctgctgtcagcaaaagacctgagaaggtgattggcatgcactacttctctcccgtggacaagatgcagctgctggagattatcacgaccgagaaaacttccaaagacaccagtgcttcagctgtagcagttggtctcaagcaggggaaggtcatcattgtggttaaggatggacctggcttctatactaccaggtgtcttgcgcccatgatgtctgaagtcatccgaatcctccaggaaggagttgacccgaagaagctggattccctgaccacaagctttggctttcctgtgggtgccgccacactggtggatgaagttggtgtggatgtagcgaaacatgtggcggaagatctgggcaaagtctttggggagcggtttggaggtggaaacccagaactgctgacacagatggtgtccaagggcttcctaggtcgtaaatctgggaagggcttttacatctatcaggagggtgtgaagaggaaggatttgaattctgacatggatagtattttagcgagtctgaagctgcctcctaagtctgaagtctcatcagacgaagacatccagttccgcctggtgacaagatttgtgaatgaggcagtcatgtgcctgcaagaggggatcttggccacacctgcagagggagacatcggagccgtctttgggcttggcttcccgccttgtctgggagggcctttccgctttgtggatctgtatggcgcccagaagatagtggaccggctcaagaaatatgaagctgcctatggaaaacagttcaccccatgccagctgctagctgaccatgctaacagccctaacaagaagttctaccagtgagcaggcctcatgcctcgctcagtcagtgcactaaccccagctgccggcagtgctggttctccaacagagtggtgtctagatttatcagagtaacgagaagacaaactccggcactgggtttgctccctgattaaagtgccttcagccaagaccatctctccctcctggtgaagtgtgacttcgaattagtttgcacttcctattggaaggtagagcccactgctcattgtataagccccgaggcctagagtggcagccaagagccatctgaagccacctctctgcctgttcctcccaagaggccagggtggccaggggtggtgagggcagttctgcacccagccaaacacataacaataaaaaccaaactctgtgtca

SEQ ID NO: 402050 - DNA, 3106 bp, Homo sapiens
agccgcttttctgccttcaggatcctccgctcccgaggttatatatgccgcaattttacagggtcttctgcttgctgaccagaacccatattaactatggagtcaaaggggatgtggcagtgttcgaattaactctcccaattcaaaggtaaatacactgagtaaagagctacattcagagttctcagaagttatgaatgaaatctgggctagtgatcaaatcagaagtgccgtccttatctcatcaaagccaggctgctttattgcaggtgctgatatcaacatgttagccgcttgcaagacccttcaagaagtaacacagctatcacaagaagcacagagaatagttgagaaacttgaaaagtccacaaagcctattgtggctgccatcaatggatcctgcctgggaggaggacttgaggttgccatttcatgccaatacagaatagcaacaaaagacagaaaaacagtattaggtacccctgaagttttgctgggggccttaccaggagcaggaggcacacaaaggctgcccaaaatggtgggtgtgcctgctgctttggacatgatgctgactggtagaagcattcgtgcagacagggcaaagaaaatgggactggttgaccaactggtggaacccctgggaccaggactaaaacctccagaggaacggacaatagaatacctagaagaagttgcaattacttttgccaaaggactagctgataagaagatctctccaaagagagacaagggattggtggaaaaattgacagcgtatgccatgactattccatttgtcaggcaacaggtttacaaaaaagtggaagaaaaagtgcgaaagcagactaaaggcctttatcctgcacctctgaaaataattgatgtggtaaagactggaattgagcaagggagtgatgccggttatctctgtgaatctcagaaatttggagagcttgtaatgaccaaagaatcaaaggccttgatgggactctaccatggtcaggtcctgtgcaagaagaataaatttggagctccacagaaggatgttaagcatctggctattcttggtgcagggctgatgggagcaggcatcgcccaagtctccgtggataaggggctaaagactatacttaaagatgccaccctcactgcgctagaccgaggacagcaacaagtgttcaaaggattgaatgacaaagtgaagaagaaagctctaacatcatttgaaagggattccatcttcagcaacttgactgggcagcttgattaccaaggttttgaaaaggccgacatggtgattgaagctgtgtttgaggaccttagtcttaagcacagagtgctaaaggaagtagaagcggtgattccagatcactgtatctttgccagtaacacatctgctctcccaatcagtgaaatcgctgctgtcagcaaaagacctgagaaggtgattggcatgcactacttctctcccgtggacaagatgcagctgctggagattatcacgaccgagaaaacttccaaagacaccagtgcttcagctgtagcagttggtctcaagcaggggaaggtcatcattgtggttaaggatggacctggcttctatactaccaggtgtcttgcgcccatgatgtctgaagtcatccgaatcctccaggaaggagttgacccgaagaagctggattccctgaccacaagctttggctttcctgtgggtgccgccacactggtggatgaagttggtgtggatgtagcgaaacatgtggcggaagatctgggcaaagtctttggggagcggtttggaggtggaaacccagaactgctgacacagatggtgtccaagggcttcctaggtcgtaaatctgggaagggcttttacatctatcaggagggtgtgaagaggaaggatttgaattctgacatggatagtattttagcgagtctgaagctgcctcctaagtctgaagtctcatcagacgaagacatccagttccgcctggtgacaagatttgtgaatgaggcagtcatgtgcctgcaagaggggatcttggccacacctgcagagggagacatcggagccgtctttgggcttggcttcccgccttgtctgggagggcctttccgctttgtggatctgtatggcgcccagaagatagtggaccggctcaagaaatatgaagctgcctatggaaaacagttcaccccatgccagctgctagctgaccatgctaacagccctaacaagaagttctaccagtgagcaggcctcatgcctcgctcagtcagtgcactaaccccagctgccggcagtgctggttctccaacagagtggtgtctagatttatcagagtaacgagaagacaaactccggcactgggtttgctccctgattaaagtgccttcagccaagaccatctctccctcctggtgaagtgtgacttcgaattagtttgcacttcctattggaaggtagagcccactgctcattgtataagccccgaggcctagagtggcagccaagagccatctgaagccacctctctgcctgttcctcccaagaggccagggtggccaggggtggtgagggcagttctgcacccagccaaacacataacaataaaaaccaaactctgtgtcagcatctttgcccttctggtttaaacgcctccttcaaaaagcaatctggaagaaagccctgtgctttgggggagtaagaatgtgtgtgcagaattctaggcagcaccttagggagggactgggatgagagaaagtgggacctggtgggctcaaccacacacacctgtctgtgcagatgctttgcccaggcttctcaccacggtgtaccgggatattaaacctctttccccagcctggaaaaaaaaaaaaaaaacaaaaaaaaaaaaaaaaaaaaaaaaaaaaaaaaaaaaaaaaaacaaaaaaaaaaaaaaaaaaaaaaaaaaaaaaaaatgttcgcccctctcggccaatgcgtttcaaactctgcccaatttaagcattgcgccccaaattcggcccacttgggcaatttcgcctattgggcgccgtttcacccttaatgcgccgcctttacacacccttccctgga

SEQ ID NO: 402051 - DNA, 2667 bp, Homo sapiens
  misc_feature (2645)..(2645): n is a, c, g, or t
agccgcttttctgccttcaggatcctccgctcccgaggttatatatgccgcaattttacagggtcttctgcttgctgaccagaacccatattaactatggagtcaaaggggatgtggcagtgttcgaattaactctcccaattcaaaggtaaatacactgagtaaagagctacattcagagttctcagaagttatgaatgaaatctgggctagtgatcaaatcagaagtgccgtccttatctcatcaaagccaggctgctttattgcaggtgctgatatcaacatgttagccgcttgcaagacccttcaagaagtaacacagctatcacaagaagcacagagaatagttgagaaacttgaaaagtccacaaagcctattgtggctgccatcaatggatcctgcctgggaggaggacttgaggttgccatttcatgccaatacagaatagcaacaaaagacagaaaaacagtattaggtacccctgaagttttgctgggggccttaccaggagcaggaggcacacaaaggctgcccaaaatggtgggtgtgcctgctgctttggacatgatgctgactggtagaagcattcgtgcagacagggcaaagaaaatgggactggttgaccaactggtggaacccctgggaccaggactaaaacctccagaggaacggacaatagaatacctagaagaagttgcaattacttttgccaaaggactagctgataagaagatctctccaaagagagacaagggattggtggaaaaattgacagcgtatgccatgactattccatttgtcaggcaacaggtttacaaaaaagtggaagaaaaagtgcgaaagcagactaaaggcctttatcctgcacctctgaaaataattgatgtggtaaagactggaattgagcaagggagtgatgccggttatctctgtgaatctcagaaatttggagagcttgtaatgaccaaagaatcaaaggccttgatgggactctaccatggtcaggtcctgtgcaagaagaataaatttggagctccacagaaggatgttaagcatctggctattcttggtgcagggctgatgggagcaggcatcgcccaagtctccgtggataaggggctaaagactatacttaaagatgccaccctcactgcgctagaccgaggacagcaacaagtgttcaaaggattgaatgacaaagtgaagaagaaagctctaacatcatttgaaagggattccatcttcagcaacttgactgggcagcttgattaccaaggttttgaaaaggccgacatggtgattgaagctgtgtttgaggaccttagtcttaagcacagagtgctaaaggaagtagaagcggtgattccagatcactgtatctttgccagtaacacatctgctctcccaatcagtgaaatcgctgctgtcagcaaaagacctgagaaggtgattggcatgcactacttctctcccgtggacaagatgcagctgctggagattatcacgaccgagaaaacttccaaagacaccagtgcttcagctgtagcagttggtctcaagcaggggaaggtcatcattgtggttaaggatggacctggcttctatactaccaggtgtcttgcgcccatgatgtctgaagtcatccgaatcctccaggaaggagttgacccgaagaagctggattccctgaccacaagctttggctttcctgtgggtgccgccacactggtggatgaagttggtgtggatgtagcgaaacatgtggcggaagatctgggcaaagtctttggggagcggtttggaggtggaaacccagaactgctgacacagatggtgtccaagggcttcctaggtcgtaaatctgggaagggcttttacatctatcaggagggtgtgaagaggaaggatttgaattctgacatggatagtattttagcgagtctgaagctgcctcctaagtctgaagtctcatcagacgaagacatccagttccgcctggtgacaagatttgtgaatgaggcagtcatgtgcctgcaagaggggatcttggccacacctgcagagggagacatcggagccgtctttgggcttggcttcccgccttgtctgggagggcctttccgctttgtggatctgtatggcgcccagaagatagtggaccggctcaagaaatatgaagctgcctatggaaaacagttcaccccatgccagctgctagctgaccatgctaacagccctaacaagaagttctaccagtgagcaggcctcatgcctcgctcagtcagtgcactaaccccagctgccggcagtgctggttctccaacagagtggtgtctagatttatcagagtaacgagaagacaaactccggcactgggtttgctccctgattaaagtgccttcagccaagaccatctctccctcctggtgaagtgtgacttcgaattagtttgcacttcctattggaaggtagagcccactgctcattgtataagccccgaggcctagagtggcagccaagagccatctgaagccacctctctgcctgttcctcccaagaggccagggtggccaggggtggtgagggcagttctgcacccagccaaacacataacaataaaaaccaaactctgtgtcaatggggntctgggatcctctagatcagcc

SEQ ID NO: 402052 - DNA, 2633 bp, Homo sapiens
  misc_feature (2616)..(2618): n is a, c, g, or t
agccgcttttctgccttcaggatcctccgctcccgaggttatatatgccgcaattttacagggtcttctgcttgctgaccagaacccatattaactatggagtcaaaggggatgtggcagtgttcgaattaactctcccaattcaaaggtaaatacactgagtaaagagctacattcagagttctcagaagttatgaatgaaatctgggctagtgatcaaatcagaagtgccgtccttatctcatcaaagccaggctgctttattgcaggtgctgatatcaacatgttagccgcttgcaagacccttcaagaagtaacacagctatcacaagaagcacagagaatagttgagaaacttgaaaagtccacaaagcctattgtggctgccatcaatggatcctgcctgggaggaggacttgaggttgccatttcatgccaatacagaatagcaacaaaagacagaaaaacagtattaggtacccctgaagttttgctgggggccttaccaggagcaggaggcacacaaaggctgcccaaaatggtgggtgtgcctgctgctttggacatgatgctgactggtagaagcattcgtgcagacagggcaaagaaaatgggactggttgaccaactggtggaacccctgggaccaggactaaaacctccagaggaacggacaatagaatacctagaagaagttgcaattacttttgccaaaggactagctgataagaagatctctccaaagagagacaagggattggtggaaaaattgacagcgtatgccatgactattccatttgtcaggcaacaggtttacaaaaaagtggaagaaaaagtgcgaaagcagactaaaggcctttatcctgcacctctgaaaataattgatgtggtaaagactggaattgagcaagggagtgatgccggttatctctgtgaatctcagaaatttggagagcttgtaatgaccaaagaatcaaaggccttgatgggactctaccatggtcaggtcctgtgcaagaagaataaatttggagctccacagaaggatgttaagcatctggctattcttggtgcagggctgatgggagcaggcatcgcccaagtctccgtggataaggggctaaagactatacttaaagatgccaccctcactgcgctagaccgaggacagcaacaagtgttcaaaggattgaatgacaaagtgaagaagaaagctctaacatcatttgaaagggattccatcttcagcaacttgactgggcagcttgattaccaaggttttgaaaaggccgacatggtgattgaagctgtgtttgaggaccttagtcttaagcacagagtgctaaaggaagtagaagcggtgattccagatcactgtatctttgccagtaacacatctgctctcccaatcagtgaaatcgctgctgtcagcaaaagacctgagaaggtgattggcatgcactacttctctcccgtggacaagatgcagctgctggagattatcacgaccgagaaaacttccaaagacaccagtgcttcagctgtagcagttggtctcaagcaggggaaggtcatcattgtggttaaggatggacctggcttctatactaccaggtgtcttgcgcccatgatgtctgaagtcatccgaatcctccaggaaggagttgacccgaagaagctggattccctgaccacaagctttggctttcctgtgggtgccgccacactggtggatgaagttggtgtggatgtagcgaaacatgtggcggaagatctgggcaaagtctttggggagcggtttggaggtggaaacccagaactgctgacacagatggtgtccaagggcttcctaggtcgtaaatctgggaagggcttttacatctatcaggagggtgtgaagaggaaggatttgaattctgacatggatagtattttagcgagtctgaagctgcctcctaagtctgaagtctcatcagacgaagacatccagttccgcctggtgacaagatttgtgaatgaggcagtcatgtgcctgcaagaggggatcttggccacacctgcagagggagacatcggagccgtctttgggcttggcttcccgccttgtctgggagggcctttccgctttgtggatctgtatggcgcccagaagatagtggaccggctcaagaaatatgaagctgcctatggaaaacagttcaccccatgccagctgctagctgaccatgctaacagccctaacaagaagttctaccagtgagcaggcctcatgcctcgctcagtcagtgcactaaccccagctgccggcagtgctggttctccaacagagtggtgtctagatttatcagagtaacgagaagacaaactccggcactgggtttgctccctgattaaagtgccttcagccaagaccatctctccctcctggtgaagtgtgacttcgaattagtttgcacttcctattggaaggtagagcccactgctcattgtataagccccgaggcctagagtggcagccaagagccatctgaagccacctctctgcctgttcctcccaagaggccagggtggccaggggtggtgaggtctcctccccccccaaccaaaaatattaannncctctttgttttcac

SEQ ID NO: 402053 - DNA, 1162 bp, Homo sapiens
  misc_feature (43)..(43): n is a, c, g, or t
acccacgcgtccggacccacgcgtcgcggacgcgtgggtcganccacgcgtcggcagtgcttcagctgtagcagttggtctcaagcaggggaaggtcatcattgtggttaaggatggacctggcttctatactaccaggtgtcttgcgcccatgatgtctgaagtcatccgaatcctccaggaaggagttgacccgaagaagctggattccctgaccacaagctttggctttcctgtgggtgccgccacactggtggatgaagttggtgtggatgtagcgaaacatgtggcggaagatctgggcaaagtctttggggagcggtttggaggtggaaacccagaactgctgacacagatggtgtccaagggcttcctaggtcgtaaatctgggaagggcttttacatctatcaggagggtgtgaagaggaaggatttgaattctgacatggatagtattttagcgagtctgaagctgcctcctaagtctgaagtctcatcagacgaagacatccagttccgcctggtgacaagatttgtgaatgaggcagtcatgtgcctgcaagaggggatcttggccacacctgcagagggagacatcggagccgtctttgggcttggcttcccgccttgtctgggagggcctttccgctttgtggatctgtatggcgcccagaagatagtggaccggctcaagaaatatgaagctgcctatggaaaacagttcaccccatgccagctgctagctgaccatgctaacagccctaacaagaagttctaccagtgagcaggcctcatgcctcgctcagtcagtgcactaaccccagctgccggcagtgctggttctccaacagagtggtgtctagatttatcagagtaacgagaagacaaactccggcactgggtttgctccctgattaaagtgccttcagccaagaccatctctccctcctggtgaagtgtgacttcgaattagtttgcacttcctattggaaggtagagcccactgctcattgtataagccccgaggcctagagtggcagccaagagccatctgaagccacctctctgcctgttcctcccaagaggccagggtggccaggggtggtgagggcagttctgcacccagccaaacacataacaataaaaaccaaactctgtgtca

SEQ ID NO: 402054 - DNA, 1269 bp, Homo sapiens
ttttttttaatactttaagtcctgggatacatgtgcaggtttgttacataggtatacacgtgccatggtgctgtcttccattttctttgtgaccaccatacctgaacaggaggaccactcctgatgctggcatggtgctttccaagtggaaggccctcgcacgtgctccttggtctctgcccagcatctaggtgagaaccaggccacgtctggtgaaggccctcccctgctccagccttctctggcaagttcccagagagccgctggaaggacagattctccttggccccttcaccctcccagatctttattatcatttgtgagcagctgactgttgctgatgtcaaagagatactgattatcttctcggcaccaggccctgttctaggtgctcagtttcatgttaattagggcaagttactctccactttttccatgggaaagtttggttcacccaggcagcatcttctctgagggccagcaccaaccggcccacagagctccccatgcacccatcccgacttccattctgcatctgcggctctggctttcctccccttttcctcttcttctacctaaacatctctttctgttggcagctcatcagacgaagacatccagttccgcctggtgacaagatttgtgaatgaggcagtcatgtgcctgcaagaggggatcttggccacacctgcagagggagacatcggagccgtctttgggcttggcttcccgccttgtctgggagggcctttccgctttgtggatctgtatggcgcccagaagatagtggaccggctcaagaaatatgaagctgcctatggaaaacagttcaccccatgccagctgctagctgaccatgctaacagccctaacaagaagttctaccagtgagcaggcctcatgcctcgctcagtcagtgcactaaccccagctgccggcagtgctggttctccaacagagtggtgtctagatttatcagagtaacgagaagacaaactccggcactgggtttgctccctgattaaagtgccttcagccaagaccatctctccctcctggtgaagtgtgacttcgaattagtttgcacttcctattggaaggtagagcccactgctcattgtataagccccgaggcctagagtggcagccaagagccatctgaagccacctctctgcctgttcctcccaagaggccagggtggccaggggtggtgagggcagttctgcacccagccaaacacataacaataaaaaccaaactctgtgtca

SEQ ID NO: 402055 - DNA, 1356 bp, Homo sapiens
ttttttttaatactttaagtcctgggatacatgtgcaggtttgttacataggtatacacgtgccatggtgctgtcttccattttctttgtgaccaccatacctgaacaggaggaccactcctgatgctggcatggtgctttccaagtggaaggccctcgcacgtgctccttggtctctgcccagcatctaggtgagaaccaggccacgtctggtgaaggccctcccctgctccagccttctctggcaagttcccagagagccgctggaaggacagattctccttggccccttcaccctcccagatctttattatcatttgtgagcagctgactgttgctgatgtcaaagagatactgattatcttctcggcaccaggccctgttctaggtgctcagtttcatgttaattagggcaagttactctccactttttccatgggaaagtttggttcacccaggcagcatcttctctgagggccagcaccaaccggcccacagagctccccatgcacccatcccgacttccattctgcatctgcggctctggctttcctccccttttcctcttcttctacctaaacatctctttctgttggcagctcatcagacgaagacatccagttccgcctggtgacaagatttgtgaatgaggcagtcatgtgcctgcaagaggggatcttggccacacctgcagagggagacatcggagccgtctttgggcttggcttcccgccttgtctgggaggttggtctcgcaggttgggaaggaagctcactttagcctggagcccgtgttgcgtctccttcaacgaagtcctctttctctattcagggcctttccgctttgtggatctgtatggcgcccagaagatagtggaccggctcaagaaatatgaagctgcctatggaaaacagttcaccccatgccagctgctagctgaccatgctaacagccctaacaagaagttctaccagtgagcaggcctcatgcctcgctcagtcagtgcactaaccccagctgccggcagtgctggttctccaacagagtggtgtctagatttatcagagtaacgagaagacaaactccggcactgggtttgctccctgattaaagtgccttcagccaagaccatctctccctcctggtgaagtgtgacttcgaattagtttgcacttcctattggaaggtagagcccactgctcattgtataagccccgaggcctagagtggcagccaagagccatctgaagccacctctctgcctgttcctcccaagaggccagggtggccaggggtggtgagggcagttctgcacccagccaaacacataacaataaaaaccaaactctgtgtca

SEQ ID NO: 402056 - DNA, 1955 bp, Homo sapiens
agccgcttttctgccttcaggatcctccgctcccgaggttatatatgccgcaattttacagggtcttctgcttgctgaccagaacccatattaactatggagtcaaaggggatgtggcagtgttcgaattaactctcccaattcaaaggtaaatacactgagtaaagagctacattcagagttctcagaagttatgaatgaaatctgggctagtgatcaaatcagaagtgccgtccttatctcatcaaagccaggctgctttattgcaggtgctgatatcaacatgttagccgcttgcaagacccttcaagaagtaacacagctatcacaagaagcacagagaatagttgagaaacttgaaaagtccacaaagcctattgtggctgccatcaatggatcctgcctgggaggaggacttgaggttgccatttcatgccaatacagaatagcaacaaaagacagaaaaacagtattaggtacccctgaagttttgctgggggccttaccaggagcaggaggcacacaaaggctgcccaaaatggtgggtgtgcctgctgctttggacatgatgctgactggtagaagcattcgtgcagacagggcaaagaaaatgggactggttgaccaactggtggaacccctgggaccaggactaaaacctccagaggaacggacaatagaatacctagaagaagttgcaattacttttgccaaaggactagctgataagaagatctctccaaagagagacaagggattggtggaaaaattgacagcgtatgccatgactattccatttgtcaggcaacaggtttacaaaaaagtggaagaaaaagtgcgaaagcagactaaaggcctttatcctgcacctctgaaaataattgatgtggtaaagactggaattgagcaagggagtgatgccggttatctctgtgaatctcagaaatttggagagcttgtaatgaccaaagaatcaaaggccttgatgggactctaccatggtcaggtcctgtgcaagaagaataaatttggagctccacagaaggatgttaagcatctggctattcttggtgcagggctgatgggagcaggcatcgcccaagtctccgtggataaggggctaaagactatacttaaagatgccaccctcactgcgctagaccgaggacagcaacaagtgttcaaaggattgaatgacaaagtgaagaagaaagctctaacatcatttgaaagggattccatcttcagcaacttgactgggcagcttgattaccaaggttttgaaaaggccgacatggtgattgaagctgtgtttgaggaccttagtcttaagcacagagtgctaaaggaagtagaagcggtgattccagatcactgtatctttgccagtaacacatctgctctcccaatcagtgaaatcgctgctgtcagcaaaagacctgagaaggtgattggcatgcactacttctctcccgtggacaagatgcagctgctggagattatcacgaccgagaaaacttccaaagacaccagtgcttcagctgtagcagttggtctcaagcaggggaaggtcatcattgtggttaaggatggacctggcttctatactaccaggtgtcttgcgcccatgatgtctgaagtcatccgaatcctccaggaaggagttgacccgaagaagctggattccctgaccacaagctttggctttcctgtgggtgccgccacactggtggatgaagttggtgtggatgtagcgaaacatgtggcggaagatctgggcaaagtctttggggagcggtttggaggtggaaacccagaactgctgacacagatggtgtccaagggcttcctaggtcggaaattgggaatgccttttaccattataggagggcgtgaaaaggaaggttttgattttgcaacggttgcctttaacgagtttgaactgcttctaatct

SEQ ID NO: 402057 - DNA, 1842 bp, Homo sapiens
  misc_feature (1730)..(1730): n is a, c, g, or t
  misc_feature (1732)..(1732): n is a, c, g, or t
  misc_feature (1734)..(1734): n is a, c, g, or t
  misc_feature (1738)..(1738): n is a, c, g, or t
  misc_feature (1745)..(1745): n is a, c, g, or t
  misc_feature (1749)..(1749): n is a, c, g, or t
  misc_feature (1751)..(1752): n is a, c, g, or t
  misc_feature (1757)..(1758): n is a, c, g, or t
  misc_feature (1764)..(1764): n is a, c, g, or t
  misc_feature (1772)..(1772): n is a, c, g, or t
agccgcttttctgccttcaggatcctccgctcccgaggttatatatgccgcaattttacagggtcttctgcttgctgaccagaacccatattaactatggagtcaaaggggatgtggcagtgttcgaattaactctcccaattcaaaggtaaatacactgagtaaagagctacattcagagttctcagaagttatgaatgaaatctgggctagtgatcaaatcagaagtgccgtccttatctcatcaaagccaggctgctttattgcaggtgctgatatcaacatgttagccgcttgcaagacccttcaagaagtaacacagctatcacaagaagcacagagaatagttgagaaacttgaaaagtccacaaagcctattgtggctgccatcaatggatcctgcctgggaggaggacttgaggttgccatttcatgccaatacagaatagcaacaaaagacagaaaaacagtattaggtacccctgaagttttgctgggggccttaccaggagcaggaggcacacaaaggctgcccaaaatggtgggtgtgcctgctgctttggacatgatgctgactggtagaagcattcgtgcagacagggcaaagaaaatgggactggttgaccaactggtggaacccctgggaccaggactaaaacctccagaggaacggacaatagaatacctagaagaagttgcaattacttttgccaaaggactagctgataagaagatctctccaaagagagacaagggattggtggaaaaattgacagcgtatgccatgactattccatttgtcaggcaacaggtttacaaaaaagtggaagaaaaagtgcgaaagcagactaaaggcctttatcctgcacctctgaaaataattgatgtggtaaagactggaattgagcaagggagtgatgccggttatctctgtgaatctcagaaatttggagagcttgtaatgaccaaagaatcaaaggccttgatgggactctaccatggtcaggtcctgtgcaagaagaataaatttggagctccacagaaggatgttaagcatctggctattcttggtgcagggctgatgggagcaggcatcgcccaagtctccgtggataaggggctaaagactatacttaaagatgccaccctcactgcgctagaccgaggacagcaacaagtgttcaaaggattgaatgacaaagtgaagaagaaagctctaacatcatttgaaagggattccatcttcagcaacttgactgggcagcttgattaccaaggttttgaaaaggccgacatggtgattgaagctgtgtttgaggaccttagtcttaagcacagagtgctaaaggaagtagaagcggtgattccagatcactgtatctttgccagtaacacatctgctctcccaatcagtgaaatcgctgctgtcagcaaaagacctgagaaggtgattggcatgcactacttctctcccgtggacaagatgcagctgctggagattatcacgaccgagaaaacttccaaagacaccagtgcttcagctgtagcagttggtctcaagcaggggaaggtcatcattgtggttaaggatggacctggcttctatactaccaggtgtcttgcgcccatgatgtctgaagtcatccgaatcctccaggaaggagttgacccgaagaagctggattccctgaccacaagctttggctttcctgtgggtgccgccctggggntncnttgngggtttncgantnngcggnnttgggncttgggcngtgggggccctgggctggtcccggtccgggatgggggctcagggggggactcgggtgcggccgatttaac

SEQ ID NO: 402058 - DNA, 1349 bp, Homo sapiens
agccgcttttctgccttcaggatcctccgctcccgaggttatatatgccgcaattttacagggtcttctgcttgctgaccagaacccatattaactatggagtcaaaggggatgtggcagtgttcgaattaactctcccaattcaaaggtaaatacactgagtaaagagctacattcagagttctcagaagttatgaatgaaatctgggctagtgatcaaatcagaagtgccgtccttatctcatcaaagccaggctgctttattgcaggtgctgatatcaacatgttagccgcttgcaagacccttcaagaagtaacacagctatcacaagaagcacagagaatagttgagaaacttgaaaagtccacaaagcctattgtggctgccatcaatggatcctgcctgggaggaggacttgaggttgccatttcatgccaatacagaatagcaacaaaagacagaaaaacagtattaggtacccctgaagttttgctgggggccttaccaggagcaggaggcacacaaaggctgcccaaaatggtgggtgtgcctgctgctttggacatgatgctgactggtagaagcattcgtgcagacagggcaaagaaaatgggactggttgaccaactggtggaacccctgggaccaggactaaaacctccagaggaacggacaatagaatacctagaagaagttgcaattacttttgccaaaggactagctgataagaagatctctccaaagagagacaagggattggtggaaaaattgacagcgtatgccatgactattccatttgtcaggcaacaggtttacaaaaaagtggaagaaaaagtgcgaaagcagactaaaggcctttatcctgcacctctgaaaataattgatgtggtaaagactggaattgagcaagggagtgatgccggttatctctgtgaatctcagaaatttggagagcttgtaatgaccaaagaatcaaaggccttgatgggactctaccatggtcaggtcctgtgcaagaagaataaatttggagctccacagaaggatgttaagcatctggctattcttggtgcagggctgatgggagcaggcatcgcccaagtctccgtggataaggggctaaagactatacttaaagatgccaccctcactgcgctagaccgaggacagcaacaagtgttcaaaggattgaatgacaaagtgaagaagaaagctctaacatcatttgaaagggattccatcttcagcaacttgactgggcagcttgattaccaaggtttgaaggccgatgtgatgagctggtcgagacttagctagacaggttcagagtgacgggacgatcagtctg

SEQ ID NO: 402059 - DNA, 875 bp, Homo sapiens
gcggccgcctactactactactgctcgaattcaagcttctaacgatgtacggggacatgcctcgctcagtcagtgcactaaccccagctgccggcagtgctggttctccaacagagtggtgtctagatttatcagagtaacgagaagacaaactccggcactgggtttgctccctgattaaagtgccttcagccaagaccatctctccctcctggtgaagtgtgacttcgaattagtttgcacttcctattggaaggtagagcccactgctcattgtataagccccgaggcctagagtggcagccaagagccatctgaagccacctctctgcctgttcctcccaagaggccagggtggccaggggtggtgagggcagttctgcacccagccaaacacataacaataaaaaccaaactctgtgtcagcatctttgcccttctggtttaaacgcctccttcaaaaagcaatctggaagaaagccctgtgctttgggggagtaagaatgtgtgtgcagaattctaggcagcaccttagggagggactgggatgagagaaagtgggacctggtgggctcaaccacacacacctgtctgtgcagatgctttgcccaggcttctcaccacggtgtaccgggatattaaacctctttccccagcctggaaaaaaaaaaaaaaaacaaacaaaaaaaaaaatgtttttggggcggccctgggcctctcgaaaaagctttttcaaacaccatccccgtggggccgccgcggggcgccagtaggtgttacgtggaacacggggatcatcacgcggtggtcccgaaggaaaaagcagcgggggccacagcacaatggtgcctggagattctccccccagtttaaac

SEQ ID NO: 402060 - DNA, 1416 bp, Homo sapiens
agccgcttttctgccttcaggatcctccgctcccgaggttatatatgccgcaattttacagggtcttctgcttgctgaccagaacccatattaactatggagtcaaaggggatgtggcagtgttcgaattaactctcccaattcaaaggtaaatacactgagtaaagagctacattcagagttctcagaagttatgaatgaaatctgggctagtgatcaaatcagaagtgccgtccttatctcatcaaagccaggctgctttattgcaggtgctgatatcaacatgttagccgcttgcaagacccttcaagaagtaacacagctatcacaagaagcacagagaatagttgagaaacttgaaaagtccacaaagcctattgtggctgccatcaatggatcctgcctgggaggaggacttgaggttgccatttcatgccaatacagaatagcaacaaaagacagaaaaacagtattaggtacccctgaagttttgctgggggccttaccaggagcaggaggcacacaaaggctgcccaaaatggtgggtgtgcctgctgctttggacatgatgctgactggtagaagcattcgtgcagacagggcaaagaaaatgggactggttgaccaactggtggaacccctgggaccaggactaaaacctccagaggaacggacaatagaatacctagaagaagttgcaattacttttgccaaaggactagctgataagaagatctctccaaagagagacaagggattggtggaaaaattgacagcgtatgccatgactattccatttgtcaggcaacaggtttacaaaaaagtggaagaaaaagtgcgaaagcagactaaaggcctttatcctgcacctctgaaaataattgatgtggtaaagactggaattgagcaagggagtgatgccggttatctctgtgaatctcaggtaaacttatttcctttcaatgttttattatcagttaaaggaaaactaaagatccaatcctctgtataaagctgaaaaaggaaaaaaatatccaaagcctagtaaaaatttttttcttccagtgcttatcatctcttatgattaatctcagtgagcaagtggatgctaagaataccctaatggggccaggcgtggtggtttacccctgtaatcccaacattctgggaggccgaggtgggcagatcgtttgagctcaggagttcaagaccagcatgtgcaacatggcaaaaccccatctttacaaaaactacaaaagttagccaggcatggtggcatgcacccacagtcccagctacttgcagggctgaggcaggagaattgtttgagtccaggaggtcagggctgcagtgagctaagtaagatcgcaccactgcattccagcctgggtgacaaagtgagaccctgtctccaaa

SEQ ID NO: 402061 - DNA, 1134 bp, Homo sapiens
agccgcttttctgccttcaggatcctccgctcccgaggttatatatgccgcaattttacagggtcttctgcttgctgaccagaacccatattaactatggagtcaaaggggatgtggcagtgttcgaattaactctcccaattcaaaggtaaatacactgagtaaagagctacattcagagttctcagaagttatgaatgaaatctgggctagtgatcaaatcagaagtgccgtccttatctcatcaaagccaggctgctttattgcaggtgctgatatcaacatgttagccgcttgcaagacccttcaagaagtaacacagctatcacaagaagcacagagaatagttgagaaacttgaaaagtccacaaagcctattgtggctgccatcaatggatcctgcctgggaggaggacttgaggttgccatttcatgccaatacagaatagcaacaaaagacagaaaaacagtattaggtacccctgaagttttgctgggggccttaccaggagcaggaggcacacaaaggctgcccaaaatggtgggtgtgcctgctgctttggacatgatgctgactggtagaagcattcgtgcagacagggcaaagaaaatgggactggttgaccaactggtggaacccctgggaccaggactaaaacctccagaggaacggacaatagaatacctagaagaagttgcaattacttttgccaaaggactagctgataagaagatctctccaaagagagacaagggattggtggaaaaattgacagcgtatgccatgactattccatttgtcaggcaacaggtttacaaaaaagtggaagaaaaagtgcgaaagcagactaaaggcctttatcctgcacctctgaaaataattgatgtggtaaagactggaattgagcaagggagtgatgccggttatctctgtgaatctcagaaatttggagagcttgtaatgaccaaagaatcaaaggccttgatgggactctaccatggtcaggtcctgtgcaagaagaataaatttggagctccacagaaggatgttaagcatctggctattcttggtgcagggctgatgggagcaggcatctttaagtatagtctttagcccctaccacggagactggg

SEQ ID NO: 402062 - DNA, 283 bp, Homo sapiens
tgcgcccatgatgtctgaagtcatccgaatcctccaggttggtattgctctccagagtgtttgcggcatcttccactccttcagtcactctaaaactcatgatgtcaagataaggaccaagcttccttctgatacaccaactcctgctcttgtctaggaaggtccctggtgccctctctctgcacagcagtcggaagttgggcttatactgcactgaaaggggcagagctttccctctgccccacagcctcctcactgttccagcaagctaaaggcaccccac

SEQ ID NO: 402063 - DNA, 2335 bp, Homo sapiens
caaagcttctttcctgagaatttaattttatttgctgtagattcaaaatgaggaagtggtaaatgcattatttactcaaagcataaagtcagccttaggtaggagatgtaacaactcctcaactttacactatccagttaaagccaatttttaaaaccttttttttccttatgatgacccttgagtcatagaaaacttttcattttagaaaatgttaagcatgaacacaaaaagactagataacagtgttataaacactcatgtacccaaggcccagctttaacattcatcacttagcatgtttaaggtagtgcttaggttgaaatttatattgtgtgtatcagaataaagagcagttcttgcagatagctagaattacttcatttttatagagtttagagcataaactaacaagggaatctaggctctttatagtaaatatctaaaagcattttattttacagaattgacagcgtatgccatgactattccatttgtcaggcaacaggtttacaaaaaagtggaagaaaaagtgcgaaagcagactaaaggcctttatcctgcacctctgaaaataattgatgtggtaaagactggaattgagcaagggagtgatgccggttatctctgtgaatctcagaaatttggagagcttgtaatgaccaaagaatcaaaggccttgatgggactctaccatggtcaggtcctgtgcaagaagaataaatttggagctccacagaaggatgttaagcatctggctattcttggtgcagggctgatgggagcaggcatcgcccaagtctccgtggataaggggctaaagactatacttaaagatgccaccctcactgcgctagaccgaggacagcaacaagtgttcaaaggattgaatgacaaagtgaagaagaaagctctaacatcatttgaaagggattccatcttcagcaacttgactgggcagcttgattaccaaggttttgaaaaggccgacatggtgattgaagctgtgtttgaggaccttagtcttaagcacagagtgctaaaggaagtagaagcggtgattccagatcactgtatctttgccagtaacacatctgctctcccaatcagtgaaatcgctgctgtcagcaaaagacctgagaaggtgattggcatgcactacttctctcccgtggacaagatgcagctgctggagattatcacgaccgagaaaacttccaaagacaccagtgcttcagctgtagcagttggtctcaagcaggggaaggtcatcattgtggttaaggatggacctggcttctatactaccaggtgtcttgcgcccatgatgtctgaagtcatccgaatcctccaggaaggagttgacccgaagaagctggattccctgaccacaagctttggctttcctgtgggtgccgccacactggtggatgaagttggtgtggatgtagcgaaacatgtggcggaagatctgggcaaagtctttggggagcggtttggaggtggaaacccagaactgctgacacagatggtgtccaagggcttcctaggtcgtaaatctgggaagggcttttacatctatcaggagggtgtgaagaggaaggatttgaattctgacatggatagtattttagcgagtctgaagctgcctcctaagtctgaagtctcatcagacgaagacatccagttccgcctggtgacaagatttgtgaatgaggcagtcatgtgcctgcaagaggggatcttggccacacctgcagagggagacatcggagccgtctttgggcttggcttcccgccttgtctgggagggcctttccgctttgtggatctgtatggcgcccagaagatagtggaccggctcaagaaatatgaagctgcctatggaaaacagttcaccccatgccagctgctagctgaccatgctaacagccctaacaagaagttctaccagtgagcaggcctcatgcctcgctcagtcagtgcactaaccccagctgccggcagtgctggttctccaacagagtggtgtctagatttatcagagtaacgagaagacaaactccggcactgggtttgctccctgattaaagtgccttcagccaagaccatctctccctcctggtgaagtgtgacttcgaattagtttgcacttcctattggaaggtagagcccactgctcattgtataagccccgaggcctagagtggcagccaagagccatctgaagccacctctctgcctgttcctcccaagaggccagggtggccaggggtggtgagggcagttctgcacccagccaaacacataacaataaaaaccaaactctgtgtca

SEQ ID NO: 402064 - DNA, 2869 bp, Homo sapiens
agccgcttttctgccttcaggatcctccgctcccgaggttatatatgccgcaattttacagggtcttctgcttgctgaccagaacccatattaactatggagtcaaaggggatgtggcagtgttcgaattaactctcccaattcaaaggtaaatacactgagtaaagagctacattcagagttctcagaagttatgaatgaaatctgggctagtgatcaaatcagaagtgccgtccttatctcatcaaagccaggctgctttattgcaggtgctgatatcaacatgttagccgcttgcaagacccttcaagaagtaacacagctatcacaagaagcacagagaatagttgagaaacttgaaaagtccacaaagcctattgtggctgccatcaatggatcctgcctgggaggaggacttgaggttgccatttcatgccaatacagaatagcaacaaaagacagaaaaacagtattaggtacccctgaagttttgctgggggccttaccaggagcaggaggcacacaaaggctgcccaaaatggtgggtgtgcctgctgctttggacatgatgctgactggtagaagcattcgtgcagacagggcaaagaaaatgggactggttgaccaactggtggaacccctgggaccaggactaaaacctccagaggaacggacaatagaatacctagaagaagttgcaattacttttgccaaaggactagctgataagaagatctctccaaagagagacaagggattggtggaaaaattgacagcgtatgccatgactattccatttgtcaggcaacaggtttacaaaaaagtggaagaaaaagtgcgaaagcagactaaaggcctttatcctgcacctctgaaaataattgatgtggtaaagactggaattgagcaagggagtgatgccggttatctctgtgaatctcagaaatttggagagcttgtaatgaccaaagaatcaaaggccttgatgggactctaccatggtcaggtcctgtgcaagaagaataaatttggagctccacagaaggatgttaagcatctggctattcttggtgcagggctgatgggagcaggcatcgcccaagtctccgtggataaggggctaaagactatacttaaagatgccaccctcactgcgctagaccgaggacagcaacaagtgttcaaaggattgaatgacaaagtgaagaagaaagctctaacatcatttgaaagggattccatcttcagcaacttgactgggcagcttgattaccaaggttttgaaaaggccgacatggtgattgaagctgtgtttgaggaccttagtcttaagcacagagtgctaaaggaagtagaagcggtgattccagatcactgtatctttgccagtaacacatctgctctcccaatcagtgaaatcgctgctgtcagcaaaagacctgagaaggtgattggcatgcactacttctctcccgtggacaagatgcagctgctggagattatcacgaccgagaaaacttccaaagacaccagtgcttcagctgtagcagttggtctcaagcaggggaaggtcatcattgtggttaaggatggacctggcttctatactaccaggtgtcttgcgcccatgatgtctgaagtcatccgaatcctccaggaaggagttgacccgaagaagctggattccctgaccacaagctttggctttcctgtgggtgccgccacactggtggatgaagttggtgtggatgtagcgaaacatgtggcggaagatctgggcaaagtctttggggagcggtttggaggtggaaacccagaactgctgacacagatggtgtccaagggcttcctaggtcgtaaatctgggaagggcttttacatctatcaggagggtgtgaagaggaaggatttgaattctgacatggatagtattttagcgagtctgaagctgcctcctaagtctgaagtctcatcagacgaagacatccagttccgcctggtgacaagatttgtgaatgaggcagtcatgtgcctgcaagaggggatcttggccacacctgcagagggagacatcggagccgtctttgggcttggcttcccgccttgtctgggagggcctttccgctttgtggatctgtatggcgcccagaagatagtggaccggctcaagaaatatgaagctgcctatggaaaacagttcaccccatgccagctgctagctgaccatgctaacagccctaacaagaagttctaccagtgagcaggcctcatgcctcgctcagtcagtgcactaaccccagctgccggcagtgctggttctccaacagagtggtgtctagatttatcagagtaacgagaagacaaactccggcactgggtttgctccctgattaaagtgccttcagccaagaccatctctccctcctggtgaagtgtgacttcgaattagtttgcacttcctattggaaggtagagcccactgctcattgtataagccccgaggcctagagtggcagccaagagccatctgaagccacctctctgcctgttcctcccaagaggccagggtggccaggggtggtgagggcagttctgcacccagccaaacacataacaataaaaaccaaactctgtgtcaaaaaaaaaaaaaaaacaaaaaaaaaaaaaaaaaaaaaaaaaaaaaaaaaaaaaaaaaacaaaaaaaaaaaaaaaaaaaaaaaaaaaaaaaaatgttcgcccctctcggccaatgcgtttcaaactctgcccaatttaagcattgcgccccaaattcggcccacttgggcaatttcgcctattgggcgccgtttcacccttaatgcgccgcctttacacacccttccctgga

SEQ ID NO: 402065 - DNA, 3088 bp, Homo sapiens
agccgcttttctgccttcaggatcctccgctcccgaggttatatatgccgcaattttacagggtcttctgcttgctgaccagaacccatattaactatggagtcaaaggggatgtggcagtgttcgaattaactctcccaattcaaaggtaaatacactgagtaaagagctacattcagagttctcagaagttatgaatgaaatctgggctagtgatcaaatcagaagtgccgtccttatctcatcaaagccaggctgctttattgcaggtgctgatatcaacatgttagccgcttgcaagacccttcaagaagtaacacagctatcacaagaagcacagagaatagttgagaaacttgaaaagtccacaaagcctattgtggctgccatcaatggatcctgcctgggaggaggacttgaggttgccatttcatgccaatacagaatagcaacaaaagacagaaaaacagtattaggtacccctgaagttttgctgggggccttaccaggagcaggaggcacacaaaggctgcccaaaatggtgggtgtgcctgctgctttggacatgatgctgactggtagaagcattcgtgcagacagggcaaagaaaatgggactggttgaccaactggtggaacccctgggaccaggactaaaacctccagaggaacggacaatagaatacctagaagaagttgcaattacttttgccaaaggactagctgataagaagatctctccaaagagagacaagggattggtggaaaaattgacagcgtatgccatgactattccatttgtcaggcaacaggtttacaaaaaagtggaagaaaaagtgcgaaagcagactaaaggcctttatcctgcacctctgaaaataattgatgtggtaaagactggaattgagcaagggagtgatgccggttatctctgtgaatctcagaaatttggagagcttgtaatgaccaaagaatcaaaggccttgatgggactctaccatggtcaggtcctgtgcaagaagaataaatttggagctccacagaaggatgttaagcatctggctattcttggtgcagggctgatgggagcaggcatcgcccaagtctccgtggataaggggctaaagactatacttaaagatgccaccctcactgcgctagaccgaggacagcaacaagtgttcaaaggattgaatgacaaagtgaagaagaaagctctaacatcatttgaaagggattccatcttcagcaacttgactgggcagcttgattaccaaggttttgaaaaggccgacatggtgattgaagctgtgtttgaggaccttagtcttaagcacagagtgctaaaggaagtagaagcggtgattccagatcactgtatctttgccagtaacacatctgctctcccaatcagtgaaatcgctgctgtcagcaaaagacctgagaaggtgattggcatgcactacttctctcccgtggacaagatgcagctgctggagattatcacgaccgagaaaacttccaaagacaccagtgcttcagctgtagcagttggtctcaagcaggggaaggtcatcattgtggttaaggatggacctggcttctatactaccaggtgtcttgcgcccatgatgtctgaagtcatccgaatcctccaggaaggagttgacccgaagaagctggattccctgaccacaagctttggctttcctgtgggtgccgccacactggtggatgaagttggtgtggatgtagcgaaacatgtggcggaagatctgggcaaagtctttggggagcggtttggaggtggaaacccagaactgctgacacagatggtgtccaagggcttcctaggtcgtaaatctgggaagggcttttacatctatcaggagggtgtgaagaggaaggatttgaattctgacatggatagtattttagcgagtctgaagctgcctcctaagtctgaagtctcatcagacgaagacatccagttccgcctggtgacaagatttgtgaatgaggcagtcatgtgcctgcaagaggggatcttggccacacctgcagagggagacatcggagccgtctttgggcttggcttcccgccttgtctgggagggcctttccgctttgtggatctgtatggcgcccagaagatagtggaccggctcaagaaatatgaagctgcctatggaaaacagttcaccccatgccagctgctagctgaccatgctaacagccctaacaagaagttctaccagtgagcaggcctcatgcctcgctcagtcagtgcactaaccccagctgccggcagtgctggttctccaacagagtggtgtctagatttatcagagtaacgagaagacaaactccggcactgggtttgctccctgattaaagtgccttcagccaagaccatctctccctcctggtgaagtgtgacttcgaattagtttgcacttcctattggaaggtagagcccactgctcattgtataagccccgaggcctagagtggcagccaagagccatctgaagccacctctctgcctgttcctcccaagaggccagggtggccaggggtggtgagggcagttctgcacccagccaaacacataacaataaaaaccaaactctgtgtcagcatctttgcccttctggtttaaacgcctccttcaaaaagcaatctggaagaaagccctgtgctttgggggagtaagaatgtgtgtgcagaattctaggcagcaccttagggagggactgggatgagagaaagtgggacctggtgggctcaaccacacacacctgtctgtgcagatgctttgcccaggcttctcaccacggtgtaccgggatattaaacctctttccccagcctggaaaaaaaaaaaaaaaacaaacaaaaaaaaaaatgtttttggggcggccctgggcctctcgaaaaagctttttcaaacaccatccccgtggggccgccgcggggcgccagtaggtgttacgtggaacacggggatcatcacgcggtggtcccgaaggaaaaagcagcgggggccacagcacaatggtgcctggagattctccccccagtttaaac

SEQ ID NO: 402066 - DNA, 2678 bp, Homo sapiens
agccgcttttctgccttcaggatcctccgctcccgaggttatatatgccgcaattttacagggtcttctgcttgctgaccagaacccatattaactatggagtcaaaggggatgtggcagtgttcgaattaactctcccaattcaaaggtaaatacactgagtaaagagctacattcagagttctcagaagttatgaatgaaatctgggctagtgatcaaatcagaagtgccgtccttatctcatcaaagccaggctgctttattgcaggtgctgatatcaacatgttagccgcttgcaagacccttcaagaagtaacacagctatcacaagaagcacagagaatagttgagaaacttgaaaagtccacaaagcctattgtggctgccatcaatggatcctgcctgggaggaggacttgaggttgccatttcatgccaatacagaatagcaacaaaagacagaaaaacagtattaggtacccctgaagttttgctgggggccttaccaggagcaggaggcacacaaaggctgcccaaaatggtgggtgtgcctgctgctttggacatgatgctgactggtagaagcattcgtgcagacagggcaaagaaaatgggactggttgaccaactggtggaacccctgggaccaggactaaaacctccagaggaacggacaatagaatacctagaagaagttgcaattacttttgccaaaggactagctgataagaagatctctccaaagagagacaagggattggtggaaaaattgacagcgtatgccatgactattccatttgtcaggcaacaggtttacaaaaaagtggaagaaaaagtgcgaaagcagactaaaggcctttatcctgcacctctgaaaataattgatgtggtaaagactggaattgagcaagggagtgatgccggttatctctgtgaatctcagaaatttggagagcttgtaatgaccaaagaatcaaaggccttgatgggactctaccatggtcaggtcctgtgcaagaagaataaatttggagctccacagaaggatgttaagcatctggctattcttggtgcagggctgatgggagcaggcatcgcccaagtctccgtggataaggggctaaagactatacttaaagatgccaccctcactgcgctagaccgaggacagcaacaagtgttcaaaggattgaatgacaaagtgaagaagaaagctctaacatcatttgaaagggattccatcttcagcaacttgactgggcagcttgattaccaaggttttgaaaaggccgacatggtgattgaagctgtgtttgaggaccttagtcttaagcacagagtgctaaaggaagtagaagcggtgattccagatcactgtatctttgccagtaacacatctgctctcccaatcagtgaaatcgctgctgtcagcaaaagacctgagaaggtgattggcatgcactacttctctcccgtggacaagatgcagctgctggagattatcacgaccgagaaaacttccaaagacaccagtgcttcagctgtagcagttggtctcaagcaggggaaggtcatcattgtggttaaggatggacctggcttctatactaccaggtgtcttgcgcccatgatgtctgaagtcatccgaatcctccaggaaggagttgacccgaagaagctggattccctgaccacaagctttggctttcctgtgggtgccgccacactggtggatgaagttggtgtggatgtagcgaaacatgtggcggaagatctgggcaaagtctttggggagcggtttggaggtggaaacccagaactgctgacacagatggtgtccaagggcttcctaggtcgtaaatctgggaagggcttttacatctatcaggagggtgtgaagaggaaggatttgaattctgacatggatagtattttagcgagtctgaagctgcctcctaagtctgaagtctcatcagacgaagacatccagttccgcctggtgacaagatttgtgaatgaggcagtcatgtgcctgcaagaggggatcttggccacacctgcagagggagacatcggagccgtctttgggcttggcttcccgccttgtctgggagggcctttccgctttgtggatctgtatggcgcccagaagatagtggaccggctcaagaaatatgaagctgcctatggaaaacagttcaccccatgccagctgctagctgaccatgctaacagccctaacaagaagttctaccagtgagcaggcctcatgcctcgctcagtcagtgcactaaccccagctgccggcagtgctggttctccaacagagtggtgtctagatttatcagagtaacgagaagacaaactccggcactgggtttgctccctgattaaagtgccttcagccaagaccatctctccctcctggtgaagtgtgacttcgaattagtttgcacttcctattggaaggtagagcccactgctcattgtataagccccgaggcctagagtggcagccaagagccatctgaagccacctctctgcctgttcctcccaagaggccagggtggccaggggtggtgagggcagttctgcacccagccaaacacataacaataaaaaccaaactctgtgtcaaaaaaaaaaaagtcgacgggccgcgaatctagtagtagta

SEQ ID NO: 402067 - DNA, 2725 bp, Homo sapiens
agccgcttttctgccttcaggatcctccgctcccgaggttatatatgccgcaattttacagggtcttctgcttgctgaccagaacccatattaactatggagtcaaaggggatgtggcagtgttcgaattaactctcccaattcaaaggtaaatacactgagtaaagagctacattcagagttctcagaagttatgaatgaaatctgggctagtgatcaaatcagaagtgccgtccttatctcatcaaagccaggctgctttattgcaggtgctgatatcaacatgttagccgcttgcaagacccttcaagaagtaacacagctatcacaagaagcacagagaatagttgagaaacttgaaaagtccacaaagcctattgtggctgccatcaatggatcctgcctgggaggaggacttgaggttgccatttcatgccaatacagaatagcaacaaaagacagaaaaacagtattaggtacccctgaagttttgctgggggccttaccaggagcaggaggcacacaaaggctgcccaaaatggtgggtgtgcctgctgctttggacatgatgctgactggtagaagcattcgtgcagacagggcaaagaaaatgggactggttgaccaactggtggaacccctgggaccaggactaaaacctccagaggaacggacaatagaatacctagaagaagttgcaattacttttgccaaaggactagctgataagaagatctctccaaagagagacaagggattggtggaaaaattgacagcgtatgccatgactattccatttgtcaggcaacaggtttacaaaaaagtggaagaaaaagtgcgaaagcagactaaaggcctttatcctgcacctctgaaaataattgatgtggtaaagactggaattgagcaagggagtgatgccggttatctctgtgaatctcagaaatttggagagcttgtaatgaccaaagaatcaaaggccttgatgggactctaccatggtcaggtcctgtgcaagaagaataaatttggagctccacagaaggatgttaagcatctggctattcttggtgcagggctgatgggagcaggcatcgcccaagtctccgtggataaggggctaaagactatacttaaagatgccaccctcactgcgctagaccgaggacagcaacaagtgttcaaaggattgaatgacaaagtgaagaagaaagctctaacatcatttgaaagggattccatcttcagcaacttgactgggcagcttgattaccaaggttttgaaaaggccgacatggtgattgaagctgtgtttgaggaccttagtcttaagcacagagtgctaaaggaagtagaagcggtgattccagatcactgtatctttgccagtaacacatctgctctcccaatcagtgaaatcgctgctgtcagcaaaagacctgagaaggtgattggcatgcactacttctctcccgtggacaagatgcagctgctggagattatcacgaccgagaaaacttccaaagacaccagtgcttcagctgtagcagttggtctcaagcaggggaaggtcatcattgtggttaaggatggacctggcttctatactaccaggtgtcttgcgcccatgatgtctgaagtcatccgaatcctccaggaaggagttgacccgaagaagctggattccctgaccacaagctttggctttcctgtgggtgccgccacactggtggatgaagttggtgtggatgtagcgaaacatgtggcggaagatctgggcaaagtctttggggagcggtttggaggtggaaacccagaactgctgacacagatggtgtccaagggcttcctaggtcgtaaatctgggaagggcttttacatctatcaggagggtgtgaagaggaaggatttgaattctgacatggatagtattttagcgagtctgaagctgcctcctaagtctgaagtctcatcagacgaagacatccagttccgcctggtgacaagatttgtgaatgaggcagtcatgtgcctgcaagaggggatcttggccacacctgcagagggagacatcggagccgtctttgggcttggcttcccgccttgtctgggaggttggtctcgcaggttgggaaggaagctcactttagcctggagcccgtgttgcgtctccttcaacgaagtcctctttctctattcagggcctttccgctttgtggatctgtatggcgcccagaagatagtggaccggctcaagaaatatgaagctgcctatggaaaacagttcaccccatgccagctgctagctgaccatgctaacagccctaacaagaagttctaccagtgagcaggcctcatgcctcgctcagtcagtgcactaaccccagctgccggcagtgctggttctccaacagagtggtgtctagatttatcagagtaacgagaagacaaactccggcactgggtttgctccctgattaaagtgccttcagccaagaccatctctccctcctggtgaagtgtgacttcgaattagtttgcacttcctattggaaggtagagcccactgctcattgtataagccccgaggcctagagtggcagccaagagccatctgaagccacctctctgcctgttcctcccaagaggccagggtggccaggggtggtgagggcagttctgcacccagccaaacacataacaataaaaaccaaactctgtgtca

SEQ ID NO: 402068 - DNA, 2429 bp, Homo sapiens
agccgcttttctgccttcaggatcctccgctcccgaggttatatatgccgcaattttacagggtcttctgcttgctgaccagaacccatattaactatggagtcaaaggggatgtggcagtgttcgaattaactctcccaattcaaaggtaaatacactgagtaaagagctacattcagagttctcagaagttatgaatgaaatctgggctagtgatcaaatcagaagtgccgtccttatctcatcaaagccaggctgctttattgcaggtgctgatatcaacatgttagccgcttgcaagacccttcaagaagtaacacagctatcacaagaagcacagagaatagttgagaaacttgaaaagtccacaaagcctattgtggctgccatcaatggatcctgcctgggaggaggacttgaggttgccatttcatgccaatacagaatagcaacaaaagacagaaaaacagtattaggtacccctgaagttttgctgggggccttaccaggagcaggaggcacacaaaggctgcccaaaatggtgggtgtgcctgctgctttggacatgatgctgactggtagaagcattcgtgcagacagggcaaagaaaatgggactggttgaccaactggtggaacccctgggaccaggactaaaacctccagaggaacggacaatagaatacctagaagaagttgcaattacttttgccaaaggactagctgataagaagatctctccaaagagagacaagggattggtggaaaaattgacagcgtatgccatgactattccatttgtcaggcaacaggtttacaaaaaagtggaagaaaaagtgcgaaagcagactaaaggcctttatcctgcacctctgaaaataattgatgtggtaaagactggaattgagcaagggagtgatgccggttatctctgtgaatctcagaaatttggagagcttgtaatgaccaaagaatcaaaggccttgatgggactctaccatggtcaggtcctgtgcaagaagaataaatttggagctccacagaaggatgttaagcatctggctattcttggtgcagggctgatgggagcaggcatcgcccaagtctccgtggataaggggctaaagactatacttaaagatgccaccctcactgcgctagaccgaggacagcaacaagtgttcaaaggattgaatgacaaagtgaagaagaaagctctaacatcatttgaaagggattccatcttcagcaacttgactgggcagcttgattaccaaggttttgaaaaggccgacatggtgattgaagctgtgtttgaggaccttagtcttaagcacagagtgctaaaggaagtagaagcggtgattccagatcactgtatctttgccagtaacacatctgctctcccaatcagtgaaatcgctgctgtcagcaaaagacctgagaaggtgattggcatgcactacttctctcccgtggacaagatgcagctgctggagattatcacgaccgagaaaacttccaaagacaccagtgcttcagctgtagcagttggtctcaagcaggggaaggtcatcattgtggttaaggatggacctggcttctatactaccaggtgtcttgcgcccatgatgtctgaagtcatccgaatcctccaggaaggagttgacccgaagaagctggattccctgaccacaagctttggctttcctgtgggtgccgccacactggtggatgaagttggtgtggatgtagcgaaacatgtggcggaagatctgggcaaagtctttggggagcggtttggaggtggaaacccagaactgctgacacagatggtgtccaagggcttcctaggtcgtaaatctgggaagggcttttacatctatcaggagggtgtgaagaggaaggatttgaattctgacatggatagtattttagcgagtctgaagctgcctcctaagtctgaagtctcatcagacgaagacatccagttccgcctggtgacaagatttgtgaatgaggcagtcatgtgcctgcaagaggggatcttggccacacctgcagagggagacatcggagccgtctttgggcttggcttcccgccttgtctgggagggcctttccgctttgtggatctgtatggcgcccagaagatagtggaccggctcaagaaatatgaagctgcctatggaaaacagttcaccccatgccagctgctagctgaccatgctaacagccctaacaagaagttctaccagtgagcaggcctcatgcctcgctcagtcagtgcactaaccccagctgccggcagtgctggttctccaacagagtggtgtctagatttatcagagtaacgagaagacaaactccggcactgggtttgctccctgattaaagtgccttcagccagtaccacaaatattcggacga

SEQ ID NO: 402069 - DNA, 2369 bp, Homo sapiens
  misc_feature (2362)..(2362): n is a, c, g, or t
agccgcttttctgccttcaggatcctccgctcccgaggttatatatgccgcaattttacagggtcttctgcttgctgaccagaacccatattaactatggagtcaaaggggatgtggcagtgttcgaattaactctcccaattcaaaggtaaatacactgagtaaagagctacattcagagttctcagaagttatgaatgaaatctgggctagtgatcaaatcagaagtgccgtccttatctcatcaaagccaggctgctttattgcaggtgctgatatcaacatgttagccgcttgcaagacccttcaagaagtaacacagctatcacaagaagcacagagaatagttgagaaacttgaaaagtccacaaagcctattgtggctgccatcaatggatcctgcctgggaggaggacttgaggttgccatttcatgccaatacagaatagcaacaaaagacagaaaaacagtattaggtacccctgaagttttgctgggggccttaccaggagcaggaggcacacaaaggctgcccaaaatggtgggtgtgcctgctgctttggacatgatgctgactggtagaagcattcgtgcagacagggcaaagaaaatgggactggttgaccaactggtggaacccctgggaccaggactaaaacctccagaggaacggacaatagaatacctagaagaagttgcaattacttttgccaaaggactagctgataagaagatctctccaaagagagacaagggattggtggaaaaattgacagcgtatgccatgactattccatttgtcaggcaacaggtttacaaaaaagtggaagaaaaagtgcgaaagcagactaaaggcctttatcctgcacctctgaaaataattgatgtggtaaagactggaattgagcaagggagtgatgccggttatctctgtgaatctcagaaatttggagagcttgtaatgaccaaagaatcaaaggccttgatgggactctaccatggtcaggtcctgtgcaagaagaataaatttggagctccacagaaggatgttaagcatctggctattcttggtgcagggctgatgggagcaggcatcgcccaagtctccgtggataaggggctaaagactatacttaaagatgccaccctcactgcgctagaccgaggacagcaacaagtgttcaaaggattgaatgacaaagtgaagaagaaagctctaacatcatttgaaagggattccatcttcagcaacttgactgggcagcttgattaccaaggttttgaaaaggccgacatggtgattgaagctgtgtttgaggaccttagtcttaagcacagagtgctaaaggaagtagaagcggtgattccagatcactgtatctttgccagtaacacatctgctctcccaatcagtgaaatcgctgctgtcagcaaaagacctgagaaggtgattggcatgcactacttctctcccgtggacaagatgcagctgctggagattatcacgaccgagaaaacttccaaagacaccagtgcttcagctgtagcagttggtctcaagcaggggaaggtcatcattgtggttaaggatggacctggcttctatactaccaggtgtcttgcgcccatgatgtctgaagtcatccgaatcctccaggaaggagttgacccgaagaagctggattccctgaccacaagctttggctttcctgtgggtgccgccacactggtggatgaagttggtgtggatgtagcgaaacatgtggcggaagatctgggcaaagtctttggggagcggtttggaggtggaaacccagaactgctgacacagatggtgtccaagggcttcctaggtcgtaaatctgggaagggcttttacatctatcaggagggtgtgaagaggaaggatttgaattctgacatggatagtattttagcgagtctgaagctgcctcctaagtctgaagtctcatcagacgaagacatccagttccgcctggtgacaagatttgtgaatgaggcagtcatgtgcctgcaagaggggatcttggccacacctgcagagggagacatcggagccgtctttgggcttggcttcccgccttgtctgggagggcctttccgctttgtggatctgtatggcgcccagaagatagtggaccggctcaagaaatatgaagctgcctatggaaaacagttcaccccatgccagctgctagctgaccatgctaacagccctaacaagaagttctaccagtgagcaggcctcatgcctcgctcagtcagtgcactaaccccagctgccggcagtgctggttctccaacagagtggtgtctttggacactcggcgtgtgcaggagntcctcta

SEQ ID NO: 402070 - DNA, 2414 bp, Homo sapiens
agccgcttttctgccttcaggatcctccgctcccgaggttatatatgccgcaattttacagggtcttctgcttgctgaccagaacccatattaactatggagtcaaaggggatgtggcagtgttcgaattaactctcccaattcaaaggtaaatacactgagtaaagagctacattcagagttctcagaagttatgaatgaaatctgggctagtgatcaaatcagaagtgccgtccttatctcatcaaagccaggctgctttattgcaggtgctgatatcaacatgttagccgcttgcaagacccttcaagaagtaacacagctatcacaagaagcacagagaatagttgagaaacttgaaaagtccacaaagcctattgtggctgccatcaatggatcctgcctgggaggaggacttgaggttgccatttcatgccaatacagaatagcaacaaaagacagaaaaacagtattaggtacccctgaagttttgctgggggccttaccaggagcaggaggcacacaaaggctgcccaaaatggtgggtgtgcctgctgctttggacatgatgctgactggtagaagcattcgtgcagacagggcaaagaaaatgggactggttgaccaactggtggaacccctgggaccaggactaaaacctccagaggaacggacaatagaatacctagaagaagttgcaattacttttgccaaaggactagctgataagaagatctctccaaagagagacaagggattggtggaaaaattgacagcgtatgccatgactattccatttgtcaggcaacaggtttacaaaaaagtggaagaaaaagtgcgaaagcagactaaaggcctttatcctgcacctctgaaaataattgatgtggtaaagactggaattgagcaagggagtgatgccggttatctctgtgaatctcagaaatttggagagcttgtaatgaccaaagaatcaaaggccttgatgggactctaccatggtcaggtcctgtgcaagaagaataaatttggagctccacagaaggatgttaagcatctggctattcttggtgcagggctgatgggagcaggcatcgcccaagtctccgtggataaggggctaaagactatacttaaagatgccaccctcactgcgctagaccgaggacagcaacaagtgttcaaaggattgaatgacaaagtgaagaagaaagctctaacatcatttgaaagggattccatcttcagcaacttgactgggcagcttgattaccaaggttttgaaaaggccgacatggtgattgaagctgtgtttgaggaccttagtcttaagcacagagtgctaaaggaagtagaagcggtgattccagatcactgtatctttgccagtaacacatctgctctcccaatcagtgaaatcgctgctgtcagcaaaagacctgagaaggtgattggcatgcactacttctctcccgtggacaagatgcagctgctggagattatcacgaccgagaaaacttccaaagacaccagtgcttcagctgtagcagttggtctcaagcaggggaaggtcatcattgtggttaaggatggacctggcttctatactaccaggtgtcttgcgcccatgatgtctgaagtcatccgaatcctccaggaaggagttgacccgaagaagctggattccctgaccacaagctttggctttcctgtgggtgccgccacactggtggatgaagttggtgtggatgtagcgaaacatgtggcggaagatctgggcaaagtctttggggagcggtttggaggtggaaacccagaactgctgacacagatggtgtccaagggcttcctaggtcgtaaatctgggaagggcttttacatctatcaggagggtgtgaagaggaaggatttgaattctgacatggatagtattttagcgagtctgaagctgcctcctaagtctgaagtctcatcagacgaagacatccagttccgcctggtgacaagatttgtgaatgaggcagtcatgtgcctgcaagaggggatcttggccacacctgcagagggagacatcggagccgtctttgggcttggcttcccgccttgtctgggagggcctttccgctttgtggatctgtatggcgcccagaagatagtggaccggctcaagaaatatgaagctgcctatggaaaacagttcaccccatgccagctgctagctgaccatgctaacagccctaacaagaagttctaccagtgagcaggcctcatgcctcgctcagtcagtgcactaaccccagctgccggcagtgctggttctccaacagagtggtgtcagtgagaaaccaaggctgctgctggctggtcctgtggacaccgaagcaggaaagtgagtctgtacagagagcaggagg

SEQ ID NO: 402071 - DNA, 602 bp, Homo sapiens
cggtggctgtctagaggatccctactgctggagagacatcggagcgtcttgggcttggcttcccgccttgtctgggagggcctttccgctttgtggatctgtatggcgcccagaagatagtggaccggctcaagaaatatgaagctgcctatggaaaacagttcaccccatgccagctgctagctgaccatgctaacagccctaacaagaagttctaccagtgagcaggcctcatgcctcgctcagtcagtgcactaaccccagctgccggcagtgctggttctccaacagagtggtgtctagatttatcagagtaacgagaagacaaactccggcactgggtttgctccctgattaaagtgccttcagccaagaccatctctccctcctggtgaagtgtgacttcgaattagtttgcacttcctattggaaggtagagcccactgctcattgtataagccccgaggcctagagtggcagccaagagccatctgaagccacctctctgcctgttcctcccaagaggccagggtggccaggggtggtgagggcagttctgcacccagccaaacacataacaataaaaaccaaactctgtgtca

SEQ ID NO: 402072 - DNA, 1850 bp, Homo sapiens
agccgcttttctgccttcaggatcctccgctcccgaggttatatatgccgcaattttacagggtcttctgcttgctgaccagaacccatattaactatggagtcaaaggggatgtggcagtgttcgaattaactctcccaattcaaaggtaaatacactgagtaaagagctacattcagagttctcagaagttatgaatgaaatctgggctagtgatcaaatcagaagtgccgtccttatctcatcaaagccaggctgctttattgcaggtgctgatatcaacatgttagccgcttgcaagacccttcaagaagtaacacagctatcacaagaagcacagagaatagttgagaaacttgaaaagtccacaaagcctattgtggctgccatcaatggatcctgcctgggaggaggacttgaggttgccatttcatgccaatacagaatagcaacaaaagacagaaaaacagtattaggtacccctgaagttttgctgggggccttaccaggagcaggaggcacacaaaggctgcccaaaatggtgggtgtgcctgctgctttggacatgatgctgactggtagaagcattcgtgcagacagggcaaagaaaatgggactggttgaccaactggtggaacccctgggaccaggactaaaacctccagaggaacggacaatagaatacctagaagaagttgcaattacttttgccaaaggactagctgataagaagatctctccaaagagagacaagggattggtggaaaaattgacagcgtatgccatgactattccatttgtcaggcaacaggtttacaaaaaagtggaagaaaaagtgcgaaagcagactaaaggcctttatcctgcacctctgaaaataattgatgtggtaaagactggaattgagcaagggagtgatgccggttatctctgtgaatctcagaaatttggagagcttgtaatgaccaaagaatcaaaggccttgatgggactctaccatggtcaggtcctgtgcaagaagaataaatttggagctccacagaaggatgttaagcatctggctattcttggtgcagggctgatgggagcaggcatcgcccaagtctccgtggataaggggctaaagactatacttaaagatgccaccctcactgcgctagaccgaggacagcaacaagtgttcaaaggattgaatgacaaagtgaagaagaaagctctaacatcatttgaaagggattccatcttcagcaacttgactgggcagcttgattaccaaggttttgaaaaggccgacatggtgattgaagctgtgtttgaggaccttagtcttaagcacagagtgctaaaggaagtagaagcggtgattccagatcactgtatctttgccagtaacacatctgctctcccaatcagtgaaatcgctgctgtcagcaaaagacctgagaaggtgattggcatgcactacttctctcccgtggacaagatgcagctgctggagattatcacgaccgagaaaacttccaaagacaccagtgcttcagctgtagcagttggtctcaagcaggggaaggtcatcattgtggttaaggatggacctggcttctatactaccaggtgtcttgcgcccatgatgtctgaagtcatccgaatcctccaggaaggagttgacccgaagaagctggattccctgaccacaagctttggctttcctgtgggtgccgccacactggtggatgaagttggtgtggatgtagcgaaacatgtggcggaagatctgggcaaagtctttgggagcgggtttgagggggaacccaaaaatgtgaaacaaagggtcaaggttttctaggggg

SEQ ID NO: 402073 - DNA, 1949 bp, Homo sapiens
agccgcttttctgccttcaggatcctccgctcccgaggttatatatgccgcaattttacagggtcttctgcttgctgaccagaacccatattaactatggagtcaaaggggatgtggcagtgttcgaattaactctcccaattcaaaggtaaatacactgagtaaagagctacattcagagttctcagaagttatgaatgaaatctgggctagtgatcaaatcagaagtgccgtccttatctcatcaaagccaggctgctttattgcaggtgctgatatcaacatgttagccgcttgcaagacccttcaagaagtaacacagctatcacaagaagcacagagaatagttgagaaacttgaaaagtccacaaagcctattgtggctgccatcaatggatcctgcctgggaggaggacttgaggttgccatttcatgccaatacagaatagcaacaaaagacagaaaaacagtattaggtacccctgaagttttgctgggggccttaccaggagcaggaggcacacaaaggctgcccaaaatggtgggtgtgcctgctgctttggacatgatgctgactggtagaagcattcgtgcagacagggcaaagaaaatgggactggttgaccaactggtggaacccctgggaccaggactaaaacctccagaggaacggacaatagaatacctagaagaagttgcaattacttttgccaaaggactagctgataagaagatctctccaaagagagacaagggattggtggaaaaattgacagcgtatgccatgactattccatttgtcaggcaacaggtttacaaaaaagtggaagaaaaagtgcgaaagcagactaaaggcctttatcctgcacctctgaaaataattgatgtggtaaagactggaattgagcaagggagtgatgccggttatctctgtgaatctcagaaatttggagagcttgtaatgaccaaagaatcaaaggccttgatgggactctaccatggtcaggtcctgtgcaagaagaataaatttggagctccacagaaggatgttaagcatctggctattcttggtgcagggctgatgggagcaggcatcgcccaagtctccgtggataaggggctaaagactatacttaaagatgccaccctcactgcgctagaccgaggacagcaacaagtgttcaaaggattgaatgacaaagtgaagaagaaagctctaacatcatttgaaagggattccatcttcagcaacttgactgggcagcttgattaccaaggttttgaaaaggccgacatggtgattgaagctgtgtttgaggaccttagtcttaagcacagagtgctaaaggaagtagaagcggtgattccagatcactgtatctttgccagtaacacatctgctctcccaatcagtgaaatcgctgctgtcagcaaaagacctgagaaggtgattggcatgcactacttctctcccgtggacaagatgcagctgctggagattatcacgaccgagaaaacttccaaagacacgaaggtcatcattgtggttaaggatggacctggcttctatactaccaggtgtcttgcgcccatgatgtctgaagtcatccgaatcctccaggaaggagttgacccgaagaagctggattccctgaccacaagctttggctttcctgtgggtgccgccacactggtggatgaagttggtgtggatgtagcgaaacatgtggcggaagatctgggcaaagtctttggggagcggtttggaggtggaaacccagaactgctgacacagatggtgtccaagggcttcctaggtcgtaaatctgggaagggcttttacatctatcaggagggtgtgaagaggaaggatttgaattctgacatggatagtattttagcgagtctgaagtgcttctaagtctgaagctcatcagacgaaacatccg

SEQ ID NO: 402074 - DNA, 1578 bp, Homo sapiens
agccgcttttctgccttcaggatcctccgctcccgaggttatatatgccgcaattttacagggtcttctgcttgctgaccagaacccatattaactatggagtcaaaggggatgtggcagtgttcgaattaactctcccaattcaaaggtaaatacactgagtaaagagctacattcagagttctcagaagttatgaatgaaatctgggctagtgatcaaatcagaagtgccgtccttatctcatcaaagccaggctgctttattgcaggtgctgatatcaacatgttagccgcttgcaagacccttcaagaagtaacacagctatcacaagaagcacagagaatagttgagaaacttgaaaagtccacaaagcctattgtggctgccatcaatggatcctgcctgggaggaggacttgaggttgccatttcatgccaatacagaatagcaacaaaagacagaaaaacagtattaggtacccctgaagttttgctgggggccttaccaggagcaggaggcacacaaaggctgcccaaaatggtgggtgtgcctgctgctttggacatgatgctgactggtagaagcattcgtgcagacagggcaaagaaaatgggactggttgaccaactggtggaacccctgggaccaggactaaaacctccagaggaacggacaatagaatacctagaagaagttgcaattacttttgccaaaggactagctgataagaagatctctccaaagagagacaagggattggtggaaaaattgacagcgtatgccatgactattccatttgtcaggcaacaggtttacaaaaaagtggaagaaaaagtgcgaaagcagactaaaggcctttatcctgcacctctgaaaataattgatgtggtaaagactggaattgagcaagggagtgatgccggttatctctgtgaatctcagaaatttggagagcttgtaatgaccaaagaatcaaaggccttgatgggactctaccatggtcaggtcctgtgcaagaagaataaatttggagctccacagaaggatgttaagcatctggctattcttggtgcagggctgatgggagcaggcatcgcccaagtctccgtggataaggggctaaagactatacttaaagatgccaccctcactgcgctagaccgaggacagcaacaagtgttcaaagggtaagcctgctctctctctttgcaagagttagaatgtcctttgtttcttggttagttgttttttgtggtggcttggtgggtttttttgtttgtttgttcttgccatcacggattcctttttcctgaacataatgagttctagatactccgtagtgaagccaagtttcttttgatttttagaaatgccaattccttctttgacttcgttttgttatagatatcatagacaattaacatccttggagtctgtagtctttgaatgcagaagggaaaatcttatctagtagatacttgttaatgccattttacactttcgtatcaggcctgcggattttgatatagtttgcaggtaattgctctattgttaaggattattcaaacagcatgact

SEQ ID NO: 402075 - DNA, 1445 bp, Homo sapiens
agccgcttttctgccttcaggatcctccgctcccgaggttatatatgccgcaattttacagggtcttctgcttgctgaccagaacccatattaactatggagtcaaaggggatgtggcagtgttcgaattaactctcccaattcaaaggtaaatacactgagtaaagagctacattcagagttctcagaagttatgaatgaaatctgggctagtgatcaaatcagaagtgccgtccttatctcatcaaagccaggctgctttattgcaggtgctgatatcaacatgttagccgcttgcaagacccttcaagaagtaacacagctatcacaagaagcacagagaatagttgagaaacttgaaaagtccacaaagcctattgtggctgccatcaatggatcctgcctgggaggaggacttgaggttgccatttcatgccaatacagaatagcaacaaaagacagaaaaacagtattaggtacccctgaagttttgctgggggccttaccaggagcaggaggcacacaaaggctgcccaaaatggtgggtgtgcctgctgctttggacatgatgctgactggtagaagcattcgtgcagacagggcaaagaaaatgggactggttgaccaactggtggaacccctgggaccaggactaaaacctccagaggaacggacaatagaatacctagaagaagttgcaattacttttgccaaaggactagctgataagaagatctctccaaagagagacaagggattggtggaaaaattgacagcgtatgccatgactattccatttgtcaggcaacaggtttacaaaaaagtggaagaaaaagtgcgaaagcagactaaaggcctttatcctgcacctctgaaaataattgatgtggtaaagactggaattgagcaagggagtgatgccggttatctctgtgaatctcagaaatttggagagcttgtaatgaccaaagaatcaaaggccttgatgggactctaccatggtcaggtcctgtgcaagaagaataaatttggagctccacagaaggatgttaagtaagttaaactctacgtaggaagcccttgtgaattttactgtgtgcaaagttcacagaggctttgaagatctacagagctagatctgtatcttaattcagtcttgccctcaacttctttcctgagcacatttgagcccttatgtctactaaaaactttttggctttcaaagttctgcctgttctgagttttttccaaacccctctggtcattcctatagaggctttcttgtcacatattgatgttgcctagaagtctggtttaggtcccccttcccaaaccacacactccctctgcactgttcaatgatcatctctctccctgtgatttgagatgtcatctctgggaactcacacttcttcctcattaaaaaacataaaacctcattgtaa

SEQ ID NO: 402076 - DNA, 471 bp, Homo sapiens
agggtctataactttcaacacattttcaaagtttaagaatcactgagctgggtgcagtggcacttgcctacagtccctgctacttgtaaggctgaatggacgatcacttgagtccaggagtttgaagccagcctgggcaatatagagagaccctgtctcttaaaaaaacaaaaatcactggactagctgatagaacaccaatgttccttaaaagaatagtttggcagtgtcaacactgcaaaattttagtttgactttttgatatgtatatttttaactataatcataaaaccttgatatgggttgaaagtttttttcttgtatttttcctctgtgtgttttttatagactgtgtatatggagagagagagaaaaagaaaactcacccatgtacaagagcaagcaaatgatatagatgttctttgaactctttttaatattgtaactttttgtaaatttgaaattatttcc

SEQ ID NO: 402077 - DNA, 356 bp, Homo sapiens
acatgttagttattacttcttgaaaatttgctatcttccaagagaaatgatatgtgattctatcatctattagtttgtgtaaccatcactggaaactagagggatataatacggtatttgcaagccaaagaattcaggtcccttgtcaaagttacacaccagaagatagaatcaggaaagaaatcccagtcatcttacctccaaggccatggttgtttcatatgccaggatgctaagaaagtagacacagtttgcacttttgagaagtttggcaatcaagtgagggaaaataaataaagaggagggatagaacacaggggagaaaatacaagaggagaagagagaggagagggcag

SEQ ID NO: 402078 - DNA, 315 bp, Homo sapiens
tcagaagaggatgcactttaactccaatggcctggaacccaaagaaaacgagcctccatctccactggtctctgggattattgattacaacatgcccctcacctccacctacctgaagcagatgaagcttcgagtgatgaattcccaggagcagccatcctcactgtctccggcacctggcttcgtaaacactgttatcaccgtgctcatctgtgcccatgaagaatgaagcacaaaaccgcacaaacagccggaagcacagccccctggttttgtttcatacagaatggcactaaatccaggtcaccactagaa

SEQ ID NO: 402079 - DNA, 746 bp, Homo sapiens
agaaaacaaaagactgtgaagcttagttgcatctctcatactgacttgaggatcaaatcagcccattatgtaactctctgtacccatttcctcaactctaatgtgaggagacagggccagcagattttaaacgtcgattcagttcaattattcacttattctgtaacttgagaattagctgtgcaaccctgaaaaacaatgaaaaaggaaatctgtagcaaaaaaagatagtggtggcactttcaggcaaacagtaaagtgatggaggggaaattgacggaagtgagaatgcagaaagtatcataatggaaaacgtttgtgagcatggagagaaatcccagagacctgaaacttctgccagaacctccatcaatcctccatcaatctgttaatcgttgttaacagatttcattaattcagctgaaataaattacatgtgcatactgaggaagtaaatggaaaggttctgctaaatttaggtgggcagcatcaagccagtgctgtgaagcaatacagtgacagacagaacaagttacctgatggattaactcagtgctcttgggtttattaaaacagatttcttgggttggggcaggggagataagggaattatttatccctagaggggctccagaccaggagatgttactggggcatgagtaggctctggagagcgctgtggaaaactcctgctctccagtgttccggacatggataataaccaggtgttgtatgcaaaaataaaa

SEQ ID NO: 402080 - DNA, 739 bp, Homo sapiens
cataaaacagtaaaatagattattctcagattaagcttggtgaagacatatccaagttcacatttttctctaattctttcccatcatcatactggtccaaccctatcctcagattttgcttagaatacttctttatgggctggtcacagtggctcatgcctgtattcccagcactttgggaggtcaagaaggaaagatcgcttaagtcaggagtttgagaccagcctgggtaacatgatgagaccccatctctactaaaattagaagaaaaaaaatccagtcatggtggtgcactcctgtaatcccagcactcatgcagctgaggcagaaggatcatttgagcccagaggttcaaggctacgattaggccactgcagtgcagcctggggacaaagtgaaaccctgtctctctaaaaaaaaaaaacaaaactcaaagaatatttttctgaggtgggtgctgttgtctctgtggtgggtgctattgtctctctggtgggtggtgtctctgcagtgggtgctgttgtctctgaggtgggtgctgttgtctctgtggtgggtgttgtctctgagtgggtgctgttgtctctctggtgggtgttgttgtttctgaggtgggagctgttttctctctggtgggtgttgttgtctctgaggtggatgctgttgtctctgtggtgggtgttgtctctgaggtgggtgctggtgtctctggtgggtgctgttgtctctgtggtgggtg

SEQ ID NO: 402081 - DNA, 197 bp, Homo sapiens
gcccccatagctatcattctgctcatttttaaaagtcagcatttatacaactgtacactcaggagtgcaggaaatctcactgcttttaaaggtaacagccttttctaaattcctacttcaacgtcatgctagagacactcagcaacctgtatgttctcagaaacaactaaaaccaatctactctctaatgacctcta

SEQ ID NO: 402082 - DNA, 294 bp, Homo sapiens
ggcaaggtcttgccatgttgtccaggctggtcttgaattcttggcctcaagcaatcctcttgccccagccttccaaagtgctgagattataggcatgagccaccacacctggcccaaaaggcctcttgagggatgagctaggaggaggccagtagacaggagggtgatgggccttgggtgagtcagagttttcctgggcatcttctgccaggagttggggcacgtgcatctgagatctttctgggagttgggagtataggaaggtgtcatcggggctctctgaggacatagaca

SEQ ID NO: 402083 - DNA, 451 bp, Homo sapiens
gcattcatgtcttgaataatttccccctcaaatataaactgatgtttctctgtctacaagactagtagtcaaacatctttggatggtcttgagacataccatactcatccatttaattcagcagaatctgagcttcactctcccctcaactaagatttacatgattataattatattgtttgtcatttttatcccttcctgtctgaacaaaaactgtatggaatcaacaccaccgagctctgtgggaaaaaagaaaaaccttctcccttcgctctgctggaagctggagggcgctaggcccctgtgcagtagtgcatagaattctagcttttttcctcctttctctgtatattgggctcagagagtacactgtgtctctatgtgaatatggacagttagcatttaccaacatgtatctgtctactttctcttgtttaaaagaagaaaaaaa

SEQ ID NO: 402084 - DNA, 574 bp, Homo sapiens
tcctgtttatctgtttgtcttttatttgtcttgatattatatataagttggtcgaaatttgctacttagtaatgacacttttatgaattagaacaatggcagataaatcctctgctgaggctattatattcgcaacagggagtactgatggtcggcccacctggcacggggaagacgctccttgctaaagcagtagctacagaatgcaagacaacattcttcaatgtctcttcatcaactttgacttccaaatacagaggagaatctgagaagcttgttcgtcttctgtttgaaatggtgaatgtttgagacagctctaatgattctttacctctctaaaaggggagaaagtgagctgtaactatctccagtatatggaatagttaggcaggatgccattttgcccagagtatgagtcctatgcccttaaagctagatttctttacaaacatgaataattagagtttctctttgtctctttttctccagatgtagatccaaatctaccagttttggggcatgctcacattatgggatctgcattactaatcttctgtaggaatctgaaattatg

SEQ ID NO: 402085 - DNA, 589 bp, Homo sapiens
aagatttgagacaatagtatactatgtttatgctgcaggcttacattttaaaatttgtttctaccattagcaaaaggcagggaggagctattacgaataagtctacgtgagttggaattggctgatgatgttgaccttgcaagtatagcagaaaacatggaaggttattcaggtgcggacattaccaacgtgtgcaggtatgaattatcatggaagcataggtttttgtaagcataaacttctagtatgaagttttttggttttgttttttgagacacagtctcgctctgttgcctagaactccatctcaaaaaagtatcacatagagatgagttatatgtactcgttcacattgtaaaatattaatatgtcaatatgagtgatggttaaaaaaggtaataaaacacttttagggtaaacagcactatatctagaaccacaagaccaagggcacagtctaattcatgacatcaatggactcattcaatttgagccatggtttcagccagtgtaaatgaaagtatacctactcctgcatctcagccattcttacctgggcaaaggttttatatcagtgtaaccaaaacag

SEQ ID NO: 402086 - DNA, 441 bp, Homo sapiens
gataatttcaaagtctcttcacatgtgttctcttccactttaagttttccttaacaattcatcatatgaatagccagcccttttagagaataaggtcaacttttttttttttgaaacagagtctcgctctgtcacccaggctggagtgcagactccatctcaaaaaagtatcacatagagatgagttatatgtactcgttcacattgtaaaatattaatatgtcaatatgagtgatggttaaaaaaggtaataaaacacttttagggtaaacagcactatatctagaaccacaagaccaagggcacagtctaattcatgacatcaatggactcattcaatttgagccatggtttcagccagtgtaaatgaaagtatacctactcctgcatctcagccattcttacctgggcaaaggttttatatcagtgtaaccaaaacag

SEQ ID NO: 402087 - DNA, 2553 bp, Homo sapiens
taaagtgtttctttttttcttcttctttttagcttacagttgaacatgagtcttcttatgattagtgagaatgtaaaattggctcgtgaatatgcattgctgggaaactatgactctgcgatggtctattatcagggagttcttgaccaaatgaacaagtatctgtactcagtcaaagatacatacctccagcagaaatggcaacaggtttggcaggaaataaatgtggaagctaaacatgttaaagatatcatgaaaacactagagagctttaaactggacagcactcccttgaaagcggcacagcatgaccttccagcttctgagggagaagtctggtccatgcctgtacctgttgaacgaagaccctcaccaggacctagaaaacgccaatcttctcagtacagtgaccctaaatcacatggtaatcgtccaagtacaactgtcagagttcaccgttcatctgcacagaatgttcacaatgacagagggaaagctgttcgttgtcgtgaaaagaaagaacagaataaaggaagagaggaaaagaacaaatcacctgctgcagtaacagaaccagagacaaataaatttgatagtaccggatatgataaagacttagtagaagctttggaaagagatataatttcccagaatcccaatgttcgatgggatgatatcgctgatttagtagaagctaaaaagttgcttaaggaagccgtagtgttaccaatgtggatgcccgaattctttaagggcattaggagaccatggaaaggagtactgatggtcggcccacctggcacggggaagacgctccttgctaaagcagtagctacagaatgcaagacaacattcttcaatgtctcttcatcaactttgacttccaaatacagaggagaatctgagaagcttgttcgtcttctgtttgaaatggctcgattttattctccagccaccatatttattgatgagatagactccatctgtagtcgccgagggacttctgaagaacatgaagcaagcagaagggtgaaagcggagctgctggttcagatggatggtgttggaggtacttctgaaaatgatgacccttccaaaatggttatggttctggcagctactaattttccctgggatatagatgaggctttaagacgacgccttgagaaacgaatctatattcctttgccgtcagcaaaaggcagggaggagctattacgaataagtctacgtgagttggaattggctgatgatgttgaccttgcaagtatagcagaaaacatggaaggttattcaggtgcggacattaccaacgtgtgcagggatgcgtccttgatggcaatgagaaggcgcattgaaggtttgactccagaggaaatccgaaatctttccaaagaagaaatgcacatgcctacaactatggaggatttcgagatggctttaaaaaaggtttctaagtcagtgtctgctgcagacattgaaagatacgagaaatggatatttgagtttggatcatgctaaattctcacatgtaaactgtgagaaatgtgccttaagtgtttgaatattaaatgcagtaattcattgtactgagtgctatattttttttaactttcataatggtaagattttttttaaaaaacccttatgattctgaataaaggcaatatttttaagctgaaaatttgttttactttagcattactagatttctattattatttcactgaccacaaatgttacttagcttggaaagctgtcttttttttctttgctttttctatttttttcaagactgtttgtttcttctagctgaactggccattcatactgggattagccaacagaccataagaaagacatcaatcttggctcttgtttgaaaccaatagctacaatggcaaaccatcacgtttcttgattcagggcctaggaaagctgactttatatgcacttttttttttttttttttttggtatataaactatttattaacagacaaggcctacagacttacttcttcttagacacacccacgatgcggccacggcagcctgtggtcttggtgtgctggcctcggacacgaaggccccagaagtgacgcagccctctacgggcccgaatctttttcagtcgctccaggtcttcacagagcttgttgtccagaccattggctaggacctggctatattttccatcctttacatccttctgtctgttcaagaaccaggctggcatcttgtactagtgtggattctgcataatggtgatcacatgttccacctcatcctcagtgagttctcccgccctcttggtgaggtcagtgtctgctttcctcaacaccacatgagcatatcttcggcccacacccttaacggcagtgatggcaaaggccattttccgccacccatcaatgttggtgttgactactcggcaaaatatgctgggacttttcagggatcactagagacatggcggcagcacaagtggcggcatgtaggcctcctgtggaagagagctatatgcacttctaacttggcatcttctctccta

SEQ ID NO: 402088 - DNA, 2809 bp, Homo sapiens
  misc_feature (39)..(39): n is a, c, g, or t
  misc_feature (76)..(76): n is a, c, g, or t
gtgccctctcccccccgtttgtccccccccgcccgctgntcccggtccggccttcccgggctcggccccggccctncccctggcgggtttgtcttcaaattctcggcgagcaggagccgcgccggcaggtggtgttgacgattgaactgggcagtactggggccgtgagcggagagcaaagtgggctggactgggtcaggccctccttcctcgctgccgggatctccactccgccaatcccctgtgcctggcgttgggcggtttcccgaggagcttgggccgccgcagcttacagttgaacatgagtcttcttatgattagtgagaatgtaaaattggctcgtgaatatgcattgctgggaaactatgactctgcgatggtctattatcagggagttcttgaccaaatgaacaagtatctgtactcagtcaaagatacatacctccagcagaaatggcaacaggtttggcaggaaataaatgtggaagctaaacatgttaaagatatcatgaaaacactagagagctttaaactggacagcactcccttgaaagcggcacagcatgaccttccagcttctgagggagaagtctggtccatgcctgtacctgttgaacgaagaccctcaccaggacctagaaaacgccaatcttctcagtacagtgaccctaaatcacatggtaatcgtccaagtacaactgtcagagttcaccgttcatctgcacagaatgttcacaatgacagagggaaagctgttcgttgtcgtgaaaagaaagaacagaataaaggaagagaggaaaagaacaaatcacctgctgcagtaacagaaccagagacaaataaatttgatagtaccggatatgataaagacttagtagaagctttggaaagagatataatttcccagaatcccaatgttcgatgggatgatatcgctgatttagtagaagctaaaaagttgcttaaggaagccgtagtgttaccaatgtggatgcccgaattctttaagggcattaggagaccatggaaaggagtactgatggtcggcccacctggcacggggaagacgctccttgctaaagcagtagctacagaatgcaagacaacattcttcaatgtctcttcatcaactttgacttccaaatacagaggagaatctgagaagcttgttcgtcttctgtttgaaatggctcgattttattctccagccaccatatttattgatgagatagactccatctgtagtcgccgagggacttctgaagaacatgaagcaagcagaagggtgaaagcggagctgctggttcagatggatggtgttggaggtacttctgaaaatgatgacccttccaaaatggttatggttctggcagctactaattttccctgggatatagatgaggctttaagacgacgccttgagaaacgaatctatattcctttgccgtcagcaaaaggcagggaggagctattacgaataagtctacgtgagttggaattggctgatgatgttgaccttgcaagtatagcagaaaacatggaaggttattcaggtgcggacattaccaacgtgtgcagggatgcgtccttgatggcaatgagaaggcgcattgaaggtttgactccagaggaaatccgaaatctttccaaagaagaaatgcacatgcctacaactatggaggatttcgagatggctttaaaaaaggtttctaagtcagtgtctgctgcagacattgaaagatacgagaaatggatatttgagtttggatcatgctaaattctcacatgtaaactgtgagaaatgtgccttaagtgtttgaatattaaatgcagtaattcattgtactgagtgctatattttttttaactttcataatggtaagattttttttaaaaaacccttatgattctgaataaaggcaatatttttaagctgaaaatttgttttactttagcattactagatttctattattatttcactgaccacaaatgttacttagcttggaaagctgtcttttttttctttgctttttctatttttttcaagactgtttgtttcttctagctgaactggccattcatactgggattagccaacagaccataagaaagacatcaatcttggctcttgtttgaaaccaatagctacaatggcaaaccatcacgtttcttgattcagggcctaggaaagctgactttatatgcacttttttttttttttttttttggtatataaactatttattaacagacaaggcctacagacttacttcttcttagacacacccacgatgcggccacggcagcctgtggtcttggtgtgctggcctcggacacgaaggccccagaagtgacgcagccctctacgggcccgaatctttttcagtcgctccaggtcttcacagagcttgttgtccagaccattggctaggacctggctatattttccatcctttacatccttctgtctgttcaagaaccaggctggcatcttgtactagtgtggattctgcataatggtgatcacatgttccacctcatcctcagtgagttctcccgccctcttggtgaggtcagtgtctgctttcctcaacaccacatgagcatatcttcggcccacacccttaacggcagtgatggcaaaggccattttccgccacccatcaatgttggtgttgactactcggcaaaatatgctgggacttttcagggatcactagagacatggcggcagcacaagtggcggcatgtaggcctcctgtggaagagagctatatgcacttctaacttggcatcttctctccta

SEQ ID NO: 402089 - DNA, 2850 bp, Homo sapiens
agcggctcgctcccggggcgacgccccgcgtgcgccagagtcgccgaggtcgtccccggcaccggaagtgaccctggcgggtttgtcttcaaattctcggcgagcaggagccgcgccggcaggtggtgttgacgattgaactgggcagtactggggccgtgagcggagagcaaagtgggctggactgggtcaggccctccttcctcgctgccgggatctccactccgccaatcccctgtgcctggcgttgggcggtttcccgaggagcttgggccgccgcagcttacagttgaacatgagtcttcttatgattagtgagaatgtaaaattggctcgtgaatatgcattgctgggaaactatgactctgcgatggtctattatcagggagttcttgaccaaatgaacaagtatctgtactcagtcaaagatacatacctccagcagaaatggcaacaggtttggcaggaaataaatgtggaagctaaacatgttaaagatatcatgaaaacactagagagctttaaactggacagcactcccttgaaagcggcacagcatgaccttccagcttctgagggagaagtctggtccatgcctgtacctgttgaacgaagaccctcaccaggacctagaaaacgccaatcttctcagtacagtgaccctaaatcacatggtaatcgtccaagtacaactgtcagagttcaccgttcatctgcacagaatgttcacaatgacagagggaaagctgttcgttgtcgtgaaaagaaagaacagaataaaggaagagaggaaaagaacaaatcacctgctgcagtaacagaaccagagacaaataaatttgatagtaccggatatgataaagacttagtagaagctttggaaagagatataatttcccagaatcccaatgttcgatgggatgatatcgctgatttagtagaagctaaaaagttgcttaaggaagccgtagtgttaccaatgtggatgcccgaattctttaagggcattaggagaccatggaaaaacaatggcagataaatcctctgctgaggctattatattcgcaacagggagtactgatggtcggcccacctggcacggggaagacgctccttgctaaagcagtagctacagaatgcaagacaacattcttcaatgtctcttcatcaactttgacttccaaatacagaggagaatctgagaagcttgttcgtcttctgtttgaaatggctcgattttattctccagccaccatatttattgatgagatagactccatctgtagtcgccgagggacttctgaagaacatgaagcaagcagaagggtgaaagcggagctgctggttcagatggatggtgttggaggtacttctgaaaatgatgacccttccaaaatggttatggttctggcagctactaattttccctgggatatagatgaggctttaagacgacgccttgagaaacgaatctatattcctttgccgtcagcaaaaggcagggaggagctattacgaataagtctacgtgagttggaattggctgatgatgttgaccttgcaagtatagcagaaaacatggaaggttattcaggtgcggacattaccaacgtgtgcagggatgcgtccttgatggcaatgagaaggcgcattgaaggtttgactccagaggaaatccgaaatctttccaaagaagaaatgcacatgcctacaactatggaggatttcgagatggctttaaaaaaggtttctaagtcagtgtctgctgcagacattgaaagatacgagaaatggatatttgagtttggatcatgctaaattctcacatgtaaactgtgagaaatgtgccttaagtgtttgaatattaaatgcagtaattcattgtactgagtgctatattttttttaactttcataatggtaagattttttttaaaaaacccttatgattctgaataaaggcaatatttttaagctgaaaatttgttttactttagcattactagatttctattattatttcactgaccacaaatgttacttagcttggaaagctgtcttttttttctttgctttttctatttttttcaagactgtttgtttcttctagctgaactggccattcatactgggattagccaacagaccataagaaagacatcaatcttggctcttgtttgaaaccaatagctacaatggcaaaccatcacgtttcttgattcagggcctaggaaagctgactttatatgcacttttttttttttttttttttggtatataaactatttattaacagacaaggcctacagacttacttcttcttagacacacccacgatgcggccacggcagcctgtggtcttggtgtgctggcctcggacacgaaggccccagaagtgacgcagccctctacgggcccgaatctttttcagtcgctccaggtcttcacagagcttgttgtccagaccattggctaggacctggctatattttccatcctttacatccttctgtctgttcaagaaccaggctggcatcttgtactagtgtggattctgcataatggtgatcacatgttccacctcatcctcagtgagttctcccgccctcttggtgaggtcagtgtctgctttcctcaacaccacatgagcatatcttcggcccacacccttaacggcagtgatggcaaaggccattttccgccacccatcaatgttggtgttgactactcggcaaaatatgctgggacttttcagggatcactagagacatggcggcagcacaagtggcggcatgtaggcctcctgtggaagagagctatatgcacttctaacttggcatcttctctccta

SEQ ID NO: 402090 - DNA, 2127 bp, Homo sapiens
tgatgagaggcatctctaggtaccatccctgacctggtcctcatgctgccgaggctgttgctgttgatctgtgaacaaatcacctgctgcagtaacagaaccagagacaaataaatttgatagtaccggatatgataaagacttagtagaagctttggaaagagatataatttcccagaatcccaatgttcgatgggatgatatcgctgatttagtagaagctaaaaagttgcttaaggaagccgtagtgttaccaatgtggatgcccgaattctttaagggcattaggagaccatggaaaaacaatggcagataaatcctctgctgaggctattatattcgcaacagggagtactgatggtcggcccacctggcacggggaagacgctccttgctaaagcagtagctacagaatgcaagacaacattcttcaatgtctcttcatcaactttgacttccaaatacagaggagaatctgagaagcttgttcgtcttctgtttgaaatggctcgattttattctccagccaccatatttattgatgagatagactccatctgtagtcgccgagggacttctgaagaacatgaagcaagcagaagggtgaaagcggagctgctggttcagatggatggtgttggaggtacttctgaaaatgatgacccttccaaaatggttatggttctggcagctactaattttccctgggatatagatgaggctttaagacgacgccttgagaaacgaatctatattcctttgccgtcagcaaaaggcagggaggagctattacgaataagtctacgtgagttggaattggctgatgatgttgaccttgcaagtatagcagaaaacatggaaggttattcaggtgcggacattaccaacgtgtgcagggatgcgtccttgatggcaatgagaaggcgcattgaaggtttgactccagaggaaatccgaaatctttccaaagaagaaatgcacatgcctacaactatggaggatttcgagatggctttaaaaaaggtttctaagtcagtgtctgctgcagacattgaaagatacgagaaatggatatttgagtttggatcatgctaaattctcacatgtaaactgtgagaaatgtgccttaagtgtttgaatattaaatgcagtaattcattgtactgagtgctatattttttttaactttcataatggtaagattttttttaaaaaacccttatgattctgaataaaggcaatatttttaagctgaaaatttgttttactttagcattactagatttctattattatttcactgaccacaaatgttacttagcttggaaagctgtcttttttttctttgctttttctatttttttcaagactgtttgtttcttctagctgaactggccattcatactgggattagccaacagaccataagaaagacatcaatcttggctcttgtttgaaaccaatagctacaatggcaaaccatcacgtttcttgattcagggcctaggaaagctgactttatatgcacttttttttttttttttttttggtatataaactatttattaacagacaaggcctacagacttacttcttcttagacacacccacgatgcggccacggcagcctgtggtcttggtgtgctggcctcggacacgaaggccccagaagtgacgcagccctctacgggcccgaatctttttcagtcgctccaggtcttcacagagcttgttgtccagaccattggctaggacctggctatattttccatcctttacatccttctgtctgttcaagaaccaggctggcatcttgtactagtgtggattctgcataatggtgatcacatgttccacctcatcctcagtgagttctcccgccctcttggtgaggtcagtgtctgctttcctcaacaccacatgagcatatcttcggcccacacccttaacggcagtgatggcaaaggccattttccgccacccatcaatgttggtgttgactactcggcaaaatatgctgggacttttcagggatcactagagacatggcggcagcacaagtggcggcatgtaggcctcctgtggaagagagctatatgcacttctaacttggcatcttctctccta

SEQ ID NO: 402091 - DNA, 2770 bp, Homo sapiens
agcggctcgctcccggggcgacgccccgcgtgcgccagagtcgccgaggtcgtccccggcaccggaagtgaccctggcgggtttgtcttcaaattctcggcgagcaggagccgcgccggcaggtggtgttgacgattgaactgggcagtactggggccgtgagcggagagcaaagtgggctggactgggtcaggccctccttcctcgctgccgggatctccactccgccaatcccctgtgcctggcgttgggcggtttcccgaggagcttgggccgccgcagcttacagttgaacatgagtcttcttatgattagtgagaatgtaaaattggctcgtgaatatgcattgctgggaaactatgactctgcgatggtctattatcagggagttcttgaccaaatgaacaagtatctgtactcagtcaaagatacatacctccagcagaaatggcaacaggtttggcaggaaataaatgtggaagctaaacatgttaaagatatcatgaaaacactagagagctttaaactggacagcactcccttgaaagcggcacagcatgaccttccagcttctgagggagaagtctggtccatgcctgtacctgttgaacgaagaccctcaccaggacctagaaaacgccaatcttctcagtacagtgaccctaaatcacatggtaatcgtccaagtacaactgtcagagttcaccgttcatctgcacagaatgttcacaatgacagagggaaagctgttcgttgtcgtgaaaagaaagaacagaataaaggaagagaggaaaagaacaaatcacctgctgcagtaacagaaccagagacaaataaatttgatagtaccggatatgataaagacttagtagaagctttggaaagagatataatttcccagaatcccaatgttcgatgggatgatatcgctgatttagtagaagctaaaaagttgcttaaggaagccgtagtgttaccaatgtggatgcccgaattctttaagggcattaggagaccatggaaaggagtactgatggtcggcccacctggcacggggaagacgctccttgctaaagcagtagctacagaatgcaagacaacattcttcaatgtctttccaaatacagaggagaatctgagaagcttgttcgtcttctgtttgaaatggctcgattttattctccagccaccatatttattctgtagtcgccgagggacttctgaagaacatgaagcaagcagaagggtgaaagcggagctgctggttcagatggatggtgttggaggtacttctgaaaatgatgacccttccaaaatggttatggttctggcagctactaattttccctgggatatagatgaggctttaagacgacgccttgagaaacgaatctatattcctttgccgtcagcaaaaggcagggaggagctattacgaataagtctacgtgagttggaattggctgatgatgttgaccttgcaagtatagcagaaaacatggaaggttattcaggtgcggacattaccaacgtgtgcagggatgcgtccttgatggcaatgagaaggcgcattgaaggtttgactccagaggaaatccgaaatctttccaaagaagaaatgcacatgcctacaactatggaggatttcgagatggctttaaaaaaggtttctaagtcagtgtctgctgcagacattgaaagatacgagaaatggatatttgagtttggatcatgctaaattctcacatgtaaactgtgagaaatgtgccttaagtgtttgaatattaaatgcagtaattcattgtactgagtgctatattttttttaactttcataatggtaagattttttttaaaaaacccttatgattctgaataaaggcaatatttttaagctgaaaatttgttttactttagcattactagatttctattattatttcactgaccacaaatgttacttagcttggaaagctgtcttttttttctttgctttttctatttttttcaagactgtttgtttcttctagctgaactggccattcatactgggattagccaacagaccataagaaagacatcaatcttggctcttgtttgaaaccaatagctacaatggcaaaccatcacgtttcttgattcagggcctaggaaagctgactttatatgcacttttttttttttttttttttggtatataaactatttattaacagacaaggcctacagacttacttcttcttagacacacccacgatgcggccacggcagcctgtggtcttggtgtgctggcctcggacacgaaggccccagaagtgacgcagccctctacgggcccgaatctttttcagtcgctccaggtcttcacagagcttgttgtccagaccattggctaggacctggctatattttccatcctttacatccttctgtctgttcaagaaccaggctggcatcttgtactagtgtggattctgcataatggtgatcacatgttccacctcatcctcagtgagttctcccgccctcttggtgaggtcagtgtctgctttcctcaacaccacatgagcatatcttcggcccacacccttaacggcagtgatggcaaaggccattttccgccacccatcaatgttggtgttgactactcggcaaaatatgctgggacttttcagggatcactagagacatggcggcagcacaagtggcggcatgtaggcctcctgtggaagagagctatatgcacttctaacttggcatcttctctccta

SEQ ID NO: 402092 - DNA, 2315 bp, Homo sapiens
aaagaaagggatgatttgcaaatgaaaaagaggcttctcttaccagaagtgtgctgtgcagggagaaccaattggtgtcctctaccgtaccttcctgggccagctaaacccaggacacatagcctttccttgaagtcagatcattctacataacctcagtatgtgggaagaatcagtctagtcacttttgcttggtgtggcaacagactgaagtttaatttttgttgatgtaggtgcttttgatagatgcttcctaaaattttagttgagaattttcttggatgttttaatgatgatgaagttcactctttccctctctccatttgttgaaaaagtacaaaaatatttatacataaagacccaagtattgactctctttaaagatgaaattatcccactaggtacagtggctcattgtaatcctagcattttgggaggccgaggcaggaagattgcttgagtctaggagtttgagaccagcctaggcaacataataagacaccatctctaccaaaaatataaaaataagcctggtgtggtggcacacacctgtagtcctagctactcgggaggttgaggtgagaggattgcttgagcccagcctccctcagctattttctgattgctaatctgtagattattttaaaatgaaataatagcttaatagcttgatattgcatggtttcttcctttaggctcgattttattctccagccaccatatttattgatgagatagactccatctgtagtcgccgagggacttctgaagaacatgaagcaagcagaagggtgaaagcggagctgctggttcagatggatggtgttggaggtacttctgaaaatgatgacccttccaaaatggttatggttctggcagctactaattttccctgggatatagatgaggctttaagacgacgccttgagaaacgaatctatattcctttgccgtcagcaaaaggcagggaggagctattacgaataagtctacgtgagttggaattggctgatgatgttgaccttgcaagtatagcagaaaacatggaaggttattcaggtgcggacattaccaacgtgtgcagggatgcgtccttgatggcaatgagaaggcgcattgaaggtttgactccagaggaaatccgaaatctttccaaagaagaaatgcacatgcctacaactatggaggatttcgagatggctttaaaaaaggtttctaagtcagtgtctgctgcagacattgaaagatacgagaaatggatatttgagtttggatcatgctaaattctcacatgtaaactgtgagaaatgtgccttaagtgtttgaatattaaatgcagtaattcattgtactgagtgctatattttttttaactttcataatggtaagattttttttaaaaaacccttatgattctgaataaaggcaatatttttaagctgaaaatttgttttactttagcattactagatttctattattatttcactgaccacaaatgttacttagcttggaaagctgtcttttttttctttgctttttctatttttttcaagactgtttgtttcttctagctgaactggccattcatactgggattagccaacagaccataagaaagacatcaatcttggctcttgtttgaaaccaatagctacaatggcaaaccatcacgtttcttgattcagggcctaggaaagctgactttatatgcacttttttttttttttttttttggtatataaactatttattaacagacaaggcctacagacttacttcttcttagacacacccacgatgcggccacggcagcctgtggtcttggtgtgctggcctcggacacgaaggccccagaagtgacgcagccctctacgggcccgaatctttttcagtcgctccaggtcttcacagagcttgttgtccagaccattggctaggacctggctatattttccatcctttacatccttctgtctgttcaagaaccaggctggcatcttgtactagtgtggattctgcataatggtgatcacatgttccacctcatcctcagtgagttctcccgccctcttggtgaggtcagtgtctgctttcctcaacaccacatgagcatatcttcggcccacacccttaacggcagtgatggcaaaggccattttccgccacccatcaatgttggtgttgactactcggcaaaatatgctgggacttttcagggatcactagagacatggcggcagcacaagtggcggcatgtaggcctcctgtggaagagagctatatgcacttctaacttggcatcttctctccta

SEQ ID NO: 402093 - DNA, 2676 bp, Homo sapiens
agcggctcgctcccggggcgacgccccgcgtgcgccagagtcgccgaggtcgtccccggcaccggaagtgaccctggcgggtttgtcttcaaattctcggcgagcaggagccgcgccggcaggtggtgttgacgattgaactgggcagtactggggccgtgagcggagagcaaagtgggctggactgggtcaggccctccttcctcgctgccgggatctccactccgccaatcccctgtgcctggcgttgggcggtttcccgaggagcttgggccgccgcagcttacagttgaacatgagtcttcttatgattagtgagaatgtaaaattggctcgtgaatatgcattgctgggaaactatgactctgcgatggtctattatcagggagttcttgaccaaatgaacaagtatctgtactcagtcaaagatacatacctccagcagaaatggcaacaggtttggcaggaaataaatgtggaagctaaacatgttaaagatatcatgaaaacactagagagctttaaactggacagcactcccttgaaagcggcacagcatgaccttccagcttctgagggagaagtctggtccatgcctgtacctgttgaacgaagaccctcaccaggacctagaaaacgccaatcttctcagtacagtgaccctaaatcacatggtaatcgtccaagtacaactgtcagagttcaccgttcatctgcacagaatgttcacaatgacagagggaaagctgttcgttgtcgtgaaaagaaagaacagaataaaggaagagaggaaaagaacaaatcacctgctgcagtaacagaaccagagacaaataaatttgatagtaccggatatgataaagacttagtagaagctttggaaagagatataatttcccagaatcccaatgttcgatgggatgatatcgctgatttagtagaagctaaaaagttgcttaaggaagccgtagtgttaccaatgtggatgcccgaattctttaagggcattaggagaccatggaaaggagtactgatggtcggcccacctggcacggggaagacgctccttgctaaagcagtagctacagaatgcaagacaacattcttcaatgtctcttcatcaactttgacttccaaatacagaggagaatctgagaagcttgttcgtcttctgtttgaaatggctcgattttattctccagccaccatatttattgatgagatagactccatctgtagtcgccgagggacttctgaagaacatgaagcaagcagaagggtgaaagcggagctgctggttcagatggatggtgttggaggtacttctgaaaatgatgacccttccaaaatggttatggttctggcagctactaattttccctgggatatagatgaggctttaagacgacgccttgagaaacgaatctatattcctttgccgtcagggatgcgtccttgatggcaatgagaaggcgcattgaaggtttgactccagaggaaatccgaaatctttccaaagaagaaatgcacatgcctacaactatggaggatttcgagatggctttaaaaaaggtttctaagtcagtgtctgctgcagacattgaaagatacgagaaatggatatttgagtttggatcatgctaaattctcacatgtaaactgtgagaaatgtgccttaagtgtttgaatattaaatgcagtaattcattgtactgagtgctatattttttttaactttcataatggtaagattttttttaaaaaacccttatgattctgaataaaggcaatatttttaagctgaaaatttgttttactttagcattactagatttctattattatttcactgaccacaaatgttacttagcttggaaagctgtcttttttttctttgctttttctatttttttcaagactgtttgtttcttctagctgaactggccattcatactgggattagccaacagaccataagaaagacatcaatcttggctcttgtttgaaaccaatagctacaatggcaaaccatcacgtttcttgattcagggcctaggaaagctgactttatatgcacttttttttttttttttttttggtatataaactatttattaacagacaaggcctacagacttacttcttcttagacacacccacgatgcggccacggcagcctgtggtcttggtgtgctggcctcggacacgaaggccccagaagtgacgcagccctctacgggcccgaatctttttcagtcgctccaggtcttcacagagcttgttgtccagaccattggctaggacctggctatattttccatcctttacatccttctgtctgttcaagaaccaggctggcatcttgtactagtgtggattctgcataatggtgatcacatgttccacctcatcctcagtgagttctcccgccctcttggtgaggtcagtgtctgctttcctcaacaccacatgagcatatcttcggcccacacccttaacggcagtgatggcaaaggccattttccgccacccatcaatgttggtgttgactactcggcaaaatatgctgggacttttcagggatcactagagacatggcggcagcacaagtggcggcatgtaggcctcctgtggaagagagctatatgcacttctaacttggcatcttctctccta

SEQ ID NO: 402094 - DNA, 2323 bp, Homo sapiens
gtccccggcaccggaagtgaccctggcgggtttgtcttcaaattctcggcgagcgtgagccaccatgcccggccccacatacattttgtagtcagggtcacaaattctggttttgttggtgttagcaggtgctggtaagatatctggtatctttcatgtcagtgaagagtctacagttcatttgaaagctacaagttcaagaagctaatgttaggataaattgtgtaaaatagaaaatcagtaattgtcttggattaaataaattgttggtgcctttgttcactatattataaaatacgaaatgattgtgaaatatattgacttggcatatgcacagaatacagtctcattctcagtgaacttatcctaaatgtgacagaatagcagtaaaaagaaaaaaagaatgtctttaatccagctggttcaagtaggttttgtcctaatctaagtattagtagagacacttaattaaccaggggcttgactgcgctcgtttcctcctttctaaagtgagcataccacacagggttctgaggattaaagctaaagtgtatacatcaaacagctctattgctatccctttgcataaatggtggctgctattaaggataaaacttggtaaaaggcaagagctgtttgaatctgaagttttgttttttttttttaacacaaatgagaaaaggagaaaccctgaacttacctagcttttcctctacatggagaaaatatttaattttcttgttaacagtttctcttctcttctgactctgtgatgcttattcttcattttattgaatagttataatgaaattcaaattgctagctttaaccccacttttactttttctgggattttatattcagtattaattatttaaattagcatcctttttcattacagaagatttaactgcttaaaaatcaatcacaacaggctttgtattccaataagtttctatacaatactacatatatatgtaatataattagagaatgctacaacagatcaattgaaaatttttctattaacaggttttcatttaaccaaagtaacattgtgtgtgttgttgttgtttttaacttaaaacctagggatgcgtccttgatggcaatgagaaggcgcattgaaggtttgactccagaggaaatccgaaatctttccaaagaagaaatgcacatgcctacaactatggaggatttcgagatggctttaaaaaaggtttctaagtcagtgtctgctgcagacattgaaagatacgagaaatggatatttgagtttggatcatgctaaattctcacatgtaaactgtgagaaatgtgccttaagtgtttgaatattaaatgcagtaattcattgtactgagtgctatattttttttaactttcataatggtaagattttttttaaaaaacccttatgattctgaataaaggcaatatttttaagctgaaaatttgttttactttagcattactagatttctattattatttcactgaccacaaatgttacttagcttggaaagctgtcttttttttctttgctttttctatttttttcaagactgtttgtttcttctagctgaactggccattcatactgggattagccaacagaccataagaaagacatcaatcttggctcttgtttgaaaccaatagctacaatggcaaaccatcacgtttcttgattcagggcctaggaaagctgactttatatgcacttttttttttttttttttttggtatataaactatttattaacagacaaggcctacagacttacttcttcttagacacacccacgatgcggccacggcagcctgtggtcttggtgtgctggcctcggacacgaaggccccagaagtgacgcagccctctacgggcccgaatctttttcagtcgctccaggtcttcacagagcttgttgtccagaccattggctaggacctggctatattttccatcctttacatccttctgtctgttcaagaaccaggctggcatcttgtactagtgtggattctgcataatggtgatcacatgttccacctcatcctcagtgagttctcccgccctcttggtgaggtcagtgtctgctttcctcaacaccacatgagcatatcttcggcccacacccttaacggcagtgatggcaaaggccattttccgccacccatcaatgttggtgttgactactcggcaaaatatgctgggacttttcagggatcactagagacatggcggcagcacaagtggcggcatgtaggcctcctgtggaagagagctatatgcacttctaacttggcatcttctctccta

SEQ ID NO: 402095 - DNA, 320 bp, Homo sapiens
ttttagtagagacggtgtttcaccatgttgaccaggctggtgtcgaactcctgacctcaagtgatccgcctgcctcagcctcccaaaatgctaagattacaggcgtgagccaccatgcccggccccacatacattttgtagtcagggtcacaaattctggttttgttggtgttagcaggtgctggtaagatatctggtatctttcatgtcagtgaagagtctacagttcatttgaaagctacaagttcaagaagctaatgttaggataaattgtgtaaaatagaaaatcagtaattgtcttggattaaataaattgttgg

SEQ ID NO: 402096 - DNA, 240 bp, Homo sapiens
catgtcagtgaagagtctacagttcatttgaaagctacaagttcaagaagctaatgttaggataaattgtgtaaaatagaaaatcagtaattgtcttggattaaataaattgttggtgcctttgttcactatattataaaatacgaaatgattgtgaaatatattgacttggcatatgcacagaatacagtctcattctcagtgaacttatcctaaatgtgacagaatagcagtaaaaag

SEQ ID NO: 402097 - DNA, 2803 bp, Homo sapiens
agcggctcgctcccggggcgacgccccgcgtgcgccagagtcgccgaggtcgtccccggcaccggaagtgaccctggcgggtttgtcttcaaattctcggcgagcaggagccgcgccggcaggtggtgttgacgattgaactgggcagtactggggccgtgagcggagagcaaagtgggctggactgggtcaggccctccttcctcgctgccgggatctccactccgccaatcccctgtgcctggcgttgggcggtttcccgaggagcttgggccgccgcagcttacagttgaacatgagtcttcttatgattagtgagaatgtaaaattggctcgtgaatatgcattgctgggaaactatgactctgcgatggtctattatcagggagttcttgaccaaatgaacaagtatctgtactcagtcaaagatacatacctccagcagaaatggcaacaggtttggcaggaaataaatgtggaagctaaacatgttaaagatatcatgaaaacactagagagctttaaactggacagcactcccttgaaagcggcacagcatgaccttccagcttctgagggagaagtctggtccatgcctgtacctgttgaacgaagaccctcaccaggacctagaaaacgccaatcttctcagtacagtgaccctaaatcacatggtaatcgtccaagtacaactgtcagagttcaccgttcatctgcacagaatgttcacaatgacagagggaaagctgttcgttgtcgtgaaaagaaagaacagaataaaggaagagaggaaaagaacaaatcacctgctgcagtaacagaaccagagacaaataaatttgatagtaccggatatgataaagacttagtagaagctttggaaagagatataatttcccagaatcccaatgttcgatgggatgatatcgctgatttagtagaagctaaaaagttgcttaaggaagccgtagtgttaccaatgtggatgcccgaattctttaagggcattaggagaccatggaaaggagtactgatggtcggcccacctggcacggggaagacgctccttgctaaagcagtagctacagaatgcaagacaacattcttcaatgtctcttcatcaactttgacttccaaatacagaggagaatctgagaagcttgttcgtcttctgtttgaaatggctcgattttattctccagccaccatatttattgatgagatagactccatctgtagtcgccgagggacttctgaagaacatgaagcaagcagaagggtgaaagcggagctgctggttcagatggatggtgttggaggtacttctgaaaatgatgacccttccaaaatggttatggttctggcagctactaattttccctgggatatagatgaggctttaagacgacgccttgagaaacgaatctatattcctttgccgtcagcaaaaggcagggaggagctattacgaataagtctacgtgagttggaattggctgatgatgttgaccttgcaagtatagcagaaaacatggaaggttattcaggtgcggacattaccaacgtgtgcagggatgcgtccttgatggcaatgagaaggcgcattgaaggtttgactccagaggaaatccgaaatctttccaaagaagaaatgcacatgcctacaactatggaggatttcgagatggctttaaaaaaggtttctaagtcagtgtctgctgcagacattgaaagatacgagaaatggatatttgagtttggatcatgctaaattctcacatgtaaactgtgagaaatgtgccttaagtgtttgaatattaaatgcagtaattcattgtactgagtgctatattttttttaactttcataatggtaagattttttttaaaaaacccttatgattctgaataaaggcaatatttttaagctgaaaatttgttttactttagcattactagatttctattattatttcactgaccacaaatgttacttagcttggaaagctgtcttttttttctttgctttttctatttttttcaagactgtttgtttcttctagctgaactggccattcatactgggattagccaacagaccataagaaagacatcaatcttggctcttgtttgaaaccaatagctacaatggcaaaccatcacgtttcttgattcagggcctaggaaagctgactttatatgcacttttttttttttttttttttggtatataaactatttattaacagacaaggcctacagacttacttcttcttagacacacccacgatgcggccacggcagcctgtggtcttggtgtgctggcctcggacacgaaggccccagaagtgacgcagccctctacgggcccgaatctttttcagtcgctccaggtcttcacagagcttgttgtccagaccattggctaggacctggctatattttccatcctttacatccttctgtctgttcaagaaccaggctggcatcttgtactagtgtggattctgcataatggtgatcacatgttccacctcatcctcagtgagttctcccgccctcttggtgaggtcagtgtctgctttcctcaacaccacatgagcatatcttcggcccacacccttaacggcagtgatggcaaaggccattttccgccacccatcaatgttggtgttgactactcggcaaaatatgctgggacttttcagggatcactagagacatggcggcagcacaagtggcggcatgtaggcctcctgtggaagagagctatatgcacttctaacttggcatcttctctccta

SEQ ID NO: 402098 - DNA, 2592 bp, Homo sapiens
actgacctcggtgtgtgtgtgagtgtggtgaaaatcaagtgggagggaaagtgagcgggcacctgaacaagcttacagttgaacatgagtcttcttatgattagtgagaatgtaaaattggctcgtgaatatgcattgctgggaaactatgactctgcgatggtctattatcagggagttcttgaccaaatgaacaagtatctgtactcagtcaaagatacatacctccagcagaaatggcaacaggtttggcaggaaataaatgtggaagctaaacatgttaaagatatcatgaaaacactagagagctttaaactggacagcactcccttgaaagcggcacagcatgaccttccagcttctgagggagaagtctggtccatgcctgtacctgttgaacgaagaccctcaccaggacctagaaaacgccaatcttctcagtacagtgaccctaaatcacatggtaatcgtccaagtacaactgtcagagttcaccgttcatctgcacagaatgttcacaatgacagagggaaagctgttcgttgtcgtgaaaagaaagaacagaataaaggaagagaggaaaagaacaaatcacctgctgcagtaacagaaccagagacaaataaatttgatagtaccggatatgataaagacttagtagaagctttggaaagagatataatttcccagaatcccaatgttcgatgggatgatatcgctgatttagtagaagctaaaaagttgcttaaggaagccgtagtgttaccaatgtggatgcccgaattctttaagggcattaggagaccatggaaaggagtactgatggtcggcccacctggcacggggaagacgctccttgctaaagcagtagctacagaatgcaagacaacattcttcaatgtctcttcatcaactttgacttccaaatacagaggagaatctgagaagcttgttcgtcttctgtttgaaatggctcgattttattctccagccaccatatttattgatgagatagactccatctgtagtcgccgagggacttctgaagaacatgaagcaagcagaagggtgaaagcggagctgctggttcagatggatggtgttggaggtacttctgaaaatgatgacccttccaaaatggttatggttctggcagctactaattttccctgggatatagatgaggctttaagacgacgccttgagaaacgaatctatattcctttgccgtcagcaaaaggcagggaggagctattacgaataagtctacgtgagttggaattggctgatgatgttgaccttgcaagtatagcagaaaacatggaaggttattcaggtgcggacattaccaacgtgtgcagggatgcgtccttgatggcaatgagaaggcgcattgaaggtttgactccagaggaaatccgaaatctttccaaagaagaaatgcacatgcctacaactatggaggatttcgagatggctttaaaaaaggtttctaagtcagtgtctgctgcagacattgaaagatacgagaaatggatatttgagtttggatcatgctaaattctcacatgtaaactgtgagaaatgtgccttaagtgtttgaatattaaatgcagtaattcattgtactgagtgctatattttttttaactttcataatggtaagattttttttaaaaaacccttatgattctgaataaaggcaatatttttaagctgaaaatttgttttactttagcattactagatttctattattatttcactgaccacaaatgttacttagcttggaaagctgtcttttttttctttgctttttctatttttttcaagactgtttgtttcttctagctgaactggccattcatactgggattagccaacagaccataagaaagacatcaatcttggctcttgtttgaaaccaatagctacaatggcaaaccatcacgtttcttgattcagggcctaggaaagctgactttatatgcacttttttttttttttttttttggtatataaactatttattaacagacaaggcctacagacttacttcttcttagacacacccacgatgcggccacggcagcctgtggtcttggtgtgctggcctcggacacgaaggccccagaagtgacgcagccctctacgggcccgaatctttttcagtcgctccaggtcttcacagagcttgttgtccagaccattggctaggacctggctatattttccatcctttacatccttctgtctgttcaagaaccaggctggcatcttgtactagtgtggattctgcataatggtgatcacatgttccacctcatcctcagtgagttctcccgccctcttggtgaggtcagtgtctgctttcctcaacaccacatgagcatatcttcggcccacacccttaacggcagtgatggcaaaggccattttccgccacccatcaatgttggtgttgactactcggcaaaatatgctgggacttttcagggatcactagagacatggcggcagcacaagtggcggcatgtaggcctcctgtggaagagagctatatgcacttctaacttggcatcttctctccta

SEQ ID NO: 402099 - DNA, 2635 bp, Homo sapiens
  misc_feature (39)..(39): n is a, c, g, or t
  misc_feature (76)..(76): n is a, c, g, or t
gtgccctctcccccccgtttgtccccccccgcccgctgntcccggtccggccttcccgggctcggccccggccctncccctggcgggtttgtcttcaaattctcggcgagcaggagccgcgccggcaggtggtgttgacgattgaactgggcagtactggggccgtgagcggagagcaaagtgggctggactgggtcaggccctccttcctcgctgccgggatctccactccgccaatcccctgtgcctggcgttgggcggtttcccgaggagcttgggccgccgccaggtttggcaggaaataaatgtggaagctaaacatgttaaagatatcatgaaaacactagagagctttaaactggacagcactcccttgaaagcggcacagcatgaccttccagcttctgagggagaagtctggtccatgcctgtacctgttgaacgaagaccctcaccaggacctagaaaacgccaatcttctcagtacagtgaccctaaatcacatggtaatcgtccaagtacaactgtcagagttcaccgttcatctgcacagaatgttcacaatgacagagggaaagctgttcgttgtcgtgaaaagaaagaacagaataaaggaagagaggaaaagaacaaatcacctgctgcagtaacagaaccagagacaaataaatttgatagtaccggatatgataaagacttagtagaagctttggaaagagatataatttcccagaatcccaatgttcgatgggatgatatcgctgatttagtagaagctaaaaagttgcttaaggaagccgtagtgttaccaatgtggatgcccgaattctttaagggcattaggagaccatggaaaggagtactgatggtcggcccacctggcacggggaagacgctccttgctaaagcagtagctacagaatgcaagacaacattcttcaatgtctcttcatcaactttgacttccaaatacagaggagaatctgagaagcttgttcgtcttctgtttgaaatggctcgattttattctccagccaccatatttattgatgagatagactccatctgtagtcgccgagggacttctgaagaacatgaagcaagcagaagggtgaaagcggagctgctggttcagatggatggtgttggaggtacttctgaaaatgatgacccttccaaaatggttatggttctggcagctactaattttccctgggatatagatgaggctttaagacgacgccttgagaaacgaatctatattcctttgccgtcagcaaaaggcagggaggagctattacgaataagtctacgtgagttggaattggctgatgatgttgaccttgcaagtatagcagaaaacatggaaggttattcaggtgcggacattaccaacgtgtgcagggatgcgtccttgatggcaatgagaaggcgcattgaaggtttgactccagaggaaatccgaaatctttccaaagaagaaatgcacatgcctacaactatggaggatttcgagatggctttaaaaaaggtttctaagtcagtgtctgctgcagacattgaaagatacgagaaatggatatttgagtttggatcatgctaaattctcacatgtaaactgtgagaaatgtgccttaagtgtttgaatattaaatgcagtaattcattgtactgagtgctatattttttttaactttcataatggtaagattttttttaaaaaacccttatgattctgaataaaggcaatatttttaagctgaaaatttgttttactttagcattactagatttctattattatttcactgaccacaaatgttacttagcttggaaagctgtcttttttttctttgctttttctatttttttcaagactgtttgtttcttctagctgaactggccattcatactgggattagccaacagaccataagaaagacatcaatcttggctcttgtttgaaaccaatagctacaatggcaaaccatcacgtttcttgattcagggcctaggaaagctgactttatatgcacttttttttttttttttttttggtatataaactatttattaacagacaaggcctacagacttacttcttcttagacacacccacgatgcggccacggcagcctgtggtcttggtgtgctggcctcggacacgaaggccccagaagtgacgcagccctctacgggcccgaatctttttcagtcgctccaggtcttcacagagcttgttgtccagaccattggctaggacctggctatattttccatcctttacatccttctgtctgttcaagaaccaggctggcatcttgtactagtgtggattctgcataatggtgatcacatgttccacctcatcctcagtgagttctcccgccctcttggtgaggtcagtgtctgctttcctcaacaccacatgagcatatcttcggcccacacccttaacggcagtgatggcaaaggccattttccgccacccatcaatgttggtgttgactactcggcaaaatatgctgggacttttcagggatcactagagacatggcggcagcacaagtggcggcatgtaggcctcctgtggaagagagctatatgcacttctaacttggcatcttctctccta

SEQ ID NO: 402100 - DNA, 2352 bp, Homo sapiens
  misc_feature (39)..(39): n is a, c, g, or t
  misc_feature (76)..(76): n is a, c, g, or t
gtgccctctcccccccgtttgtccccccccgcccgctgntcccggtccggccttcccgggctcggccccggccctncccctggcgggtttgtcttcaaattctcggcgagcaggagccgcgccggcaggtggtgttgacgattgaactgggcagtactggggccgtgagcggagagcaaagtgggctggactgggtcaggccctccttcctcgctgccgggatctccactccgccaatcccctgtgcctggcgttgggcggtttcccgaggagcttgggccgccgcaccctcaccaggacctagaaaacgccaatcttctcagtacagtgaccctaaatcacatggtaatcgtccaagtacaactgtcagagttcaccgttcatctgcacagaatgttcacaatgacagagggaaagctgttcgttgtcgtgaaaagaaagaacagaataaaggaagagaggaaaagggatgatatcgctgatttagtagaagctaaaaagttgcttaaggaagccgtagtgttaccaatgtggatgcccgaattctttaagggcattaggagaccatggaaaggagtactgatggtcggcccacctggcacggggaagacgctccttgctaaagcagtagctacagaatgcaagacaacattcttcaatgtctcttcatcaactttgacttccaaatacagaggagaatctgagaagcttgttcgtcttctgtttgaaatggctcgattttattctccagccaccatatttattgatgagatagactccatctgtagtcgccgagggacttctgaagaacatgaagcaagcagaagggtgaaagcggagctgctggttcagatggatggtgttggaggtacttctgaaaatgatgacccttccaaaatggttatggttctggcagctactaattttccctgggatatagatgaggctttaagacgacgccttgagaaacgaatctatattcctttgccgtcagcaaaaggcagggaggagctattacgaataagtctacgtgagttggaattggctgatgatgttgaccttgcaagtatagcagaaaacatggaaggttattcaggtgcggacattaccaacgtgtgcagggatgcgtccttgatggcaatgagaaggcgcattgaaggtttgactccagaggaaatccgaaatctttccaaagaagaaatgcacatgcctacaactatggaggatttcgagatggctttaaaaaaggtttctaagtcagtgtctgctgcagacattgaaagatacgagaaatggatatttgagtttggatcatgctaaattctcacatgtaaactgtgagaaatgtgccttaagtgtttgaatattaaatgcagtaattcattgtactgagtgctatattttttttaactttcataatggtaagattttttttaaaaaacccttatgattctgaataaaggcaatatttttaagctgaaaatttgttttactttagcattactagatttctattattatttcactgaccacaaatgttacttagcttggaaagctgtcttttttttctttgctttttctatttttttcaagactgtttgtttcttctagctgaactggccattcatactgggattagccaacagaccataagaaagacatcaatcttggctcttgtttgaaaccaatagctacaatggcaaaccatcacgtttcttgattcagggcctaggaaagctgactttatatgcacttttttttttttttttttttggtatataaactatttattaacagacaaggcctacagacttacttcttcttagacacacccacgatgcggccacggcagcctgtggtcttggtgtgctggcctcggacacgaaggccccagaagtgacgcagccctctacgggcccgaatctttttcagtcgctccaggtcttcacagagcttgttgtccagaccattggctaggacctggctatattttccatcctttacatccttctgtctgttcaagaaccaggctggcatcttgtactagtgtggattctgcataatggtgatcacatgttccacctcatcctcagtgagttctcccgccctcttggtgaggtcagtgtctgctttcctcaacaccacatgagcatatcttcggcccacacccttaacggcagtgatggcaaaggccattttccgccacccatcaatgttggtgttgactactcggcaaaatatgctgggacttttcagggatcactagagacatggcggcagcacaagtggcggcatgtaggcctcctgtggaagagagctatatgcacttctaacttggcatcttctctccta

SEQ ID NO: 402101 - DNA, 442 bp, Homo sapiens
aatcagttagagaagacagccataaagattcagtcatggtggcgtggaaacatggtgcgccggacgttactgcaggcagcactcagagcctgggtcatccagtgctggtggaggtcaatgcaggccaagatgttggagcaaagacggcgcctggcactaagactctatacctgccaggagtgggcggtggtgaaggtgcaggcacaggttcgaatgtggcaggcccgcaggcggttcctccaggcacgccaagcggcctgcatcatccagtctcactggcgctggcatgccagccaaacccgaggcctgatccggggccactatgaggtcagagccagccggctggagcttgacatcgaaatcctcatgacctagggcgctgacagagccaaggaggctggatctctcttccaataaagacccttactgaccatacacttgc

SEQ ID NO: 402102 - DNA, 599 bp, Homo sapiens
tgtgcctggccaaatgttcttgaaagaaattaaaagtgctactccaatgaacatacaagtggtaagaaagcaaaacagccctattgctgatatggagaaagtttgaatggtttggataaagatcaaaccagccacagcattcccttatgccaaagcctaatccagagcaaggtcttaattctcttcagttctgtgaaggaagctgcagaagaaaaaggtgaaagaggtgaggaagctgcagaagaaaacctggaagttagcagagcttgatccagaggtttaaggaaagaagccatctccataacataaaagtgcaaggtgaagcagcaagtgctgatggggaagctgcagcaagtcatccagaagatcttgctaagggtatgcacagatgtggaaacaggaactgatgtgtccattacaccactaggacagaggccagaacaatgaagaaaccaaatacttggaagagggtagagataatgaatggagtccaagagccctgattgtgccataaatgtccagataattccatacctgaggattatgtggtttgtaaacttggcacttagaagaaccaataaaatcatgttatagtttca

SEQ ID NO: 402103 - DNA, 886 bp, Homo sapiens
gaactcctccaaggcaagaaatctgttttgaagcttctctgcgttcacacacagcagcctggtttcctggaagggcattttccacattgtgcgttatggatgatcatcccaggcatcaggtgtgaagccctgcatccacatccaggggctatcaaatctctctgcaaaaggagaagctggactcaggctggaatgcagggatgcgatctcggctcaatgcaacctctgccgcccaggattcaagcgattctcctgcctcagcttcttgagtatctgggattacaggcacctgccaccacgcctgactaatttttgtagttttagtagagccagggtttcaccatcttggccaggctggtcttgaactcctgacctcgtgatccacccaccttgtcttcccaaagtgctgcgattacaggcgtgagccaccgtgcccggctgaccagtatctttcatgttactattgtaattgtttggggtcaccacgaaccgcacacatataagacaatgaacttaatcaataaacgtgtgtgttctgattgctccaaaaaaaaaaaaaaaaaaaaaaaaaaaaaaaaacaacaaaaaaaaaaaaaaaaacaatgactacaaatacggagagaacacaaaacgaacgacgacggggggggagaaaattaatctgtgaggaggaagaataagatagactcgaagatgttcgttaaagggtgggcctcctaacagggttaataaataaaagagaggtgagggtcaaactgtgtgggagagaagcatatgtgtgagtataaaagaaccaacttgggggggatggtggcaacacagaaggtataggtgggaatatagcataggtatgagtcaacatggggggagtgtgtgtattaatagt

SEQ ID NO: 402104 - DNA, 408 bp, Homo sapiens
gaactcctccaaggcaagaaatctgttttgaagcttctctgcgttcacacacagcagcctggtttcctggaagggcattttccacattgtgcgttatggatgatcatcccaggcatcaggtgtgaagccctgcatccacatccaggggctatcaaatctctctgcaaaaggagaagctggactcagggtatgcacagatgtggaaacaggaactgatgtgtccattacaccactaggacagaggccagaacaatgaagaaaccaaatacttggaagagggtagagataatgaatggagtccaagagccctgattgtgccataaatgtccagataattccatacctgaggattatgtggtttgtaaacttggcacttagaagaaccaataaaatcatgttatagtttca

SEQ ID NO: 402105 - DNA, 434 bp, Homo sapiens
gaactcctccaaggcaagaaatctgttttgaagcttctctgcgttcacacacagcagcctggtttcctggaagggcattttccacattgtgcgttatggatgatcatcccaggcatcaggtgtgaagccctgcatccacatccaggggctatcaaatctctctgcaaaaggagaagctggactcaggcacgtttacagtgatgtgtatgcagggtatgcacagatgtggaaacaggaactgatgtgtccattacaccactaggacagaggccagaacaatgaagaaaccaaatacttggaagagggtagagataatgaatggagtccaagagccctgattgtgccataaatgtccagataattccatacctgaggattatgtggtttgtaaacttggcacttagaagaaccaataaaatcatgttatagtttca

SEQ ID NO: 402106 - DNA, 469 bp, Homo sapiens
tcaaggacacagataatacaattaagatatcatactattttgtctcaaattatatacaaaacattttcagaataacaatactgataccattaccaatgtcattaaagaaaagtttaaaaagtttgtgtatgtggccaggtgcagtggctcacgcctgtaatcccagcactgtggaggccgaggcgagcggatcacaaggtcaggagtttgagaccagcctggccaacatggtgaaacaccatctgtactaaaaatacaaaaaaattagccgggcgtggttgcaggtgcctgtaatcccagctactcaggagactgagggcaggagaattgcttgcatctgggaggtagaggttgcagtgagcccagatcgagccattgcactccagcccggcaagaagagcgaaagtccgtctcaaaaacaaacaaacaaacaaacaaacttaaagtgcactctcaccctactttccct

SEQ ID NO: 402107 - DNA, 717 bp, Homo sapiens
aagaagctggtccttagcggggcgctgcggacaacctttcggtggccagctggagcctgggcaccgttcttcaaataatggcttttaattctcagacgagaacgtttaggattacaaaagaaaccggttctcttcacatccttatccttgtcatgtagcattccgcttgaaattggaagccgttcaatgtcagagagaaaccatatttatgaaatgaaagaggcttctcagatgactgcaaaccagccttccttactggttttatcactggtaatgttataaagacagttgtccagtttcatgaatcttgtaggtttttgtttgtttatttgtttgcttttgatgttgttgttgttgctgttgttttccaaattcagtattgtagaaaaatatgctgccccagaagagatgattggacactctccagcgtggtgttggactttgtcatctcttgcacagccatctccagaccttagtgcttacctcacgttagttttttatattctgcaaagacaaaaccaaaaatgtctggatcatcttttcttacattggattataacgcaggaaacactgtgaagtaagtaaagttggaatccaagtcaaagaccatttgaatatttacaagtagatttgaggcaggaataatacagggtggccgcagggtaacaaattctaggcagcagatttacatgacttgaggctatgggctgataagac

SEQ ID NO: 402108 - DNA, 231 bp, Homo sapiens
atggtttaaaatgatatttttgtaattccaaagtaatatctaaattgtaaggttttatttggtatgaccgaagagggtgacaaaaaactcaggcagttggagagagaacactgtgagggctggaatcagcacctgggacagctctgaataagctttcccttttactctgaaataagtgtattaaggatttccatagtgatgttcatggctgcagaattagaggctctgaaa

SEQ ID NO: 402109 - DNA, 368 bp, Homo sapiens
aaacattcagcagatgtttactgactgccaactctttgaaattcatggcactatgttttgtaaagaagtacagtgctatctgtaatagttgacagtacctagcccaaattaataagtgcaaaaaaaaaaggttgtatagtgccaaaaaaggtaaatgccacagacattcccagattgaactcaagagcgccttaaaacaagagctacatcttatctttctttatatccccagtacctagcaccctgcctggtatttttttaaaaaagggttgtgagttaattaatagatgattgagtagcatgcatttggcaggggggcagttataagaagattcatggaagaaacaaaatgtgagttaattataaaa

SEQ ID NO: 402110 - DNA, 529 bp, Homo sapiens
cttttcctcaaaccagctggtttagatattttagtacaatgctttcaccagaacctacaacaatggttcctattaactgagaactgaaattgatgtggtctcctcatgccacaggtcacatgttgtttggtgactgattttgactctcaggaggaagtggggttgctgttacaccacggaggcaagaggagcagtaatagaacacaggagatctcctgaggcacctcatcactctcatgccagggcacaagttgatggcaatgtactgtaccacctacagacaaactacagacaacctacctacaggcaacctcctcaagaacaaaagcttgcttaacccaaccaggcaaagaatcctggccagctgaggggttgcgtgaaggaaagagggacctggaatggttagcggagaaggaaaattgtaaatgacaataaagcttcattaccagttacaaaaatgaagatcgtaacctctaacagtatttcccttcttgctgtattatatataaatggagtttttagctattgt

SEQ ID NO: 402111 - DNA, 446 bp, Homo sapiens
tgttagatatttcagaaagtgatgtgagtccctgaggtcatactgcagcgttcaggttctgtttggcctcctgcacgaagctttccttgattggaaaagctgcatactctgaagcacatcgcatgtgtcctgtctgtagttcatttcatttccccagatttgttatcatccaccatcactcatacaagcctaccttcttcatgccaacctttgtaatctttctaccttgctaacctggtcatgtcaaggaccagctaataaatagcaaagttgtaccttgagccaaggtatcttgactcttagtccagtgctctttatatacctctgaagtcttatttgagcttcaaaattatgagtctgtgctctcaagatttttttgaaaatgtacttaatgttgcccctaagcttttatgagaaataataaagttctttccagattgaatatc

SEQ ID NO: 402112 - DNA, 717 bp, Homo sapiens
catgagagagcagtcatttcagctttttcaccattgtgatctctggttaataaattaatgaagttgatttattagtattacttttccatagatttattttgatgctcttcaggtggctttcggattaaaagtgttttcttccttgtaattttttttcatttttataaactaaagggaaaaaaaaggctatggattgtactttggtaaaattttgactgtaacccatgtctatatcgtttgtcactaatttctgaaggccttcacatgaaatgtaatcaatgattcttaaagtaaaacattttgattattgatgatttctaatgagtctgtagttataatttggaagagtttttaatatatccattatttaagagagtttttctacatttctggtgctttaatttcttattgctactaattattagctgataaaagttaattggcttttacaatttctgccttttaggatttgtagaataatttttacagctctatgtgtgatatttatgaatattctgtgaatattgggtaaattatatattctccataggataatgatattattcaaatatattttacttaaatttttttggtcaaggattcttactgctcttttgctcttttcattttccctgtatatgtaaattgttttcacttcatttgtattacattttatgagacacaggtgtttatgcattatgcctatatagtaaattt

SEQ ID NO: 402113 - DNA, 472 bp, Homo sapiens
agcattgattgatattcacagaattgtgagccaatttttgatggttgttgctttaaaatattaaatttggggatgttttgctaggcagcaatagaaaatggatacgaaaatattttcgtcaaaaaaaattagattaacagctgatcataatacttaagtattaactttttcttaaactttagaatttaagttgcaggatatcaagaagagtaaacatcaaccaaataatctgcatcctcttttagagaaaggaatagtgtgttttcggctacatgcaagatagttctttcatgctaagcagaagtatgactttgttactgtctttatttggagattaataatggtttaaggagatgtgtatgggtgccaagttgataaagagtagacttgtgattgttaatttggttgggccacaccacagtgtccagatatttggttaaaggttattctggatatttctgtgaggggtttt

SEQ ID NO: 402114 - DNA, 325 bp, Homo sapiens
cagttgtcccaagtactcagggcacttggagtaaattgggagctgcattcagcatggagaccgcaatcctctggactgatggaaaggaaaaatcaaaccgttaaaacagttcttgccaaacggtgtcaggaaactcaactgaaatggatttagggctttggccttgcactgctctggattaattgcctggctgagcatgggacacatttgataaatgttctacattcacttaaagaaatgtggattctccaggtgtttggtacagcattccatgtatgttcagtatgtgaatatttataatcttgtataaattcatgtattctaa

SEQ ID NO: 402115 - DNA, 395 bp, Homo sapiens
attaaattgtttttggatttaattttccaatggttctttgctagaatatagcaataccattcatttttatatagtgacctcactgaccttctcttctgaacacatttatatatgtaattacatttatataaatgcaattatagaaatctatattacaggtatttgtgtttatatattgctctgctaacatacaaacatatttatgtaatgtaaaagtagttagagtaggagaggggaatctccgcatttactctggaatactgacatatcaaagcaggttaccaggggctttatttacaccaaatttggtagaaataatgatgatatgctaaggaattaattagctctagcatcaggtttcttaaaccagaaacggagatggacaaagattacat

SEQ ID NO: 402116 - DNA, 524 bp, Homo sapiens
cttgtttaagtattatgcacttgtctgtgtgacattttgtaaagcggagaaaaattaaggagaaaggaattgtagaacactaacaggaagaggacagatactgaggaatggctcatggtataagtgagattatcagagactttctacaatggaatttgaaatgcagggagcacatttggtgtatggttgtagaggacttacactaaagggcattcttcggctacctctgccagcagatgagcggctcctgagaatgcataccaaattaattccccagctgttcacatgcatataagcagctgctgctgttactgcctaacacttaatggcagtctggcagcacctctaatctctgccatagcagacaagccactcacctaaggcctctgctgtacttccaaagaaagaatttctcaagtagagactgagtagaactagactgccagctgtgagcctcagagctcctggctgcctgttgctgagtctatcagctgctgagcctttctcaccacaaaaaaaaaaaa

SEQ ID NO: 402117 - DNA, 1182 bp, Homo sapiens
ctcagcctctgagtagttgagactagagatacacacaccagtaatggtccagcccactaattagtgcacgcctggctaatttttgtactttttgtagagatggggttttgccatgttgccccagctgatctcgaactcctgtccttgagtgatccgcccgtctcggcctcccaaagtggtgggattacaggcatgagtcattgtgcccagcccatacacaacctctaaaaaatttttcataacacccaaattggtaaacatgttcaaaagatttaatgtacagaatcactagatacggtgagtttacggtttattgtagaagcaagtttgttttaatcatcttaggagatttttttgtgttgttttgtttttttgagagtctcactgcaatctccaccctccgggttcaactgattctcctccctcagcctcccaagcagctgggattacaggtgcctgccactgcacccggctaatttttgtatttttagtagagacggtttcaccatcttggccaggctggtcttgaactcctgaccttgtggtctacccgcctcagcctcccaaagtgctgggattacaggtgtgagccactgcacccagccatggagttatttttcattcataattgttatgtttgtaattttttaacatagccaataagaaaatacactaagtagatgaaatggtagatgtagctcttttcagctgagagtgggagaaaaagttgaggcacctaagggagatgaataaaaatgctagggtgtctgtcactttcacagtgaggagggctgacatgtagctgtgtgagcagtctactggagagagtggcttttctagaccatgacaattccctggcaatttagtttgaaccacattcacctgttaggattaccatgcgtattattaatgtcaactgaactaaatcatctttccatgacagctgcctaacaagaatccatctcacaaaattgaccacctcaaaaggaaattattttcatttcacctttaatgattattcaagaccccagtataacaacccaaggccaggcgcagtggctcacgcctgtaatcccagcactttgggaggccgaggcgggtggattacgaggttaagagatcgagaccatcctggctaacagtgaaaccccacctctactaaaaatacaaaaaataagccgg

SEQ ID NO: 402118 - DNA, 470 bp, Homo sapiens
ctcagcctctgagtagttgagactagagatacacacaccagtaatggtccagcccactaattagtgcacgcctggctaatttttgtactttttgtagagatggggttttgccatgttgccccagctgatctcgaactcctgtccttgagtgatccgcccgtctcggcctcccaaagtggtgggattacaggcatgagtcattgtgcccagcccatacacaacctctaaaaaatttttcataacacccaaattggtaaacatgttcaaaagatttaatgtacagaatcactagatacggtgagtttacggtttattgtagaagcaagtttgttttaatcatcttaggagatttttttgtgttgttttgtttttttgagaaatcacttgaacccaggaggcagaggttgcagtgagccaagatcgcgccactgctctccagcctcggcaacatagcgagactccgtctcaaa

SEQ ID NO: 402119 - DNA, 421 bp, Homo sapiens
tgcatgacctacaatcaaacaaagtaggtaagagaatttctttatgtccagttcttactcaaaaaggcaggggaaggttagagtagtattttatgttttatggctggctttggggatttttgggttctggtttttatgaaccactttgcagaagagaaattctagtttctgtggcttgtcttgaagaagaatgagaggtgaaagacgaaagcaggagagagccagaggaactttgcttttgaggctgcttctgaagccttcacttgggggcatcactttctgagcccccacagtgtcttctgatgaacagaaatgtttaatgttaatgaagtttaatttattagttttttaatggttagtgctttctgtaacctaggaaatctttacctgtcccaacattgcaaaggcattcccctatgtt

SEQ ID NO: 402120 - DNA, 2464 bp, Homo sapiens
  misc_feature (981)..(981): n is a, c, g, or t
gcaatatttggttcctattctttgacaaggataagctattgagaccaatcagaaccttccaatgtgtttccaatgttcttggctacatttctacttaaactcaaacctcaggaagaatataatctgttaagataacttttgtttttctcaaacattctctctctgcctatcccaaaagaatcaatcaatgctttatgttactaagttcactgattatgaggacaatgtctgaagatttcatacacataatattgggatcttccctttccttgaatttcagaatatgttggagccaatttctataaccaaaacgtagtatttgtgtatctttaaatgagctacaatccagaactgaaaatgaactatactaatggcatcgcacttaacaactttcaatgaagaaagaaataggttagagtctaagttcaaacacacttcaaactcacgtgaccacagtaaatcctacccttaaagcaagtacatatgtgtgtattgtttatgtttcttattttctgtatattatgatggttttgactcctttctggctgggaagagattgcccctctaggggccagccaacgcttagagaaggcaaaggactcagcgtgcctttcacatgcaaactaaacaatccacagcgatacctcctctacctgacccatacacccaggaggcaatattcccctgcctggtatctaccaggcaaactagggatcactcttacagtttagagcctgtatacctataacttattcaaagctactattattacacacctatagcttattagtagtagtagcagtagcatttacctacagctaatgcaaactagcgaatcctaaacttggttacccgccctgccttgcctttcccacagatactccagaaacggctgcagcccggtctctcttctagctcctgcccctttggcccctagaccaacactggggctttctcatgtggccctgaatggcatgctgngcctccgagaactcatgagtataataaactttgttttcctgagcccctcctgggtctccttttcacatgcacctgactgaccacataaaagaacacagaactctgtgtgtgtgtgcgcgtgtgtgtgtcattttcattttattttcccttgttcaggtggtcaataaaaaattattacacctttaaaaagaggtacctaaataaacaaacctaccaattctgtatgcaaaattaaatcctggactggcagtgttgctcagataacactcagaaaagaacaatgtgactgaaactgtaaggaacaggtcaaaaacactccatttaaaatgtgaacacctgctacagaatattttgattcacaagtccatctaggaaatatttttcttcctccctcacctgttcccccacctatcttgcattcaacaccataaacagcacttatcccccattataaaacagttgacggttaaaacaatgagccaaccaagaaagtataatactctataactgacatttactgcattggccttggacttctaatctttaccagacgggcacacaaatcaatccatcagctcataaaggtgtgcttttttaacctctaaaacagatgggattggccagaagtgtctggcatgtcaaactgctaatcactgctgccctttgcacaaaataacccacttaagttgaggcatggttgcactgtaaccgacattagtctgtgggaaacccatttaactgtcacacactcctgccactcctgctctcccttaattaagcctaatgccttatgctttgaccttttgttctagcctattaaccctatctagtacaagttcaattatgttaagctaaaaactttgctgtaaaatattaaatgccaagctcaaaaaatcataagggacatcctctcagccctaagttctattcaccctgatactcaatacatttgaaagtaaaacctcactttcgaagtaacgctgatactgaagcaaggagatgttgaatgactcacccatttcatagcttttccgtggcaaagcctcactaaaacctatctaatccctagctccaattctttaatctccatggtgcttctgattaatagttaaaccacccggaagtatgttaaggatactaacattttcaccccgaagtattatccttcgccatcctctagaatatgctatgcaaagaggcctaaaacaaaataaactgcgacttcagcagctgagaagtaatgattcctttcccctcccacacatcaaaacttcctatcctatcccctcactactttttttcctttttaaaagtaacaatggtcattgagaactactaaatcctacaacactcacaaggtagtatgtacaaccacagttttcccccgcgatacttcactgaagtattcaataccgccaatgacttaaactacagaaggtaattacaacttgctacttatcctcactggacacagccatttagg

SEQ ID NO: 402121 - DNA, 552 bp, Homo sapiens
cagatggacatttatagcaacttaaaatgagctacatgtctctgacctgttctagtctccattccctcagaatttgcctccaaatgagaatttattcattgaattaaggcagctttattagagacagtgaagaatccaatttcaaaattatgatttatcccattcagtttagagataggtgatatctgatggccctcaatgttagatgattgattaccagtatatcacatgggagcaatgctaaaatgcaaagaaaataccagatttggctgggcacggtggctcacatatgtaatcccagcactttgggaggcagaggtgggcagatcacctgagatcaggagttcgagaccagcctagccaacaaggtgaaaccccatctctactaaaactacaaaaaattagccaggtgtggtggtgcatgcctatagttcaagctgctcagaggctgaggcaggagaatcacttcaacctaggaggcagcagttgcaatgagccgagatcacaccactggcactacagcctgcgtgacagagcaagattccatctcat

SEQ ID NO: 402122 - DNA, 729 bp, Homo sapiens
aaccatgtaaagtaacactgaactgatttgtaaagtttgggggcaagtgatggcagttatgaacagtcacaatctaaactctaactttttgccattaaaaattacaaagtacctgttagaaatattttctaaatatttgaaaggtacattgtgaatatcttcatatttggaatgaagtgtgccttggcagtttgaacacttaggcagtcattaagctccatgtctatagctgctccctggaaatacagaagaccctcctccttggcaggacccattggcatgagaccccttgctaggctctgttttctcaaaatcctttcacatacagctgagtatatcatggtaagaggctcaggggacaataatattcaatatgtttctttatcaccaatggatatattttttaacttgaaggactagctagtcatgccatgtagcaggatcagaaatctctaatctttaggatgatttttttactttttaggaaaaagggctatatgcagacaggctggccctggtagtactttacaaataattttgttttattaccaagaaatatgtttgtttcttgtgacacattataacattatctgaaaggggtaggcaagagtttatttttatctgtatttaagttttaattacaaaattattataacatgcttgataaaatctcaaacaatctagaaagatactatacttgataaaatctcaatctggaaagataccaag

SEQ ID NO: 402123 - DNA, 1138 bp, Homo sapiens
tggtcaacgcgatttgcttccaagggacggccaccagtcggcacaggaaaggggcagaggcagtgagttcagcgtgtggacgagggtcaacaagtttgggatcaagcggctgccgctcctccaaaagcgaccgaagcgcgagcagattacccctccgagccagtgtagtaaacacacttcagaaacgtgaggtgccggtggtcacgaggggagcgcgccctccaatgaggagccgggggcggggccgaggccgctgacgcggcggcggcggcagagtcacccgggcagcctcgggaccggtcaccggccggcaaccgtccagcggcctcgaccaccgcctctagcctccgttcccggtcctttctcccgggccgagagacagcgtcgccgacaggggctcattcccctccggttctcctcggtgactcacctcgggcgggccgttttgtctttaggggccgccttggtggggcgaggtttccgtgacgaatctcctggggccgtccgtgccggctcgggccgtcgtggcgactcgagctcctggaacttgctcaggctccggaggtccgaggccctcgaagttatgcgtcgcctccaggcggttgcggcgggcgcgggctcctaaagggcgtcacacccggactccgccgactaggcaacctccattcatctttccactgcgcctccagcgcccccgccttctccggtcccctcctcggagtcattttttcctgttccccctctgccgccctttcctcacgccccgggtgaggcaattctcttggaagcgaaggtgtcggctatgagccggagcctccttccttgaatttctccgtggaggacccgccgcgccccccggcatgggggtgaacgccgtgcactggttccgaaaggggctccggctccacgacaaccccgccctgaaggagtgcattcagggcgccgacaccatccgctgcgtctacatcctggacccctggttcgccggctcctccaatgtgggcatcaacaggtggcgaatttacattgacactgaggttacactctaacttctttttccccaaatgatgatcattttccacaaaatgatggccagttattccaacactacttattggatcatttccaattcagtgag

SEQ ID NO: 402124 - DNA, 3267 bp, Homo sapiens
  misc_feature (2754)..(2754): n is a, c, g, or t
  misc_feature (2767)..(2768): n is a, c, g, or t
  misc_feature (2778)..(2778): n is a, c, g, or t
  misc_feature (2784)..(2785): n is a, c, g, or t
  misc_feature (2787)..(2787): n is a, c, g, or t
  misc_feature (2791)..(2791): n is a, c, g, or t
  misc_feature (2794)..(2794): n is a, c, g, or t
  misc_feature (2799)..(2801): n is a, c, g, or t
  misc_feature (2816)..(2816): n is a, c, g, or t
  misc_feature (2821)..(2822): n is a, c, g, or t
  misc_feature (2824)..(2829): n is a, c, g, or t
  misc_feature (2833)..(2833): n is a, c, g, or t
  misc_feature (2836)..(2837): n is a, c, g, or t
  misc_feature (2850)..(2850): n is a, c, g, or t
  misc_feature (2852)..(2852): n is a, c, g, or t
  misc_feature (2855)..(2855): n is a, c, g, or t
tggtcaacgcgatttgcttccaagggacggccaccagtcggcacaggaaaggggcagaggcagtgagttcagcgtgtggacgagggtcaacaagtttgggatcaagcggctgccgctcctccaaaagcgaccgaagcgcgagcagattacccctccgagccagtgtagtaaacacacttcagaaacgtgaggtgccggtggtcacgaggggagcgcgccctccaatgaggagccgggggcggggccgaggccgctgacgcggcggcggcggcagagtcacccgggcagcctcgggaccggtcaccggccggcaaccgtccagcggcctcgaccaccgcctctagcctccgttcccggtcctttctcccgggccgagagacagcgtcgccgacaggggctcattcccctccggttctcctcggtgactcacctcgggcgggccgttttgtctttaggggccgccttggtggggcgaggtttccgtgacgaatctcctggggccgtccgtgccggctcgggccgtcgtggcgactcgagctcctggaacttgctcaggctccggaggtccgaggccctcgaagttatgcgtcgcctccaggcggttgcggcgggcgcgggctcctaaagggcgtcacacccggactccgccgactaggcaacctccattcatctttccactgcgcctccagcgcccccgccttctccggtcccctcctcggagtcattttttcctgttccccctctgccgccctttcctcacgccccgggtgaggcaattctcttggaagcgaaggtgtcggctatgagccggagcctccttccttgaatttctccgtggaggacccgccgcgccccccggcatgggggtgaacgccgtgcactggttccgaaaggggctccggctccacgacaaccccgccctgaaggagtgcattcagggcgccgacaccatccgctgcgtctacatcctggacccctggttcgccggctcctccaatgtgggcatcaacaggtggcgatttttgcttcagtgtcttgaggatcttgatgccaatctacgaaaattaaactcccgtctgtttgtgattcgtggacaaccagcagatgtgtttcccaggcttttcaaggaatggaacattactaaactttcaattgagtatgattctgagccctttggaaaggaacgagacgcagctattaagaaactggcaactgaagctggagtagaagtcattgtaagaatttcacatacattatatgacctagacaagatcatagaactcaatggtggacaaccgcctctaacttataaaagattccagactctcatcagcaaaatggaaccactagagataccagtagagacaattacttcagaagtgatagaaaagtgcacaactcctctgtctgatgaccatgatgagaaatatggagtcccttcactggaagagctaggttttgatacagatggcttatcctctgcagtgtggccaggcggagaaactgaagcacttactcgtttggaaaggcatttggaaagaaaagcttgggtggcaaattttgaaagacctcgaatgaatgcgaattctctgcttgcaagccctactggacttagtccttatctccgatttggttgtttgtcatgtcgactgttttacttcaaactaacagatctctacaaaaaggtaaagaagaacagttcccctcccctttccctttatgggcaactgttatggcgtgaatttttctatacagcagcaacaaataatccacgctttgataaaatggaaggaaaccctatctgtgttcagattccttgggataaaaatcctgaggctttagccaaatgggcggaaggccggacaggctttccatggattgatgccatcatgacacagcttcgtcaggagggttggattcatcatctagccaggcatgcagttgcttgcttcctgacacgaggggacctgtggattagttgggaagaaggaatgaaggtatttgaagaattattgcttgatgcagattggagcataaatgctggaagttggatgtggctgtcttgtagttccttttttcaacagttttttcactgctattgccctgttggttttggtaggagaacagatcccaatggagactatatcaggcgttatttgcctgtcctaagaggcttccctgcaaaatatatctatgatccctggaatgcaccagaaggtatccaaaaggtagccaaatgtttgataggagttaattatcctaaaccaatggtgaaccatgctgaggcaagccgtttgaatatcgaaaggatgaaacagatctatcagcagctttcacgatatagaggactaggtcttctggcatcagtaccttctaatcctaatgggaatggaggcttcatgggatattctgcagaaaatatcccaggttgtagcagcagtggaagttgctctcaagggagtggtattttacactatgctcatggcgacagtcagcaaactcacctgttgaagcaaggaagaagctccatgggcactggtctcagtggtgggaaacgtcctagtcaggaagaggacacacagagtattggtcctaaagtccagagacagagcactaattagaaaacattcaggaggaatactgttgcagctgaaattggtggggagttcaatacttttcaattaagttatttaaaaatattcttcattgatggaaagcagttacatattgaaatatgttgtttctaatgacacnactgcgccccccnnccccccaacnaacccnncngagnacnaaccnnnacacgaatataaagnacccnncnnnnnnaccngcnnaagggaaagatananagngggaattagtatagacccatcgatatatttttgataatttttcatgtatggtaaagttaaaatgacaaattgatattctgatataaaactcaaagttttgaagtcagtgggaaaaaaggaggtttttagactttcttaaaagacgttaaaattttaggacagaattttcttgatgttgtttgatctaactttgcactctttgataataatgttttagataatgtgcgtaatccaaattggtattgtagcctctgttaacacagacagtatatgttttaaactttgatgtaaacctttttagacccaaacttgtggaagtatcatgtgttaagttctctgtctctgtttctttgttcatttattactaaaatgaacttgttattaaagtatatgcaaatatgaaaaaaaaaaa

SEQ ID NO: 402125 - DNA, 3346 bp, Homo sapiens
tggtcaacgcgatttgcttccaagggacggccaccagtcggcacaggaaaggggcagaggcagtgagttcagcgtgtggacgagggtcaacaagtttgggatcaagcggctgccgctcctccaaaagcgaccgaagcgcgagcagattacccctccgagccagtgtagtaaacacacttcagaaacgtgaggtgccggtggtcacgaggggagcgcgccctccaatgaggagccgggggcggggccgaggccgctgacgcggcggcggcggcagagtcacccgggcagcctcgggaccggtcaccggccggcaaccgtccagcggcctcgaccaccgcctctagcctccgttcccggtcctttctcccgggccgagagacagcgtcgccgacaggggctcattcccctccggttctcctcggtgactcacctcgggcgggccgttttgtctttaggggccgccttggtggggcgaggtttccgtgacgaatctcctggggccgtccgtgccggctcgggccgtcgtggcgactcgagctcctggaacttgctcaggctccggaggtccgaggccctcgaagttatgcgtcgcctccaggcggttgcggcgggcgcgggctcctaaagggcgtcacacccggactccgccgactaggcaacctccattcatctttccactgcgcctccagcgcccccgccttctccggtcccctcctcggagtcattttttcctgttccccctctgccgccctttcctcacgccccgggtgaggcaattctcttggaagcgaaggtgtcggctatgagccggagcctccttccttgaatttctccgtggaggacccgccgcgccccccggcatgggggtgaacgccgtgcactggttccgaaaggggctccggctccacgacaaccccgccctgaaggagtgcattcagggcgccgacaccatccgctgcgtctacatcctggacccctggttcgccggctcctccaatgtgggcatcaacaggtggcgatttttgcttcagtgtcttgaggatcttgatgccaatctacgaaaattaaactcccgtctgtttgtgattcgtggacaaccagcagatgtgtttcccaggcttttcaaggaatggaacattactaaactttcaattgagtatgattctgagccctttggaaaggaacgagacgcagctattaagaaactggcaactgaagctggagtagaagtcattgtaagaatttcacatacattatatgacctagacaagatcatagaactcaatggtggacaaccgcctctaacttataaaagattccagactctcatcagcaaaatggaaccactagagataccagtagagacaattacttcagaagtgatagaaaagtgcacaactcctctgtctgatgaccatgatgagaaatatggagtcccttcactggaagagctaggttttgatacagatggcttatcctctgcagtgtggccaggcggagaaactgaagcacttactcgtttggaaaggcatttggaaagaaaagcttgggtggcaaattttgaaagacctcgaatgaatgcgaattctctgcttgcaagccctactggacttagtccttatctccgatttggttgtttgtcatgtcgactgttttacttcaaactaacagatctctacaaaaaggtattctctaaaattagagcttattgtttaatactttaaaaaaaaattctgataatacttctttgctttttaaccataggtaaagaagaacagttcccctcccctttccctttatgggcaactgttatggcgtgaatttttctatacagcagcaacaaataatccacgctttgataaaatggaaggaaaccctatctgtgttcagattccttgggataaaaatcctgaggctttagccaaatgggcggaaggccggacaggctttccatggattgatgccatcatgacacagcttcgtcaggagggttggattcatcatctagccaggcatgcagttgcttgcttcctgacacgaggggacctgtggattagttgggaagaaggaatgaaggtatttgaagaattattgcttgatgcagattggagcataaatgctggaagttggatgtggctgtcttgtagttccttttttcaacagttttttcactgctattgccctgttggttttggtaggagaacagatcccaatggagactatatcaggcgttatttgcctgtcctaagaggcttccctgcaaaatatatctatgatccctggaatgcaccagaaggtatccaaaaggtagccaaatgtttgataggagttaattatcctaaaccaatggtgaaccatgctgaggcaagccgtttgaatatcgaaaggatgaaacagatctatcagcagctttcacgatatagaggactaggtcttctggcatcagtaccttctaatcctaatgggaatggaggcttcatgggatattctgcagaaaatatcccaggttgtagcagcagtggaagttgctctcaagggagtggtattttacactatgctcatggcgacagtcagcaaactcacctgttgaagcaaggaagaagctccatgggcactggtctcagtggtgggaaacgtcctagtcaggaagaggacacacagagtattggtcctaaagtccagagacagagcactaattagaaaacattcaggaggaatactgttgcagctgaaattggtggggagttcaatacttttcaattaagttatttaaaaatattcttcattgatggaaagcagttacatattgaaatatgttgtttctaatgacatttctgtggtttttaactttttaatgaatttcacagaggacaattggtaatttgtatataaagaacttggcaagagaatttgcttaatgtaaatataaacagtcacaattagtatagacccatcgatatatttttgataatttttcatgtatggtaaagttaaaatgacaaattgatattctgatataaaactcaaagttttgaagtcagtgggaaaaaaggaggtttttagactttcttaaaagacgttaaaattttaggacagaattttcttgatgttgtttgatctaactttgcactctttgataataatgttttagataatgtgcgtaatccaaattggtattgtagcctctgttaacacagacagtatatgttttaaactttgatgtaaacctttttagacccaaacttgtggaagtatcatgtgttaagttctctgtctctgtttctttgttcatttattactaaaatgaacttgttattaaagtatatgcaaatatgaaaaaaaaaaa

SEQ ID NO: 402126 - DNA, 3206 bp, Homo sapiens
tggtcaacgcgatttgcttccaagggacggccaccagtcggcacaggaaaggggcagaggcagtgagttcagcgtgtggacgagggtcaacaagtttgggatcaagcggctgccgctcctccaaaagcgaccgaagcgcgagcagattacccctccgagccagtgtagtaaacacacttcagaaacgtgaggtgccggtggtcacgaggggagcgcgccctccaatgaggagccgggggcggggccgaggccgctgacgcggcggcggcggcagagtcacccgggcagcctcgggaccggtcaccggccggcaaccgtccagcggcctcgaccaccgcctctagcctccgttcccggtcctttctcccgggccgagagacagcgtcgccgacaggggctcattcccctccggttctcctcggtgactcacctcgggcgggccgttttgtctttaggggccgccttggtggggcgaggtttccgtgacgaatctcctggggccgtccgtgccggctcgggccgtcgtggcgactcgagctcctggaacttgctcaggctccggaggtccgaggccctcgaagttatgcgtcgcctccaggcggttgcggcgggcgcgggctcctaaagggcgtcacacccggactccgccgactaggcaacctccattcatctttccactgcgcctccagcgcccccgccttctccggtcccctcctcggagtcattttttcctgttccccctctgccgccctttcctcacgccccgggtgaggcaattctcttggaagcgaaggtgtcggctatgagccggagcctccttccttgaatttctccgtggaggacccgccgcgccccccggcatgggggtgaacgccgtgcactggttccgaaaggggctccggctccacgacaaccccgccctgaaggagtgcattcagggcgccgacaccatccgctgcgtctacatcctggacccctggttcgccggctcctccaatgtgggcatcaacaggtggcgatttttgcttcagtgtcttgaggatcttgatgccaatctacgaaaattgaatggaacattactaaactttcaattgagtatgattctgagccctttggaaaggaacgagacgcagctattaagaaactggcaactgaagctggagtagaagtcattgtaagaatttcacatacattatatgacctagacaagatcatagaactcaatggtggacaaccgcctctaacttataaaagattccagactctcatcagcaaaatggaaccactagagataccagtagagacaattacttcagaagtgatagaaaagtgcacaactcctctgtctgatgaccatgatgagaaatatggagtcccttcactggaagagctaggttttgatacagatggcttatcctctgcagtgtggccaggcggagaaactgaagcacttactcgtttggaaaggcatttggaaagaaaagcttgggtggcaaattttgaaagacctcgaatgaatgcgaattctctgcttgcaagccctactggacttagtccttatctccgatttggttgtttgtcatgtcgactgttttacttcaaactaacagatctctacaaaaaggtaaagaagaacagttcccctcccctttccctttatgggcaactgttatggcgtgaatttttctatacagcagcaacaaataatccacgctttgataaaatggaaggaaaccctatctgtgttcagattccttgggataaaaatcctgaggctttagccaaatgggcggaaggccggacaggctttccatggattgatgccatcatgacacagcttcgtcaggagggttggattcatcatctagccaggcatgcagttgcttgcttcctgacacgaggggacctgtggattagttgggaagaaggaatgaaggtatttgaagaattattgcttgatgcagattggagcataaatgctggaagttggatgtggctgtcttgtagttccttttttcaacagttttttcactgctattgccctgttggttttggtaggagaacagatcccaatggagactatatcaggcgttatttgcctgtcctaagaggcttccctgcaaaatatatctatgatccctggaatgcaccagaaggtatccaaaaggtagccaaatgtttgataggagttaattatcctaaaccaatggtgaaccatgctgaggcaagccgtttgaatatcgaaaggatgaaacagatctatcagcagctttcacgatatagaggactaggtcttctggcatcagtaccttctaatcctaatgggaatggaggcttcatgggatattctgcagaaaatatcccaggttgtagcagcagtggaagttgctctcaagggagtggtattttacactatgctcatggcgacagtcagcaaactcacctgttgaagcaaggaagaagctccatgggcactggtctcagtggtgggaaacgtcctagtcaggaagaggacacacagagtattggtcctaaagtccagagacagagcactaattagaaaacattcaggaggaatactgttgcagctgaaattggtggggagttcaatacttttcaattaagttatttaaaaatattcttcattgatggaaagcagttacatattgaaatatgttgtttctaatgacatttctgtggtttttaactttttaatgaatttcacagaggacaattggtaatttgtatataaagaacttggcaagagaatttgcttaatgtaaatataaacagtcacaattagtatagacccatcgatatatttttgataatttttcatgtatggtaaagttaaaatgacaaattgatattctgatataaaactcaaagttttgaagtcagtgggaaaaaaggaggtttttagactttcttaaaagacgttaaaattttaggacagaattttcttgatgttgtttgatctaactttgcactctttgataataatgttttagataatgtgcgtaatccaaattggtattgtagcctctgttaacacagacagtatatgttttaaactttgatgtaaacctttttagacccaaacttgtggaagtatcatgtgttaagttctctgtctctgtttctttgttcatttattactaaaatgaacttgttattaaagtatatgcaaatatgaaaaaaaaaaa

SEQ ID NO: 402127 - DNA, 462 bp, Homo sapiens
atgatgcttctaaaatctaaattatttccaatttgggaatagttcaaaattttttaaaatgctggcccttattagaagtatcagaaagccttgcctgcattcaatttaattggatttgggatgtcattttgtgatttaaattaatatgaaaaatatttatacgttggatttgccagtttttaaaaattttctgtttcttcagtttctaacactgtttacattttttattgcttagtttttttatgtcaacctaattagactataagtatcttgaagataaggtcaataaacactcatcacatttttgtcattgaattatttgcaatcaagctttacctagtttttttttcccccttaaatcacagaaaacattcaggaggaatactgttgcagctgaaattggtggggagttcaatacttttcaattaagttatttaaaaatattcttcattgatggaaagc

SEQ ID NO: 402128 - DNA, 490 bp, Homo sapiens
ataacatgtttttcatatgtctgtgtgtattaactttttgtaattgcctttagactaatttcccctcttacttgttttttcctctcataagtttttaatattctttgtcttaaaggtttaatatttgtgtagtatatttgtgtagtatatttgatacccagaggatgtctagaagctcaggagaatgatttttggactcattaatcattttggacacatttcttggtcattataacaagctaacaccctcaaagacttcagtgattaattttattttctgctttttaagccttttgggagcttattagccaaaatgtattgtcttttttaatactaactacattttactaactcttgttataggatcatagaactcaatggtggacaaccgcctctaacttataaaagattccagactctcatcagcaaaatggaaccactagagataccagtagagacaattacttcagaagtgatagaaaagtgcaca

SEQ ID NO: 402129 - DNA, 3267 bp, Homo sapiens
tggtcaacgcgatttgcttccaagggacggccaccagtcggcacaggaaaggggcagaggcagtgagttcagcgtgtggacgagggtcaacaagtttgggatcaagcggctgccgctcctccaaaagcgaccgaagcgcgagcagattacccctccgagccagtgtagtaaacacacttcagaaacgtgaggtgccggtggtcacgaggggagcgcgccctccaatgaggagccgggggcggggccgaggccgctgacgcggcggcggcggcagagtcacccgggcagcctcgggaccggtcaccggccggcaaccgtccagcggcctcgaccaccgcctctagcctccgttcccggtcctttctcccgggccgagagacagcgtcgccgacaggggctcattcccctccggttctcctcggtgactcacctcgggcgggccgttttgtctttaggggccgccttggtggggcgaggtttccgtgacgaatctcctggggccgtccgtgccggctcgggccgtcgtggcgactcgagctcctggaacttgctcaggctccggaggtccgaggccctcgaagttatgcgtcgcctccaggcggttgcggcgggcgcgggctcctaaagggcgtcacacccggactccgccgactaggcaacctccattcatctttccactgcgcctccagcgcccccgccttctccggtcccctcctcggagtcattttttcctgttccccctctgccgccctttcctcacgccccgggtgaggcaattctcttggaagcgaaggtgtcggctatgagccggagcctccttccttgaatttctccgtggaggacccgccgcgccccccggcatgggggtgaacgccgtgcactggttccgaaaggggctccggctccacgacaaccccgccctgaaggagtgcattcagggcgccgacaccatccgctgcgtctacatcctggacccctggttcgccggctcctccaatgtgggcatcaacaggtggcgatttttgcttcagtgtcttgaggatcttgatgccaatctacgaaaattaaactcccgtctgtttgtgattcgtggacaaccagcagatgtgtttcccaggcttttcaaggaatggaacattactaaactttcaattgagtatgattctgagccctttggaaaggaacgagacgcagctattaagaaactggcaactgaagctggagtagaagtcattgtaagaatttcacatacattatatgacctagacaagatcatagaactcaatggtggacaaccgcctctaacttataaaagattccagactctcatcagcaaaatggaaccactagagataccagtagagacaattacttcagaagtgatagaaaagtgcacaactcctctgtctgatgaccatgatgagaaatatggagtcccttcactggaagagctaggttttgatacagatggcttatcctctgcagtgtggccaggcggagaaactgaagcacttactcgtttggaaaggcatttggaaagaaaagcttgggtggcaaattttgaaagacctcgaatgaatgcgaattctctgcttgcaagccctactggacttagtccttatctccgatttggttgtttgtcatgtcgactgttttacttcaaactaacagatctctacaaaaaggtaaagaagaacagttcccctcccctttccctttatgggcaactgttatggcgtgaatttttctatacagcagcaacaaataatccacgctttgataaaatggaaggaaaccctatctgtgttcagattccttgggataaaaatcctgaggctttagccaaatgggcggaaggccggacaggctttccatggattgatgccatcatgacacagcttcgtcaggagggttggattcatcatctagccaggcatgcagttgcttgcttcctgacacgaggggacctgtggattagttgggaagaaggaatgaaggtatttgaagaattattgcttgatgcagattggagcataaatgctggaagttggatgtggctgtcttgtagttccttttttcaacagttttttcactgctattgccctgttggttttggtaggagaacagatcccaatggagactatatcaggcgttatttgcctgtcctaagaggcttccctgcaaaatatatctatgatccctggaatgcaccagaaggtatccaaaaggtagccaaatgtttgataggagttaattatcctaaaccaatggtgaaccatgctgaggcaagccgtttgaatatcgaaaggatgaaacagatctatcagcagctttcacgatatagaggactaggtcttctggcatcagtaccttctaatcctaatgggaatggaggcttcatgggatattctgcagaaaatatcccaggttgtagcagcagtggaagttgctctcaagggagtggtattttacactatgctcatggcgacagtcagcaaactcacctgttgaagcaaggaagaagctccatgggcactggtctcagtggtgggaaacgtcctagtcaggaagaggacacacagagtattggtcctaaagtccagagacagagcactaattagaaaacattcaggaggaatactgttgcagctgaaattggtggggagttcaatacttttcaattaagttatttaaaaatattcttcattgatggaaagcagttacatattgaaatatgttgtttctaatgacatttctgtggtttttaactttttaatgaatttcacagaggacaattggtaatttgtatataaagaacttggcaagagaatttgcttaatgtaaatataaacagtcacaattagtatagacccatcgatatatttttgataatttttcatgtatggtaaagttaaaatgacaaattgatattctgatataaaactcaaagttttgaagtcagtgggaaaaaaggaggtttttagactttcttaaaagacgttaaaattttaggacagaattttcttgatgttgtttgatctaactttgcactctttgataataatgttttagataatgtgcgtaatccaaattggtattgtagcctctgttaacacagacagtatatgttttaaactttgatgtaaacctttttagacccaaacttgtggaagtatcatgtgttaagttctctgtctctgtttctttgttcatttattactaaaatgaacttgttattaaagtatatgcaaatatgaaaaaaaaaaa

SEQ ID NO: 402130 - DNA, 3999 bp, Homo sapiens
tggtcaacgcgatttgcttccaagggacggccaccagtcggcacaggaaaggggcagaggcagtgagttcagcgtgtggacgagggtcaacaagtttgggatcaagcggctgccgctcctccaaaagcgaccgaagcgcgagcagattacccctccgagccagtgtagtaaacacacttcagaaacgtgaggtgccggtggtcacgaggggagcgcgccctccaatgaggagccgggggcggggccgaggccgctgacgcggcggcggcggcagagtcacccgggcagcctcgggaccggtcaccggccggcaaccgtccagcggcctcgaccaccgcctctagcctccgttcccggtcctttctcccgggccgagagacagcgtcgccgacaggggctcattcccctccggttctcctcggtgactcacctcgggcgggccgttttgtctttaggggccgccttggtggggcgaggtttccgtgacgaatctcctggggccgtccgtgccggctcgggccgtcgtggcgactcgagctcctggaacttgctcaggctccggaggtccgaggccctcgaagttatgcgtcgcctccaggcggttgcggcgggcgcgggctcctaaagggcgtcacacccggactccgccgactaggcaacctccattcatctttccactgcgcctccagcgcccccgccttctccggtcccctcctcggagtcattttttcctgttccccctctgccgccctttcctcacgccccgggtgaggcaattctcttggaagcgaaggtgtcggctatgagccggagcctccttccttgaatttctccgtggaggacccgccgcgccccccggcatgggggtgaacgccgtgcactggttccgaaaggggctccggctccacgacaaccccgccctgaaggagtgcattcagggcgccgacaccatccgctgcgtctacatcctggacccctggttcgccggctcctccaatgtgggcatcaacaggtggcgatttttgcttcagtgtcttgaggatcttgatgccaatctacgaaaattaaactcccgtctgtttgtgattcgtggacaaccagcagatgtgtttcccaggcttttcaaggaatggaacattactaaactttcaattgagtatgattctgagccctttggaaaggaacgagacgcagctattaagaaactggcaactgaagctggagtagaagtcattgtaagaatttcacatacattatatgacctagacaagatcatagaactcaatggtggacaaccgcctctaacttataaaagattccagactctcatcagcaaaatggaaccactagagataccagtagagacaattacttcagaagtgatagaaaagtgcacaactcctctgtctgatgaccatgatgagaaatatggagtcccttcactggaagagctaggttttgatacagatggcttatcctctgcagtgtggccaggcggagaaactgaagcacttactcgtttggaaaggcatttggaaagaaaagcttgggtggcaaattttgaaagacctcgaatgaatgcgaattctctgcttgcaagccctactggacttagtccttatctccgatttggttgtttgtcatgtcgactgttttacttcaaactaacagatctctacaaaaaggtaaagaagaacagttcccctcccctttccctttatgggcaactgttatggcgtgaatttttctatacagcagcaacaaataatccacgctttgataaaatggaaggaaaccctatctgtgttcagattccttgggataaaaatcctgaggctttagccaaatgggcggaaggccggacaggctttccatggattgatgccatcatgacacagcttcgtcaggagggttggattcatcatctagccaggcatgcagttgcttgcttcctgacacgaggggacctgtggattagttgggaagaaggaatgaaggtatttgaagaattattgcttgatgcagattggagcataaatgctggaagttggatgtggctgtcttgtagttccttttttcaacagttttttcactgctattgccctgttggttttggtaggagaacagatcccaatggagactatatcaggcgttatttgcctgtcctaagaggcttccctgcaaaatatatctatgatccctggaatgcaccagaaggtatccaaaaggtagccaaatgtttgataggagttaattatcctaaaccaatggtgaaccatgctgaggcaagccgtttgaatatcgaaaggatgaaacagatctatcagcagctttcacgatatagaggactaggtcttctggcatcagtaccttctaatcctaatgggaatggaggcttcatgggatattctgcagaaaatatcccaggttgtagcagcagtggaagttgctctcaagggagtggtattttacactatgctcatggcgacagtcagcaaactcacctgttgaagcaaggaagaagctccatgggcactggtctcagtggtgggaaacgtcctagtcaggaagaggacacacagagtattggtcctaaagtccagagacagagcactaattaggtaaatattttagagctgtatttcttgctttagaagagtatataattaacataaattaagataatttcaaaaatggagcaaatctctattttcaaaccagaaaatcttgaggcattaatttttaagcagtttatacagactcagttaatttttggtcaagagacatgcatctgtactggagaaattgttgcaccagttttatattcatctgaaccaatgctctttaaattagagatgtttatgattttgtggtcaagttttttcttagaaaaagacaacttttttatttccttactatgtaactatgagtctaaaacaattaaagtggcctgtttattttagtgacattaatataatctttttatgaactttcccctaaatctttgcctcttaaatgttgataaatttcttttatctgttatgatgcttctaaaatctaaattatttccaatttgggaatagttcaaaattttttaaaatgctggcccttattagaagtatcagaaagccttgcctgcattcaatttaattggatttgggatgtcattttgtgatttaaattaatatgaaaaatatttatacgttggatttgccagtttttatttttttatgtcaacctaattagactataagtatcttgaagataaggtcaataaacactcatcacatttttgtcattgaattatttgcaatcaagctttacctagtttttttttcccccttaaatcacagaaaacattcaggaggaatactgttgcagctgaaattggtggggagttcaatacttttcaattaagttatttaaaaatattcttcattgatggaaagcagttacatattgaaatatgttgtttctaatgacatttctgtggtttttaactttttaatgaatttcacagaggacaattggtaatttgtatataaagaacttggcaagagaatttgcttaatgtaaatataaacagtcacaattagtatagacccatcgatatatttttgataatttttcatgtatggtaaagttaaaatgacaaattgatattctgatataaaactcaaagttttgaagtcagtgggaaaaaaggaggtttttagactttcttaaaagacgttaaaattttaggacagaattttcttgatgttgtttgatctaactttgcactctttgataataatgttttagataatgtgcgtaatccaaattggtattgtagcctctgttaacacagacagtatatgttttaaactttgatgtaaacctttttagacccaaacttgtggaagtatcatgtgttaagttctctgtctctgtttctttgttcatttattactaaaatgaacttgttattaaagtatatgcaaatatgaaaaaaaaaaa

SEQ ID NO: 402131 - DNA, 3129 bp, Homo sapiens
tggtcaacgcgatttgcttccaagggacggccaccagtcggcacaggaaaggggcagaggcagtgagttcagcgtgtggacgagggtcaacaagtttgggatcaagcggctgccgctcctccaaaagcgaccgaagcgcgagcagattacccctccgagccagtgtagtaaacacacttcagaaacgtgaggtgccggtggtcacgaggggagcgcgccctccaatgaggagccgggggcggggccgaggccgctgacgcggcggcggcggcagagtcacccgggcagcctcgggaccggtcaccggccggcaaccgtccagcggcctcgaccaccgcctctagcctccgttcccggtcctttctcccgggccgagagacagcgtcgccgacaggggctcattcccctccggttctcctcggtgactcacctcgggcgggccgttttgtctttaggggccgccttggtggggcgaggtttccgtgacgaatctcctggggccgtccgtgccggctcgggccgtcgtggcgactcgagctcctggaacttgctcaggctccggaggtccgaggccctcgaagttatgcgtcgcctccaggcggttgcggcgggcgcgggctcctaaagggcgtcacacccggactccgccgactaggcaacctccattcatctttccactgcgcctccagcgcccccgccttctccggtcccctcctcggagtcattttttcctgttccccctctgccgccctttcctcacgccccgggtgaggcaattctcttggaagcgaaggtgtcggctatgagccggagcctccttccttgaatttctccgtggaggacccgccgcgccccccggcatgggggtgaacgccgtgcactggttccgaaaggggctccggctccacgacaaccccgccctgaaggagtgcattcagggcgccgacaccatccgctgcgtctacatcctggacccctggttcgccggctcctccaatgtgggcatcaacaggtggcgatttttgcttcagtgtcttgaggatcttgatgccaatctacgaaaattaaactcccgtctgtttgtgattcgtggacaaccagcagatgtgtttcccaggcttttcaaggaatggaacattactaaactttcaattgagtatgattctgagccctttggaaaggaacgagacgcagctattaagaaactggcaactgaagctggagtagaagtcattgtaagaatttcacatacattatatgacctagacaagatcatagaactcaatggtggacaaccgcctctaacttataaaagattccagactctcatcagcaaaatggaaccactagagataccagtagagacaattacttcagaagtgatagaaaagtgcacaactcctctgtctgatgaccatgatgagaaatatggagtcccttcactggaagagctaggttttgatacagatggcttatcctctgcagtgtggccaggcggagaaactgaagcacttactcgtttggaaaggcatttggaaagaaaagcttgggtggcaaattttgaaagacctcgaatgaatgcgaattctctgcttgcaagccctactggacttagtccttatctccgatttggttgtttgtcatgtcgactgttttacttcaaactaacagatctctacaaaaaggtaaagaagaacagttcccctcccctttccctttatgggcaactgttatggcgtgaatttttctatacagcagcaacaaataatccacgctttgataaaatggaaggaaaccctatctgtgttcagattccttgggataaaaatcctgaggctttagccaaatgggcggaaggccggacaggctttccatggattgatgcagattggagcataaatgctggaagttggatgtggctgtcttgtagttccttttttcaacagttttttcactgctattgccctgttggttttggtaggagaacagatcccaatggagactatatcaggcgttatttgcctgtcctaagaggcttccctgcaaaatatatctatgatccctggaatgcaccagaaggtatccaaaaggtagccaaatgtttgataggagttaattatcctaaaccaatggtgaaccatgctgaggcaagccgtttgaatatcgaaaggatgaaacagatctatcagcagctttcacgatatagaggactaggtcttctggcatcagtaccttctaatcctaatgggaatggaggcttcatgggatattctgcagaaaatatcccaggttgtagcagcagtggaagttgctctcaagggagtggtattttacactatgctcatggcgacagtcagcaaactcacctgttgaagcaaggaagaagctccatgggcactggtctcagtggtgggaaacgtcctagtcaggaagaggacacacagagtattggtcctaaagtccagagacagagcactaattagaaaacattcaggaggaatactgttgcagctgaaattggtggggagttcaatacttttcaattaagttatttaaaaatattcttcattgatggaaagcagttacatattgaaatatgttgtttctaatgacatttctgtggtttttaactttttaatgaatttcacagaggacaattggtaatttgtatataaagaacttggcaagagaatttgcttaatgtaaatataaacagtcacaattagtatagacccatcgatatatttttgataatttttcatgtatggtaaagttaaaatgacaaattgatattctgatataaaactcaaagttttgaagtcagtgggaaaaaaggaggtttttagactttcttaaaagacgttaaaattttaggacagaattttcttgatgttgtttgatctaactttgcactctttgataataatgttttagataatgtgcgtaatccaaattggtattgtagcctctgttaacacagacagtatatgttttaaactttgatgtaaacctttttagacccaaacttgtggaagtatcatgtgttaagttctctgtctctgtttctttgttcatttattactaaaatgaacttgttattaaagtatatgcaaatatgaaaaaaaaaaa

SEQ ID NO: 402132 - DNA, 1598 bp, Homo sapiens
tggtcaacgcgatttgcttccaagggacggccaccagtcggcacaggaaaggggcagaggcagtgagttcagcgtgtggacgagggtcaacaagtttgggatcaagcggctgccgctcctccaaaagcgaccgaagcgcgagcagattacccctccgagccagtgtagtaaacacacttcagaaacgtgaggtgccggtggtcacgaggggagcgcgccctccaatgaggagccgggggcggggccgaggccgctgacgcggcggcggcggcagagtcacccgggcagcctcgggaccggtcaccggccggcaaccgtccagcggcctcgaccaccgcctctagcctccgttcccggtcctttctcccgggccgagagacagcgtcgccgacaggggctcattcccctccggttctcctcggtgactcacctcgggcgggccgttttgtctttaggggccgccttggtggggcgaggtttccgtgacgaatctcctggggccgtccgtgccggctcgggccgtcgtggcgactcgagctcctggaacttgctcaggctccggaggtccgaggccctcgaagttatgcgtcgcctccaggcggttgcggcgggcgcgggctcctaaagggcgtcacacccggactccgccgactaggcaacctccattcatctttccactgcgcctccagcgcccccgccttctccggtcccctcctcggagtcattttttcctgttccccctctgccgccctttcctcacgccccgggtgaggcaattctcttggaagcgaaggtgtcggctatgagccggagcctccttccttgaatttctccgtggaggacccgccgcgccccccggcatgggggtgaacgccgtgcactggttccgaaaggggctccggctccacgacaaccccgccctgaaggagtgcattcagggcgccgacaccatccgctgcgtctacatcctggacccctggttcgccggctcctccaatgtgggcatcaacaggtggcgatttttgcttcagtgtcttgaggatcttgatgccaatctacgaaaattaaactcccgtctgtttgtgattcgtggacaaccagcagatgtgtttcccaggcttttcaaggaatggaacattactaaactttcaattgagtatgattctgagccctttggaaaggaacgagacgcagctattaagaaactggcaactgaagctggagtagaagtcattgtaagaatttcacatacattatatgacctagacaagatcatagaactcaatggtggacaaccgcctctaacttataaaagattccagactctcatcagcaaaatggaaccactagagataccagtagagacaattacttcagaagtgatagaaaagtgcacaactcctctgtctgatgaccatgatgagaaatatggagtcccttcactggaagagctaggttttgatacagatggcttatcctctgcagtgtggccaggcggagaaactgaagcacttactcgtttggaaaggcatttggaaagaaaagcttgggtggcaattttgaaagacctcgaatgatgcgtcacggggtcctctagg

SEQ ID NO: 402133 - DNA, 427 bp, Homo sapiens
atgcttgcttacaagtacttctgaccatatgtcatcatgatattcatggtgtacccatttatagcaatatgtgaagccagtggtaaaaagaatagagatctcaggatgttaattgctaagaaccagatcgattataataaaatcccaaagttgttttatttaccccaaattttccagaataataaatacccatggggaaacattgacactgatctctcatcctgaaggtcctttggagtgagaactggtcatgcccaagaagaacccaagtcctctccagattcttaagaataaccccagggtttcaggctgcaggccaaagagggtctctcaggttgcaaacgatctagcattctcctcctaagaggaaaacacttgggaaagaggaagattattagggaccctgagcagtattttgacccaactc

SEQ ID NO: 402134 - DNA, 523 bp, Homo sapiens
ttgtttccaagagaggtattccaaaagtgtttcaagcaatgactgagctaagcatccagtcctgcaaggtgaaggcgttgaagacgcagccctcatttgaatagatgaattgtggtattcttgttaaataatgaatcatatcaaggcttggtcacacctcatgcacatgaaaagaccaaaacgcaaggcagcatatcagcgccacgtgaagtacacactaagcaccaactatttaattcagcaatcatggggggcccggtggctcacgcctgtcatcttagcaatttgggaggccgaggcaggtggatcgcttgagcccaggagttcgagatcagcctgggcatcatggtggcctgcacctgtagtcccagctactcaggaggctgaggtgggaggatagtttgaccccagaaagttgaggctgcagtgagccgtgaatgcaccactacacaccagcctggatgacagagcgaaaccctgtctcaaagtaattaataataattatattaattcagcaatcatt

SEQ ID NO: 402135 - DNA, 1214 bp, Homo sapiens
tatgagttgagctctgtgcataaggcttgccagacatcgtcttatttgagtctcataaacccaccaggcgagttgatttttcttattttacagatagggaaatgaagtaagagaacttaagttatttgcccgaggccatcctggcaggtctgtatttgggagagtgctgtgactcatgctggactctaacccacgagggtttctcagagtcagcagctgggggatgaagaagtgaaaagtgactggcaggaaattctgcaagcaaggaaagggaaagagaaatgaactggtgcaggtctgcgggaagagaatgaggctggatcctcaaaatcacaggaggaagcaggcccagacctcagaggcagaaagagaaagaaaccagagcttagagtcaggaggaggaaaccagaccccggagccacaaggagagggctggatccccggctcagagggaagagctcactacagtgtcgccgcctctgcctgcgtagccccggccatggctctgtagcctcgacccctttgtgcccccggcccgtctccgcgctcaccacgcctgcgctctccgctcccaccttctttcttcagccgaggccgccgccgcctctccttgctgcagccatggagtcttccactttcgccttggtgcctgtcttcgcccacctgagcatcctccagagcctcgtgccagctgctggtgcagcctctcctgttgccatcagtgcccagcacctgtgctacagccatgtcactcctggcgaccctggggctggagctggacagggccctgctcccagctagtgggctgggatggctcgtagactatgggaaactccccccggcccctgcccccctggctccctatgaggtccttgggggagccctggagggcgggcttccagtggggggagagcccctggcaggtgatggcttctctgactggatgactgagcgagttgatttcacagctctcctccctctggagcctcctaccgtgtacaagagagagccaaaaggcgaaaacagcaagaaagaaagacaacaaagagaggagaaaacacagcaaacgacacagaaacaaaacaaaaagaagagagagacaaagaaaggaacaccagaagaaacacagagcggagatgagaagaacaagaagaaaaaagaacaacaccacaagacacacaaacctgaaaacaaataacaaaacgaagaaaaac

SEQ ID NO: 402136 - DNA, 679 bp, Homo sapiens
gggtacaggtagcggaggctggagatcgcgaatttggagctgaggctcactacagtgtcgccgcctctgcctgcgtagccccggccatggctctgtagcctcgacccctttgtgcccccggcccgtctccgcgctcaccacgcctgcgctctccgctcccaccttctttcttcagccgaggccgccgccgcctctccttgctgcagccatggagtcttccactttcgccttggtgcctgtcttcgcccacctgagcatcctccagagcctcgtgccagctgctggtgcagcctctcctgttgccatcagtgcccagcacctgtgctacagccatgtcactcctggcgaccctggggctggagctggacagggccctgctcccagctagtgggctgggatggctcgtagactatgggaaactccccccggcccctgcccccctggctccctatgaggtccttgggggagccctggagggcgggcttccagtggggggagagcccctggcaggtgatggcttctctgactggatgactgagcgagttgatttcacagctctcctccctctggagcctcctactggaaggccctccccccataacaaagggaagaaagggaaccaaaaaagagaagagagagaaaaaggaaaagggagcaccaaaagaacaacacaggaaag

SEQ ID NO: 402137 - DNA, 2744 bp, Homo sapiens
tatgagttgagctctgtgcataaggcttgccagacatcgtcttatttgagtctcataaacccaccaggcgagttgatttttcttattttacagatagggaaatgaagtaagagaacttaagttatttgcccgaggccatcctggcaggtctgtatttgggagagtgctgtgactcatgctggactctaacccacgagggtttctcagagtcagcagctgggggatgaagaagtgaaaagtgactggcaggaaattctgcaagcaaggaaagggaaagagaaatgaactggtgcaggtctgcgggaagagaatgaggctggatcctcaaaatcacaggaggaagcaggcccagacctcagaggcagaaagagaaagaaaccagagcttagagtcaggaggaggaaaccagaccccggagccacaaggagagggctggatccccggctcagagggaagaggtcggatccccagctgagagggaggagggtcccggaccctaggagtgggaaggaaaggctcggatcccctgatccccaggaggaggggacccggctgcctcccggttggggccgcgcgagggcggggcgcggaaggatccgggagggccgtgctccgccacccagtatatatctgtccccagtccccggggccgcctcattccctgtcctcggatcacagtctcttctcactacagtgtcgccgcctctgcctgcgtagccccggccatggctctgtagcctcgacccctttgtgcccccggcccgtctccgcgctcaccacgcctgcgctctccgctcccaccttctttcttcagccgaggccgccgccgcctctccttgctgcagccatggagtcttccactttcgccttggtgcctgtcttcgcccacctgagcatcctccagagcctcgtgccagctgctggtgcagcctctcctgttgccatcagtgcccagcacctgtgctacagccatgtcactcctggcgaccctggggctggagctggacagggccctgctcccagctagtgggctgggatggctcgtagactatgggaaactccccccggcccctgcccccctggctccctatgaggtccttgggggagccctggagggcgggcttccagtggggggagagcccctggcaggtgatggcttctctgactggatgactgagcgagttgatttcacagctctcctccctctggagcctcccctaccccccggcaccctcccccaaccttccccaaccccacctgacctggaagctatggcctccctcctcaagaaggagctggaacagatggaagacttcttcctagatgccccgcccctcccaccaccctccccgccgccactaccaccaccaccactaccaccagccccctccctccccctgtccctcccctcctttgacctcccccagccccctgtcttggatactctggacttgctggccatctactgccgcaacgaggccgggcaggaggaagtggggatgccgcctctgcccccgccacagcagccccctcctccttctccacctcaaccttctcgcctggccccctacccacatcctgccaccacccgaggggaccgcaagcaaaagaagagagaccagaacaagtcggcggctctgaggtaccgccagcggaagcgggcagagggtgaggccctggagggcgagtgccaggggctggaggcacggaatcgcgagctgaaggaacgggcagagtccgtggagcgcgagatccagtacgtcaaggacctgctcatcgaggtttacaaggcccggagccagaggacccgtagctgctagaagggcaggggtgtggcttctgggggctggtcttcagctctggcgccttcatccccctgcctctaccttcattccaaacccctctcggccgggtgcagtggcttatgcttgtaatcccagcactttgggaggccaaggcaggaggatcgtttgaggccaggaggtcaataccagcctgggcaacatagtaagaccctgtctctattaaaaaaaaaaaatcaacccttcttccccaccaaaccacccaactcctctctactcttatccttttatcctctgtctctgcttatcacctctcttgcgtatttctggatctccttccctcctttctcgtccaaatcatgaaatgtttggccttagtcaatgtctatgcccgtcacataacagccgaggcaccgaggcccacagggaagcagctgggagcttggaaacctggtctcttgaatttcaaacctggtttcttacaggtggttgtctggggtgggtggagtggcgacaggatagagctgaaggactatgcaaatgaggaagtaagtcagggcgggctttgagaaggggacccatatcctacaggcaaaaagcaggctaggtgaccttgggacactacgctaagggagggaggctaaaggcggccaggtttgcagtgcgggaagatgagcaggccagtgggaggaggggcagggcagggctgtagttggtgactgggtgttcattttagctctaagaaaaaaaatcagtgtttcgtgaaggtgttggagaggggctgtgtctgggtgagggatggcggggtactgatttttttgggaggttatgagcaaaaataaaacgaaacatttcctctggaaaacgagcaagccaaacaccccggggaactcaatcccggggcccgcgaaaaggaggctcccgaaatggccccgtggcctc

SEQ ID NO: 402138 - DNA, 2660 bp, Homo sapiens
tatgagttgagctctgtgcataaggcttgccagacatcgtcttatttgagtctcataaacccaccaggcgagttgatttttcttattttacagatagggaaatgaagtaagagaacttaagttatttgcccgaggccatcctggcaggtctgtatttgggagagtgctgtgactcatgctggactctaacccacgagggtttctcagagtcagcagctgggggatgaagaagtgaaaagtgactggcaggaaattctgcaagcaaggaaagggaaagagaaatgaactggtgcaggtctgcgggaagagaatgaggctggatcctcaaaatcacaggaggaagcaggcccagacctcagaggcagaaagagaaagaaaccagagcttagagtcaggaggaggaaaccagaccccggagccacaaggagagggctggatccccggctcagagggaagaggtcggatccccagctgagagggaggagggtcccggaccctaggagtgggaaggaaaggctcggatcccctgatccccaggaggaggggacccggctgcctcccggttggggccgcgcgagggcggggcgcggaaggatccgggagggccgtgctccgccacccagtatatatctgtccccagtccccggggccgcctcattccctgtcctcggatcacagtctcttctcactacagtgtcgccgcctctgcctgcgtagccccggccatggctctgtagcctcgacccctttgtgcccccggcccgtctccgcgctcaccacgcctgcgctctccgctcccaccttctttcttcagccgaggccgccgccgcctctccttgctgcagccatggagtcttccactttcgccttggtgcctgtcttcgcccacctgagcatcctccagagcctcgtgccagctgctggtgcagcctctcctgttgccatcagtgcccagcacctgtgctacagccatgtcactcctggcgaccctggggctggagctggacagggccctgctcccagctagtgggctgggatggctcgtagactatgggaaactccccccggcccctgcccccctggctccctatgaggtccttgggggagccctggagggcgggcttccagtggggggagagcccctggcaggtgatggcttctctgactggatgactgagcgagttgatttcacagctctcctccctctggagcctcccctaccccccggcaccctcccccaaccttccccaaccccacctgacctggaagctatggcctccctcctcaagaaggagctggaacagatggaagacttcttcctagatgccccgcccctcccaccaccctccccgccgccactaccaccaccaccactaccaccagccccctccctccccctgtccctcccctcctttgacctcccccagccccctgtcttggatactctggacttgctggccatctactgccgcaacgaggccgggcaggaggaagtggggatgccgcctctgcccccgccacagcagccccctcctccttctccacctcaaccttctcgcctggccccctacccacatcctgccaccacccgaggggaccgcaagcaaaagaagagagaccagaacaagtcggcggctctgaggtaccgccagcggaagcgggcagagggtgaggccctggagggcgagtgccaggggctggaggcacggaatcgcgagctgaaggaacgggcagagtccgtggagcgcgagatccagtacgtcaaggacctgctcatcgaggtttacaaggcccggagccagaggacccgtagctgctagaagggcaggggtgtggcttctgggggctggtcttcagctctggcgccttcatccccctgcctctaccttcattccaaacccctctcggccgggtgcagtggcttatgcttgtaatcccagcactttgggaggccaaggcaggaggatcgtttgaggccaggaggtcaataccagcctgggcaacatagtaagaccctgtctctattaaaaaaaaaaaatcaacccttcttccccaccaaaccacccaactcctctctactcttatccttttatcctctgtctctgcttatcacctctcttgcgtatttctggatctccttccctcctttctcgtccaaatcatgaaatgtttggccttagtcaatgtctatgcccgtcacataacagccgaggcaccgaggcccacagggaagcagctgggagcttggaaacctggtctcttgaatttcaaacctggtttcttacaggtggttgtctggggtgggtggagtggcgacaggatagagctgaaggactatgcaaatgaggaagtaagtcagggcgggctttgagaaggggacccatatcctacaggcaaaaagcaggctaggtgaccttgggacactacgctaagggagggaggctaaaggcggccaggtttgcagtgcgggaagatgagcaggccagtgggaggaggggcagggcagggctgtagttggtgactgggtgttcattttagctctaagaaaaaaaatgcccccgatcgggaatcagagcggcgccgagggcgaccagatcaacgccagcaagaactaggagtacgcgggaaaaatgttcgttggtggcctgagctgggatatt

SEQ ID NO: 402139 - DNA, 2437 bp, Homo sapiens
tatgagttgagctctgtgcataaggcttgccagacatcgtcttatttgagtctcataaacccaccaggcgagttgatttttcttattttacagatagggaaatgaagtaagagaacttaagttatttgcccgaggccatcctggcaggtctgtatttgggagagtgctgtgactcatgctggactctaacccacgagggtttctcagagtcagcagctgggggatgaagaagtgaaaagtgactggcaggaaattctgcaagcaaggaaagggaaagagaaatgaactggtgcaggtctgcgggaagagaatgaggctggatcctcaaaatcacaggaggaagcaggcccagacctcagaggcagaaagagaaagaaaccagagcttagagtcaggaggaggaaaccagaccccggagccacaaggagagggctggatccccggctcagagggaagagctcactacagtgtcgccgcctctgcctgcgtagccccggccatggctctgtagcctcgacccctttgtgcccccggcccgtctccgcgctcaccacgcctgcgctctccgctcccaccttctttcttcagccgaggccgccgccgcctctccttgctgcagccatggagtcttccactttcgccttggtgcctgtcttcgcccacctgagcatcctccagagcctcgtgccagctgctggtgcagcctctcctgttgccatcagtgcccagcacctgtgctacagccatgtcactcctggcgaccctggggctggagctggacagggccctgctcccagctagtgggctgggatggctcgtagactatgggaaactccccccggcccctgcccccctggctccctatgaggtccttgggggagccctggagggcgggcttccagtggggggagagcccctggcaggtgatggcttctctgactggatgactgagcgagttgatttcacagctctcctccctctggagcctcccctaccccccggcaccctcccccaaccttccccaaccccacctgacctggaagctatggcctccctcctcaagaaggagctggaacagatggaagacttcttcctagatgccccgcccctcccaccaccctccccgccgccactaccaccaccaccactaccaccagccccctccctccccctgtccctcccctcctttgacctcccccagccccctgtcttggatactctggacttgctggccatctactgccgcaacgaggccgggcaggaggaagtggggatgccgcctctgcccccgccacagcagccccctcctccttctccacctcaaccttctcgcctggccccctacccacatcctgccaccacccgaggggaccgcaagcaaaagaagagagaccagaacaagtcggcggctctgaggtaccgccagcggaagcgggcagagggtgaggccctggagggcgagtgccaggggctggaggcacggaatcgcgagctgaaggaacgggcagagtccgtggagcgcgagatccagtacgtcaaggacctgctcatcgaggtttacaaggcccggagccagaggacccgtagctgctagaagggcaggggtgtggcttctgggggctggtcttcagctctggcgccttcatccccctgcctctaccttcattccaaacccctctcggccgggtgcagtggcttatgcttgtaatcccagcactttgggaggccaaggcaggaggatcgtttgaggccaggaggtcaataccagcctgggcaacatagtaagaccctgtctctattaaaaaaaaaaaatcaacccttcttccccaccaaaccacccaactcctctctactcttatccttttatcctctgtctctgcttatcacctctcttgcgtatttctggatctccttccctcctttctcgtccaaatcatgaaatgtttggccttagtcaatgtctatgcccgtcacataacagccgaggcaccgaggcccacagggaagcagctgggagcttggaaacctggtctcttgaatttcaaacctggtttcttacaggtggttgtctggggtgggtggagtggcgacaggatagagctgaaggactatgcaaatgaggaagtaagtcagggcgggctttgagaaggggacccatatcctacaggcaaaaagcaggctaggtgaccttgggacactacgctaagggagggaggctaaaggcggccaggtttgcagtgcgggaagatgagcaggccagtgggaggaggggcagggcagggctgtagttggtgactgggtgttcattttagctctaagaaaaaaaatcagtgtttcgtgaaggtgttggagaggggctgtgtctgggtgagggatggcggggtactgatttttttgggaggttatgagcaaaaataaaacgaaacatttcctctgg

SEQ ID NO: 402140 - DNA, 2030 bp, Homo sapiens
  misc_feature (3)..(3): n is a, c, g, or t
acnccgcctaaatacgccccccccttcattacccttaccggaattcccgggctcactacagtgtcgccgcctctgcctgcgtagccccggccatggctctgtagcctcgacccctttgtgcccccggcccgtctccgcgctcaccacgcctgcgctctccgctcccaccttctttcttcagccgaggccgccgccgcctctccttgctgcagccatggagtcttccactttcgccttggtgcctgtcttcgcccacctgagcatcctccagagcctcgtgccagctgctggtgcagcctctcctgttgccatcagtgcccagcacctgtgctacagccatgtcactcctggcgaccctggggctggagctggacagggccctgctcccagctagtgggctgggatggctcgtagactatgggaaactccccccggcccctgcccccctggctccctatgaggtccttgggggagccctggagggcgggcttccagtggggggagagcccctggcaggtgatggcttctctgactggatgactgagcgagttgatttcacagctctcctccctctggagcctcccctaccccccggcaccctcccccaaccttccccaaccccacctgacctggaagctatggcctccctcctcaagaaggagctggaacagatggaagacttcttcctagatgccccgcccctcccaccaccctccccgccgccactaccaccaccaccactaccaccagccccctccctccccctgtccctcccctcctttgacctcccccagccccctgtcttggatactctggacttgctggccatctactgccgcaacgaggccgggcaggaggaagtggggatgccgcctctgcccccgccacagcagccccctcctccttctccacctcaaccttctcgcctggccccctacccacatcctgccaccacccgaggggaccgcaagcaaaagaagagagaccagaacaagtcggcggctctgaggtaccgccagcggaagcgggcagagggtgaggccctggagggcgagtgccaggggctggaggcacggaatcgcgagctgaaggaacgggcagagtccgtggagcgcgagatccagtacgtcaaggacctgctcatcgaggtttacaaggcccggagccagaggacccgtagctgctagaagggcaggggtgtggcttctgggggctggtcttcagctctggcgccttcatccccctgcctctaccttcattccaaacccctctcggccgggtgcagtggcttatgcttgtaatcccagcactttgggaggccaaggcaggaggatcgtttgaggccaggaggtcaataccagcctgggcaacatagtaagaccctgtctctattaaaaaaaaaaaatcaacccttcttccccaccaaaccacccaactcctctctactcttatccttttatcctctgtctctgcttatcacctctcttgcgtatttctggatctccttccctcctttctcgtccaaatcatgaaatgtttggccttagtcaatgtctatgcccgtcacataacagccgaggcaccgaggcccacagggaagcagctgggagcttggaaacctggtctcttgaatttcaaacctggtttcttacaggtggttgtctggggtgggtggagtggcgacaggatagagctgaaggactatgcaaatgaggaagtaagtcagggcgggctttgagaaggggacccatatcctacaggcaaaaagcaggctaggtgaccttgggacactacgctaagggagggaggctaaaggcggccaggtttgcagtgcgggaagatgagcaggccagtgggaggaggggcagggcagggctgtagttggtgactgggtgttcattttagctctaagaaaaaaaatcagtgtttcgtgaaggtgttggagaggggctgtgtctgggtgagggatggcggggtactgatttttttgggaggttatgagcaaaaataaaacgaaacatttcctctgg

SEQ ID NO: 402141 - DNA, 2012 bp, Homo sapiens
  misc_feature (23)..(23): n is a, c, g, or t
caactacggctaggtacgaggcngggtggtaccctcactacagtgtcgccgcctctgcctgcgtagccccggccatggctctgtagcctcgacccctttgtgcccccggcccgtctccgcgctcaccacgcctgcgctctccgctcccaccttctttcttcagccgaggccgccgccgcctctccttgctgcagccatggagtcttccactttcgccttggtgcctgtcttcgcccacctgagcatcctccagagcctcgtgccagctgctggtgcagcctctcctgttgccatcagtgcccagcacctgtgctacagccatgtcactcctggcgaccctggggctggagctggacagggccctgctcccagctagtgggctgggatggctcgtagactatgggaaactccccccggcccctgcccccctggctccctatgaggtccttgggggagccctggagggcgggcttccagtggggggagagcccctggcaggtgatggcttctctgactggatgactgagcgagttgatttcacagctctcctccctctggagcctcccctaccccccggcaccctcccccaaccttccccaaccccacctgacctggaagctatggcctccctcctcaagaaggagctggaacagatggaagacttcttcctagatgccccgcccctcccaccaccctccccgccgccactaccaccaccaccactaccaccagccccctccctccccctgtccctcccctcctttgacctcccccagccccctgtcttggatactctggacttgctggccatctactgccgcaacgaggccgggcaggaggaagtggggatgccgcctctgcccccgccacagcagccccctcctccttctccacctcaaccttctcgcctggccccctacccacatcctgccaccacccgaggggaccgcaagcaaaagaagagagaccagaacaagtcggcggctctgaggtaccgccagcggaagcgggcagagggtgaggccctggagggcgagtgccaggggctggaggcacggaatcgcgagctgaaggaacgggcagagtccgtggagcgcgagatccagtacgtcaaggacctgctcatcgaggtttacaaggcccggagccagaggacccgtagctgctagaagggcaggggtgtggcttctgggggctggtcttcagctctggcgccttcatccccctgcctctaccttcattccaaacccctctcggccgggtgcagtggcttatgcttgtaatcccagcactttgggaggccaaggcaggaggatcgtttgaggccaggaggtcaataccagcctgggcaacatagtaagaccctgtctctattaaaaaaaaaaaatcaacccttcttccccaccaaaccacccaactcctctctactcttatccttttatcctctgtctctgcttatcacctctcttgcgtatttctggatctccttccctcctttctcgtccaaatcatgaaatgtttggccttagtcaatgtctatgcccgtcacataacagccgaggcaccgaggcccacagggaagcagctgggagcttggaaacctggtctcttgaatttcaaacctggtttcttacaggtggttgtctggggtgggtggagtggcgacaggatagagctgaaggactatgcaaatgaggaagtaagtcagggcgggctttgagaaggggacccatatcctacaggcaaaaagcaggctaggtgaccttgggacactacgctaagggagggaggctaaaggcggccaggtttgcagtgcgggaagatgagcaggccagtgggaggaggggcagggcagggctgtagttggtgactgggtgttcattttagctctaagaaaaaaaatcagtgtttcgtgaaggtgttggagaggggctgtgtctgggtgagggatggcggggtactgatttttttgggaggttatgagcaaaaataaaacgaaacatttcctctgg

SEQ ID NO: 402142 - DNA, 2018 bp, Homo sapiens
ggtctcttgagattcaaagggtttgtcacgaaacaatgactcactacagtgtcgccgcctctgcctgcgtagccccggccatggctctgtagcctcgacccctttgtgcccccggcccgtctccgcgctcaccacgcctgcgctctccgctcccaccttctttcttcagccgaggccgccgccgcctctccttgctgcagccatggagtcttccactttcgccttggtgcctgtcttcgcccacctgagcatcctccagagcctcgtgccagctgctggtgcagcctctcctgttgccatcagtgcccagcacctgtgctacagccatgtcactcctggcgaccctggggctggagctggacagggccctgctcccagctagtgggctgggatggctcgtagactatgggaaactccccccggcccctgcccccctggctccctatgaggtccttgggggagccctggagggcgggcttccagtggggggagagcccctggcaggtgatggcttctctgactggatgactgagcgagttgatttcacagctctcctccctctggagcctcccctaccccccggcaccctcccccaaccttccccaaccccacctgacctggaagctatggcctccctcctcaagaaggagctggaacagatggaagacttcttcctagatgccccgcccctcccaccaccctccccgccgccactaccaccaccaccactaccaccagccccctccctccccctgtccctcccctcctttgacctcccccagccccctgtcttggatactctggacttgctggccatctactgccgcaacgaggccgggcaggaggaagtggggatgccgcctctgcccccgccacagcagccccctcctccttctccacctcaaccttctcgcctggccccctacccacatcctgccaccacccgaggggaccgcaagcaaaagaagagagaccagaacaagtcggcggctctgaggtaccgccagcggaagcgggcagagggtgaggccctggagggcgagtgccaggggctggaggcacggaatcgcgagctgaaggaacgggcagagtccgtggagcgcgagatccagtacgtcaaggacctgctcatcgaggtttacaaggcccggagccagaggacccgtagctgctagaagggcaggggtgtggcttctgggggctggtcttcagctctggcgccttcatccccctgcctctaccttcattccaaacccctctcggccgggtgcagtggcttatgcttgtaatcccagcactttgggaggccaaggcaggaggatcgtttgaggccaggaggtcaataccagcctgggcaacatagtaagaccctgtctctattaaaaaaaaaaaatcaacccttcttccccaccaaaccacccaactcctctctactcttatccttttatcctctgtctctgcttatcacctctcttgcgtatttctggatctccttccctcctttctcgtccaaatcatgaaatgtttggccttagtcaatgtctatgcccgtcacataacagccgaggcaccgaggcccacagggaagcagctgggagcttggaaacctggtctcttgaatttcaaacctggtttcttacaggtggttgtctggggtgggtggagtggcgacaggatagagctgaaggactatgcaaatgaggaagtaagtcagggcgggctttgagaaggggacccatatcctacaggcaaaaagcaggctaggtgaccttgggacactacgctaagggagggaggctaaaggcggccaggtttgcagtgcgggaagatgagcaggccagtgggaggaggggcagggcagggctgtagttggtgactgggtgttcattttagctctaagaaaaaaaatcagtgtttcgtgaaggtgttggagaggggctgtgtctgggtgagggatggcggggtactgatttttttgggaggttatgagcaaaaataaaacgaaacatttcctctgg

SEQ ID NO: 402143 - DNA, 2030 bp, Homo sapiens
gaaaaaaactacgctagggtacgagccgggtgaaatcggcgaggcggtcacctcactacagtgtcgccgcctctgcctgcgtagccccggccatggctctgtagcctcgacccctttgtgcccccggcccgtctccgcgctcaccacgcctgcgctctccgctcccaccttctttcttcagccgaggccgccgccgcctctccttgctgcagccatggagtcttccactttcgccttggtgcctgtcttcgcccacctgagcatcctccagagcctcgtgccagctgctggtgcagcctctcctgttgccatcagtgcccagcacctgtgctacagccatgtcactcctggcgaccctggggctggagctggacagggccctgctcccagctagtgggctgggatggctcgtagactatgggaaactccccccggcccctgcccccctggctccctatgaggtccttgggggagccctggagggcgggcttccagtggggggagagcccctggcaggtgatggcttctctgactggatgactgagcgagttgatttcacagctctcctccctctggagcctcccctaccccccggcaccctcccccaaccttccccaaccccacctgacctggaagctatggcctccctcctcaagaaggagctggaacagatggaagacttcttcctagatgccccgcccctcccaccaccctccccgccgccactaccaccaccaccactaccaccagccccctccctccccctgtccctcccctcctttgacctcccccagccccctgtcttggatactctggacttgctggccatctactgccgcaacgaggccgggcaggaggaagtggggatgccgcctctgcccccgccacagcagccccctcctccttctccacctcaaccttctcgcctggccccctacccacatcctgccaccacccgaggggaccgcaagcaaaagaagagagaccagaacaagtcggcggctctgaggtaccgccagcggaagcgggcagagggtgaggccctggagggcgagtgccaggggctggaggcacggaatcgcgagctgaaggaacgggcagagtccgtggagcgcgagatccagtacgtcaaggacctgctcatcgaggtttacaaggcccggagccagaggacccgtagctgctagaagggcaggggtgtggcttctgggggctggtcttcagctctggcgccttcatccccctgcctctaccttcattccaaacccctctcggccgggtgcagtggcttatgcttgtaatcccagcactttgggaggccaaggcaggaggatcgtttgaggccaggaggtcaataccagcctgggcaacatagtaagaccctgtctctattaaaaaaaaaaaatcaacccttcttccccaccaaaccacccaactcctctctactcttatccttttatcctctgtctctgcttatcacctctcttgcgtatttctggatctccttccctcctttctcgtccaaatcatgaaatgtttggccttagtcaatgtctatgcccgtcacataacagccgaggcaccgaggcccacagggaagcagctgggagcttggaaacctggtctcttgaatttcaaacctggtttcttacaggtggttgtctggggtgggtggagtggcgacaggatagagctgaaggactatgcaaatgaggaagtaagtcagggcgggctttgagaaggggacccatatcctacaggcaaaaagcaggctaggtgaccttgggacactacgctaagggagggaggctaaaggcggccaggtttgcagtgcgggaagatgagcaggccagtgggaggaggggcagggcagggctgtagttggtgactgggtgttcattttagctctaagaaaaaaaatcagtgtttcgtgaaggtgttggagaggggctgtgtctgggtgagggatggcggggtactgatttttttgggaggttatgagcaaaaataaaacgaaacatttcctctgg

SEQ ID NO: 402144 - DNA, 2029 bp, Homo sapiens
  misc_feature (13)..(13): n is a, c, g, or t
  misc_feature (16)..(16): n is a, c, g, or t
  misc_feature (24)..(24): n is a, c, g, or t
ttggctggttcgnccncgagttantgctatcgtcgacccacgcgctccgcctcactacagtgtcgccgcctctgcctgcgtagccccggccatggctctgtagcctcgacccctttgtgcccccggcccgtctccgcgctcaccacgcctgcgctctccgctcccaccttctttcttcagccgaggccgccgccgcctctccttgctgcagccatggagtcttccactttcgccttggtgcctgtcttcgcccacctgagcatcctccagagcctcgtgccagctgctggtgcagcctctcctgttgccatcagtgcccagcacctgtgctacagccatgtcactcctggcgaccctggggctggagctggacagggccctgctcccagctagtgggctgggatggctcgtagactatgggaaactccccccggcccctgcccccctggctccctatgaggtccttgggggagccctggagggcgggcttccagtggggggagagcccctggcaggtgatggcttctctgactggatgactgagcgagttgatttcacagctctcctccctctggagcctcccctaccccccggcaccctcccccaaccttccccaaccccacctgacctggaagctatggcctccctcctcaagaaggagctggaacagatggaagacttcttcctagatgccccgcccctcccaccaccctccccgccgccactaccaccaccaccactaccaccagccccctccctccccctgtccctcccctcctttgacctcccccagccccctgtcttggatactctggacttgctggccatctactgccgcaacgaggccgggcaggaggaagtggggatgccgcctctgcccccgccacagcagccccctcctccttctccacctcaaccttctcgcctggccccctacccacatcctgccaccacccgaggggaccgcaagcaaaagaagagagaccagaacaagtcggcggctctgaggtaccgccagcggaagcgggcagagggtgaggccctggagggcgagtgccaggggctggaggcacggaatcgcgagctgaaggaacgggcagagtccgtggagcgcgagatccagtacgtcaaggacctgctcatcgaggtttacaaggcccggagccagaggacccgtagctgctagaagggcaggggtgtggcttctgggggctggtcttcagctctggcgccttcatccccctgcctctaccttcattccaaacccctctcggccgggtgcagtggcttatgcttgtaatcccagcactttgggaggccaaggcaggaggatcgtttgaggccaggaggtcaataccagcctgggcaacatagtaagaccctgtctctattaaaaaaaaaaaatcaacccttcttccccaccaaaccacccaactcctctctactcttatccttttatcctctgtctctgcttatcacctctcttgcgtatttctggatctccttccctcctttctcgtccaaatcatgaaatgtttggccttagtcaatgtctatgcccgtcacataacagccgaggcaccgaggcccacagggaagcagctgggagcttggaaacctggtctcttgaatttcaaacctggtttcttacaggtggttgtctggggtgggtggagtggcgacaggatagagctgaaggactatgcaaatgaggaagtaagtcagggcgggctttgagaaggggacccatatcctacaggcaaaaagcaggctaggtgaccttgggacactacgctaagggagggaggctaaaggcggccaggtttgcagtgcgggaagatgagcaggccagtgggaggaggggcagggcagggctgtagttggtgactgggtgttcattttagctctaagaaaaaaaatcagtgtttcgtgaaggtgttggagaggggctgtgtctgggtgagggatggcggggtactgatttttttgggaggttatgagcaaaaataaaacgaaacatttcctctgg

SEQ ID NO: 402145 - DNA, 2718 bp, Homo sapiens
tatgagttgagctctgtgcataaggcttgccagacatcgtcttatttgagtctcataaacccaccaggcgagttgatttttcttattttacagatagggaaatgaagtaagagaacttaagttatttgcccgaggccatcctggcaggtctgtatttgggagagtgctgtgactcatgctggactctaacccacgagggtttctcagagtcagcagctgggggatgaagaagtgaaaagtgactggcaggaaattctgcaagcaaggaaagggaaagagaaatgaactggtgcaggtctgcgggaagagaatgaggctggatcctcaaaatcacaggaggaagcaggcccagacctcagaggcagaaagagaaagaaaccagagcttagagtcaggaggaggaaaccagaccccggagccacaaggagagggctggatccccggctcagagggaagaggtcggatccccagctgagagggaggagggtcccggaccctaggagtgggaaggaaaggctcggatcccctgatccccaggaggaggggacccggctgcctcccggttggggccgcgcgagggcggggcgcggaaggatccgggagggccgtgctccgccacccagtatatatctgtccccagtccccggggccgcctcattccctgtcctcggatcacagtctcttctcactacagtgtcgccgcctctgcctgcgtagccccggccatggctctgtagcctcgacccctttgtgcccccggcccgtctccgcgctcaccacgcctgcgctctccgctcccaccttctttcttcagccgaggccgccgccgcctctccttgctgcagccatggagtcttccactttcgccttggtgcctgtcttcgcccacctgagcatcctccagagcctcgtgccagctgctggtgcagcctctcctgttgccatcagtgcccagcacctgtgctacagccatgtcactcctggcgaccctggggctggagctggacagggccctgctcccagctagtgggctgggatggctcgtagactatgggaaactccccccggcccctgcccccctggctccctatgaggtccttgggggagccctggagggcgggcttccagtggggggagagcccctggcaggtgatggcttctctgactggatgactgagcgagttgatttcacagctctcctccctctggagcctcccctaccccccggcaccctcccccaaccttccccaaccccacctgacctggaagctatggcctccctcctcaagaaggagctggaacagatggaagacttcttcctagatgccccgcccctcccaccaccctccccgccgccactaccaccaccaccactaccaccagccccctccctccccctgtccctcccctcctttgacctcccccagccccctgtcttggatactctggacttgctggccatctactgccgcaacgaggccgggcaggaggaagtggggatgccgcctctgcccccgccacagcagccccctcctccttctccacctcaaccttctcgcctggccccctacccacatcctgccaccacccgaggggaccgcaagcaaaagaagagagaccagaacaagtcggcggctctgaggtaccgccagcggaagcgggcagagggtgaggccctggagggcgagtgccaggggctggaggcacggaatcgcgagctgaaggaacgggcagagtccgtggagcgcgagatccagtacgtcaaggacctgctcatcgaggtttacaaggcccggagccagaggacccgtagctgctagaagggcaggggtgtggcttctgggggctggtcttcagctctggcgccttcatccccctgcctctaccttcattccaaacccctctcggccgggtgcagtggcttatgcttgtaatcccagcactttgggaggccaaggcaggaggatcgtttgaggccaggaggtcaataccagcctgggcaacatagtaagaccctgtctctattaaaaaaaaaaaatcaacccttcttccccaccaaaccacccaactcctctctactcttatccttttatcctctgtctctgcttatcacctctcttgcgtatttctggatctccttccctcctttctcgtccaaatcatgaaatgtttggccttagtcaatgtctatgcccgtcacataacagccgaggcaccgaggcccacagggaagcagctgggagcttggaaacctggtctcttgaatttcaaacctggtttcttacaggtggttgtctggggtgggtggagtggcgacaggatagagctgaaggactatgcaaatgaggaagtaagtcagggcgggctttgagaaggggacccatatcctacagactacgctaagggagggaggctaaaggcggccaggtttgcagtgcgggaagatgagcaggccagtgggaggaggggcagggcagggctgtagttggtgactgggtgttcattttagctctaagaaaaaaaatcagtgtttcgtgaaggtgttggagaggggctgtgtctgggtgagggatggcggggtactgatttttgttttagccataaattataatcgaacctttcccttctgaaaaaaatttaatataataacccctggggggggcacctgaacaccaaaattacccttatatggtgtatttatatgaaaatacgtagggc

SEQ ID NO: 402146 - DNA, 2608 bp, Homo sapiens
tatgagttgagctctgtgcataaggcttgccagacatcgtcttatttgagtctcataaacccaccaggcgagttgatttttcttattttacagatagggaaatgaagtaagagaacttaagttatttgcccgaggccatcctggcaggtctgtatttgggagagtgctgtgactcatgctggactctaacccacgagggtttctcagagtcagcagctgggggatgaagaagtgaaaagtgactggcaggaaattctgcaagcaaggaaagggaaagagaaatgaactggtgcaggtctgcgggaagagaatgaggctggatcctcaaaatcacaggaggaagcaggcccagacctcagaggcagaaagagaaagaaaccagagcttagagtcaggaggaggaaaccagaccccggagccacaaggagagggctggatccccggctcagagggaagaggtcggatccccagctgagagggaggagggtcccggaccctaggagtgggaaggaaaggctcggatcccctgatccccaggaggaggggacccggctgcctcccggttggggccgcgcgagggcggggcgcggaaggatccgggagggccgtgctccgccacccagtatatatctgtccccagtccccggggccgcctcattccctgtcctcggatcacagtctcttctcactacagtgtcgccgcctctgcctgcgtagccccggccatggctctgtagcctcgacccctttgtgcccccggcccgtctccgcgctcaccacgcctgcgctctccgctcccaccttctttcttcagccgaggccgccgccgcctctccttgctgcagccatggagtcttccactttcgccttggtgcctgtcttcgcccacctgagcatcctccagagcctcgtgccagctgctggtgcagcctctcctgttgccatcagtgcccagcacctgtgctacagccatgtcactcctggcgaccctggggctggagctggacagggccctgctcccagctagtgggctgggatggctcgtagactatgggaaactccccccggcccctgcccccctggctccctatgaggtccttgggggagccctggagggcgggcttccagtggggggagagcccctggcaggtgatggcttctctgactggatgactgagcgagttgatttcacagctctcctccctctggagcctcccctaccccccggcaccctcccccaaccttccccaaccccacctgacctggaagctatggcctccctcctcaagaaggagctggaacagatggaagacttcttcctagatgccccgcccctcccaccaccctccccgccgccactaccaccaccaccactaccaccagccccctccctccccctgtccctcccctcctttgacctcccccagccccctgtcttggatactctggacttgctggccatctactgccgcaacgaggccgggcaggaggaagtggggatgccgcctctgcccccgccacagcagccccctcctccttctccacctcaaccttctcgcctggccccctacccacatcctgccaccacccgaggggaccgcaagcaaaagaagagagaccagaacaagtcggcggctctgaggtaccgccagcggaagcgggcagagggtgaggccctggagggcgagtgccaggggctggaggcacggaatcgcgagctgaaggaacgggcagagtccgtggagcgcgagatccagtacgtcaaggacctgctcatcgaggtttacaaggcccggagccagaggacccgtagctgctagaagggcaggggtgtggcttctgggggctggtcttcagctctggcgccttcatccccctgcctctaccttcattccaaacccctctcggccgggtgcagtggcttatgcttgtaatcccagcactttgggaggccaaggcaggaggatcgtttgaggccaggaggtcaataccagcctgggcaacatagtaagaccctgtctctattaaaaaaaaaaaatcaacccttcttccccaccaaaccacccaactcctctctactcttatccttttatcctctgtctctgcttatcacctctcttgcgtatttctggatctccttccctcctttctcgtccaaatcatgaaatgtttggccttagtcaatgtctatgcccgtcacataacagccgaggcaccgaggcccacagggaagcagctgggagcttggaaacctggtctcttgaatttcaaacctggtttcttacaggtggttgtctggggtgggtggagtggcgacaggatagagctgaaggactatgcaaatgaggaagtaagtcagggcgggctttgagaaggggacccatatcctacaggcggccaggtttgcagtgcgggaagatgagcaggccagtgggaggaggggcagggcagggctgtagttggtgactgggtgttcattttagctctaagaaaaaaaatcagtgtttcgtgaaggtgttggagaggggctgtgtctgggtgagggatggcggggtactgatttttttgggaggttatgagcaaaaataaaacgaaacatttcctctgg

SEQ ID NO: 402147 - DNA, 2235 bp, Homo sapiens
tatgagttgagctctgtgcataaggcttgccagacatcgtcttatttgagtctcataaacccaccaggcgagttgatttttcttattttacagatagggaaatgaagtaagagaacttaagttatttgcccgaggccatcctggcaggtctgtatttgggagagtgctgtgactcatgctggactctaacccacgagggtttctcagagtcagcagctgggggatgaagaagtgaaaagtgactggcaggaaattctgcaagcaaggaaagggaaagagaaatgaactggtgcaggtctgcgggaagagaatgaggctggatcctcaaaatcacaggaggaagcaggcccagacctcagaggcagaaagagaaagaaaccagagcttagagtcaggaggaggaaaccagaccccggagccacaaggagagggctggatccccggctcagagggaagaggtcggatccccagctgagagggaggagggtcccggaccctaggagtgggaaggaaaggctcggatcccctgatccccaggaggaggggacccggctgcctcccggttggggccgcgcgagggcggggcgcggaaggatccgggagggccgtgctccgccacccagtatatatctgtccccagtccccggggccgcctcattccctgtcctcggatcacagtctcttctcactacagtgtcgccgcctctgcctgcgtagccccggccatggctctgtagcctcgacccctttgtgcccccggcccgtctccgcgctcaccacgcctgcgctctccgctcccaccttctttcttcagccgaggccgccgccgcctctccttgctgcagccatggagtcttccactttcgccttggtgcctgtcttcgcccacctgagcatcctccagagcctcgtgccagctgctggtgcagcctctcctgttgccatcagtgcccagcacctgtgctacagccatgtcactcctggcgaccctggggctggagctggacagggccctgctcccagctagtgggctgggatggctcgtagactatgggaaactccccccggcccctgcccccctggctccctatgaggtccttgggggagccctggagggcgggcttccagtggggggagagcccctggcaggtgatggcttctctgactggatgactgagcgagttgatttcacagctctcctccctctggagcctcccctaccccccggcaccctcccccaaccttccccaaccccacctgacctggaagctatggcctccctcctcaagaaggagctggaacagatggaagacttcttcctagatgccccgcccctcccaccaccctccccgccgccactaccaccaccaccactaccaccagccccctccctccccctgtccctcccctcctttgacctcccccagccccctgtcttggatactctggacttgctggccatctactgccgcaacgaggccgggcaggaggaagtggggatgccgcctctgcccccgccacagcagccccctcctccttctccacctcaaccttctcgcctggccccctacccacatcctgccaccacccgaggggaccgcaagcaaaagaagagagaccagaacaagtcggcggctctgaggtaccgccagcggaagcgggcagagggtgaggccctggagggcgagtgccaggggctggaggcacggaatcgcgagctgaaggaacgggcagagtccgtggagcgcgagatccagtacgtcaaggacctgctcatcgaggtttacaaggcccggagccagaggacccgtagctgctagaagggcaggggtgtggcttctgggggctggtcttcagctctggcgccttcatccccctgcctctaccttcattccaaacccctctcggccgggtgcagtggcttatgcttgtaatcccagcactttgggaggccaaggcaggaggatcgtttgaggccaggaggtcaataccagcctgggcaacatagtaagaccctgtctctattaaaaaaaaaaaaaaaaaactcgagactagtgcggccgctaagtaagtaagacgtcgagctctaagtaagtaagacgtcgagctctaagtaagtaagacgtcgagctctaagtaagtaagacgtcgagctctaagtaagtaagacgtcgagctctaagtaagtaagacgtcgagctctaagtaagtaagacgtcgagctctaagtaagta

SEQ ID NO: 402148 - DNA, 2319 bp, Homo sapiens
tatgagttgagctctgtgcataaggcttgccagacatcgtcttatttgagtctcataaacccaccaggcgagttgatttttcttattttacagatagggaaatgaagtaagagaacttaagttatttgcccgaggccatcctggcaggtctgtatttgggagagtgctgtgactcatgctggactctaacccacgagggtttctcagagtcagcagctgggggatgaagaagtgaaaagtgactggcaggaaattctgcaagcaaggaaagggaaagagaaatgaactggtgcaggtctgcgggaagagaatgaggctggatcctcaaaatcacaggaggaagcaggcccagacctcagaggcagaaagagaaagaaaccagagcttagagtcaggaggaggaaaccagaccccggagccacaaggagagggctggatccccggctcagagggaagaggtcggatccccagctgagagggaggagggtcccggaccctaggagtgggaaggaaaggctcggatcccctgatccccaggaggaggggacccggctgcctcccggttggggccgcgcgagggcggggcgcggaaggatccgggagggccgtgctccgccacccagtatatatctgtccccagtccccggggccgcctcattccctgtcctcggatcacagtctcttctcactacagtgtcgccgcctctgcctgcgtagccccggccatggctctgtagcctcgacccctttgtgcccccggcccgtctccgcgctcaccacgcctgcgctctccgctcccaccttctttcttcagccgaggccgccgccgcctctccttgctgcagccatggagtcttccactttcgccttggtgcctgtcttcgcccacctgagcatcctccagagcctcgtgccagctgctggtgcagcctctcctgttgccatcagtgcccagcacctgtgctacagccatgtcactcctggcgaccctggggctggagctggacagggccctgctcccagctagtgggctgggatggctcgtagactatgggaaactccccccggcccctgcccccctggctccctatgaggtccttgggggagccctggagggcgggcttccagtggggggagagcccctggcaggtgatggcttctctgactggatgactgagcgagttgatttcacagctctcctccctctggagcctcccctaccccccggcaccctcccccaaccttccccaaccccacctgacctggaagctatggcctccctcctcaagaaggagctggaacagatggaagacttcttcctagatgccccgcccctcccaccaccctccccgccgccactaccaccaccaccactaccaccagccccctccctccccctgtccctcccctcctttgacctcccccagccccctgtcttggatactctggacttgctggccatctactgccgcaacgaggccgggcaggaggaagtggggatgccgcctctgcccccgccacagcagccccctcctccttctccacctcaaccttctcgcctggccccctacccacatcctgccaccacccgaggggaccgcaagcaaaagaagagagaccagaacaagtcggcggctctgaggtaccgccagcggaagcgggcagagggtgaggccctggagggcgagtgccaggggctggaggcacggaatcgcgagctgaaggaacgggcagagtccgtggagcgcgagatccagtacgtcaaggacctgctcatcgaggtttacaaggcccggagccagaggacccgtagctgctagaagggcaggggtgtggcttctgggggctggtcttcagctctggcgccttcatccccctgcctctaccttcattccaaacccctctcggccgggtgcagtggcttatgcttgtaatcccagcactttgggaggccaaggcaggaggatcgtttgaggccaggaggtcaataccagcctgggcaacatagtaagaccctgtctctattaaaaaaaaaaaagccgggcgcggtggctcacgcctgtaatcccagcactttgggaggccaaggtgggaggatcacttgagtccaggatttcgagaccatcttgggcaacatggcgaaaccctgtctctacaaacaatacaaaaattagctgggtgtggtggtgtatgcctgtaatcccagctacttgggaggctgaagtaggagaatcacttgaacccagggggcagaggttgcagtgaaccaagattgtgccattgcatgctagcctgggtgacagagcaagactctgtctt

SEQ ID NO: 402149 - DNA, 2828 bp, Homo sapiens
tatgagttgagctctgtgcataaggcttgccagacatcgtcttatttgagtctcataaacccaccaggcgagttgatttttcttattttacagatagggaaatgaagtaagagaacttaagttatttgcccgaggccatcctggcaggtctgtatttgggagagtgctgtgactcatgctggactctaacccacgagggtttctcagagtcagcagctgggggatgaagaagtgaaaagtgactggcaggaaattctgcaagcaaggaaagggaaagagaaatgaactggtgcaggtctgcgggaagagaatgaggctggatcctcaaaatcacaggaggaagcaggcccagacctcagaggcagaaagagaaagaaaccagagcttagagtcaggaggaggaaaccagaccccggagccacaaggagagggctggatccccggctcagagggaagaggtcggatccccagctgagagggaggagggtcccggaccctaggagtgggaaggaaaggctcggatcccctgatccccaggaggaggggacccggctgcctcccggttggggccgcgcgagggcggggcgcggaaggatccgggagggccgtgctccgccacccagtatatatctgtccccagtccccggggccgcctcattccctgtcctcggatcacagtctcttctcactacagtgtcgccgcctctgcctgcgtagccccggccatggctctgtagcctcgacccctttgtgcccccggcccgtctccgcgctcaccacgcctgcgctctccgctcccaccttctttcttcagccgaggccgccgccgcctctccttgctgcagccatggatagcccaccagtgccccgtagtgaaagagctgcggaccctgaatggccgcacatgcgcattgatccccaagagggcggaggtgtaaaggcaattggaccgctcgggcgacgtagcatgcgccttggccctcggcgcagagccgcgtgtggacgggtggcgttcgggtcttccactttcgccttggtgcctgtcttcgcccacctgagcatcctccagagcctcgtgccagctgctggtgcagcctctcctgttgccatcagtgcccagcacctgtgctacagccatgtcactcctggcgaccctggggctggagctggacagggccctgctcccagctagtgggctgggatggctcgtagactatgggaaactccccccggcccctgcccccctggctccctatgaggtccttgggggagccctggagggcgggcttccagtggggggagagcccctggcaggtgatggcttctctgactggatgactgagcgagttgatttcacagctctcctccctctggagcctcccctaccccccggcaccctcccccaaccttccccaaccccacctgacctggaagctatggcctccctcctcaagaaggagctggaacagatggaagacttcttcctagatgccccgcccctcccaccaccctccccgccgccactaccaccaccaccactaccaccagccccctccctccccctgtccctcccctcctttgacctcccccagccccctgtcttggatactctggacttgctggccatctactgccgcaacgaggccgggcaggaggaagtggggatgccgcctctgcccccgccacagcagccccctcctccttctccacctcaaccttctcgcctggccccctacccacatcctgccaccacccgaggggaccgcaagcaaaagaagagagaccagaacaagtcggcggctctgaggtaccgccagcggaagcgggcagagggtgaggccctggagggcgagtgccaggggctggaggcacggaatcgcgagctgaaggaacgggcagagtccgtggagcgcgagatccagtacgtcaaggacctgctcatcgaggtttacaaggcccggagccagaggacccgtagctgctagaagggcaggggtgtggcttctgggggctggtcttcagctctggcgccttcatccccctgcctctaccttcattccaaacccctctcggccgggtgcagtggcttatgcttgtaatcccagcactttgggaggccaaggcaggaggatcgtttgaggccaggaggtcaataccagcctgggcaacatagtaagaccctgtctctattaaaaaaaaaaaatcaacccttcttccccaccaaaccacccaactcctctctactcttatccttttatcctctgtctctgcttatcacctctcttgcgtatttctggatctccttccctcctttctcgtccaaatcatgaaatgtttggccttagtcaatgtctatgcccgtcacataacagccgaggcaccgaggcccacagggaagcagctgggagcttggaaacctggtctcttgaatttcaaacctggtttcttacaggtggttgtctggggtgggtggagtggcgacaggatagagctgaaggactatgcaaatgaggaagtaagtcagggcgggctttgagaaggggacccatatcctacaggcaaaaagcaggctaggtgaccttgggacactacgctaagggagggaggctaaaggcggccaggtttgcagtgcgggaagatgagcaggccagtgggaggaggggcagggcagggctgtagttggtgactgggtgttcattttagctctaagaaaaaaaatcagtgtttcgtgaaggtgttggagaggggctgtgtctgggtgagggatggcggggtactgatttttttgggaggttatgagcaaaaataaaacgaaacatttcctctgg

SEQ ID NO: 402150 - DNA, 1434 bp, Homo sapiens
ttatcctctgtctctgcttatcacctctctgcgtatttctggatctcctccctcctcaagaaggagctggaacagatggaagacttcttcctagatgccccgcccctcccaccaccctccccgccgccactaccaccaccaccactaccaccagccccctccctccccctgtccctcccctcctttgacctcccccagccccctgtcttggatactctggacttgctggccatctactgccgcaacgaggccgggcaggaggaagtggggatgccgcctctgcccccgccacagcagccccctcctccttctccacctcaaccttctcgcctggccccctacccacatcctgccaccacccgaggggaccgcaagcaaaagaagagagaccagaacaagtcggcggctctgaggtaccgccagcggaagcgggcagagggtgaggccctggagggcgagtgccaggggctggaggcacggaatcgcgagctgaaggaacgggcagagtccgtggagcgcgagatccagtacgtcaaggacctgctcatcgaggtttacaaggcccggagccagaggacccgtagctgctagaagggcaggggtgtggcttctgggggctggtcttcagctctggcgccttcatccccctgcctctaccttcattccaaacccctctcggccgggtgcagtggcttatgcttgtaatcccagcactttgggaggccaaggcaggaggatcgtttgaggccaggaggtcaataccagcctgggcaacatagtaagaccctgtctctattaaaaaaaaaaaatcaacccttcttccccaccaaaccacccaactcctctctactcttatccttttatcctctgtctctgcttatcacctctcttgcgtatttctggatctccttccctcctttctcgtccaaatcatgaaatgtttggccttagtcaatgtctatgcccgtcacataacagccgaggcaccgaggcccacagggaagcagctgggagcttggaaacctggtctcttgaatttcaaacctggtttcttacaggtggttgtctggggtgggtggagtggcgacaggatagagctgaaggactatgcaaatgaggaagtaagtcagggcgggctttgagaaggggacccatatcctacaggcaaaaagcaggctaggtgaccttgggacactacgctaagggagggaggctaaaggcggccaggtttgcagtgcgggaagatgagcaggccagtgggaggaggggcagggcagggctgtagttggtgactgggtgttcattttagctctaagaaaaaaaatcagtgtttcgtgaaggtgttggagaggggctgtgtctgggtgagggatggcggggtactgatttttttgggaggttatgagcaaaaataaaacgaaacatttcctctgg

SEQ ID NO: 402151 - DNA, 1587 bp, Homo sapiens
tatgagttgagctctgtgcataaggcttgccagacatcgtcttatttgagtctcataaacccaccaggcgagttgatttttcttattttacagatagggaaatgaagtaagagaacttaagttatttgcccgaggccatcctggcaggtctgtatttgggagagtgctgtgactcatgctggactctaacccacgagggtttctcagagtcagcagctgggggatgaagaagtgaaaagtgactggcaggaaattctgcaagcaaggaaagggaaagagaaatgaactggtgcaggtctgcgggaagagaatgaggctggatcctcaaaatcacaggaggaagcaggcccagacctcagaggcagaaagagaaagaaaccagagcttagagtcaggaggaggaaaccagaccccggagccacaaggagagggctggatccccggctcagagggaagaggtcggatccccagctgagagggaggagggtcccggaccctaggagtgggaaggaaaggctcggatcccctgatccccaggaggaggggacccggctgcctcccggttggggccgcgcgagggcggggcgcggaaggatccgggagggccgtgctccgccacccagtatatatctgtccccagtccccggggccgcctcattccctgtcctcggatcacagtctcttctcactacagtgtcgccgcctctgcctgcgtagccccggccatggctctgtagcctcgacccctttgtgcccccggcccgtctccgcgctcaccacgcctgcgctctccgctcccaccttctttcttcagccgaggccgccgccgcctctccttgctgcagccatggagtcttccactttcgccttggtgcctgtcttcgcccacctgagcatcctccagagcctcgtgccagctgctggtgcagcctctcctgttgccatcagtgcccagcacctgtgctacagccatgtcactcctggcgaccctggggctggagctggacagggccctgctcccagctagtgggctgggatggctcgtagactatgggaaactccccccggcccctgcccccctggctccctatgaggtccttgggggagccctggagggcgggcttccagtggggggagagcccctggcaggtgatggcttctctgactggatgactgagcgagttgatttcacagctctcctccctctggagcctcccctaccccccggcaccctcccccaaccttccccaaccccacctgacctggaagctatggcctccctcctcaagaaggagctggaacagatggaagacttcttcctagatgccccgcccctcccaccaccctccccgccgccactaccaccaccaccactaccaccagccccctccctccccctgtccctcccctcctttgacctcccccagccccctgtcttggatactctgggtgttcattttagctctaagaaaaaaaatcagtgtttcgtgaaggtgttggagaggggctgtgtctgggtgagggatggcggggtactgatttttttgggaggttatgagcaaaaataaaacgaaacatttcctctgg

SEQ ID NO: 402152 - DNA, 1602 bp, Homo sapiens
  misc_feature (1336)..(1336): n is a, c, g, or t
  misc_feature (1339)..(1340): n is a, c, g, or t
  misc_feature (1343)..(1343): n is a, c, g, or t
  misc_feature (1353)..(1357): n is a, c, g, or t
  misc_feature (1360)..(1360): n is a, c, g, or t
  misc_feature (1371)..(1371): n is a, c, g, or t
  misc_feature (1381)..(1381): n is a, c, g, or t
  misc_feature (1386)..(1386): n is a, c, g, or t
  misc_feature (1402)..(1402): n is a, c, g, or t
  misc_feature (1406)..(1406): n is a, c, g, or t
  misc_feature (1416)..(1417): n is a, c, g, or t
  misc_feature (1419)..(1420): n is a, c, g, or t
  misc_feature (1423)..(1423): n is a, c, g, or t
  misc_feature (1425)..(1425): n is a, c, g, or t
  misc_feature (1427)..(1427): n is a, c, g, or t
  misc_feature (1433)..(1433): n is a, c, g, or t
  misc_feature (1440)..(1440): n is a, c, g, or t
  misc_feature (1444)..(1444): n is a, c, g, or t
  misc_feature (1453)..(1453): n is a, c, g, or t
  misc_feature (1460)..(1460): n is a, c, g, or t
  misc_feature (1491)..(1491): n is a, c, g, or t
  misc_feature (1495)..(1495): n is a, c, g, or t
  misc_feature (1497)..(1497): n is a, c, g, or t
  misc_feature (1509)..(1509): n is a, c, g, or t
  misc_feature (1514)..(1514): n is a, c, g, or t
  misc_feature (1518)..(1518): n is a, c, g, or t
  misc_feature (1521)..(1522): n is a, c, g, or t
  misc_feature (1524)..(1524): n is a, c, g, or t
  misc_feature (1527)..(1527): n is a, c, g, or t
  misc_feature (1539)..(1539): n is a, c, g, or t
  misc_feature (1589)..(1589): n is a, c, g, or t
tatgagttgagctctgtgcataaggcttgccagacatcgtcttatttgagtctcataaacccaccaggcgagttgatttttcttattttacagatagggaaatgaagtaagagaacttaagttatttgcccgaggccatcctggcaggtctgtatttgggagagtgctgtgactcatgctggactctaacccacgagggtttctcagagtcagcagctgggggatgaagaagtgaaaagtgactggcaggaaattctgcaagcaaggaaagggaaagagaaatgaactggtgcaggtctgcgggaagagaatgaggctggatcctcaaaatcacaggaggaagcaggcccagacctcagaggcagaaagagaaagaaaccagagcttagagtcaggaggaggaaaccagaccccggagccacaaggagagggctggatccccggctcagagggaagaggtcggatccccagctgagagggaggagggtcccggaccctaggagtgggaaggaaaggctcggatcccctgatccccaggaggaggggacccggctgcctcccggttggggccgcgcgagggcggggcgcggaaggatccgggagggccgtgctccgccacccagtatatatctgtccccagtccccggggccgcctcattccctgtcctcggatcacagtctcttctcactacagtgtcgccgcctctgcctgcgtagccccggccatggctctgtagcctcgacccctttgtgcccccggcccgtctccgcgctcaccacgcctgcgctctccgctcccaccttctttcttcagccgaggccgccgccgcctctccttgctgcagccatggagtcttccactttcgccttggtgcctgtcttcgcccacctgagcatcctccagagcctcgtgccagctgctggtgcagcctctcctgttgccatcagtgcccagcacctgtgctacagccatgtcactcctggcgaccctggggctggagctggacagggccctgctcccagctagtgggctgggatggctcgtagactatgggaaactccccccggcccctgcccccctggctccctatgaggtccttgggggagccctggagggcgggcttccagtggggggagagcccctggcaggtgatggcttctctgactggatgactgagcgagttgatttcacagctctcctccctctggagcctcccctaccccccggcaccctcccccaaccttccccaaccccacctgacctggaagctatggcctccctcctcaagaaggagctggaacagatggaagacttcttcctagatgccccgcccgncgnnccnaaaaaaaaannnnngcngcaactaaaanaaaaccactnccccncccccccccccccctncccngggctggttnnanntcncnangccctnttttggntctntggcttctngcctctntgccgcacgggccgggccggcgcctggggtncgcnangccccgcccagnggccntctnttnngnctngcgttttgttgncctccccctctgcccccgggggcggccccccccccccccccctggggttncgtccgccggccg

SEQ ID NO: 402153 - DNA, 1318 bp, Homo sapiens
tatgagttgagctctgtgcataaggcttgccagacatcgtcttatttgagtctcataaacccaccaggcgagttgatttttcttattttacagatagggaaatgaagtaagagaacttaagttatttgcccgaggccatcctggcaggtctgtatttgggagagtgctgtgactcatgctggactctaacccacgagggtttctcagagtcagcagctgggggatgaagaagtgaaaagtgactggcaggaaattctgcaagcaaggaaagggaaagagaaatgaactggtgcaggtctgcgggaagagaatgaggctggatcctcaaaatcacaggaggaagcaggcccagacctcagaggcagaaagagaaagaaaccagagcttagagtcaggaggaggaaaccagaccccggagccacaaggagagggctggatccccggctcagagggaagaggtcggatccccagctgagagggaggagggtcccggaccctaggagtgggaaggaaaggctcggatcccctgatccccaggaggaggggacccggctgcctcccggttggggccgcgcgagggcggggcgcggaaggatccgggagggccgtgctccgccacccagtatatatctgtccccagtccccggggccgcctcattccctgtcctcggatcacagtctcttctcactacagtgtcgccgcctctgcctgcgtagccccggccatggctctgtagcctcgacccctttgtgcccccggcccgtctccgcgctcaccacgcctgcgctctccgctcccaccttctttcttcagccgaggccgccgccgcctctccttgctgcagccatggagtcttccactttcgccttggtgcctgtcttcgcccacctgagcatcctccagagcctcgtgccagctgctggtgcagcctctcctgttgccatcagtgcccagcacctgtgctacagccatgtcactcctggcgaccctggggctggagctggacagggccctgctcccagctagtgggctgggatggctcgtagactatgggaaactccccccggcccctgcccccctggctccctatgaggtccttgggggagccctggagggcgggcttccagtggggggagagcccctggcaggtgatggcttctctgactggatgactgagcgagttgatttcacagctctcctccctctggagcctcctactggaaggccctccccccataacaaagggaagaaagggaaccaaaaaagagaagagagagaaaaaggaaaagggagcaccaaaagaacaacacaggaaag

SEQ ID NO: 402154 - DNA, 1608 bp, Homo sapiens
tatgagttgagctctgtgcataaggcttgccagacatcgtcttatttgagtctcataaacccaccaggcgagttgatttttcttattttacagatagggaaatgaagtaagagaacttaagttatttgcccgaggccatcctggcaggtctgtatttgggagagtgctgtgactcatgctggactctaacccacgagggtttctcagagtcagcagctgggggatgaagaagtgaaaagtgactggcaggaaattctgcaagcaaggaaagggaaagagaaatgaactggtgcaggtctgcgggaagagaatgaggctggatcctcaaaatcacaggaggaagcaggcccagacctcagaggcagaaagagaaagaaaccagagcttagagtcaggaggaggaaaccagaccccggagccacaaggagagggctggatccccggctcagagggaagaggtcggatccccagctgagagggaggagggtcccggaccctaggagtgggaaggaaaggctcggatcccctgatccccaggaggaggggacccggctgcctcccggttggggccgcgcgagggcggggcgcggaaggatccgggagggccgtgctccgccacccagtatatatctgtccccagtccccggggccgcctcattccctgtcctcggatcacagtctcttctcactacagtgtcgccgcctctgcctgcgtagccccggccatggctctgtagcctcgacccctttgtgcccccggcccgtctccgcgctcaccacgcctgcgctctccgctcccaccttctttcttcagccgaggccgccgccgcctctccttgctgcagccatggagtcttccactttcgccttggtgcctgtcttcgcccacctgagcatcctccagagcctcgtgccagctgctggtgcagcctctcctgttgccatcagtgcccagcacctgtgctacagccatgtcactcctggcgaccctggggctggagctggacagggccctgctcccagctagtgggctgggatggctcgtagactatgggaaactccccccggcccctgcccccctggctccctatgaggtccttgggggagccctggagggcgggcttccagtggggggagagcccctggcaggtaagggcaggtggaaggtggagctggggagtggagggcaggggaagatgggggaggaagaactcatccatgtattcaataaatattgagtgcctacaatgtgccaggcactgttttaggtgctgaggatacggctgggaacaagaagaacatggtctgtgccttccagcagctcacactgtggggagtagaccagagataaattaaatgagagtgtattggaataagtcaaaaacacctagcagctgagctacaaaatgacaaaggggacctaatatagaatgggtagccagaaaaccttctccaagtaggtaacatgttgactgaggcataaatgatgggaaggaagccaggcatgatggcctgtaatcccagcactttgggaggccaagcggggagaattgctttagtccaggagttcaggacgtgggcaacatagcgagacctcatatctatagg

SEQ ID NO: 402155 - DNA, 1291 bp, Homo sapiens
tatgagttgagctctgtgcataaggcttgccagacatcgtcttatttgagtctcataaacccaccaggcgagttgatttttcttattttacagatagggaaatgaagtaagagaacttaagttatttgcccgaggccatcctggcaggtctgtatttgggagagtgctgtgactcatgctggactctaacccacgagggtttctcagagtcagcagctgggggatgaagaagtgaaaagtgactggcaggaaattctgcaagcaaggaaagggaaagagaaatgaactggtgcaggtctgcgggaagagaatgaggctggatcctcaaaatcacaggaggaagcaggcccagacctcagaggcagaaagagaaagaaaccagagcttagagtcaggaggaggaaaccagaccccggagccacaaggagagggctggatccccggctcagagggaagaggtcggatccccagctgagagggaggagggtcccggaccctaggagtgggaaggaaaggctcggatcccctgatccccaggaggaggggacccggctgcctcccggttggggccgcgcgagggcggggcgcggaaggatccgggagggccgtgctccgccacccagtatatatctgtccccagtccccggggccgcctcattccctgtcctcggatcacagtctcttctcactacagtgtcgccgcctctgcctgcgtagccccggccatggctctgtagcctcgacccctttgtgcccccggcccgtctccgcgctcaccacgcctgcgctctccgctcccaccttctttcttcagccgaggccgccgccgcctctccttgctgcagccatggagtcttccactttcgccttggtgcctgtcttcgcccacctgagcatcctccagagcctcgtgccagctgctggtgcagcctctcctgttgccatcagtgcccagcacctgtgctacagccatgtcactcctggcgaccctggggctggagctggacagggccctgctcccagctagtgggctgggatggctcgtagactatgggaaactccccccggcccctgcccccctggctccctatgaggtccttgggggagccctggagggcgggcttccagtggggggagagcccctggcagctgggtgttcattttagctctaagaaaaaaaatcagtgtttcgtgaaggtgttggagaggggctgtgtctgggtgagggatggcggggtactgatttttttgggaggttatgagcaaaaataaaacgaaacatttcctctgg

SEQ ID NO: 402156 - DNA, 301 bp, Homo sapiens
  misc_feature (3)..(3): n is a, c, g, or t
acnccgcctaaatacgccccccccttcattacccttaccggaattcccgggctcactacagtgtcgccgcctctgcctgcgtagccccggccatggctctgtagcctcgacccctttgtccccctggctccctatgaggtccttgggggagccctggagggcgggcttccagtggggggagagcccctggcaggtaagggcaggtggaaggtggagctggggagtggagggcaggggaagatgggggaggaagaactcatccatgttttcaataattaatgagtaaagatgaaacaaggca

SEQ ID NO: 402157 - DNA, 330 bp, Homo sapiens
ggtgtgttttttttttttctaaacgattcttcgtgcttggttgttcctgcgcagtagcccaccagtgccccgtagtgaaagagctgcggaccctgaatggccgcacatgcgcattgatccccaagagggcggaggtgtaaaggcaattggaccgctcgggcgacgtagcatgcgccttggccctcggcgcagagccgcgtgtggacgggtggcgttcgggtagccgttctccgcgtgccccctctaccctcctccaccctccctgccccacgttgctctggctcacagcccagcttccttccttttaaaccaggcacctgctgaggcggg

SEQ ID NO: 402158 - DNA, 954 bp, Homo sapiens
  misc_feature (649)..(649): n is a, c, g, or t
aagtaggctagtagagcggggttatggagaggctcactacagtgtcgccgcctctgcctgcgtagccccggccatggctctgtagcctcgacccctttgtgcccccggcccgtctccgcgctcaccacgcctgcgctctccgctcccaccttctttcttcagccgaggccgccgccgcctctccttgctgcagccatggagtcttccactttcgccttggtgcctgtcttcgcccacctgagcatcctccagagcctcgtgccagctgctggtgcagcctctcctgttgccatcagtgcccagcacctgtgctacagccatgtcactcctggcgaccctggggctggagctggacagggccctgctcccagctagtgggctgggatggctcgtagactatgggaaactccccccggcccctgcccccctggctccctatgaggtccttgggggagccctggagggcgggcttccagtggggggagagcccctggcaggtgatggcttctctgactggatgactgagcgagttgatttcacagctctcctccctctggagcctcacacacaaaaaaaaaaaaaaaaaaaagacaaacaaaaaaaaaacaaaaaaaaaacaaaaaaaaaaaaaaaaaaaaaaaaaaaaaanacaaccagaaaaagaagagacccgaaaccacaaacacacaaccaaaccagagacaacacaccaaaaaacacaccgaaaagaaacgagaacaatacaacaacaaagacaaaaaaacaacaacaagctatagaccaagcaaaaaaaccaacaagaagaaccaaaccccacaaacccaaaacccacaagagcagaaaaaagcaaaaccaaacacaaaagaacacagacaaagacagaacacagaccaaaaacaccagacacaaaacaagcagaaacacaagaaacacaaacacaaaacaagaacaacc

SEQ ID NO: 402159 - DNA, 2663 bp, Homo sapiens
tatgagttgagctctgtgcataaggcttgccagacatcgtcttatttgagtctcataaacccaccaggcgagttgatttttcttattttacagatagggaaatgaagtaagagaacttaagttatttgcccgaggccatcctggcaggtctgtatttgggagagtgctgtgactcatgctggactctaacccacgagggtttctcagagtcagcagctgggggatgaagaagtgaaaagtgactggcaggaaattctgcaagcaaggaaagggaaagagaaatgaactggtgcaggtctgcgggaagagaatgaggctggatcctcaaaatcacaggaggaagcaggcccagacctcagaggcagaaagagaaagaaaccagagcttagagtcaggaggaggaaaccagaccccggagccacaaggagagggctggatccccggctcagagggaagaggtcggatccccagctgagagggaggagggtcccggaccctaggagtgggaaggaaaggctcggatcccctgatccccaggaggaggggacccggctgcctcccggttggggccgcgcgagggcggggcgcggaaggatccgggagggccgtgctccgccacccagtatatatctgtccccagtccccggggccgcctcattccctgtcctcggatcacagtctcttctcactacagtgtcgccgcctctgcctgcgtagccccggccatggctctgtagcctcgacccctttgtgcccccggcccgtctccgcgctcaccacgcctgcgctctccgctcccaccttctttcttcagccgaggccgccgccgcctctccttgctgcagccatggagtcttccactttcgccttggtgcctgtcttcgcccacctgagcatcctccagagcctcgtgccagctgctggtgcagcctctcctgttgccatcagtgcccagcacctgtgctacagccatgtcactcctggcgaccctggggctggagctggacagggccctgctcccagctagtgggctgggatggctcgtagactatgggaaactccccccggcccctgcccccctggctccctatgaggtccttgggggagccctggagggcgggcttccagtggggggagagcccctggcaggtgatggcttctctgactggatgactgagcgagttgatttcacagctctcctccctctggagcctcccctaccccccggcaccctcccccaaccttccccaaccccacctgacctggaagctatggcctccctcctcaagaaggagctggaacagatggaagacttcttcctagatgccccgcccctcccaccaccctccccgccgccactaccaccaccaccactaccaccagccccctccctccccctgtccctcccctcctttgacctcccccagccccctgtcttggatactctggacttgctggccatctactgccgcaacgaggccgggcaggaggaagtggggatgccgcctctgcccccgccacagcagccccctcctccttctccacctcaaccttctcgcctggccccctacccacatcctgccaccacccgaggggaccgcaagcaaaagaagagagaccagaacaagtcggcggctctgaggtaccgccagcggaagcgggcagagggtgaggccctggagggcgagtgccaggggctggaggcacggaatcgcgagctgaaggaacgggcagagtccgtggagcgcgagatccagtacgtcaaggacctgctcatcgaggtttacaaggcccggagccagaggacccgtagctgctagaagggcaggggtgtggcttctgggggctggtcttcagctctggcgccttcatccccctgcctctaccttcattccaaacccctctcggccgggtgcagtggcttatgcttgtaatcccagcactttgggaggccaaggcaggaggatcgtttgaggccaggaggtcaataccagcctgggcaacatagtaagaccctgtctctattaaaaaaaaaaaatcaacccttcttccccaccaaaccacccaactcctctctactcttatccttttatcctctgtctctgcttatcacctctcttgcgtatttctggatctccttccctcctttctcgtccaaatcatgaaatgtttggccttagtcaatgtctatgcccgtcacataacagccgaggcaccgaggcccacagggaagcagctgggagcttggaaacctggtctcttgaatttcaaacctggtttcttacaggtggttgtctggggtgggtggagtggcgacaggatagagctgaaggactatgcaaatgaggaagtaagtcagggcgggctttgagaaggggacccatatcctacaggcaaaaagcaggctaggtgaccttgggacactacgctaagggagggaggctaaaggcggccaggtttgcagtgcgggaagatgagcaggccagtgggaggaggggcagggcagggctgtagttggtgactgggtgttcattttagctctaagaaaaaaaatcagtgtttcgtgaaggtgttggagaggggctgtgtctgggtgagggatggcggggtactgatttttttgggaggttatgagcaaaaataaaacgaaacatttcctctgg

SEQ ID NO: 402160 - DNA, 2765 bp, Homo sapiens
tatgagttgagctctgtgcataaggcttgccagacatcgtcttatttgagtctcataaacccaccaggcgagttgatttttcttattttacagatagggaaatgaagtaagagaacttaagttatttgcccgaggccatcctggcaggtctgtatttgggagagtgctgtgactcatgctggactctaacccacgagggtttctcagagtcagcagctgggggatgaagaagtgaaaagtgactggcaggaaattctgcaagcaaggaaagggaaagagaaatgaactggtgcaggtctgcgggaagagaatgaggctggatcctcaaaatcacaggaggaagcaggcccagacctcagaggcagaaagagaaagaaaccagagcttagagtcaggaggaggaaaccagaccccggagccacaaggagagggctggatccccggctcagagggaagaggtcggatccccagctgagagggaggagggtcccggaccctaggagtgggaaggaaaggctcggatcccctgatccccaggaggaggggacccggctgcctcccggttggggccgcgcgagggcggggcgcggaaggatccgggagggccgtgctccgccacccagtatatatctgtccccagtccccggggccgcctcattccctgtcctcggatcacagtctcttctcactacagtgtcgccgcctctgcctgcgtagccccggccatggctctgtagcctcgacccctttgtgcccccggcccgtctccgcgctcaccacgcctgcgctctccgctcccaccttctttcttcagccgaggccgccgccgcctctccttgctgcagccatggagtcttccactttcgccttggtgcctgtcttcgcccacctgagcatcctccagagcctcgtgccagctgctggtgcagcctctcctgttgccatcagtgcccagcacctgtgctacagccatgtcactcctggcgaccctggggctggagctggacagggccctgctcccagctagtgggctgggatggctcgtagactatgggaaactccccccggcccctgcccccctggctccctatgaggtccttgggggagccctggagggcgggcttccagtggggggagagcccctggcaggtgatggcttctctgactggatgactgagcgagttgatttcacagctctcctccctctggagcctcccctaccccccggcaccctcccccaaccttccccaaccccacctgacctggaagctatggcctccctcctcaagaaggagctggaacagatggaagacttcttcctagatgccccgcccctcccaccaccctccccgccgccactaccaccaccaccactaccaccagccccctccctccccctgtccctcccctcctttgacctcccccagccccctgtcttggatactctggacttgctggccatctactgccgcaacgaggccgggcaggaggaagtggggatgccgcctctgcccccgccacagcagccccctcctccttctccacctcaaccttctcgcctggccccctacccacatcctgccaccacccgaggggaccgcaagcaaaagaagagagaccagaacaagtcggcggctctgaggtaccgccagcggaagcgggcagagggtgaggccctggagggcgagtgccaggggctggaggcacggaatcgcgagctgaaggaacgggcagagtccgtggagcgcgagatccagtacgtcaaggacctgctcatcgaggtttacaaggcccggagccagaggacccgtagctgctagaagggcaggggtgtggcttctgggggctggtcttcagctctggcgccttcatccccctgcctctaccttcattccaaacccctctcggccgggtgcagtggcttatgcttgtaatcccagcactttgggaggccaaggcaggaggatcgtttgaggccaggaggtcaataccagcctgggcaacatagtaagaccctgtctctattaaaaaaaaaaaatcaacccttcttccccaccaaaccacccaactcctctctactcttatccttttatcctctgtctctgcttatcacctctcttgcgtatttctggatctccttccctcctttctcgtccaaatcatgaaatgtttggccttagtcaatgtctatgcccgtcacataacagccgaggcaccgaggcccacagggaagcagctgggagcttggaaacctggtctcttgaatttcaaacctggtttcttacaggtggttgtctggggtgggtggagtggcgacaggatagagctgaaggactatgcaaatgaggaagtaagtcagggcgggctttgagaaggggacccatatcctacaggcaaaaagcaggctaggtgaccttgggacactacgctaagggagggaggctaaaggcggccaggtttgcagtgcgggaagatgagcaggccagtgggaggaggggcagggcagggctgtagttggtgactgggtgttcattttagctctaagaaaaaaaatcagtgtttcgtgaaggtgttggagaggggctgtgtctgggtgagggatggcggggtactgatttttttgggaggttatgagcaaaaataaaacgaaacatttcctctggaaaaaaaaatacataaaaaaaattgtggggcggcttgggcctggaaaaggtttttaaccacttcgtgtgggggggggcccagatgggttagtgcactggtca

SEQ ID NO: 402161 - DNA, 2564 bp, Homo sapiens
tatgagttgagctctgtgcataaggcttgccagacatcgtcttatttgagtctcataaacccaccaggcgagttgatttttcttattttacagatagggaaatgaagtaagagaacttaagttatttgcccgaggccatcctggcaggtctgtatttgggagagtgctgtgactcatgctggactctaacccacgagggtttctcagagtcagcagctgggggatgaagaagtgaaaagtgactggcaggaaattctgcaagcaaggaaagggaaagagaaatgaactggtgcaggtctgcgggaagagaatgaggctggatcctcaaaatcacaggaggaagcaggcccagacctcagaggcagaaagagaaagaaaccagagcttagagtcaggaggaggaaaccagaccccggagccacaaggagagggctggatccccggctcagagggaagaggtcggatccccagctgagagggaggagggtcccggaccctaggagtgggaaggaaaggctcggatcccctgatccccaggaggaggggacccggctgcctcccggttggggccgcgcgagggcggggcgcggaaggatccgggagggccgtgctccgccacccagtatatatctgtccccagtccccggggccgcctcattccctgtcctcggatcacagtctcttctcactacagtgtcgccgcctctgcctgcgtagccccggccatggctctgtagcctcgacccctttgtgcccccggcccgtctccgcgctcaccacgcctgcgctctccgctcccaccttctttcttcagccgaggccgccgccgcctctccttgctgcagccatggagtcttccactttcgccttggtgcctgtcttcgcccacctgagcatcctccagagcctcgtgccagctgctggtgcagcctctcctgttgccatcagtgcccagcacctgtgctacagccatgtcactcctggcgaccctggggctggagctggacagggccctgctcccagctagtgggctgggatggctcgtagactatgggaaactccccccggcccctgcccccctggctccctatgaggtccttgggggagccctggagggcgggcttccagtggggggagagcccctggcaggtgatggcttctctgactggatgactgagcgagttgatttcacagctctcctccctctggagcctcccctaccccccggcaccctcccccaaccttccccaaccccacctgacctggaagctatggcctccctcctcaagaaggagctggaacagatggaagacttcttcctagatgccccgcccctcccaccaccctccccgccgccactaccaccaccaccactaccaccagccccctccctccccctgtccctcccctcctttgacctcccccagccccctgtcttggatactctggacttgctggccatctactgccgcaacgaggccgggcaggaggaagtggggatgccgcctctgcccccgccacagcagccccctcctccttctccacctcaaccttctcgcctggccccctacccacatcctgccaccacccgaggggaccgcaagcaaaagaagagagaccagaacaagtcggcggctctgaggtaccgccagcggaagcgggcagagggtgaggccctggagggcgagtgccaggggctggaggcacggaatcgcgagctgaaggaacgggcagagtccgtggagcgcgagatccagtacgtcaaggacctgctcatcgaggtttacaaggcccggagccagaggacccgtagctgctagaagggcaggggtgtggcttctgggggctggtcttcagctctggcgccttcatccccctgcctctaccttcattccaaacccctctcggccgggtgcagtggcttatgcttgtaatcccagcactttgggaggccaaggcaggaggatcgtttgaggccaggaggtcaataccagcctgggcaacatagtaagaccctgtctctattaaaaaaaaaaaatcaacccttcttccccaccaaaccacccaactcctctctactcttatccttttatcctctgtctctgcttatcacctctcttgcgtatttctggatctccttccctcctttctcgtccaaatcatgaaatgtttggccttagtcaatgtctatgcccgtcacataacagccgaggcaccgaggcccacagggaagcagctgggagcttggaaacctggtctcttgaatttcaaacctggtttcttacaggtggttgtctggggtgggtggagtggcgacaggatagagctgaaggactatgcaaatgaggaagtaagtcagggcgggctttgagaaggggacccatatcctacaggcaaaaagcaggctaggtgaccttgggacactacgctaagggagggaggctaaaggcggccaggtttgcagtgcgggaagatgagcaggccagtgggaggaggggcagggcagggctgtagttggtgattgggaggttatgagcaaaaataaaacgaaacatttcctctgg

SEQ ID NO: 402162 - DNA, 2595 bp, Homo sapiens
tatgagttgagctctgtgcataaggcttgccagacatcgtcttatttgagtctcataaacccaccaggcgagttgatttttcttattttacagatagggaaatgaagtaagagaacttaagttatttgcccgaggccatcctggcaggtctgtatttgggagagtgctgtgactcatgctggactctaacccacgagggtttctcagagtcagcagctgggggatgaagaagtgaaaagtgactggcaggaaattctgcaagcaaggaaagggaaagagaaatgaactggtgcaggtctgcgggaagagaatgaggctggatcctcaaaatcacaggaggaagcaggcccagacctcagaggcagaaagagaaagaaaccagagcttagagtcaggaggaggaaaccagaccccggagccacaaggagagggctggatccccggctcagagggaagaggtcggatccccagctgagagggaggagggtcccggaccctaggagtgggaaggaaaggctcggatcccctgatccccaggaggaggggacccggctgcctcccggttggggccgcgcgagggcggggcgcggaaggatccgggagggccgtgctccgccacccagtatatatctgtccccagtccccggggccgcctcattccctgtcctcggatcacagtctcttctcactacagtgtcgccgcctctgcctgcgtagccccggccatggctctgtagcctcgacccctttgtgcccccggcccgtctccgcgctcaccacgcctgcgctctccgctcccaccttctttcttcagccgaggccgccgccgcctctccttgctgcagccatggagtcttccactttcgccttggtgcctgtcttcgcccacctgagcatcctccagagcctcgtgccagctgctggtgcagcctctcctgttgccatcagtgcccagcacctgtgctacagccatgtcactcctggcgaccctggggctggagctggacagggccctgctcccagctagtgggctgggatggctcgtagactatgggaaactccccccggcccctgcccccctggctccctatgaggtccttgggggagccctggagggcgggcttccagtggggggagagcccctggcaggtgatggcttctctgactggatgactgagcgagttgatttcacagctctcctccctctggagcctcccctaccccccggcaccctcccccaaccttccccaaccccacctgacctggaagctatggcctccctcctcaagaaggagctggaacagatggaagacttcttcctagatgccccgccccctcccctcctttgacctcccccagccccctgtcttggatactctggacttgctggccatctactgccgcaacgaggccgggcaggaggaagtggggatgccgcctctgcccccgccacagcagccccctcctccttctccacctcaaccttctcgcctggccccctacccacatcctgccaccacccgaggggaccgcaagcaaaagaagagagaccagaacaagtcggcggctctgaggtaccgccagcggaagcgggcagagggtgaggccctggagggcgagtgccaggggctggaggcacggaatcgcgagctgaaggaacgggcagagtccgtggagcgcgagatccagtacgtcaaggacctgctcatcgaggtttacaaggcccggagccagaggacccgtagctgctagaagggcaggggtgtggcttctgggggctggtcttcagctctggcgccttcatccccctgcctctaccttcattccaaacccctctcggccgggtgcagtggcttatgcttgtaatcccagcactttgggaggccaaggcaggaggatcgtttgaggccaggaggtcaataccagcctgggcaacatagtaagaccctgtctctattaaaaaaaaaaaatcaacccttcttccccaccaaaccacccaactcctctctactcttatccttttatcctctgtctctgcttatcacctctcttgcgtatttctggatctccttccctcctttctcgtccaaatcatgaaatgtttggccttagtcaatgtctatgcccgtcacataacagccgaggcaccgaggcccacagggaagcagctgggagcttggaaacctggtctcttgaatttcaaacctggtttcttacaggtggttgtctggggtgggtggagtggcgacaggatagagctgaaggactatgcaaatgaggaagtaagtcagggcgggctttgagaaggggacccatatcctacaggcaaaaagcaggctaggtgaccttgggacactacgctaagggagggaggctaaaggcggccaggtttgcagtgcgggaagatgagcaggccagtgggaggaggggcagggcagggctgtagttggtgactgggtgttcattttagctctaagaaaaaaaatcagtgtttcgtgaaggtgttggagaggggctgtgtctgggtgagggatggcggggtactgatttttttgggaggttatgagcaaaaataaaacgaaacatttcctctgg

SEQ ID NO: 402163 - DNA, 2016 bp, Homo sapiens
atatagctaggtcgggctggggtgaaatcggccgaggctcactacagtgtcgccgcctctgcctgcgtagccccggccatggctctgtagcctcgacccctttgtgcccccggcccgtctccgcgctcaccacgcctgcgctctccgctcccaccttctttcttcagccgaggccgccgccgcctctccttgctgcagccatggagtcttccactttcgccttggtgcctgtcttcgcccacctgagcatcctccagagcctcgtgccagctgctggtgcagcctctcctgttgccatcagtgcccagcacctgtgctacagccatgtcactcctggcgaccctggggctggagctggacagggccctgctcccagctagtgggctgggatggctcgtagactatgggaaactccccccggcccctgcccccctggctccctatgaggtccttgggggagccctggagggcgggcttccagtggggggagagcccctggcaggtgatggcttctctgactggatgactgagcgagttgatttcacagctctcctccctctggagcctcccctaccccccggcaccctcccccaaccttccccaaccccacctgacctggaagctatggcctccctcctcaagaaggagctggaacagatggaagacttcttcctagatgccccgcccctcccaccaccctccccgccgccactaccaccaccaccactaccaccagccccctccctccccctgtccctcccctcctttgacctcccccagccccctgtcttggatactctggacttgctggccatctactgccgcaacgaggccgggcaggaggaagtggggatgccgcctctgcccccgccacagcagccccctcctccttctccacctcaaccttctcgcctggccccctacccacatcctgccaccacccgaggggaccgcaagcaaaagaagagagaccagaacaagtcggcggctctgaggtaccgccagcggaagcgggcagagggtgaggccctggagggcgagtgccaggggctggaggcacggaatcgcgagctgaaggaacgggcagagtccgtggagcgcgagatccagtacgtcaaggacctgctcatcgaggtttacaaggcccggagccagaggacccgtagctgctagaagggcaggggtgtggcttctgggggctggtcttcagctctggcgccttcatccccctgcctctaccttcattccaaacccctctcggccgggtgcagtggcttatgcttgtaatcccagcactttgggaggccaaggcaggaggatcgtttgaggccaggaggtcaataccagcctgggcaacatagtaagaccctgtctctattaaaaaaaaaaaatcaacccttcttccccaccaaaccacccaactcctctctactcttatccttttatcctctgtctctgcttatcacctctcttgcgtatttctggatctccttccctcctttctcgtccaaatcatgaaatgtttggccttagtcaatgtctatgcccgtcacataacagccgaggcaccgaggcccacagggaagcagctgggagcttggaaacctggtctcttgaatttcaaacctggtttcttacaggtggttgtctggggtgggtggagtggcgacaggatagagctgaaggactatgcaaatgaggaagtaagtcagggcgggctttgagaaggggacccatatcctacaggcaaaaagcaggctaggtgaccttgggacactacgctaagggagggaggctaaaggcggccaggtttgcagtgcgggaagatgagcaggccagtgggaggaggggcagggcagggctgtagttggtgactgggtgttcattttagctctaagaaaaaaaatcagtgtttcgtgaaggtgttggagaggggctgtgtctgggtgagggatggcggggtactgatttttttgggaggttatgagcaaaaataaaacgaaacatttcctctgg

SEQ ID NO: 402164 - DNA, 2034 bp, Homo sapiens
gtcctacggcatatgagatctcttgacgattcattattgttcccaaaaactggtactcactacagtgtcgccgcctctgcctgcgtagccccggccatggctctgtagcctcgacccctttgtgcccccggcccgtctccgcgctcaccacgcctgcgctctccgctcccaccttctttcttcagccgaggccgccgccgcctctccttgctgcagccatggagtcttccactttcgccttggtgcctgtcttcgcccacctgagcatcctccagagcctcgtgccagctgctggtgcagcctctcctgttgccatcagtgcccagcacctgtgctacagccatgtcactcctggcgaccctggggctggagctggacagggccctgctcccagctagtgggctgggatggctcgtagactatgggaaactccccccggcccctgcccccctggctccctatgaggtccttgggggagccctggagggcgggcttccagtggggggagagcccctggcaggtgatggcttctctgactggatgactgagcgagttgatttcacagctctcctccctctggagcctcccctaccccccggcaccctcccccaaccttccccaaccccacctgacctggaagctatggcctccctcctcaagaaggagctggaacagatggaagacttcttcctagatgccccgcccctcccaccaccctccccgccgccactaccaccaccaccactaccaccagccccctccctccccctgtccctcccctcctttgacctcccccagccccctgtcttggatactctggacttgctggccatctactgccgcaacgaggccgggcaggaggaagtggggatgccgcctctgcccccgccacagcagccccctcctccttctccacctcaaccttctcgcctggccccctacccacatcctgccaccacccgaggggaccgcaagcaaaagaagagagaccagaacaagtcggcggctctgaggtaccgccagcggaagcgggcagagggtgaggccctggagggcgagtgccaggggctggaggcacggaatcgcgagctgaaggaacgggcagagtccgtggagcgcgagatccagtacgtcaaggacctgctcatcgaggtttacaaggcccggagccagaggacccgtagctgctagaagggcaggggtgtggcttctgggggctggtcttcagctctggcgccttcatccccctgcctctaccttcattccaaacccctctcggccgggtgcagtggcttatgcttgtaatcccagcactttgggaggccaaggcaggaggatcgtttgaggccaggaggtcaataccagcctgggcaacatagtaagaccctgtctctattaaaaaaaaaaaatcaacccttcttccccaccaaaccacccaactcctctctactcttatccttttatcctctgtctctgcttatcacctctcttgcgtatttctggatctccttccctcctttctcgtccaaatcatgaaatgtttggccttagtcaatgtctatgcccgtcacataacagccgaggcaccgaggcccacagggaagcagctgggagcttggaaacctggtctcttgaatttcaaacctggtttcttacaggtggttgtctggggtgggtggagtggcgacaggatagagctgaaggactatgcaaatgaggaagtaagtcagggcgggctttgagaaggggacccatatcctacaggcaaaaagcaggctaggtgaccttgggacactacgctaagggagggaggctaaaggcggccaggtttgcagtgcgggaagatgagcaggccagtgggaggaggggcagggcagggctgtagttggtgactgggtgttcattttagctctaagaaaaaaaatcagtgtttcgtgaaggtgttggagaggggctgtgtctgggtgagggatggcggggtactgatttttttgggaggttatgagcaaaaataaaacgaaacatttcctctgg

SEQ ID NO: 402165 - DNA, 2608 bp, Homo sapiens
tatgagttgagctctgtgcataaggcttgccagacatcgtcttatttgagtctcataaacccaccaggcgagttgatttttcttattttacagatagggaaatgaagtaagagaacttaagttatttgcccgaggccatcctggcaggtctgtatttgggagagtgctgtgactcatgctggactctaacccacgagggtttctcagagtcagcagctgggggatgaagaagtgaaaagtgactggcaggaaattctgcaagcaaggaaagggaaagagaaatgaactggtgcaggtctgcgggaagagaatgaggctggatcctcaaaatcacaggaggaagcaggcccagacctcagaggcagaaagagaaagaaaccagagcttagagtcaggaggaggaaaccagaccccggagccacaaggagagggctggatccccggctcagagggaagaggtcggatccccagctgagagggaggagggtcccggaccctaggagtgggaaggaaaggctcggatcccctgatccccaggaggaggggacccggctgcctcccggttggggccgcgcgagggcggggcgcggaaggatccgggagggccgtgctccgccacccagtatatatctgtccccagtccccggggccgcctcattccctgtcctcggatcacagtctcttctcactacagtgtcgccgcctctgcctgcgtagccccggccatggctctgtagcctcgacccctttgtgcccccggcccgtctccgcgctcaccacgcctgcgctctccgctcccaccttctttcttcagccgaggccgccgccgcctctccttgctgcagccatggagtcttccactttcgccttggtgcctgtcttcgcccacctgagcatcctccagagcctcgtgccagctgctggtgcagcctctcctgttgccatcagtgcccagcacctgtgctacagccatgtcactcctggcgaccctggggctggagctggacagggccctgctcccagctagtgggctgggatggctcgtagactatgggaaactccccccggcccctgcccccctggctccctatgaggtccttgggggagccctggagggcgggcttccagtggggggagagcccctggcaggtgatggcttctctgactggatgactgagcgagttgatttcacagctctcctccctctggagcctcccctaccccccggcaccctcccccaaccttccccaaccccacctgacctggaagctatggcctccctcctcaagaaggagctggaacagatggaagacttcttcctagatgccccgcccctcccaccaccctccccgccgccactaccaccaccaccactaccaccagccccctccctccccctgtccctcccctcctttgacctcccccagccccctgtcttggatactctggacttgctggccatctactgccgcaacgaggccgggcaggaggaagtggggatgccgcctctgcccccgccacagcagccccctcctccttctccacctcaaccttctcgcctggccccctacccacatcctgccaccacccgaggggaccgcaacgggcagagggtgaggccctggagggcgagtgccaggggctggaggcacggaatcgcgagctgaaggaacgggcagagtccgtggagcgcgagatccagtacgtcaaggacctgctcatcgaggtttacaaggcccggagccagaggacccgtagctgctagaagggcaggggtgtggcttctgggggctggtcttcagctctggcgccttcatccccctgcctctaccttcattccaaacccctctcggccgggtgcagtggcttatgcttgtaatcccagcactttgggaggccaaggcaggaggatcgtttgaggccaggaggtcaataccagcctgggcaacatagtaagaccctgtctctattaaaaaaaaaaaatcaacccttcttccccaccaaaccacccaactcctctctactcttatccttttatcctctgtctctgcttatcacctctcttgcgtatttctggatctccttccctcctttctcgtccaaatcatgaaatgtttggccttagtcaatgtctatgcccgtcacataacagccgaggcaccgaggcccacagggaagcagctgggagcttggaaacctggtctcttgaatttcaaacctggtttcttacaggtggttgtctggggtgggtggagtggcgacaggatagagctgaaggactatgcaaatgaggaagtaagtcagggcgggctttgagaaggggacccatatcctacaggcaaaaagcaggctaggtgaccttgggacactacgctaagggagggaggctaaaggcggccaggtttgcagtgcgggaagatgagcaggccagtgggaggaggggcagggcagggctgtagttggtgactgggtgttcattttagctctaagaaaaaaaatcagtgtttcgtgaaggtgttggagaggggctgtgtctgggtgagggatggcggggtactgatttttttgggaggttatgagcaaaaataaaacgaaacatttcctctgg

SEQ ID NO: 402166 - DNA, 2032 bp, Homo sapiens
gggcagcggcagagcgaggagtgggatttgagtgaataacattgctgaagggctgcggcctggggcagttcccctgggaactggtttgggatggaagctaggaaggcagtggggccaaaaggaaatattttagaggaaggggcgtggctggaagaaaatgtccctgggattgagtttttccttgaggcgaaatattctgaggtggatgggaggggcctaaggtcttccactttcgccttggtgcctgtcttcgcccacctgagcatcctccagagcctcgtgccagctgctggtgcagcctctcctgttgccatcagtgcccagcacctgtgctacagccatgtcactcctggcgaccctggggctggagctggacagggccctgctcccagctagtgggctgggatggctcgtagactatgggaaactccccccggcccctgcccccctggctccctatgaggtccttgggggagccctggagggcgggcttccagtggggggagagcccctggcaggtgatggcttctctgactggatgactgagcgagttgatttcacagctctcctccctctggagcctcccctaccccccggcaccctcccccaaccttccccaaccccacctgacctggaagctatggcctccctcctcaagaaggagctggaacagatggaagacttcttcctagatgccccgcccctcccaccaccctccccgccgccactaccaccaccaccactaccaccagccccctccctccccctgtccctcccctcctttgacctcccccagccccctgtcttggatactctggacttgctggccatctactgccgcaacgaggccgggcaggaggaagtggggatgccgcctctgcccccgccacagcagccccctcctccttctccacctcaaccttctcgcctggccccctacccacatcctgccaccacccgaggggaccgcaagcaaaagaagagagaccagaacaagtcggcggctctgaggtaccgccagcggaagcgggcagagggtgaggccctggagggcgagtgccaggggctggaggcacggaatcgcgagctgaaggaacgggcagagtccgtggagcgcgagatccagtacgtcaaggacctgctcatcgaggtttacaaggcccggagccagaggacccgtagctgctagaagggcaggggtgtggcttctgggggctggtcttcagctctggcgccttcatccccctgcctctaccttcattccaaacccctctcggccgggtgcagtggcttatgcttgtaatcccagcactttgggaggccaaggcaggaggatcgtttgaggccaggaggtcaataccagcctgggcaacatagtaagaccctgtctctattaaaaaaaaaaaatcaacccttcttccccaccaaaccacccaactcctctctactcttatccttttatcctctgtctctgcttatcacctctcttgcgtatttctggatctccttccctcctttctcgtccaaatcatgaaatgtttggccttagtcaatgtctatgcccgtcacataacagccgaggcaccgaggcccacagggaagcagctgggagcttggaaacctggtctcttgaatttcaaacctggtttcttacaggtggttgtctggggtgggtggagtggcgacaggatagagctgaaggactatgcaaatgaggaagtaagtcagggcgggctttgagaaggggacccatatcctacaggcaaaaagcaggctaggtgaccttgggacactacgctaagggagggaggctaaaggcggccaggtttgcagtgcgggaagatgagcaggccagtgggaggaggggcagggcagggctgtagttggtgactgggtgttcattttagctctaagaaaaaaaatcagtgtttcgtgaaggtgttggagaggggctgtgtctgggtgagggatggcggggtactgatttttttgggaggttatgagcaaaaataaaacgaaacatttcctctgg

SEQ ID NO: 402167 - DNA, 1582 bp, Homo sapiens
  misc_feature (1404)..(1404): n is a, c, g, or t
  misc_feature (1412)..(1412): n is a, c, g, or t
  misc_feature (1416)..(1416): n is a, c, g, or t
  misc_feature (1423)..(1423): n is a, c, g, or t
  misc_feature (1425)..(1425): n is a, c, g, or t
  misc_feature (1450)..(1450): n is a, c, g, or t
  misc_feature (1459)..(1459): n is a, c, g, or t
  misc_feature (1468)..(1468): n is a, c, g, or t
  misc_feature (1470)..(1470): n is a, c, g, or t
  misc_feature (1472)..(1472): n is a, c, g, or t
  misc_feature (1475)..(1475): n is a, c, g, or t
  misc_feature (1485)..(1485): n is a, c, g, or t
  misc_feature (1491)..(1491): n is a, c, g, or t
  misc_feature (1506)..(1506): n is a, c, g, or t
  misc_feature (1528)..(1528): n is a, c, g, or t
tatgagttgagctctgtgcataaggcttgccagacatcgtcttatttgagtctcataaacccaccaggcgagttgatttttcttattttacagatagggaaatgaagtaagagaacttaagttatttgcccgaggccatcctggcaggtctgtatttgggagagtgctgtgactcatgctggactctaacccacgagggtttctcagagtcagcagctgggggatgaagaagtgaaaagtgactggcaggaaattctgcaagcaaggaaagggaaagagaaatgaactggtgcaggtctgcgggaagagaatgaggctggatcctcaaaatcacaggaggaagcaggcccagacctcagaggcagaaagagaaagaaaccagagcttagagtcaggaggaggaaaccagaccccggagccacaaggagagggctggatccccggctcagagggaagaggtcggatccccagctgagagggaggagggtcccggaccctaggagtgggaaggaaaggctcggatcccctgatccccaggaggaggggacccggctgcctcccggttggggccgcgcgagggcggggcgcggaaggatccgggagggccgtgctccgccacccagtatatatctgtccccagtccccggggccgcctcattccctgtcctcggatcacagtctcttctcactacagtgtcgccgcctctgcctgcgtagccccggccatggctctgtagcctcgacccctttgtgcccccggcccgtctccgcgctcaccacgcctgcgctctccgctcccaccttctttcttcagccgaggccgccgccgcctctccttgctgcagccatggagtcttccactttcgccttggtgcctgtcttcgcccacctgagcatcctccagagcctcgtgccagctgctggtgcagcctctcctgttgccatcagtgcccagcacctgtgctacagccatgtcactcctggcgaccctggggctggagctggacagggccctgctcccagctagtgggctgggatggctcgtagactatgggaaactccccccggcccctgcccccctggctccctatgaggtccttgggggagccctggagggcgggcttccagtggggggagagcccctggcaggtgatggcttctctgactggatgactgagcgagttgatttcacagctctcctccctctggagcctcccctaccccccggcaccctcccccaaccttccccaaccccacctgacctggaagctatggcctccctcctcaagaaggagctggaacagatggaagacttcttcctagatgccccgcccctcccaccaccctccccgccgccactaccaccaccaccactaccaccagccccctccctccccctgtctnttccttcncttnttttaantncccaactccttttttttatattctngatttctgncatttattncngnaanaggcgggcangaggantggggatccgctttnccccgcacagagcccctcctcntctccactcaacttctcgctggcccctaccacatctgcacaccgagggacgcaa

SEQ ID NO: 402168 - DNA, 1504 bp, Homo sapiens
tatgagttgagctctgtgcataaggcttgccagacatcgtcttatttgagtctcataaacccaccaggcgagttgatttttcttattttacagatagggaaatgaagtaagagaacttaagttatttgcccgaggccatcctggcaggtctgtatttgggagagtgctgtgactcatgctggactctaacccacgagggtttctcagagtcagcagctgggggatgaagaagtgaaaagtgactggcaggaaattctgcaagcaaggaaagggaaagagaaatgaactggtgcaggtctgcgggaagagaatgaggctggatcctcaaaatcacaggaggaagcaggcccagacctcagaggcagaaagagaaagaaaccagagcttagagtcaggaggaggaaaccagaccccggagccacaaggagagggctggatccccggctcagagggaagaggtcggatccccagctgagagggaggagggtcccggaccctaggagtgggaaggaaaggctcggatcccctgatccccaggaggaggggacccggctgcctcccggttggggccgcgcgagggcggggcgcggaaggatccgggagggccgtgctccgccacccagtatatatctgtccccagtccccggggccgcctcattccctgtcctcggatcacagtctcttctcactacagtgtcgccgcctctgcctgcgtagccccggccatggctctgtagcctcgacccctttgtgcccccggcccgtctccgcgctcaccacgcctgcgctctccgctcccaccttctttcttcagccgaggccgccgccgcctctccttgctgcagccatggagtcttccactttcgccttggtgcctgtcttcgcccacctgagcatcctccagagcctcgtgccagctgctggtgcagcctctcctgttgccatcagtgcccagcacctgtgctacagccatgtcactcctggcgaccctggggctggagctggacagggccctgctcccagctagtgggctgggatggctcgtagactatgggaaactccccccggcccctgcccccctggctccctatgaggtccttgggggagccctggagggcgggcttccagtggggggagagcccctggcaggtgatggcttctctgactggatgactgagcgagttgatttcacagctctcctccctctggagcctcccctaccccccggcaccctcccccaaccttccccaaccccacctgacctggaagctatggcctccctcctcaagaaggagctggaacagatggaagacttcttcctagatgccccgcccgcctattatcaaccgttgtgtcttgtggtaaacgctcctcatcttataagacttttcatttattttttgccttagtgcttatgaattctttgtatggtctttgctaaatctcaaattctttgccctggtattacattatatataaaggtgtctgttataccttttaaaat

SEQ ID NO: 402169 - DNA, 367 bp, Homo sapiens
tgttatgttttaatatttttagagatggagtctcactgttttgcctagactggagtgcagtggcccttcctaattgtttaatacaatttatgcgtataatctaattatagtaaggcaaggaagtgtaactttgaaatacatcagtagtaaaccacgcatcttgcgggtagtggacaaaccaagggaaggactgttcctcccacagagaggacattgtgggctaatcatatgcttatttacacctgctcttttttaaagcccccaagttcatgtggctaccatctgaactaactacccaaaaattttcactctgattcctattttgaataacatgcttatactcaccaataaatctttagttcaaatg

SEQ ID NO: 402170 - DNA, 439 bp, Homo sapiens
ggaatgaaggtcctcagtgacaggcgctgtgtgtcctcccaccatccgagatccaggcagacacgctgtggaatgaaggtcctcggtgacaggcgctgtgtgtcctccgaccatccgacatccaggcagacatgctgtggaatgaaggtcctcagtgacaggtgctctgtggcttacgaccatccgagatccaggcagacactctgtggaatgaaggtcctcggtgacaggcgctctgtggcctccatctcatcctacccttcagagcgcccgacctcacccctctggtagaagctcgcacatccagtggccagcccttcccttgctttctgggagaagcaccgtgacttgtagaaatgaccacaatatttttttaaatgaagttatgcaaatctgatagactgaagtaaatgtttcataaaatcaatgactgtttaaa

SEQ ID NO: 402171 - DNA, 468 bp, Homo sapiens
agaagaaaaatgaggagaatgctgtctcatggaagacaagctagcaaagcttggagaagcctgaacaagctggtcaccctcactgtcaaagactttcatttccacggaagggaaactgatgacctgggaccattggaagaactatatggatgaagcagttctaaggactgcaaagctgcgcagcgggaaccaactccctactgcagttatcattcgcctttaaagtctccgtgtcaagacacacagaaagtgtctacaccaaatggacaaacgttccagggggtttccttcccaactgcttattaagaaatccatcctcttcacatcagtgggacttcattctactcaaattccatcaattcccaatagctccaacacgaggacaaaccctaggagatgagggtgccatctcaagtctcttattttggttatttaactgaataagaaaatgtgtataactgcaaaaaa

SEQ ID NO: 402172 - DNA, 195 bp, Homo sapiens
tgcactactttgctccccctactttatcaattccagcctaatatttgtaccagtggcattgatgtagttcctttagcttttacctactgtggaattatagcagtttgaggaaaatcatattgagcctcatatctgtagataacaacatgaaacagataaattttggccttaaataatgttaacagagtttaagat

SEQ ID NO: 402173 - DNA, 455 bp, Homo sapiens
aaacatggtcatcccactctgagatgacaagagccactcctctagagacctgggggattttagaacagggctttcaaggtaatgaaggaagagaatcttctttggacttctttttgctccagatgcggagaaggcaacttcccggagtctctaccagtgagaaggctacagaatcatgggcagataaggtctcgctctgtggctatagctcactgcagcctcaaattcctgcgctcaagtaatcctcccacctcagcttcccaagtagatgggactacaggtatgtgccaccaagcccagctcctttctcaagctttaaaacaacaacgaaaacaaacaaacaaaggaaaaacctttgcattgtgtaatttagatttattttgtaaccatgttggattaagtataatttttatactgaggactcctctctttctttaaatcaggggaaaaaaaaa

SEQ ID NO: 402174 - DNA, 670 bp, Homo sapiens
aaacatggtcatcccactctgagatgacaagagccactcctctagagacctgggggattttagaacagggctttcaaggtaatgaaggaagagaatcttctttggacttctttttgctccagatgcggagaaggcaacttcccggagtctctaccagtgagaaggctacagaatcatgggcagataaggtctcgctctgtggctatagctcactgcagcctcaaattcctgcgctcaagtaatcctcccacctcagcttcccaagtagatgggactacagcgatggggtctcactatgttgcccaggctggtctcaaactacagtggctcaaacaatccttccagtactgcctcccaaagtgctgggattacaggcgtgagccaccaaactgcaattacttttgcaccaacctaataataccaacaagcagatgagcttggaaaacactgctgaactccagaaaggaaagtagctcagggcatacctagagtgtagtcttgcaagaccatgagcagaggatccagctaacacatgcctggactctagaccagtggacagtgagatagtaaagggttgtttctcaagccaccaaattgtggtaattgttgcacagcaatagaaatataatactataagctatcaggttagtttgagctctgagtacatatg

SEQ ID NO: 402175 - DNA, 391 bp, Homo sapiens
ccatcctgtctaaaactgcatccccaaacccttcctatcccttttctccacttttttctttttttaaactatagttcttatcaacatagtatatgttttgcttatttatcctgtttattgtctgactcaacaagtagaatttgaactttaaaaggcctatgatttttatctattttgatcaatgctttctatctaatgcctggaacaatgacacatagcagatactcagaaagtttttactgaatgaatatagtaactaagcagcctttagaaaagtcttggagaacactttcatctgagtagtgaggtcaaaggcggatatcaacgaggtgagacataaatgtgagggaaggaaacagaattacaaagtatagcctattttttaaacagc

SEQ ID NO: 402176 - DNA, 384 bp, Homo sapiens
atggggtctcaccatgttggctaggatggtctcgatctcttgaccttgtgtctgcccacctcggccaggatttgcattttatactccaataccatcttgtgctttatacctcctactatattgctggcctcatctcatttgctcacagtgtccccctgctggaatgtgctcctcaccacccgttcctcctctgagagatacagcccaggtgttgcctcctaagggaaaccttcttaaatctgggttagattggattgggggtccctcctctgtgctcccacagtatcttgtacctcatgagggtcagaatcctgtgccgtcatcatttacatatctcccctctcactaggacctgagttcttggagcactgagacctgctttaa

SEQ ID NO: 402177 - DNA, 413 bp, Homo sapiens
aacaggcatccttgaaagtttcatagtttacaataataaacattaatctcactctgcaggagcagggagaagtacaaccagtctccacttctggggtagtgaaggagaaaggcagtgatggggagtttccaggtgctgagattcaacccaatgcaacttgctacctggctaagccatctatgacttccacatcctgaagtcctcagactttccttttactcctctcccaaactcagtactcctggggcatttcccccagattgtgggagccaccagcagagacaagatctggggaaatactggtgtcagagcagcccagggaagggagaagcattcctgaaatcaaaggttgaaattctccttatacgttttccataaaaatgtggatgtttttggctcaaataagaataaca

SEQ ID NO: 402178 - DNA, 402 bp, Homo sapiens
ccttcaagacatgatgactgtttgtaatttatctttaaaagaatgccatagtaactggtgtgtacccctaattaatcataggaaggattgaccagacatcctttaacaattcttgctggactctctgctctttgggaaaaggttgaagagtatttattcaatgggagaaggacaccagctctctgtcctttaagtttatgtcttagctgttcacatatctggtggcaacaacttatgttgtctttgactgtgagaagagaaaatagcctagctctttttttttttttttttttttaatagaaacagtgtctcatgatgttccctaggctggtcttgaactcctgagctcaagccatcctcttgcctcagccttccaaagtgctgagattacaggtgtgagtc

SEQ ID NO: 402179 - DNA, 1890 bp, Homo sapiens
gtcattgtttgtaaactggaagtaacaactagctaccccatagggttatcctgagaattaaattgagctgatgctgatgaagccggtagcacagtgtaagtactcaataaatggtagctggtatggcattatcatttttcctctttaattcctctttgtgcttttaaaaatcttttaggctgctgtttcagagaaacaacaaactcacagtgctttttcccattctctcacttcacaacaacaatcaacatagaagacttctgtaaccaaatgtgtgggcgtttttcaccacatatcaagcagcagccaccagctgggtgtcctctaatttagtttcattttctgatgctgtcttcctggagatagcctcagatcccacaagatgtccctcctccccgcaaccagtcgataagtcagggcctctggaacttctgaccaaccagcttcaagttggggttctcatgaccccccgctttgggttcaattaatttgctacagcagctctcagaactaaaagaaacacatttaccagtttattatagaggatattacaaagaatatagatggggagatgtataggctgaggtacaggggaaggagcatggagttgccatgcccctcctgggtacaccaccctccaggaatgtccacatattcagcttattcaaaagttctccaaactctgtcctttaggaatatttatggagacttcattgggtaagatgattaattaagccattggcctttaggaagtagtgctgcaagtcccaaccttctaatcctgccttggcctttctggtgaccagcccccatcctgaaactacctggggggctatcagccatcagtcaatagtttgtcattagtatacaaaaagacattacttttgagattcctttgccaggaaacaggatgaagagcaaatacatatttcactgtatcacaggtgctaattttggtttagcaaatctctatagtcttcccttttttggggaaggagctgggtcaacctttgtggagtcaagatgaatcaaatacagtcccagcccctaagaagtattggatccagcagaggaggtgagatgaccacagccataatttaaggcagaaggtattagaaaattacaaaatacaatggaagagagaggtaacttctagtttgggaggttggaaagtactttctaaaaacatgcctggcatttaagggtgaagaggatttggacatatagaggcattaaaggaaggagcaaagaaatgggcagtgttcaggggcacttggctcacagtgagaagagggtatgtgttgggaaaggaatagttgctgaggctggaggggtaagttgagggcaagtcactaaaggcgctgagtgtcaggttgaagagttgggcctttatcctgtaagtaaagaaaggcaaatctcatttctagaactcttatgaacagttcatagtggctacttaaagtactgtattgaaaaggatacctagatgttatctgggcccagtggagaagactgttgtgcttgattaatggtgtgtgccaggggctcagtgggtgtgttagcaaccatgccacattatctatggataaaatatatataggagtagagaccgtataacccagggattaacatggtctgtggagctgggctgcttaaatcctggataagaagtgactgctgtggtctggctgcatggtcctgaggacctgaaccagggtcaggggcatgggagggaagagcctacacagtgaatgggctaaacctgggaacattttgaatgtgggactaagagaggagggctagattgctctacaatgctgcagaagtttctacctgcctggctgggaggtaggagggtctggtttggggatgtggccctgaggagaggac

SEQ ID NO: 402180 - DNA, 2977 bp, Homo sapiens
cgtggaggtcccgccccggaactgcagttgctgctgcagctgaggtacagcggcggtttctgaggttcttcactcgcgactgacggagctgcggtggcgtctccacacgcaaccatgaagttgaaggacacaaaatcaaggccaaagcagtcaagctgtggcaaatttcagacaaagggaatcaaagttgtgggaaaatggaaggaagtgaagattgacccaaatatgtttgcagatggacagatggatgacttggtgtgctttgaggaattgacagattaccagttggtctcccctgccaagaatccctccagtctcttctcaaaggaagcacccaagagaaaggcacaagctgtttcagaagaagaggaggaggaggagggaaagtctagctcaccaaagaaaaagatcaagttgaagaaaagtaaaaatgtagcaactgaaggaaccagtacccagaaagaatttgaagtgaaagatcctgagctggaggcccagggagatgacatggtttgtgatgatccggaggctggggagatgacatcagaaaacctggtccaaactgctccaaaaaagaagaaaaataaagggaaaaaagggttggagccttctcagagcactgctgccaaggtgcccaaaaaagcgaagacatggattcctgaagttcatgatcagaaagcagatgtgtcagcttggaaggacctgtttgttcccaggccggttctccgagcactcagctttctaggcttctctgcacccacaccaatccaagccctgaccttggcacctgccatccgtgacaaactggacatccttggggctgctgagacaggaagtgggaaaactcttgcctttgccatcccaatgattcatgcggtgttgcagtggcagaagaggaatgctgcccctcctccaagtaacaccgaagcaccacctggagagaccagaactgaggccggagctgagactagatcaccaggcaaggctgaagctgagtctgatgcattgcctgacgatactgtaattgagagtgaagcactgcccagtgatattgcagccgaggccagagccaagactggaggcactgtctcagaccaggcgttgctctttggtgacgatgatgctggtgaagggccttcttccctgatcagggagaaacctgttcccaaacagaatgagaatgaggaggaaaatcttgataaagagcagactggaaatctaaaacaggagttggatgacaaaagcgccacctgtaaggcatatccaaagcgtcctctgcttggactggttctgactcccactcgagagctggccgtccaggtcaaacagcacattgatgctgtggccaggtttacaggaattaaaactgctattttggttggtggaatgtccacgcagaaacagcagaggatgctgaaccgtcgtcctgagattgtggttgctactccaggccggctgtgggaattaattaaagaaaagcattatcatttgaggaaccttcggcagctcaggtgcctggtagtggatgaggctgaccggatggttgagaaaggccattttgctgagctctcacagctgctagagatgctcaatgactcccaatacaacccaaagagacaaacgcttgttttttctgccacactcaccctggtgcatcaggctcctgctcgaatccttcataagaagcacaccaagaaaatggataaaacagccaaacttgacctccttatgcagaaaattggcatgaggggcaagcccaaggtcattgacctcacaaggaatgaggccacggtggagacgctaacagagaccaagatccattgtgagactgatgagaaagacttctacttgtactacttcctgatgcagtatccaggccgcagcttagtgtttgccaacagtatctcctgcatcaaacgcctctctgggctcctcaaagtccttgatatcatgcccttgaccctgcatgcctgtatgcaccagaagcagaggctcagaaacctggagcagtttgcccgtctggaagactgtgttctcttggcaacagatgtggcagctcggggtctggatattcctaaagtccagcatgtcatccattaccaggtcccacgtacctcggagatttatgtccaccgaagtggtcgaactgctcgagctaccaatgaaggcctcagtctgatgctcattgggcctgaggatgtgatcaactttaagaagatttacaaaacgctcaagaaagatgaggatatcccactgttccccgtgcagacaaaatacatggatgtggtcaaggagcgaatccgtttagctcgacagattgagaaatctgagtatcggaacttccaggcttgcctgcacaactcttggattgagcaggcagcagctgccctggagattgagctggaagaagacatgtataagggacatgtataagggagggaaaagctgaccagcaagaagaacgtcggagacaaaagcagatgaaggttctgaagaaggagctgcgccacctgctgtcccagccactgtttacggagagccagaaaaccaagtatcccactcagtctggcaagccgcccctgcttgtgtctgccccaagtaagagcgagtctgctttgagctgtctctccaagcagaagaagaagaagacaaagaagccgaaggagccacagccggaacagccacagccaagtacaagtgcaaattaactggtcaagtgtgtcagtgactgcacattggtttctgttctctggctatttgcaaaacctctcccacccttgtgtttcactccaccaccaaccccaggtaaaaaagtctccctctcttccactcacacccatagcgggagagacctcatgcagatttgcattgttttggagtaagaattcaatgcagcagcttaatttttctgtattgcagtgtttataggcttcttgtgtgttaaacttgatttcataaattaaaaacaatggtcaga

SEQ ID NO: 402181 - DNA, 1458 bp, Homo sapiens
gtcattgtttgtaaactggaagtaacaactagctaccccatagggttatcctgagaattaaattgagctgatgctgatgaagccggtagcacagtgtaagtactcaataaatggtagctggtatggcattatcatttttcctctttaattcctctttgtgcttttaaaaatcttttaggctgctgtttcagagaaacaacaaactcacagtgctttttcccattctctcacttcacaacaacaatcaacatagaagacttctgtaaccaaatgtgtgggcgtttttcaccacatatcaagcagcagccaccagctgggtgtcctctaatttagtttcattttctgatgctgtcttcctggagatagcctcagatcccacaagatgtccctcctccccgcaaccagtcgataagtcagggcctctggaacttctgaccaaccagcttcaagttggggttctcatgaccccccgctttgggttcaattaatttgctacagcagctctcagaactaaaagaaacacatttaccagtttattatagaggatattacaaagaatatagatggggagatgtataggctgaggtacaggggaaggagcatggagttgccatgcccctcctgggtacaccaccctccaggaatgtccacatattcagcttattcaaaagttctccaaactctgtcctttaggaatatttatggagacttcattgggtaagatgattaattaagccattggcctttaggaagtagtgctgcaagtcccaaccttctaatcctgccttggcctttctggtgaccagcccccatcctgaaactacctggggggctatcagccatcagtcaatagtttgtcattagtatacaaaaagacattacttttgagattcctttgccaggaaacaggatgaagagcaaatacatatttcactgtatcacaggtgctaattttggtttagcaaatctctatagtcttcccttttttggggaaggagctgggtcaacctttgtggagtcaagatgaatcaaatacagtcccagcccctaagaagtattggatccagcagaggaggtgagatgaccacagccataatttaaggcagaagccaagcagaagaagaagaagacaaagaagccgaaggagccacagccggaacagccacagccaagtacaagtgcaaattaactggtcaagtgtgtcagtgactgcacattggtttctgttctctggctatttgcaaaacctctcccacccttgtgtttcactccaccaccaaccccaggtaaaaaagtctccctctcttccactcacacccatagcgggagagacctcatgcagatttgcattgttttggagtaagaattcaatgcagcagcttaatttttctgtattgcagtgtttataggcttcttgtgtgttaaacttgatttcataaattaaaaacaatggtcaga

SEQ ID NO: 402182 - DNA, 345 bp, Homo sapiens
gcacgaggtgcaaattaactgccctggtacttggctgtggctgttccggctgtggccaagtacaagtgcaaattaactggtcaagtgtgtcagtgactgcacattggtttctgttctctggctatttgcaaaacctctcccacccttgtgtttcactccaccaccaaccccaggtaaaaaagtctccctctcttccactcacacccatagcgggagagacctcatgcagatttgcattgttttggagtaagaattcaatgcagcagcttaatttttctgtattgcagtgtttataggcttcttgtgtgttaaacttgatttcataaattaaaaacaatggtcaga

SEQ ID NO: 402183 - DNA, 895 bp, Homo sapiens
cgtggaggtcccgccccggaactgcagttgctgctgcagctgaggtacagcggcggtttctgaggttcttcactcgcgactgacggagctgcggtggcgtctccacacggtgagtaccaaaacgagcggggttggagccgactctggagaggggctgaggccaggaacccgggttcctatcgcgggtcgctctgggccggtgggttcccgggtccagagagggcggccgccggcccaagccgtccaaccgagctgcgtgccacggtccccgcgccttgggctccttgtccggtcatcagagcctgacggccttggcttctcggcttctcggtttctcggtttcgtgcgcgcgttcgtgcctgagacaaagcgagagggccgcgcgggaccggcgtcacgaggagacagaggcccttctactctgcctggcgctctccgtgtcctcgcccggttcgcgtggcacccctcgccctctccttgttgaaccccgcgtgtttctttgtttttttgtttgtttgttttttgtttttttgccgtggcgcagcgggtccggcgggcactgtgtgcgaacgtgctctcctcgccgggcgccatgctcagcggttttttttgacgtgcgtcactttttcgtagtggcgtataaggattctgtgggacagatgtcctcgtttttcccattgtgcagactgggaaataagagactcagagattaatacgtccaccgcagagccacagctgacaagtggtggatctggatttgaaccaaagtttaccttggtctttttcacggaatctgttatctttcttggcctttctgaaaaggaaaaacctggatcgagttccacccaaacgagttgggcctaaatggccattaagccacttaaaatatgatgaa

SEQ ID NO: 402184 - DNA, 648 bp, Homo sapiens
cgtggaggtcccgccccggaactgcagttgctgctgcagctgaggtacagcggcggtttctgaggttcttcactcgcgactgacggagctgcggtggcgtctccacacgatggacagatggatgacttggtgtgctttgaggaattgacagattaccagttggtctcccctgccaagaatccctccagtctcttctcaaaggaagcacccaagagaaaggcacaagctgtttcagaagaagaggaggaggaggagggaaagtctagctcaccaaaaaaaaaaaaaaaaaaaaaaaaaaaaaaaaaaaaaaaaaaaaaaaaaaaaaacaaaaaaaaaaaaaaaaaaaaaaaaaaaaaaaaaaaaaaaaaaaaaaaaaaaaaaaacctgggggggggccccggtccccatttggccttatagggggccggtttacaatccacgggcgggcgtttacaacggcggaccgggaaaaaccttggcgttccccaatttatcggcctggaaaacatcccccttgtgccagttggcgaataccgaaaaggccccaaccgtcgcctttccaacagtgggccaccttaaggggaatgggaaattgaagccttaaatttttgtaaaattcgcgtaaactttgggaaaggaatcgcccca

SEQ ID NO: 402185 - DNA, 3058 bp, Homo sapiens
  misc_feature (2986)..(2986): n is a, c, g, or t
cgtggaggtcccgccccggaactgcagttgctgctgcagctgaggtacagcggcggtttctgaggttcttcactcgcgactgacggagctgcggtggcgtctccacacgcaaccatgaagttgaaggacacaaaatcaaggccaaagcagtcaagctgtggcaaatttcagacaaagggaatcaaagttgtgggaaaatggaaggaagtgaagattgacccaaatatgtttgcagatggacagatggatgacttggtgtgctttgaggaattgacagattaccagttggtctcccctgccaagaatccctccagtctcttctcaaaggaagcacccaagagaaaggcacaagctgtttcagaagaagaggaggaggaggagggaaagtctagctcaccaaagaaaaagatcaagttgaagaaaagtaaaaatgtagcaactgaaggaaccagtacccagaaagaatttgaagtgaaagatcctgagctggaggcccagggagatgacatggtttgtgatgatccggaggctggggagatgacatcagaaaacctggtccaaactgctccaaaaaagaagaaaaataaagggaaaaaagggttggagccttctcagagcactgctgccaaggtgcccaaaaaagcgaagacatggattcctgaagttcatgatcagaaagcagatgtgtcagcttggaaggacctgtttgttcccaggccggttctccgagcactcagctttctaggcttctctgcacccacaccaatccaagccctgaccttggcacctgccatccgtgacaaactggacatccttggggctgctgagacaggaagtgggaaaactcttgcctttgccatcccaatgattcatgcggtgttgcagtggcagaagaggaatgctgcccctcctccaagtaacaccgaagcaccacctggagagaccagaactgaggccggagctgagactagatcaccaggcaaggctgaagctgagtctgatgcattgcctgacgatactgtaattgagagtgaagcactgcccagtgatattgcagccgaggccagagccaagactggaggcactgtctcagaccaggcgttgctctttggtgacgatgatgctggtgaagggccttcttccctgatcagggagaaacctgttcccaaacagaatgagaatgaggaggaaaatcttgataaagagcagactggaaatctaaaacaggagttggatgacaaaagcgccacctgtaaggcatatccaaagcgtcctctgcttggactggttctgactcccactcgagagctggccgtccaggtcaaacagcacattgatgctgtggccaggtttacaggaattaaaactgctattttggttggtggaatgtccacgcagaaacagcagaggatgctgaaccgtcgtcctgagattgtggttgctactccaggccggctgtgggaattaattaaagaaaagcattatcatttgaggaaccttcggcagctcaggtgcctggtagtggatgaggctgaccggatggttgagaaaggccattttgctgagctctcacagctgctagagatgctcaatgactcccaatacaacccaaagagacaaacgcttgttttttctgccacactcaccctggtgcatcaggctcctgctcgaatccttcataagaagcacaccaagaaaatggataaaacagccaaacttgacctccttatgcagaaaattggcatgaggggcaagcccaaggtcattgacctcacaaggaatgaggccacggtggagacgctaacagagaccaagatccattgtgagactgatgagaaagacttctacttgtactacttcctgatgcagtatccaggccgcagcttagtgtttgccaacagtatctcctgcatcaaacgcctctctgggctcctcaaagtccttgatatcatgcccttgaccctgcatgcctgtatgcaccagaagcagaggctcagaaacctggagcagtttgcccgtctggaagactgtgttctcttggcaacagatgtggcagctcggggtctggatattcctaaagtccagcatgtcatccattaccaggtcccacgtacctcggagatttatgtccaccgaagtggtcgaactgctcgagctaccaatgaaggcctcagtctgatgctcattgggcctgaggatgtgatcaactttaagaagatttacaaaacgctcaagaaagatgaggatatcccactgttccccgtgcagacaaaatacatggatgtggtcaaggagcgaatccgtttagctcgacagattgagaaatctgagtatcggaacttccaggcttgcctgcacaactcttggattgagcaggcagcagctgccctggagattgagctggaagaagacatgtataagggagggaaaagctgaccagcaagaagaacgtcggagacaaaagcagatgaaggttctgaagaaggagctgcgccacctgctgtcccagccactgtttacggagagccagaaaaccaagtatcccactcagtctggcaagccgcccctgcttgtgtctgccccaagtaagagcgagtctgctttgagctgtctctccaagcagaagaagaagaagacaaagaagccgaaggagccacagccggaacagccacagccaagtacaagtgcaaattaactggtcaagtgtgtcagtgactgcacattggtttctgttctctggctatttgcaaaacctctcccacccttgtgtttcactccaccaccaaccccaggtaaaaaagtctccctctcttccactcacacccatagcgggagagacctcatgcagatttgcattgttttggagtaagaattcaatgcagcagcttaatttttctgtattgcagtgtttataggcttcttgtgtgttaaacttgatttcataaattaaaaacaatggtcagaaaaaaaaaaaatcggggctttnggggggaaggattgaaggcaggcattgttccgcccttggaaagggagcggcccaggggtatgatggaagaag

SEQ ID NO: 402186 - DNA, 2838 bp, Homo sapiens
cgtggaggtcccgccccggaactgcagttgctgctgcagctgaggtacagcggcggtttctgaggttcttcactcgcgactgacggagctgcggtggcgtctccacacgatggacagatggatgacttggtgtgctttgaggaattgacagattaccagttggtctcccctgccaagaatccctccagtctcttctcaaaggaagcacccaagagaaaggcacaagctgtttcagaagaagaggaggaggaggagggaaagtctagctcaccaaagaaaaagatcaagttgaagaaaagtaaaaatgtagcaactgaaggaaccagtacccagaaagaatttgaagtgaaagatcctgagctggaggcccagggagatgacatggtttgtgatgatccggaggctggggagatgacatcagaaaacctggtccaaactgctccaaaaaagaagaaaaataaagggaaaaaagggttggagccttctcagagcactgctgccaaggtgcccaaaaaagcgaagacatggattcctgaagttcatgatcagaaagcagatgtgtcagcttggaaggacctgtttgttcccaggccggttctccgagcactcagctttctaggcttctctgcacccacaccaatccaagccctgaccttggcacctgccatccgtgacaaactggacatccttggggctgctgagacaggaagtgggaaaactcttgcctttgccatcccaatgattcatgcggtgttgcagtggcagaagaggaatgctgcccctcctccaagtaacaccgaagcaccacctggagagaccagaactgaggccggagctgagactagatcaccaggcaaggctgaagctgagtctgatgcattgcctgacgatactgtaattgagagtgaagcactgcccagtgatattgcagccgaggccagagccaagactggaggcactgtctcagaccaggcgttgctctttggtgacgatgatgctggtgaagggccttcttccctgatcagggagaaacctgttcccaaacagaatgagaatgaggaggaaaatcttgataaagagcagactggaaatctaaaacaggagttggatgacaaaagcgccacctgtaaggcatatccaaagcgtcctctgcttggactggttctgactcccactcgagagctggccgtccaggtcaaacagcacattgatgctgtggccaggtttacaggaattaaaactgctattttggttggtggaatgtccacgcagaaacagcagaggatgctgaaccgtcgtcctgagattgtggttgctactccaggccggctgtgggaattaattaaagaaaagcattatcatttgaggaaccttcggcagctcaggtgcctggtagtggatgaggctgaccggatggttgagaaaggccattttgctgagctctcacagctgctagagatgctcaatgactcccaatacaacccaaagagacaaacgcttgttttttctgccacactcaccctggtgcatcaggctcctgctcgaatccttcataagaagcacaccaagaaaatggataaaacagccaaacttgacctccttatgcagaaaattggcatgaggggcaagcccaaggtcattgacctcacaaggaatgaggccacggtggagacgctaacagagaccaagatccattgtgagactgatgagaaagacttctacttgtactacttcctgatgcagtatccaggccgcagcttagtgtttgccaacagtatctcctgcatcaaacgcctctctgggctcctcaaagtccttgatatcatgcccttgaccctgcatgcctgtatgcaccagaagcagaggctcagaaacctggagcagtttgcccgtctggaagactgtgttctcttggcaacagatgtggcagctcggggtctggatattcctaaagtccagcatgtcatccattaccaggtcccacgtacctcggagatttatgtccaccgaagtggtcgaactgctcgagctaccaatgaaggcctcagtctgatgctcattgggcctgaggatgtgatcaactttaagaagatttacaaaacgctcaagaaagatgaggatatcccactgttccccgtgcagacaaaatacatggatgtggtcaaggagcgaatccgtttagctcgacagattgagaaatctgagtatcggaacttccaggcttgcctgcacaactcttggattgagcaggcagcagctgccctggagattgagctggaagaagacatgtataagggagggaaaagctgaccagcaagaagaacgtcggagacaaaagcagatgaaggttctgaagaaggagctgcgccacctgctgtcccagccactgtttacggagagccagaaaaccaagtatcccactcagtctggcaagccgcccctgcttgtgtctgccccaagtaagagcgagtctgctttgagctgtctctccaagcagaagaagaagaagacaaagaagccgaaggagccacagccggaacagccacagccaagtacaagtgcaaattaactggtcaagtgtgtcagtgactgcacattggtttctgttctctggctatttgcaaaacctctcccacccttgtgtttcactccaccaccaaccccaggtaaaaaagtctccctctcttccactcacacccatagcgggagagacctcatgcagatttgcattgttttggagtaagaattcaatgcagcagcttaatttttctgtattgcagtgtttataggcttcttgtgtgttaaacttgatttcataaattaaaaacaatggtcaga

SEQ ID NO: 402187 - DNA, 2529 bp, Homo sapiens
cgtggaggtcccgccccggaactgcagttgctgctgcagctgaggtacagcggcggtttctgaggttcttcactcgcgactgacggagctgcggtggcgtctccacacgcaaccatgaagttgaaggacacaaaatcaaggccaaagcagtcaagctgtggcaaatttcagacaaagggaatcaaagttgtgggaaaatggaaggaagtgaagattgacccaaatatgtttgcagatggacagatggatgacttggtgtgctttgaggaattgacagattaccagttggtctcccctgccaagaatccctccagtctcttctcaaaggaagcacccaagagaaaggcacaagctgtttcagaagaagaggaggaggaggagggaaagtctagctcaccaaagaaaaagatcaagttgaagaaaagtaaaaatgtagcaactgaaggaaccagtacccagaaagaatttgaagtgaaagatcctgagctggaggcccagggagatgacatggtttgtgatgatccggaggctggggagatgacatcagaaaacctggtccaaactgctccaaaaaagaagaaaaataaagggaaaaaagggttggagccttctcagagcactgctgccaaggtgcccaaaaaagcgaagacatggattcctgaagttcatgatcagaaagcagatgtgtcagcttggaaggacctgtttgttcccaggccggttctccgagcactcagctttctaggcttctctgcacccacaccaatccaagccctgaccttggcacctgccatccgtgacaaactggacatccttggggctgctgagacaggaagtgggaaaactcttgcctttgccatcccaatgattcatgcggtgttgcagtggcagaagaggaatgctgcccctcctccaagtaacaccgaagcaccacctggagagaccagaactgaggccggagctgagactagatcaccaggcaaggctgaagctgagtctgatgcattgcctgacgatactgtaattgagagtgaagcactgcccagtgatattgcagccgaggccagagccaagactggaggcactgtctcagaccaggcgttgctctttggtgacgatgatgctggtgaagggccttcttccctgatcagggagaaacctgttcccaaacagaatgagaatgaggaggaaaatcttgataaagagcagactggaaatctaaaacaggagttggatgacaaaagcgccacctgtaaggcatatccaaagcgtcctctgcttggactggttctgactcccactcgagagctggccgtccaggtcaaacagcacattgatgctgtggccaggtttacaggaattaaaactgctattttggttggtggaatgtccacgcagaaacagcagaggatgctgaaccgtcgtcctgagattgtggttgctactccaggccggctgtgggaattaattaaagaaaagcattatcatttgaggaaccttcggcagctcaggtgcctggtagtggatgaggctgaccggatggttgagaaagagaggctcagaaacctggagcagtttgcccgtctggaagactgtgttctcttggcaacagatgtggcagctcggggtctggatattcctaaagtccagcatgtcatccattaccaggtcccacgtacctcggagatttatgtccaccgaagtggtcgaactgctcgagctaccaatgaaggcctcagtctgatgctcattgggcctgaggatgtgatcaactttaagaagatttacaaaacgctcaagaaagatgaggatatcccactgttccccgtgcagacaaaatacatggatgtggtcaaggagcgaatccgtttagctcgacagattgagaaatctgagtatcggaacttccaggcttgcctgcacaactcttggattgagcaggcagcagctgccctggagattgagctggaagaagacatgtataagggagggaaaagctgaccagcaagaagaacgtcggagacaaaagcagatgaaggttctgaagaaggagctgcgccacctgctgtcccagccactgtttacggagagccagaaaaccaagtatcccactcagtctggcaagccgcccctgcttgtgtctgccccaagtaagagcgagtctgctttgagctgtctctccaagcagaagaagaagaagacaaagaagccgaaggagccacagccggaacagccacagccaagtacaagtgcaaattaactggtcaagtgtgtcagtgactgcacattggtttctgttctctggctatttgcaaaacctctcccacccttgtgtttcactccaccaccaaccccaggtaaaaaagtctccctctcttccactcacacccatagcgggagagacctcatgcagatttgcattgttttggagtaagaattcaatgcagcagcttaatttttctgtattgcagtgtttataggcttcttgtgtgttaaacttgatttcataaattaaaaacaatggtcaga

SEQ ID NO: 402188 - DNA, 2923 bp, Homo sapiens
cgtggaggtcccgccccggaactgcagttgctgctgcagctgaggtacagcggcggtttctgaggttcttcactcgcgactgacggagctgcggtggcgtctccacacgcaaccatgaagttgaaggacacaaaatcaaggccaaagcagtcaagctgtggcaaatttcagacaaagggaatcaaagttgtgggaaaatggaaggaagtgaagattgacccaaatatgtttgcagatggacagatggatgacttggtgtgctttgaggaattgacagattaccagttggtctcccctgccaagaatccctccagtctcttctcaaaggaagcacccaagagaaaggcacaagctgtttcagaagaagaggaggaggaggagggaaagtctagctcaccaaagaaaaagatcaagttgaagaaaagtaaaaatgtagcaactgaaggaaccagtacccagaaagaatttgaagtgaaagatcctgagctggaggcccagggagatgacatggtttgtgatgatccggaggctggggagatgacatcagaaaacctggtccaaactgctccaaaaaagaagaaaaataaagggaaaaaagggttggagccttctcagagcactgctgccaaggtgcccaaaaaagcgaagacatggattcctgaagttcatgatcagaaagcagatgtgtcagcttggaaggacctgtttgttcccaggccggttctccgagcactcagctttctaggcttctctgcacccacaccaatccaagccctgaccttggcacctgccatccgtgacaaactggacatccttggggctgctgagacaggaagtgggaaaactcttgcctttgccatcccaatgattcatgcggtgttgcagtggcagaagaggaatgctgcccctcctccaagtaacaccgaagcaccacctggagagaccagaactgaggccggagctgagactagatcaccaggcaaggctgaagctgagtctgatgcattgcctgacgatactgtaattgagagtgaagcactgcccagtgatattgcagccgaggccagagccaagactggaggcactgtctcagaccaggcgttgctctttggtgacgatgatgctggtgaagggccttcttccctgatcagggagaaacctgttcccaaacagaatgagaatgaggaggaaaatcttgataaagagcagactggaaatctaaaacaggagttggatgacaaaagcgccacctgtaaggcatatccaaagcgtcctctgcttggactggttctgactcccactcgagagctggccgtccaggtcaaacagcacattgatgctgtggccaggtttacaggaattaaaactgctattttggttggtggaatgtccacgcagaaacagcagaggatgctgaaccgtcgtcctgagattgtggttgctactccaggccggctgtgggaattaattaaagaaaagcattatcatttgaggaaccttcggcagctcaggtgcctggtagtggatgaggctgaccggatggttgagaaaggccattttgctgagctctcacagctgctagagatgctcaatgactcccaatacaacccaaagagacaaacgcttgttttttctgccacactcaccctggtgcatcaggctcctgctcgaatccttcataagaagcacaccaagaaaatggataaaacagccaaacttgacctccttatgcagaaaattggcatgaggggcaagcccaaggtcattgacctcacaaggaatgaggccacggtggagacgctaacagagaccaagatccattgtgagactgatgagaaagacttctacttgtactacttcctgatgcagtatccaggccgcagcttagtgtttgccaacagtatctcctgcatcaaacgcctctctgggctcctcaaagtccttgatatcatgcccttgaccctgcatgcctgtatgcaccagaagcagaggctcagaaacctggagcagtttgcccgtctggaagactgtgttctcttggcaacagatgtggcagctcggggtctggatattcctaaagtccagcatgtcatccattaccaggtcccacgtacctcggagatttatgtccaccgaagtggtcgaactgctcgagctaccaatgaaggcctcagtctgatgctcattgggcctgaggatgtgatcaactttaagaagatttacaaaacgctcaagaaagatgaggatatcccactgttccccgtgcagacaaaatacatggatgtggtcaaggagcgaatccgtttagctcgacagattgagaaatctgagtatcggaacttccaggcttgcctgcacaactcttggattgagcaggcagcagctgccctggagattgagctggaagaagacatgtataagggacatgtataagggagggaaaagctgaccagcaagaagaacgtcggagacaaaagcagatgaaggttctgaagaaggagctgcgccacctgctgtcccagccactgtttacggagagccagaataagagcgagtctgctttgagctgtctctccaagcagaagaagaagaagacaaagaagccgaaggagccacagccggaacagccacagccaagtacaagtgcaaattaactggtcaagtgtgtcagtgactgcacattggtttctgttctctggctatttgcaaaacctctcccacccttgtgtttcactccaccaccaaccccaggtaaaaaagtctccctctcttccactcacacccatagcgggagagacctcatgcagatttgcattgttttggagtaagaattcaatgcagcagcttaatttttctgtattgcagtgtttataggcttcttgtgtgttaaacttgatttcataaattaaaaacaatggtcaga

SEQ ID NO: 402189 - DNA, 2861 bp, Homo sapiens
cgtggaggtcccgccccggaactgcagttgctgctgcagctgaggtacagcggcggtttctgaggttcttcactcgcgactgacggagctgcggtggcgtctccacacgcaaccatgaagttgaaggacacaaaatcaaggccaaagcagtcaagctgtggcaaatttcagacaaagggaatcaaagttgtgggaaaatggaaggaagtgaagattgacccaaatatgtttgcagatggacagatggatgacttggtgtgctttgaggaattgacagattaccagttggtctcccctgccaagaatccctccagtctcttctcaaaggaagcacccaagagaaaggcacaagctgtttcagaagaagaggaggaggaggagggaaagtctagctcaccaaagaaaaagatcaagttgaagaaaagtaaaaatgtagcaactgaaggaaccagtacccagaaagaatttgaagtgaaagatcctgagctggaggcccagggagatgacatggtttgtgatgatccggaggctggggagatgacatcagaaaacctggtccaaactgctccaaaaaagaagaaaaataaagggaaaaaagggttggagccttctcagagcactgctgccaaggtgcccaaaaaagcgaagacatggattcctgaagttcatgatcagaaagcagatgtgtcagcttggaaggacctgtttgttcccaggccggttctccgagcactcagctttctaggcttctctgcacccacaccaatccaagccctgaccttggcacctgccatccgtgacaaactggacatccttggggctgctgagacaggaagtgggaaaactcttgcctttgccatcccaatgattcatgcggtgttgcagtggcagaagaggaatgctgcccctcctccaagtaacaccgaagcaccacctggagagaccagaactgaggccggagctgagactagatcaccaggcaaggctgaagctgagtctgatgcattgcctgacgatactgtaattgagagtgaagcactgcccagtgatattgcagccgaggccagagccaagactggaggcactgtctcagaccaggcgttgctctttggtgacgatgatgctggtgaagggccttcttccctgatcagggagaaacctgttcccaaacagaatgagaatgaggaggaaaatcttgataaagagcagactggaaatctaaaacaggagttggatgacaaaagcgccacctgtaaggcatatccaaagcgtcctctgcttggactggttctgactcccactcgagagctggccgtccaggtcaaacagcacattgatgctgtggccaggtttacaggaattaaaactgctattttggttggtggaatgtccacgcagaaacagcagaggatgctgaaccgtcgtcctgagattgtggttgctactccaggccggctgtgggaattaattaaagaaaagcattatcatttgaggaaccttcggcagctcaggtgcctggtagtggatgaggctgaccggatggttgagaaaggccattttgctgagctctcacagctgctagagatgctcaatgactcccaatacaacccaaagagacaaacgcttgttttttctgccacactcaccctggtgcatcaggctcctgctcgaatccttcataagaagcacaccaagaaaatggataaaacagccaaacttgacctccttatgcagaaaattggcatgaggggcaagcccaaggtcattgacctcacaaggaatgaggccacggtggagacgctaacagagaccaagatccattgtgagactgatgagaaagacttctacttgtactacttcctgatgcagtatccaggccgcagcttagtgtttgccaacagtatctcctgcatcaaacgcctctctgggctcctcaaagtccttgatatcatgcccttgaccctgcatgcctgtatgcaccagaagcagaggctcagaaacctggagcagtttgcccgtctggaagactgtgttctcttggcaacagatgtggcagctcggggtctggatattcctaaagtccagcatgtcatccattaccaggtcccacgtacctcggagatttatgtccaccgaagtggtcgaactgctcgagctaccaatgaaggcctcagtctgatgctcattgggcctgaggatgtgatcaactttaagaagatttacaaaacgctcaagaaagatgaggatatcccactgttccccgtgcagacaaaatacatggatgtggtcaaggagcgaatccgtttagctcgacagattgagaaatctgagtatcggaacttccaggcttgcctgcacaactcttggattgagcaggcagcagctgccctggagattgagctggaagaagacatgtataagggacatgtataagggagggaaaagctgaccagcaagaagaacgtcggagacaaaagcagatgaaggttctgaagaaggagctgcgccacctgctgtcccagccactgtttacggagagccagaaaaccaagtatcccactcagtctggcaagccgcccctgcttgtgtctgccccaagtaagagcgagtctgctttgagctgtctctgttctctggctatttgcaaaacctctcccacccttgtgtttcactccaccaccaaccccaggtaaaaaagtctccctctcttccactcacacccatagcgggagagacctcatgcagatttgcattgttttggagtaagaattcaatgcagcagcttaatttttctgtattgcagtgtttataggcttcttgtgtgttaaacttgatttcataaattaaaaacaatggtcaga

SEQ ID NO: 402190 - DNA, 2872 bp, Homo sapiens
  misc_feature (2800)..(2800): n is a, c, g, or t
cgtggaggtcccgccccggaactgcagttgctgctgcagctgaggtacagcggcggtttctgaggttcttcactcgcgactgacggagctgcggtggcgtctccacacgcaaccatgaagttgaaggacacaaaatcaaggccaaagcagtcaagctgtggcaaatttcagacaaagggaatcaaagttgtgggaaaatggaaggaagtgaagattgacccaaatatgtttgcagatggacagatggatgacttggtgtgctttgaggaattgacagattaccagttggtctcccctgccaagaatccctccagtctcttctcaaaggaagcacccaagagaaaggcacaagctgtttcagaagaagaggaggaggaggagggaaagtctagctcaccaaagaaaaagatcaagttgaagaaaagtaaaaatgtagcaactgaaggaaccagtacccagaaagaatttgaagtgaaagatcctgagctggaggcccagggagatgacatggtttgtgatgatccggaggctggggagatgacatcagaaaacctggtccaaactgctccaaaaaagaagaaaaataaagggaaaaaagggttggagccttctcagagcactgctgccaaggtgcccaaaaaagcgaagacatggattcctgaagttcatgatcagaaagcagatgtgtcagcttggaaggacctgtttgttcccaggccggttctccgagcactcagctttctaggcttctctgcacccacaccaatccaagccctgaccttggcacctgccatccgtgacaaactggacatccttggggctgctgagacaggaagtgggaaaactcttgcctttgccatcccaatgattcatgcggtgttgcagtggcagaagaggaatgctgcccctcctccaagtaacaccgaagcaccacctggagagaccagaactgaggccggagctgagactagatcaccaggcaaggctgaagctgagtctgatgcattgcctgacgatactgtaattgagagtgaagcactgcccagtgatattgcagccgaggccagagccaagactggaggcactgtctcagaccaggcgttgctctttggtgacgatgatgctggtgaagggccttcttccctgatcagggagaaacctgttcccaaacagaatgagaatgaggaggaaaatcttgataaagagcagactggaaatctaaaacaggagttggatgacaaaagcgccacctgtaaggcatatccaaagcgtcctctgcttggactggttctgactcccactcgagagctggccgtccaggtcaaacagcacattgatgctgtggccaggtttacaggaattaaaactgctattttggttggtggaatgtccacgcagaaacagcagaggatgctgaaccgtcgtcctgagattgtggttgctactccaggccggctgtgggaattaattaaagaaaagcattatcatttgaggaaccttcggcagctcaggtgcctggtagtggatgaggctgaccggatggttgagaaaggccattttgctgagctctcacagctgctagagatgctcaatgactcccaatacaacccaaagagacaaacgcttgttttttctgccacactcaccctggtgcatcaggctcctgctcgaatccttcataagaagcacaccaagaaaatggataaaacagccaaacttgacctccttatgcagaaaattggcatgaggggcaagcccaaggtcattgacctcacaaggaatgaggccacggtggagacgctaacagagaccaagatccattgtgagactgatgagaaagacttctacttgtactacttcctgatgcagtatccaggccgcagcttagtgtttgccaacagtatctcctgcatcaaacgcctctctgggctcctcaaagtccttgatatcatgcccttgaccctgcatgcctgtatgcaccagaagcagaggctcagaaacctggagcagtttgcccgtctggaagactgtgttctcttggcaacagatgtggcagctcggggtctggatattcctaaagtccagcatgtcatccattaccaggtcccacgtacctcggagatttatgtccaccgaagtggtcgaactgctcgagctaccaatgaaggcctcagtctgatgctcattgggcctgaggatgtgatcaactttaagaagatttacaaaacgctcaagaaagatgaggatatcccactgttccccgtgcagacaaaatacatggatgtggtcaaggagcgaatccgtttagctcgacagattgagaaatctgagtatcggaacttccaggcttgcctgcacaactcttggattgagcaggcagcagctgccctggagattgagctggaagaagacatgtataagggacatgtataagggagggaaaagctgaccagcaagaagaacgtcggagacaaaagcagatgaaggttctgaagaaggagctgcgccacctgctgtcccagccactgtttacggagagccagaaaaccaagtatcccactcagtctggcaagccgcccctgcttgtgtctgccccaagtaagagcgagtctgctttgagctgtctctcactcacacccatagcgggagagacctcatgcagatttgcattgttttggagtaagaattcaatgcagcagcttaatttttctgtattgcagtgtttataggcttcttgtgtgttaaacttgatttcataaattaaaaacaatggtcagaaaaaaaaaaaatcggggctttnggggggaaggattgaaggcaggcattgttccgcccttggaaagggagcggcccaggggtatgatggaagaag

SEQ ID NO: 402191 - DNA, 2687 bp, Homo sapiens
cgtggaggtcccgccccggaactgcagttgctgctgcagctgaggtacagcggcggtttctgaggttcttcactcgcgactgacggagctgcggtggcgtctccacacgcaaccatgaagttgaaggacacaaaatcaaggccaaagcagtcaagctgtggcaaatttcagacaaagggaatcaaagttgtgggaaaatggaaggaagtgaagattgacccaaatatgtttgcagatggacagatggatgacttggtgtgctttgaggaattgacagattaccagttggtctcccctgccaagaatccctccagtctcttctcaaaggaagcacccaagagaaaggcacaagctgtttcagaagaagaggaggaggaggagggaaagtctagctcaccaaagaaaaagatcaagttgaagaaaagtaaaaatgtagcaactgaaggaaccagtacccagaaagaatttgaagtgaaagatcctgagctggaggcccagggagatgacatggtttgtgatgatccggaggctggggagatgacatcagaaaacctggtccaaactgctccaaaaaagaagaaaaataaagggaaaaaagggttggagccttctcagagcactgctgccaaggtgcccaaaaaagcgaagacatggattcctgaagttcatgatcagaaagcagatgtgtcagcttggaaggacctgtttgttcccaggccggttctccgagcactcagctttctaggcttctctgcacccacaccaatccaagccctgaccttggcacctgccatccgtgacaaactggacatccttggggctgctgagacaggaagtgggaaaactcttgcctttgccatcccaatgattcatgcggtgttgcagtggcagaagaggaatgctgcccctcctccaagtaacaccgaagcaccacctggagagaccagaactgaggccggagctgagactagatcaccaggcaaggctgaagctgagtctgatgcattgcctgacgatactgtaattgagagtgaagcactgcccagtgatattgcagccgaggccagagccaagactggaggcactgtctcagaccaggcgttgctctttggtgacgatgatgctggtgaagggccttcttccctgatcagggagaaacctgttcccaaacagaatgagaatgaggaggaaaatcttgataaagagcagactggaaatctaaaacaggagttggatgacaaaagcgccacctgtaaggcatatccaaagcgtcctctgcttggactggttctgactcccactcgagagctggccgtccaggtcaaacagcacattgatgctgtggccaggtttacaggaattaaaactgctattttggttggtggaatgtccacgcagaaacagcagaggatgctgaaccgtcgtcctgagattgtggttgctactccaggccggctgtgggaattaattaaagaaaagcattatcatttgaggaaccttcggcagctcaggtgcctggtagtggatgaggctgaccggatggttgagaaaggccattttgctgagctctcacagctgctagagatgctcaatgactcccaatacaacccaaagagacaaacgcttgttttttctgccacactcaccctggtgcatcaggctcctgctcgaatccttcataagaagcacaccaagaaaatggataaaacagccaaacttgacctccttatgcagaaaattggcatgaggggcaagcccaaggtcattgacctcacaaggaatgaggccacggtggagacgctaacagagaccaagatccattgtgagactgatgagaaagacttctacttgtactacttcctgatgcagtatccaggccgcagcttagtgtttgccaacagtatctcctgcatcaaacgcctctctgggctcctcaaagtccttgatatcatgcccttgaccctgcatgcctgtatgcaccagaagcagaggctcagaaacctggagcagtttgcccgtctggaagactgtgttctcttggcaacagatgtggcagctcggggtctggatattcctaaagtccagcatgtcatccattaccaggtcccacgtacctcggagatttatgtccaccgaagtggtcgaactgctcgagctaccaatgaaggcctcagtctgatgctcattgggcctgaggatgtgatcaactttaagaagatttacaaaacgctcaagaaagatgaggatatcccactgttccccgtgcagacaaaatacatggatgtggtcaaggagcgaatccgtttagctcgacagattgagaaatctgagtatcggaacttccaggcttgcctgcacaactcttggatgcttcctttgagaagagactggagggattcttggcaggggagaccaactggtaatctgtcaattcctcaaagcacaccaagtcatccatcctacaatgctctatttaaggccctctcccgctagactgcccggagagtggctgctgctgttttgctctgtctttcctgcacccagcacagtacttggaataaggtaggagctgaaatcatggagtgatgttgttgaacatcaacgacccctttatcacagaacattttaaatcaaggacagccacaggcctgtgtgtggagtgggcgggagccaggccaccttcctct

SEQ ID NO: 402192 - DNA, 1863 bp, Homo sapiens
cgtggaggtcccgccccggaactgcagttgctgctgcagctgaggtacagcggcggtttctgaggttcttcactcgcgactgacggagctgcggtggcgtctccacacgcaaccatgaagttgaaggacacaaaatcaaggccaaagcagtcaagctgtggcaaatttcagacaaagggaatcaaagttgtgggaaaatggaaggaagtgaagattgacccaaatatgtttgcagatggacagatggatgacttggtgtgctttgaggaattgacagattaccagttggtctcccctgccaagaatccctccagtctcttctcaaaggaagcacccaagagaaaggcacaagctgtttcagaagaagaggaggaggaggagggaaagtctagctcaccaaagaaaaagatcaagttgaagaaaagtaaaaatgtagcaactgaaggaaccagtacccagaaagaatttgaagtgaaagatcctgagctggaggcccagggagatgacatggtttgtgatgatccggaggctggggagatgacatcagaaaacctggtccaaactgctccaaaaaagaagaaaaataaagggaaaaaagggttggagccttctcagagcactgctgccaaggtgcccaaaaaagcgaagacatggattcctgaagttcatgatcagaaagcagatgtgtcagcttggaaggacctgtttgttcccaggccggttctccgagcactcagctttctaggcttctctgcacccacaccaatccaagccctgaccttggcacctgccatccgtgacaaactggacatccttggggctgctgagacaggaagtgggaaaactcttgcctttgccatcccaatgattcatgcggtgttgcagtggcagaagaggaatgctgcccctcctccaagtaacaccgaagcaccacctggagagaccagaactgaggccggagctgagactagatcaccaggcaaggctgaagctgagtctgatgcattgcctgacgatactgtaattgagagtgaagcactgcccagtgatattgcagccgaggccagagccaagactggaggcactgtctcagaccaggcgttgctctttggtgacgatgatgctggtgaagggccttcttccctgatcagggagaaacctgttcccaaacagaatgagaatgaggaggaaaatcttgataaagagcagactggaaatctaaaacaggagttggatgacaaaagcgccacctgtaaggcatatccaaagcgtcctctgcttggactggttctgactcccactcgagaggacatgtataagggagggaaaagctgaccagcaagaagaacgtcggagacaaaagcagatgaaggttctgaagaaggagctgcgccacctgctgtcccagccactgtttacggagagccagaaaaccaagtatcccactcagtctggcaagccgcccctgcttgtgtctgccccaagtaagagcgagtctgctttgagctgtctctccaagcagaagaagaagaagacaaagaagccgaaggagccacagccggaacagccacagccaagtacaagtgcaaattaactggtcaagtgtgtcagtgactgcacattggtttctgttctctggctatttgcaaaacctctcccacccttgtgtttcactccaccaccaaccccaggtaaaaaagtctccctctcttccactcacacccatagcgggagagacctcatgcagatttgcattgttttggagtaagaattcaatgcagcagcttaatttttctgtattgcagtgtttataggcttcttgtgtgttaaacttgatttcataaattaaaaacaatggtcaga

SEQ ID NO: 402193 - DNA, 1311 bp, Homo sapiens
cgtggaggtcccgccccggaactgcagttgctgctgcagctgaggtacagcggcggtttctgaggttcttcactcgcgactgacggagctgcggtggcgtctccacacgcaaccatgaagttgaaggacacaaaatcaaggccaaagcagtcaagctgtggcaaatttcagacaaagggaatcaaagttgtgggaaaatggaaggaagtgaagattgacccaaatatgtttgcagatggacagatggatgacttggtgtgctttgaggaattgacagattaccagttggtctcccctgccaagaatccctccagtctcttctcaaaggaagcacccaagagaaaggcacaagctgtttcagaagaagaggaggaggaggagggaaagtctagctcaccaaagaaaaagatcaagttgaagaaaagtaaaaatgtagcaactgaaggaaccagtacccagaaagaatttgaagtgaaagatcctgagctggaggcccagggagatgacatggtttgtgatgatccggaggctggggagatgacatcagaaaacctggtccaaactgctccaaaaaagaagaaaaataaagggaaaaaagggttggagccttctcagagcactgctgccaaggtgcccaaaaaagcgaagacatggattcctgaagttcatgatcagaaagcagatgtgtcagcttggaaggacctgtttgttcccaggccggttctccgagcactcagctttctaggcttctctgcacccacaccaatccaagccctgaccttggcacctgccatccgtgacaaactggacatccttggggctgctgagacaggaagtgggaaaactcttgcctttgccatcccaatgattcatgcggtgttgcagtggcagaagaggaatgctgcccctcctccaagtaacaccgaagcaccacctggagagaccagaactgaggccggagctgagactagatcaccaggcaaggctgaagctgagtctgatgcattgcctgacgatactgtaattgagagtgaagcactgcccagtgatattgcagccgaggccagagccaagactggaggcactgtctcagaccaggcgttgctctttggtgacgatgatgctggtgaagggccttcttccctgatcagggagaaacctgttcccaaacagaatgagaatgaggaggaaaatcttgataaagagcagactggaaatctaaaacaggagttggatgacaaaagcgccacctgtaggttccaaggtcctggtggacggttggcccctgaaaggcggcggtacacttgtcgg

SEQ ID NO: 402194 - DNA, 1193 bp, Homo sapiens
cgtggaggtcccgccccggaactgcagttgctgctgcagctgaggtacagcggcggtttctgaggttcttcactcgcgactgacggagctgcggtggcgtctccacacgcaaccatgaagttgaaggacacaaaatcaaggccaaagcagtcaagctgtggcaaatttcagacaaagggaatcaaagttgtgggaaaatggaaggaagtgaagattgacccaaatatgtttgcagatggacagatggatgacttggtgtgctttgaggaattgacagattaccagttggtctcccctgccaagaatccctccagtctcttctcaaaggaagcacccaagagaaaggcacaagctgtttcagaagaagaggaggaggaggagggaaagtctagctcaccaaagaaaaagatcaagttgaagaaaagtaaaaatgtagcaactgaaggaaccagtacccagaaagaatttgaagtgaaagatcctgagctggaggcccagggagatgacatggtttgtgatgatccggaggctggggagatgacatcagaaaacctggtccaaactgctccaaaaaagaagaaaaataaagggaaaaaagggttggagccttctcagagcactgctgccaaggtgcccaaaaaagcgaagacatggattcctgaagttcatgatcagaaagcagatgtgtcagcttggaaggacctgtttgttcccaggccggttctccgagcactcagctttctaggcttctctgcacccacaccaatccaagccctgaccttggcacctgccatccgtgacaaactggacatccttggggctgctgagacaggaagtgggaaaactcttgcctttgccatcccaatgattcatgcggtgttgcagtggcagaagaggaatgctgcccctcctccaagtaacaccgaagcaccacctggagagaccagaactgaggccggagctgagactagatcaccaggcaaggctgaagctgagtctgatgcattgcctgacgatactgtaattgagagtgaagcactgcccagtgatattgcagccgaggccagagccaagactggaggcactgtctcagaccaggcgtgccctcgggcgcaagccgggaagggccctcccggccggggaacctttccccgggtgatgggggactttaaagcggggccccggggggcccc

SEQ ID NO: 402195 - DNA, 639 bp, Homo sapiens
cagcaaattaattataatgtaagttaagatttgctttttgccaagttgcaaagttctccacatctcctgaggagatgtggagaaggcatgtataagggagggaaaagctgaccagcaagaagaacgtcggagacaaaagcagatgaaggttctgaagaaggagctgcgccacctgctgtcccagccactgtttacggagagccagaaaaccaagtatcccactcagtctggcaagccgcccctgcttgtgtctgccccaagtaagagcgagtctgctttgagctgtctctccaagcagaagaagaagaagacaaagaagccgaaggagccacagccggaacagccacagccaagtacaagtgcaaattaactggtcaagtgtgtcagtgactgcacattggtttctgttctctggctatttgcaaaacctctcccacccttgtgtttcactccaccaccaaccccaggtaaaaaagtctccctctcttccactcacacccatagcgggagagacctcatgcagatttgcattgttttggagtaagaattcaatgcagcagcttaatttttctgtattgcagtgtttataggcttcttgtgtgttaaacttgatttcataaattaaaaacaatggtcaga

SEQ ID NO: 402196 - DNA, 761 bp, Homo sapiens
cgtggaggtcccgccccggaactgcagttgctgctgcagctgaggtacagcggcggtttctgaggttcttcactcgcgactgacggagctgcggtggcgtctccacacgcaaccatgaagttgaaggacacaaaatcaaggccaaagcagtcaagctgtggcaaatttcagacaaagggaatcaaagttgtgggaaaatggaaggaagtgaagattgacccaaatatgtttgcagatggacagatggatgacttggtgtgctttgaggaattgacagattaccagttggtctcccctgccaagaatccctccagtctcttctcaaaggaagcacccaagagaaaggcacaagctgtttcagaagaagaggaggaggaggagggaaagtctagctcaccaaagaaaaagatcaagttgaagaaaagtaaaaatgtagcaactgaaaaaaaaaaaaaaaaacaaaaaaaattttttggggggcttgggcttagagaaaagttttcgaaacacctctgcgcgttggggcccgccggccccaatgtgggcaaacgtcgaacaccggggccaataggtctgggtcccccaaaggaagaacccggggacaaggaccaagggggcgggatctcccacccaataaaaaaagcgccgggggggacacacccggcggtgttttggcacaattccgagaagggacgtcggaggggcaataacgggatcactcaacggggatgccaggaggcgaaataaatagcaggttgggg

SEQ ID NO: 402197 - DNA, 423 bp, Homo sapiens
cctcagtctgatgctcattgggcctgaggatgtgatcaactttaagaagatttacaaaacgctcaagaaagatgaggatatcccactgttccccgtgcagacaaaatacatggatgtggtcaaggtagaaagcagttaaaaccccagtgctaatgaagggattgtgctgctcccttgcagagcaccttgctgtgggactctggcagcataacccttgaaaactaaggaatggttctgccaacagctgaacaaggagacttgtagaaaggattgagagcaacatacctgggaaaagggagaaaaggggagtgactgaaggtgggaggcattttctccctgaaccatttcttccttctctggccctgaagtcccccctcctcaccagacagtgcagtggtcatggctgtctggatatcctgtcag

SEQ ID NO: 402198 - DNA, 2964 bp, Homo sapiens
cgtggaggtcccgccccggaactgcagttgctgctgcagctgaggtacagcggcggtttctgaggttcttcactcgcgactgacggagctgcggtggcgtctccacacgcaaccatgaagttgaaggacacaaaatcaaggccaaagcagtcaagctgtggcaaatttcagacaaagggaatcaaagttgtgggaaaatggaaggaagtgaagattgacccaaatatgtttgcagatggacagatggatgacttggtgtgctttgaggaattgacagattaccagttggtctcccctgccaagaatccctccagtctcttctcaaaggaagcacccaagagaaaggcacaagctgtttcagaagaagaggaggaggaggagggaaagtctagctcaccaaagaaaaagatcaagttgaagaaaagtaaaaatgtagcaactgaaggaaccagtacccagaaagaatttgaagtgaaagatcctgagctggaggcccagggagatgacatggtttgtgatgatccggaggctggggagatgacatcagaaaacctggtccaaactgctccaaaaaagaagaaaaataaagggaaaaaagggttggagccttctcagagcactgctgccaaggtgcccaaaaaagcgaagacatggattcctgaagttcatgatcagaaagcagatgtgtcagcttggaaggacctgtttgttcccaggccggttctccgagcactcagctttctaggcttctctgcacccacaccaatccaagccctgaccttggcacctgccatccgtgacaaactggacatccttggggctgctgagacaggaagtgggaaaactcttgcctttgccatcccaatgattcatgcggtgttgcagtggcagaagaggaatgctgcccctcctccaagtaacaccgaagcaccacctggagagaccagaactgaggccggagctgagactagatcaccaggcaaggctgaagctgagtctgatgcattgcctgacgatactgtaattgagagtgaagcactgcccagtgatattgcagccgaggccagagccaagactggaggcactgtctcagaccaggcgttgctctttggtgacgatgatgctggtgaagggccttcttccctgatcagggagaaacctgttcccaaacagaatgagaatgaggaggaaaatcttgataaagagcagactggaaatctaaaacaggagttggatgacaaaagcgccacctgtaaggcatatccaaagcgtcctctgcttggactggttctgactcccactcgagagctggccgtccaggtcaaacagcacattgatgctgtggccaggtttacaggaattaaaactgctattttggttggtggaatgtccacgcagaaacagcagaggatgctgaaccgtcgtcctgagattgtggttgctactccaggccggctgtgggaattaattaaagaaaagcattatcatttgaggaaccttcggcagctcaggtgcctggtagtggatgaggctgaccggatggttgagaaaggccattttgctgagctctcacagctgctagagatgctcaatgactcccaatacaacccaaagagacaaacgcttgttttttctgccacactcaccctggtgcatcaggctcctgctcgaatccttcataagaagcacaccaagaaaatggataaaacagccaaacttgacctccttatgcagaaaattggcatgaggggcaagcccaaggtcattgacctcacaaggaatgaggccacggtggagacgctaacagagaccaagatccattgtgagactgatgagaaagacttctacttgtactacttcctgatgcagtatccaggccgcagcttagtgtttgccaacagtatctcctgcatcaaacgcctctctgggctcctcaaagtccttgatatcatgcccttgaccctgcatgcctgtatgcaccagaagcagaggctcagaaacctggagcagtttgcccgtctggaagactgtgttctcttggcaacagatgtggcagctcggggtctggatattcctaaagtccagcatgtcatccattaccaggtcccacgtacctcggagatttatgtccaccgaagtggtcgaactgctcgagctaccaatgaaggcctcagtctgatgctcattgggcctgaggatgtgatcaactttaagaagatttacaaaacgctcaagaaagatgaggatatcccactgttccccgtgcagacaaaatacatggatgtggtcaaggagcgaatccgtttagctcgacagattgagaaatctgagtatcggaacttccaggcttgcctgcacaactcttggattgagcaggcagcagctgccctggagattgagctggaagaagacatgtataagggagggaaaagctgaccagcaagaagaacgtcggagacaaaagcagatgaaggttctgaagaaggagctgcgccacctgctgtcccagccactgtttacggagagccagaaaaccaagtatcccactcagtctggcaagccgcccctgcttgtgtctgccccaagtaagagcgagtctgctttgagctgtctctccaagcagaagaagaagaagacaaagaagccgaaggagccacagccggaacagccacagccaagtacaagtgcaaattaactggtcaagtgtgtcagtgactgcacattggtttctgttctctggctatttgcaaaacctctcccacccttgtgtttcactccaccaccaaccccaggtaaaaaagtctccctctcttccactcacacccatagcgggagagacctcatgcagatttgcattgttttggagtaagaattcaatgcagcagcttaatttttctgtattgcagtgtttataggcttcttgtgtgttaaacttgatttcataaattaaaaacaatggtcaga

SEQ ID NO: 402199 - DNA, 2660 bp, Homo sapiens
cgtggaggtcccgccccggaactgcagttgctgctgcagctgaggtacagcggcggtttctgaggttcttcactcgcgactgacggagctgcggtggcgtctccacacgcaaccatgaagttgaaggacacaaaatcaaggccaaagcagtcaagctgtggcaaatttcagacaaagggaatcaaagttgtgggaaaatggaaggaagtgaagattgacccaaatatgtttgcagatggacagatggatgacttggtgtgctttgaggaattgacagattaccagttggtctcccctgccaagaatccctccagtctcttctcaaaggaagcacccaagagaaaggcacaagctgtttcagaagaagaggaggaggaggagggaaagtctagctcaccaaagaaaaagatcaagttgaagaaaagtaaaaatgtagcaactgaaggaaccagtacccagaaagaatttgaagtgaaagatcctgagctggaggcccagggagatgacatggtttgtgatgatccggaggctggggagatgacatcagaaaacctggtccaaactgctccaaaaaagaagaaaaataaagggaaaaaagggttggagccttctcagagcactgctgccaaggtgcccaaaaaagcgaagacatggattcctgaagttcatgatcagaaagcagatgtgtcagcttggaaggacctgtttgttcccaggccggttctccgagcactcagctttctaggcttctctgcacccacaccaatccaagccctgaccttggcacctgccatccgtgacaaactggacatccttggggctgctgagacaggaagtgggaaaactcttgcctttgccatcccaatgattcatgcggtgttgcagtggcagaagaggaatgctgcccctcctccaagtaacaccgaagcaccacctggagagaccagaactgaggccggagctgagactagatcaccaggcaaggctgaagctgagtctgatgcattgcctgacgatactgtaattgagagtgaagcactgcccagtgatattgcagccgaggccagagccaagactggaggcactgtctcagaccaggcgttgctctttggtgacgatgatgctggtgaagggccttcttccctgatcagggagaaacctgttcccaaacagaatgagaatgaggaggaaaatcttgataaagagcagactggaaatctaaaacaggagttggatgacaaaagcgccacctgtaaggcatatccaaagcgtcctctgcttggactggttctgactcccactcgagagctggccgtccaggtcaaacagcacattgatgctgtggccaggtttacaggaattaaaactgctattttggttggtggaatgtccacgcagaaacagcagaggatgctgaaccgtcgtcctgagattgtggttgctactccaggccggctgtgggaattaattaaagaaaagcattatcatttgaggaaccttcggcagctcaggtgcctggtagtggatgaggctgaccggatggttgagaaaggccattttgctgagctctcacagctgctagagatgctcaatgactcccaatacaacccaaagagacaaacgcttgttttttctgccacactcaccctggtgcatcaggctcctgctcgaatccttcataagagaggctcagaaacctggagcagtttgcccgtctggaagactgtgttctcttggcaacagatgtggcagctcggggtctggatattcctaaagtccagcatgtcatccattaccaggtcccacgtacctcggagatttatgtccaccgaagtggtcgaactgctcgagctaccaatgaaggcctcagtctgatgctcattgggcctgaggatgtgatcaactttaagaagatttacaaaacgctcaagaaagatgaggatatcccactgttccccgtgcagacaaaatacatggatgtggtcaaggagcgaatccgtttagctcgacagattgagaaatctgagtatcggaacttccaggcttgcctgcacaactcttggattgagcaggcagcagctgccctggagattgagctggaagaagacatgtataagggagggaaaagctgaccagcaagaagaacgtcggagacaaaagcagatgaaggttctgaagaaggagctgcgccacctgctgtcccagccactgtttacggagagccagaaaaccaagtatcccactcagtctggcaagccgcccctgcttgtgtctgccccaagtaagagcgagtctgctttgagctgtctctccaagcagaagaagaagaagacaaagaagccgaaggagccacagccggaacagccacagccaagtacaagtgcaaattaactggtcaagtgtgtcagtgactgcacattggtttctgttctctggctatttgcaaaacctctcccacccttgtgtttcactccaccaccaaccccaggtaaaaaagtctccctctcttccactcacacccatagcgggagagacctcatgcagatttgcattgttttggagtaagaattcaatgcagcagcttaatttttctgtattgcagtgtttataggcttcttgtgtgttaaacttgatttcataaattaaaaacaatggtcaga

SEQ ID NO: 402200 - DNA, 2267 bp, Homo sapiens
gagtggaggagctttgggtcggtcagggtggcacttggctaccttattctatgcaaaagaatgaattccagactaaagtatgttcatctgttgattcacactgtttttactttgttttgtttttttacttttaaggaagtgggaaaactcttgcctttgccatcccaatgattcatgcggtgttgcagtggcagaagaggaatgctgcccctcctccaagtaacaccgaagcaccacctggagagaccagaactgaggccggagctgagactagatcaccaggcaaggctgaagctgagtctgatgcattgcctgacgatactgtaattgagagtgaagcactgcccagtgatattgcagccgaggccagagccaagactggaggcactgtctcagaccaggcgttgctctttggtgacgatgatgctggtgaagggccttcttccctgatcagggagaaacctgttcccaaacagaatgagaatgaggaggaaaatcttgataaagagcagactggaaatctaaaacaggagttggatgacaaaagcgccacctgtaaggcatatccaaagcgtcctctgcttggactggttctgactcccactcgagagctggccgtccaggtcaaacagcacattgatgctgtggccaggtttacaggaattaaaactgctattttggttggtggaatgtccacgcagaaacagcagaggatgctgaaccgtcgtcctgagattgtggttgctactccaggccggctgtgggaattaattaaagaaaagcattatcatttgaggaaccttcggcagctcaggtgcctggtagtggatgaggctgaccggatggttgagaaaggccattttgctgagctctcacagctgctagagatgctcaatgactcccaatacaacccaaagagacaaacgcttgttttttctgccacactcaccctggtgcatcaggctcctgctcgaatccttcataagaagcacaccaagaaaatggataaaacagccaaacttgacctccttatgcagaaaattggcatgaggggcaagcccaaggtcattgacctcacaaggaatgaggccacggtggagacgctaacagagaccaagatccattgtgagactgatgagaaagacttctacttgtactacttcctgatgcagtatccaggccgcagcttagtgtttgccaacagtatctcctgcatcaaacgcctctctgggctcctcaaagtccttgatatcatgcccttgaccctgcatgcctgtatgcaccagaagcagaggctcagaaacctggagcagtttgcccgtctggaagactgtgttctcttggcaacagatgtggcagctcggggtctggatattcctaaagtccagcatgtcatccattaccaggtcccacgtacctcggagatttatgtccaccgaagtggtcgaactgctcgagctaccaatgaaggcctcagtctgatgctcattgggcctgaggatgtgatcaactttaagaagatttacaaaacgctcaagaaagatgaggatatcccactgttccccgtgcagacaaaatacatggatgtggtcaaggagcgaatccgtttagctcgacagattgagaaatctgagtatcggaacttccaggcttgcctgcacaactcttggattgagcaggcagcagctgccctggagattgagctggaagaagacatgtataagggagggaaaagctgaccagcaagaagaacgtcggagacaaaagcagatgaaggttctgaagaaggagctgcgccacctgctgtcccagccactgtttacggagagccagaaaaccaagtatcccactcagtctggcaagccgcccctgcttgtgtctgccccaagtaagagcgagtctgctttgagctgtctctccaagcagaagaagaagaagacaaagaagccgaaggagccacagccggaacagccacagccaagtacaagtgcaaattaactggtcaagtgtgtcagtgactgcacattggtttctgttctctggctatttgcaaaacctctcccacccttgtgtttcactccaccaccaaccccaggtaaaaaagtctccctctcttccactcacacccatagcgggagagacctcatgcagatttgcattgttttggagtaagaattcaatgcagcagcttaatttttctgtattgcagtgtttataggcttcttgtgtgttaaacttgatttcataaattaaaaacaatggtcaga

SEQ ID NO: 402201 - DNA, 1979 bp, Homo sapiens
tacgcagtcacgaggcctcacgtgtaatcggccgagggtatcgagagtgttacatgcccagtgatattgcagccgaggccagagccaagactggaggcactgtctcagaccaggcgttgctctttggtgacgatgatgctggtgaagggccttcttccctgatcagggagaaacctgttcccaaacagaatgagaatgaggaggaaaatcttgataaagagcagactggaaatctaaaacaggagttggatgacaaaagcgccacctgtaaggcatatccaaagcgtcctctgcttggactggttctgactcccactcgagagctggccgtccaggtcaaacagcacattgatgctgtggccaggtttacaggaattaaaactgctattttggttggtggaatgtccacgcagaaacagcagaggatgctgaaccgtcgtcctgagattgtggttgctactccaggccggctgtgggaattaattaaagaaaagcattatcatttgaggaaccttcggcagctcaggtgcctggtagtggatgaggctgaccggatggttgagaaaggccattttgctgagctctcacagctgctagagatgctcaatgactcccaatacaacccaaagagacaaacgcttgttttttctgccacactcaccctggtgcatcaggctcctgctcgaatccttcataagaagcacaccaagaaaatggataaaacagccaaacttgacctccttatgcagaaaattggcatgaggggcaagcccaaggtcattgacctcacaaggaatgaggccacggtggagacgctaacagagaccaagatccattgtgagactgatgagaaagacttctacttgtactacttcctgatgcagtatccaggccgcagcttagtgtttgccaacagtatctcctgcatcaaacgcctctctgggctcctcaaagtccttgatatcatgcccttgaccctgcatgcctgtatgcaccagaagcagaggctcagaaacctggagcagtttgcccgtctggaagactgtgttctcttggcaacagatgtggcagctcggggtctggatattcctaaagtccagcatgtcatccattaccaggtcccacgtacctcggagatttatgtccaccgaagtggtcgaactgctcgagctaccaatgaaggcctcagtctgatgctcattgggcctgaggatgtgatcaactttaagaagatttacaaaacgctcaagaaagatgaggatatcccactgttccccgtgcagacaaaatacatggatgtggtcaaggagcgaatccgtttagctcgacagattgagaaatctgagtatcggaacttccaggcttgcctgcacaactcttggattgagcaggcagcagctgccctggagattgagctggaagaagacatgtataagggagggaaaagctgaccagcaagaagaacgtcggagacaaaagcagatgaaggttctgaagaaggagctgcgccacctgctgtcccagccactgtttacggagagccagaaaaccaagtatcccactcagtctggcaagccgcccctgcttgtgtctgccccaagtaagagcgagtctgctttgagctgtctctccaagcagaagaagaagaagacaaagaagccgaaggagccacagccggaacagccacagccaagtacaagtgcaaattaactggtcaagtgtgtcagtgactgcacattggtttctgttctctggctatttgcaaaacctctcccacccttgtgtttcactccaccaccaaccccaggtaaaaaagtctccctctcttccactcacacccatagcgggagagacctcatgcagatttgcattgttttggagtaagaattcaatgcagcagcttaatttttctgtattgcagtgtttataggcttcttgtgtgttaaacttgatttcataaattaaaaacaatggtcaga

SEQ ID NO: 402202 - DNA, 2713 bp, Homo sapiens
cgtggaggtcccgccccggaactgcagttgctgctgcagctgaggtacagcggcggtttctgaggttcttcactcgcgactgacggagctgcggtggcgtctccacacgcaaccatgaagttgaaggacacaaaatcaaggccaaagcagtcaagctgtggcaaatttcagacaaagggaatcaaagttgtgggaaaatggaaggaagtgaagattgacccaaatatgtttgcagatggacagatggatgacttggtgtgctttgaggaattgacagattaccagttggtctcccctgccaagaatccctccagtctcttctcaaaggaagcacccaagagaaaggcacaagctgtttcagaagaagaggaggaggaggagggaaagtctagctcaccaaagaaaaagatcaagttgaagaaaagtaaaaatgtagcaactgaaggaaccagtacccagaaagaatttgaagtgaaagatcctgagctggaggcccagggagatgacatggtttgtgatgatccggaggctggggagatgacatcagaaaacctggtccaaactgctccaaaaaagaagaaaaataaagggaaaaaagggttggagccttctcagagcactgctgccaaggtgcccaaaaaagcgaagacatggattcctgaagttcatgatcagaaagcagatgtgtcagcttggaaggacctgtttgttcccaggccggttctccgagcactcagctttctaggcttctctgcacccacaccaatccaagccctgaccttggcacctgccatccgtgacaaactggacatccttggggctgctgagacaggaagtgggaaaactcttgcctttgccatcccaatgattcatgcggtgttgcagtggcagaagaggaatgctgcccctcctccaagtaacaccgaagcaccacctggagagaccagaactgaggccggagctgagactagatcaccaggcaaggctgaagctgagtctgatgcattgcctgacgatactgtaattgagagtgaagcactgcccagtgatattgcagccgaggccagagccaagactggaggcactgtctcagaccaggcgttgctctttggtgacgatgatgctggtgaagggccttcttccctgatcagggagaaacctgttcccaaacagaatgagaatgaggaggaaaatcttgataaagagcagactggaaatctaaaacaggagttggatgacaaaagcgccacctgtaaggcatatccaaagcgtcctctgcttggactggttctgactcccactcgagagctggccgtccaggtcaaacagcacattgatgctgtggccaggtttacaggaattaaaactgctattttggttggtggaatgtccacgcagaaacagcagaggatgctgaaccgtcgtcctgagattgtggttgctactccaggccggctgtgggaattaattaaagaaaagcattatcatttgaggaaccttcggcagctcaggtgcctggtagtggatgaggctgaccggatggttgagaaaggccattttgctgagctctcacagctgctagagatgctcaatgactcccaatacaacccaaagagacaaacgcttgttttttctgccacactcaccctggtgcatcaggctcctgctcgaatccttcataagaagcacaccaagaaaatggataaaacagccaaacttgacctccttatgcagaaaattggcatgaggggcaagcccaaggtcattgacctcacaaggaatgaggccacggtggagacgctaacagagaccaagatccattgtgagactgatgagaaagacttctacttgtactacttcctgatgcagtatccaggccgcagcttagtgtttgccaacagtatctcctgcatcaaacgcctctctgggctcctcaaagtccttgatatcatgcccttgaccctgcatgcctgtatgcaccagaagcagaggctcagaaacctggagcagtttgcccgtctggaagactgtgttctcttggcaacagatgtggcagctcggggtctggatattcctaaagtccagcatgtcatccattaccaggtcccacgtacctcggagatttatgtccaccgaagtggtcgaactgctcgagctaccaatgaaggcctcagtctgatgctcattgggcctgaggatgtgatcaactttaagaagatttacaaaacgctcaagaaagatgaggatatcccactgttccccgtgcagacaaaatacatggatgtggtcaaggagcgaatccgtttagctcgacagattgagaaatctgagtatcggaacttccaggcttgcctgcacaactcttggattgagcaggcagcagctgccctggagattgagctggaagaagacatgtataagggacatgtataagggagggaaaagctgaccagcaagaagaacgtcggagacaaaagcagatgaaggttctgaagaaggagctgcgccacctgctgtcccagccactgtttacggagagccagaaaaccaagtatcccactcacactcacacccatagcgggagagacctcatgcagatttgcattgttttggagtaagaattcaatgcagcagcttaatttttctgtattgcagtgtttataggcttcttgtgtgttaaacttgatttcataaattaaaaacaatggtcaga

SEQ ID NO: 402203 - DNA, 2358 bp, Homo sapiens
cgtggaggtcccgccccggaactgcagttgctgctgcagctgaggtacagcggcggtttctgaggttcttcactcgcgactgacggagctgcggtggcgtctccacacgcaaccatgaagttgaaggacacaaaatcaaggccaaagcagtcaagctgtggcaaatttcagacaaagggaatcaaagttgtgggaaaatggaaggaagtgaagattgacccaaatatgtttgcagatggacagatggatgacttggtgtgctttgaggaattgacagattaccagttggtctcccctgccaagaatccctccagtctcttctcaaaggaagcacccaagagaaaggcacaagctgtttcagaagaagaggaggaggaggagggaaagtctagctcaccaaagaaaaagatcaagttgaagaaaagtaaaaatgtagcaactgaaggaaccagtacccagaaagaatttgaagtgaaagatcctgagctggaggcccagggagatgacatggtttgtgatgatccggaggctggggagatgacatcagaaaacctggtccaaactgctccaaaaaagaagaaaaataaagggaaaaaagggttggagccttctcagagcactgctgccaaggtgcccaaaaaagcgaagacatggattcctgaagttcatgatcagaaagcagatgtgtcagcttggaaggacctgtttgttcccaggccggttctccgagcactcagctttctaggcttctctgcacccacaccaatccaagccctgaccttggcacctgccatccgtgacaaactggacatccttggggctgctgagacaggaagtgggaaaactcttgcctttgccatcccaatgattcatgcggtgttgcagtggcagaagaggaatgctgcccctcctccaagtaacaccgaagcaccacctggagagaccagaactgaggccggagctgagactagatcaccaggcaaggctgaagctgagtctgatgcattgcctgacgatactgtaattgagagtgaagcactgcccagtgatattgcagccgaggccagagccaagactggaggcactgtctcagaccaggcgttgctctttggtgacgatgatgctggtgaagggccttcttccctgatcagggagaaacctgttcccaaacagaatgagaatgaggaggaaaatcttgataaagagcagactggaaatctaaaacaggagttggatgacaaaagcgccacctgtaaggcatatccaaagcgtcctctgcttggactggttctgactcccactcgagagctggccgtccaggtcaaacagcacattgatgctgtggccaggtttacaggaattaaaactgctattttggttggtggaatgtccacgcagaaacagcagaggatgctgaaccgtcgtcctgagattgtggttgctactccaggccggctgtgggaattaattaaagaaaagcattatcatttgaggaaccttcggcagctcaggtgcctggtagtggatgaggctgaccggatggttgagaaaggccattttgctgagctctcacagctgctagagatgctcaatgactcccaatacaacccaaagagacaaacgcttgttttttctgccacactcaccctggtgcatcaggctcctgctcgaatccttcataagaagcacaccaagaaaatggataaaacagccaaacttgacctccttatgcagaaaattggcatgaggggcaagcccaaggtcattgacctcacaaggaatgaggccacggtggagacgctaacagagaccaagatccattgtgagactgatgagaaagacttctacttgtactacttcctgatgcagtatccaggccgcagcttagtgtttgccaacagtatctcctgcatcaaacgcctctctgggctcctcaaagtccttgatatcatgcccttgaccctgcatgcctgtatgcaccagaagcagaggctcagaaacctggagcagtttgcccgtctggaagactgtgttctcttggcaacagatgtggcagctcggggtctggatattcctaaagtccagcatgtcatccattaccaggtcccacgtacctcggagatttatgtccaccgaagtggtcgaactgctcgagctaccaatgaaggcctcagtctgatgctcattgggcctgaggatgtgatcaactttaagaagatttacaaaacgctcaagaaagatgaggatatcccactgttccccggcgaacacatactggtttgtgccagggcaaaccggtaactcgacaattggaaacggtatgtccggttgcgggaccctggttacacgcaccacctg

SEQ ID NO: 402204 - DNA, 1910 bp, Homo sapiens
cgtggaggtcccgccccggaactgcagttgctgctgcagctgaggtacagcggcggtttctgaggttcttcactcgcgactgacggagctgcggtggcgtctccacacgcaaccatgaagttgaaggacacaaaatcaaggccaaagcagtcaagctgtggcaaatttcagacaaagggaatcaaagttgtgggaaaatggaaggaagtgaagattgacccaaatatgtttgcagatggacagatggatgacttggtgtgctttgaggaattgacagattaccagttggtctcccctgccaagaatccctccagtctcttctcaaaggaagcacccaagagaaaggcacaagctgtttcagaagaagaggaggaggaggagggaaagtctagctcaccaaagaaaaagatcaagttgaagaaaagtaaaaatgtagcaactgaaggaaccagtacccagaaagaatttgaagtgaaagatcctgagctggaggcccagggagatgacatggtttgtgatgatccggaggctggggagatgacatcagaaaacctggtccaaactgctccaaaaaagaagaaaaataaagggaaaaaagggttggagccttctcagagcactgctgccaaggtgcccaaaaaagcgaagacatggattcctgaagttcatgatcagaaagcagatgtgtcagcttggaaggacctgtttgttcccaggccggttctccgagcactcagctttctaggcttctctgcacccacaccaatccaagccctgaccttggcacctgccatccgtgacaaactggacatccttggggctgctgagacaggaagtgggaaaactcttgcctttgccatcccaatgattcatgcggtgttgcagtggcagaagaggaatgctgcccctcctccaagtaacaccgaagcaccacctggagagaccagaactgaggccggagctgagactagatcaccaggcaaggctgaagctgagtctgatgcattgcctgacgatactgtaattgagagtgaagcactgcccagtgatattgcagccgaggccagagccaagactggaggcactgtctcagaccaggcgttgctctttggtgacgatgatgctggtgaagggccttcttccctgatcagggagaaacctgttcccaaacagaatgagaatgaggaggaaaatcttgataaagagcagactggaaatctaaaacaggagttggatgacaaaagcgccacctgtaaggcatatccaaagcgtcctctgcttggactggttctgactcccactcgagagctggccgtccaggtcaaacagcacattgatgctgtggccaggtttacaggaattaaaactgctattttggttggtggaatgtccacgcagaaacagcagaggatgctgaaccgtcgtcctgagattgtggttgctactccaggccggctgtgggaattaattaaagaaaagcattatcatttgaggaaccttcggcagctcaggtgcctggtagtggatgaggctgaccggatggttgagaaaggccattttgctgagctctcacagctgctagagatgctcaatgactcccaatacaacccaaagagacaaacgcttgttttttctgccacactcaccctggtgcatcaggctcctgctcgaatccttcataagaagcacaccaagaaaatggataaaacagccaaacttgacctccttatgcagaaaattggcatgaggggcaagcccaaggtcattgacctcacaaggaatgaggccacggtggagacgctaacagagaccaagatccattgtgagactgatgagaaagaaggaaggaaagaaggaaaggagggagggaaggagggaaggagggagctcgtgccgattctttggctcga

SEQ ID NO: 402205 - DNA, 1804 bp, Homo sapiens
cgtggaggtcccgccccggaactgcagttgctgctgcagctgaggtacagcggcggtttctgaggttcttcactcgcgactgacggagctgcggtggcgtctccacacgcaaccatgaagttgaaggacacaaaatcaaggccaaagcagtcaagctgtggcaaatttcagacaaagggaatcaaagttgtgggaaaatggaaggaagtgaagattgacccaaatatgtttgcagatggacagatggatgacttggtgtgctttgaggaattgacagattaccagttggtctcccctgccaagaatccctccagtctcttctcaaaggaagcacccaagagaaaggcacaagctgtttcagaagaagaggaggaggaggagggaaagtctagctcaccaaagaaaaagatcaagttgaagaaaagtaaaaatgtagcaactgaaggaaccagtacccagaaagaatttgaagtgaaagatcctgagctggaggcccagggagatgacatggtttgtgatgatccggaggctggggagatgacatcagaaaacctggtccaaactgctccaaaaaagaagaaaaataaagggaaaaaagggttggagccttctcagagcactgctgccaaggtgcccaaaaaagcgaagacatggattcctgaagttcatgatcagaaagcagatgtgtcagcttggaaggacctgtttgttcccaggccggttctccgagcactcagctttctaggcttctctgcacccacaccaatccaagccctgaccttggcacctgccatccgtgacaaactggacatccttggggctgctgagacaggaagtgggaaaactcttgcctttgccatcccaatgattcatgcggtgttgcagtggcagaagaggaatgctgcccctcctccaagtaacaccgaagcaccacctggagagaccagaactgaggccggagctgagactagatcaccaggcaaggctgaagctgagtctgatgcattgcctgacgatactgtaattgagagtgaagcactgcccagtgatattgcagccgaggccagagccaagactggaggcactgtctcagaccaggcgttgctctttggtgacgatgatgctggtgaagggccttcttccctgatcagggagaaacctgttcccaaacagaatgagaatgaggaggaaaatcttgataaagagcagactggaaatctaaaacaggagttggatgacaaaagcgccacctgtaaggcatatccaaagcgtcctctgcttggactggttctgactcccactcgagagctggccgtccaggtcaaacagcacattgatgctgtggccaggtttacaggaattaaaactgctattttggttggtggaatgtccacgcagaaacagcagaggatgctgaaccgtcgtcctgagattgtggttgctactccaggccggctgtgggaattaattaaagaaaagcattatcatttgaggaaccttcggcagctcaggtgcctggtagtggatgaggctgaccggatggttgagaaaggccattttgctgagctctcacagctgctagagatgctcaatgactcccacccttgtgtttcactccaccaccaaccccaggtaaaaaagtctccctctcttccactcacacccatagcgggagagacctcatgcagatttgcattgttttggagtaagaattcaatgcagcagcttaatttttctgtattgcagtgtttataggcttcttgtgtgttaaacttgatttcataaattaaaaacaatggtcaga

SEQ ID NO: 402206 - DNA, 1289 bp, Homo sapiens
  misc_feature (1236)..(1236): n is a, c, g, or t
cgtggaggtcccgccccggaactgcagttgctgctgcagctgaggtacagcggcggtttctgaggttcttcactcgcgactgacggagctgcggtggcgtctccacacgcaaccatgaagttgaaggacacaaaatcaaggccaaagcagtcaagctgtggcaaatttcagacaaagggaatcaaagttgtgggaaaatggaaggaagtgaagattgacccaaatatgtttgcagatggacagatggatgacttggtgtgctttgaggaattgacagattaccagttggtctcccctgccaagaatccctccagtctcttctcaaaggaagcacccaagagaaaggcacaagctgtttcagaagaagaggaggaggaggagggaaagtctagctcaccaaagaaaaagatcaagttgaagaaaagtaaaaatgtagcaactgaaggaaccagtacccagaaagaatttgaagtgaaagatcctgagctggaggcccagggagatgacatggtttgtgatgatccggaggctggggagatgacatcagaaaacctggtccaaactgctccaaaaaagaagaaaaataaagggaaaaaagggttggagccttctcagagcactgctgccaaggtgcccaaaaaagcgaagacatggattcctgaagttcatgatcagaaagcagatgtgtcagcttggaaggacctgtttgttcccaggccggttctccgagcactcagctttctaggcttctctgcacccacaccaatccaagccctgaccttggcacctgccatccgtgacaaactggacatccttggggctgctgagacaggaagtgggaaaactcttgcctttgccatcccaatgattcatgcggtgttgcagtggcagaagaggaatgctgcccctcctccaagtaacaccgaagcaccacctggagagaccagaactgaggccggagctgagactagatcaccaggcaaggctgaagctgagtctgatgcattgcctgacgatactgtaattgagagtgaagcactgcccagtgatattgcagccgaggccagagccaagactggaggcactgtctcagaccaggcgttgctctttggtgacgatgatgctggtgaagggccttcttccctgatcagggagaaacctgttcccaaacagaatgagaatgaggaggaaaatcttgataaagagcagactggaaatctaaaacaggagttggtnaaaggccctgtaggtttcaggtctctgtggcggtcgaccacagggcgccggcc

SEQ ID NO: 402207 - DNA, 559 bp, Homo sapiens
aactcatatatttgtcatctgattcaccaattttgaatgtcttgccacatttgcttttttccctctctccttcccttcttcccttctttccttccttccctccttccttttttcttttgttaaattatttgagaagttgtagatatcatgacatcttacccctgacagggttcaggattcgctaccccaaaatatggtgacctgttgtatttaatattttgggcttttattttgttttgttctgttttgagacagggtctcaccctgtcacccatgctagagtacagttttgttttgttttgagacaggttctcactctgtcacccatgctagagtacagtggcctgatagcagctcactgcagccttgaacttctgggctcaagtggtcctcctccctcagccttctgagtagttgggagtataggcatggtggcctccacctgtattcccagctgcttgagaggctgaggatggaggatggcttgagcctaggaggcagaggttgcagtgagccaaaattgcaccactgtactccagcctggaggactgggtttaaa

SEQ ID NO: 402208 - DNA, 166 bp, Homo sapiens
ctccctcagccttctgagtagttgggagtataggcatggtgtcaccatgctcagctaattttttttttaagtagatgtggggtctccctatgttgcacagggtggtcttgaatttctgacctcaagcaaccctcccacctcagcctcacaaagtattgggattacc

SEQ ID NO: 402209 - DNA, 477 bp, Homo sapiens
aaccaacaggtccctaatgattgcatcagctgaaaaatcaaccttctcaaaattaaaaattagcaaaaattacttatcttgcatttgccaagaatacatgttactttcaattatatattgaaaatgaagttgctaaaaatataaatttcgatgacttaataaatgaatttgcaaaaagagtgccagaaaatcttatgatcaatcaaggtatcatattaacaaactattagtaattattgtattatttaaagtttattacaacaaaactgttttttgtgatttgtaaatttatgttgttttatgttactattatacctattacattttacaagtagtaaaatatgttaaaggaaaaaagcataatttattttactttttactatacttctttttatacattctgagtaactgacctcacatttttattttgcactggccccatcaattatgtagtcatctctgccctgtattaaaatg

SEQ ID NO: 402210 - DNA, 619 bp, Homo sapiens
acagatcattctgtatttgcataaaatgacaaagatgatgcatgctcggtagaaagaaatcaggctgggaatggtggctcatgcctgtaatcacagcactttgggaggctgaggagggaggatcactggaagccaggagttcaaggccagcctgggtgacaaagtgagacacgcatctctgcaaaaaatttaaaaattagctgggcgtggtggtgtgtacctgtagtctcaattactaggaaggctgaggatcacttgaacccgagttcgaggctgcagtgaggtatgatggtgccactgccctccagcctgagtgatagagggagagcccatttcttaaaaaagagaggctgggtgtggtcgtcacgcctgtaatcccaacactttgagaggcccaggcgggtggatcacgaggtcaggagttcaagaccagcctggccaagatggtgaaaccccgtctctactaaaaatacaaaaattagctgggcatgttggtgggtgcctataatcccagctactcgggaggctgaggcaggagaattgcggtgaggaggaggttgtagtgagccgagattatgccactgcactccagcctgggcgacagagtgagattccgtct

SEQ ID NO: 402211 - DNA, 376 bp, Homo sapiens
aaaaattaaaattagctggatgtggtagcgtgtgtctgtggtcccagctactcaggaggctgaagtgggaggattgcttgagcccaggagatagaggctgcagtgagacatggtcatgccactgtgcctcagcctgggtgacaatgcaaaatcctgtctcaaaaaaagaaaaggagcatggacccaggctgggagataattgaggccatttttgcaaagagtctaccacattcccaaaggtccagtgcacaagaggggttcccagtcagccatttgacatgagagcatagctctaaattaacacttctctgaatcccacctgctgagctagctcatttctcacctctgatgctcccaaagacaacgagttcatttc

SEQ ID NO: 402212 - DNA, 583 bp, Homo sapiens
gccgggcagcgggagcggcggccgcgccatgtggctgctggggccgctgtgcctgctgctgagcagcgccgcggccaaggctaagtcgaaatgtggcccaaccttcttcccctgtgccagcggcatccattgcatcattggtcgcttccggtgcaatgggtttgaggactgtcccgatggcagcgatgaagagaactgcacagcaaaccctctgctttgctccaccgcccgctaccactgcaagaacggcctctgtattgacaagagcttcatctgcgatggacagaataactgtcaagacaacagtgatgaggaaagctgtgaaagttctcaagaacccggcagtgggcaggtgtttgtgacttcagagaaccaacttgtgtattaccccagcatcacctatgccatcatcggcagctccgtcatttttgtgctggtggtggccctgctggcactggtcttgcaccaccagcggaagcggaacaacctcatgacgctgcccgtgcaccggctgcagcaccctgtgctgctgtcccgcctggtggtcctggaccacccccaccactgcaacgtcacctacaac

SEQ ID NO: 402213 - DNA, 529 bp, Homo sapiens
actcctgtctagaattttaatttttaaccactgctgatggccagaaaagaacatttggattttacaaccagtctttgatggagaaagaaaaaaagtcagtgaacacccattttgtgcctgacattcaagtatgtttgttccctgtatttctccatttagtcctctcagaatctctggaggtggactggggcagattattaatctaccagaagtctcacctataccaaaccacacacctttcagttgaggggcgctgaggtccctgctgttgctgtgccatctgacctgtcccctctctctgacagagagccagctgctccccgggaacaacttcaccaatgagtgcaacataccaggcaacttcatgtgcagcaatggacggtgcatcccgggcgcctggcagtgtgacgggctgcctgactgcttcgacaagagtgatgagaaggagtgccgtgagtggcctggccctttgctggggtggggtggcagccatcctggggcagaggggagcaggtcctgagcaggctta

SEQ ID NO: 402214 - DNA, 730 bp, Homo sapiens
gccgggcagcgggagcggcggccgcgccatgtggctgctggggccgctgtgcctgctgctgagcagcgccgcggagagccagctgctccccgggaacaacttcaccaatgagtgcaacataccaggcaacttcatgtgcagcaatggacggtgcatcccgggcgcctggcagtgtgacgggctgcctgactgcttcgacaagagtgatgagaaggagtgccccaaggctaagtcgaaatgtggcccaaccttcttcccctgtgccagcggcatccattgcatcattggtcgcttccggtgcaatgggtttgaggactgtcccgatggcagcgatgaagagaactgcacagcaaaccctctgctttgctccaccgcccgctaccactgcaagaacggcctctgtattgacaagagcttcatctgcgatggacagaataactgtcaagacaacagtgatgaggaaagctgtgaaagttctcaagaacccggcagtgggcaggtgtttgtgacttcagagaaccaacttgtgtattaccccagcatcacctatgccatcatcggcagctccgtcatttttgtgctggtggtggccctgctggcactggtcttgcaccaccagcggaagcggaacaacctcatgacgctgcccgtgcaccggctgcagcaccctgtgctgctgtcccgcctggtggtcctggaccacccccaccactgcaacgtcacctacaac

SEQ ID NO: 402215 - DNA, 729 bp, Homo sapiens
aactatgattctgagattctactactgagtagagtcatcactaagggctcatctctaagggctccatgtgactctggtggagaggtagatcatgatttgggcggcaatgtttgctcactctttcccttactagagttctgccatagaatcatggagtcaacatcccaggacagaagggcaactcacgtcatcactataaaaccaaacgaaactgtattgactgcatttccctacagacctcatagctctctgctggattttctgaagggagagccaagagtcttgggggctacccagatcctgcttgctctaatcagtgggctttggaactatatttgcacttaattacatcggtttctcccaaagacttccccttgttgtcctcacaggatatccattctggggagcacttatttttattcttacaggatacctcacagtaaccgataagaaatcaaaacttctgggtcaaggtgtcacgggcatgaatgttatcagctccttggttgcgataactgggattactttcaccattctcagctacagacatcaagacaagtactgccagatgccatcctttgaagaaatatgtgttttcagtagaactcttttcattgtaagtggtcttattttgcatgaagaatccctaaaatcttctctgaactgtgtccatgatgtaatgattcactgatttttattttattaaatgaagttgtgtcagcatttgaa

SEQ ID NO: 402216 - DNA, 3052 bp, Homo sapiens
aactatgattctgagattctactactgagtagagtcatcactaagggctcatctctaagggctccatgtgactctggtggagaggtagatcatgatttgggcggcaatgtttgctcactctttcccttactagagttctgccatagaatcatggagtcaacatcccaggacagaagggcaactcacgtcatcactataaaaccaaacgaaactgtattgactgcatttccctacagacctcatagctctctgctggattttctgaagggagagccaagagtcttgggggctacccagatcctgcttgctctaatcagtgggctttggaactatatttgcacttaattacatcggtttctcccaaagacttccccttgttgtcctcacaggatatccattctggggagcacttatttttattcttacaggatacctcacagtaaccgataagaaatcaaaacttctgggtcaaggtgtcacgggcatgaatgttatcagctccttggttgcgataactgggattactttcaccattctcagctacagacatcaagacaagtactgccagatgccatcctttgaagaaatatgtgttttcagtagaactcttttcattgacttcatccttctcactcctccacactccagccacttcctataatcccttaatgtgtcaagtatccacggccccaagatgatcagaggatcagcttcttccggctttgaaccgtcaccagttctgtttttcttgccttcggatgttactcaaaatagtgaacaacctgccccagaagaatatgatcaattacaatttgtgcttcaagaagagttttccagtgatgattcaacaacaaatgcacaatctgttatctttggaggctatgctttcttcaagttaacactctctaggagtcctttagtctcccaaccaggtaataaaggtagagaatttgtgccagatgaacaaaagcaaagtatccttccatctcccaaattttcagaggaagaaattgaacctttgcctcccacactagagaagaagccctcagaaaatatgtccattcagctagactctacatttaaacaaatgaaagatgaagatctacaatctgctattgtacaaccttctcaaatgcaaaccaagcttctgcaggaccaagctgcgtcactccaagtttttccatcccattctgcactaaaactcgaagatatatcacctgaagacttgccatcccaagctctaccagtagaaggcctgtcagaacaaaccatgccatctaagtctacatcatcccatgtcaaacagtcttctaatctgacagctaatgacctgccccctcaaggcatactatcccaagacacatcatctcaagatatgctgtttcatgacatgacatcccaagatatgcaatccctagatatgctatctcaagacacaccatcccacgccatgccacctcaagacataccttcccaagatatgctatcccaagctctatcagcgcatgccatattacctgaagcctcaacatcccatattgtgcagttccctgaaatacaacacctacttcagcagcccccagatcttcaaccagaaaacactgaacctcaaaaccagcaaattttacaaatgtcatatcaagatattagatcagaagttatggaagagaccaaagaatggaaatctgaggaggaactccatagaagaaaatcctcaagacggcattccttaaaccagcaaaccaaagccttgcaatacttaaggagacattctttagacgtgcaagccaaaggccagaaatcctcaaagaggcattccttagatcagcaaagcaaaggctggcaatctccaaagcagaaatccttagaccagcaaatcaaagactggctatccccaaagaggcactccgtagataagcaagctcaacttaatcaaactaaagagcaactcccagatcagcaagctgaagatcagcaagccaaaggggaacaatacccagaaggacaatctaaagatagacaagttaaagaccagcagactgataaggagcaaaactcaaagaagcaaacccaggatcagcaaactgaagaccagccggcccaagagaagaaatccccgaaaggacaattccaaaatgttcaagccgaaggacagcaagctcaggtggagaaagtgccaaaactgttatgccaagattcagaatcccaaatacagcaataccaattctggcaattccacaaaggcaatctccaggctggacaacccaggactgtcaatcttttggccaagaatcccctgactggataactcagggctggagaaacaaagattataaagcacgagaatggcaatttgaaatgaagcactggcaaacacaggatctattagagaaagaagccctaaagcagaaagctctataccaagaagtccaaacccagcacgcaacagcccaacataacctagaatgtcaagacactcaagataaagaccaacaagaccttcaatccagagttacacaaaaaggagatatgtacactagagacatcaaaccaggggacatgaaatgtatagggcaaacctcaggggacctgcaatcagaagacgtgaaggcagattttcattcttcttctggccaaagctcagtacaagacacatgtttagcctatttgtccaatctagattcagaacaagatgtgcaaccagacacttcagcttcctcaaattcatataaagaagatgtgaatttaacttctacttcatgtgatccaaaagatcaacagcaatctgaagactctgactaacatgcagaatctacccaataccacactgcccccattaatggaattaaattgggaaaaacaatattgcctcctccaatctgtgttctcaactgtggttgccacctcattaacttacaaaaaaatgaagggcatgctgagcactcaaacaatttgttcttacttaaaataaaatgacaacaaaccaaatgttaacactgtatcatcactttatgtatgtgaagaaataattcacatgtatattccttgtcat

SEQ ID NO: 402217 - DNA, 2601 bp, Homo sapiens
ggaagtctcagaggctggagagcagagcaccaagatcgttctggcaggaacagccagtgggaggttccagctgagcgctccccagaggtgagctgatccccagccacagcacacaggaccaggctgcgagaacagggtcaaggtgtcacgggcatgaatgttatcagctccttggttgcgataactgggattactttcaccattctcagctacagacatcaagacaagtactgccagatgccatcctttgaagaaatatgtgttttcagtagaactcttttcattgttctgtttttcttgccttcggatgttactcaaaatagtgaacaacctgccccagaagaatatgatcaattacaatttgtgcttcaagaagagttttccagtgatgattcaacaacaaatgcacaatctgttatctttggaggctatgctttcttcaagttaacactctctaggagtcctttagtctcccaaccaggtaataaaggtagagaatttgtgccagatgaacaaaagcaaagtatccttccatctcccaaattttcagaggaagaaattgaacctttgcctcccacactagagaagaagccctcagaaaatatgtccattcagctagactctacatttaaacaaatgaaagatgaagatctacaatctgctattgtacaaccttctcaaatgcaaaccaagcttctgcaggaccaagctgcgtcactccaagtttttccatcccattctgcactaaaactcgaagatatatcacctgaagacttgccatcccaagctctaccagtagaaggcctgtcagaacaaaccatgccatctaagtctacatcatcccatgtcaaacagtcttctaatctgacagctaatgacctgccccctcaaggcatactatcccaagacacatcatctcaagatatgctgtttcatgacatgacatcccaagatatgcaatccctagatatgctatctcaagacacaccatcccacgccatgccacctcaagacataccttcccaagatatgctatcccaagctctatcagcgcatgccatattacctgaagcctcaacatcccatattgtgcagttccctgaaatacaacacctacttcagcagcccccagatcttcaaccagaaaacactgaacctcaaaaccagcaaattttacaaatgtcatatcaagatattagatcagaagttatggaagagaccaaagaatggaaatctgaggaggaactccatagaagaaaatcctcaagacggcattccttaaaccagcaaaccaaagccttgcaatacttaaggagacattctttagacgtgcaagccaaaggccagaaatcctcaaagaggcattccttagatcagcaaagcaaaggctggcaatctccaaagcagaaatccttagaccagcaaatcaaagactggctatccccaaagaggcactccgtagataagcaagctcaacttaatcaaactaaagagcaactcccagatcagcaagctgaagatcagcaagccaaaggggaacaatacccagaaggacaatctaaagatagacaagttaaagaccagcagactgataaggagcaaaactcaaagaagcaaacccaggatcagcaaactgaagaccagccggcccaagagaagaaatccccgaaaggacaattccaaaatgttcaagccgaaggacagcaagctcaggtggagaaagtgccaaaactgttatgccaagattcagaatcccaaatacagcaataccaattctggcaattccacaaaggcaatctccaggctggacaacccaggactgtcaatcttttggccaagaatcccctgactggataactcagggctggagaaacaaagattataaagcacgagaatggcaatttgaaatgaagcactggcaaacacaggatctattagagaaagaagccctaaagcagaaagctctataccaagaagtccaaacccagcacgcaacagcccaacataacctagaatgtcaagacactcaagataaagaccaacaagaccttcaatccagagttacacaaaaaggagatatgtacactagagacatcaaaccaggggacatgaaatgtatagggcaaacctcaggggacctgcaatcagaagacgtgaaggcagattttcattcttcttctggccaaagctcagtacaagacacatgtttagcctatttgtccaatctagattcagaacaagatgtgcaaccagacacttcagcttcctcaaattcatataaagaagatgtgaatttaacttctacttcatgtgatccaaaagatcaacagcaatctgaagactctgactaacatgcagaatctacccaataccacactgcccccattaatggaattaaattgggaaaaacaatattgcctcctccaatctgtgttctcaactgtggttgccacctcattaacttacaaaaaaatgaagggcatgctgagcactcaaacaatttgttcttacttaaaataaaatgacaacaaaccaaatgttaacactgtatcatcactttatgtatgtgaagaaataattcacatgtatattccttgtcat

SEQ ID NO: 402218 - DNA, 2460 bp, Homo sapiens
caacccggctgcattaaatcctgcctcattgcagtgtaagttggacgaaaaggatataccattctcagctacagacatcaagacaagtactgccagatgccatcctttgaagaaatatgtgttttcagtagaactcttttcattgttctgtttttcttgccttcggatgttactcaaaatagtgaacaacctgccccagaagaatatgatcaattacaatttgtgcttcaagaagagttttccagtgatgattcaacaacaaatgcacaatctgttatctttggaggctatgctttcttcaagttaacactctctaggagtcctttagtctcccaaccaggtaataaaggtagagaatttgtgccagatgaacaaaagcaaagtatccttccatctcccaaattttcagaggaagaaattgaacctttgcctcccacactagagaagaagccctcagaaaatatgtccattcagctagactctacatttaaacaaatgaaagatgaagatctacaatctgctattgtacaaccttctcaaatgcaaaccaagcttctgcaggaccaagctgcgtcactccaagtttttccatcccattctgcactaaaactcgaagatatatcacctgaagacttgccatcccaagctctaccagtagaaggcctgtcagaacaaaccatgccatctaagtctacatcatcccatgtcaaacagtcttctaatctgacagctaatgacctgccccctcaaggcatactatcccaagacacatcatctcaagatatgctgtttcatgacatgacatcccaagatatgcaatccctagatatgctatctcaagacacaccatcccacgccatgccacctcaagacataccttcccaagatatgctatcccaagctctatcagcgcatgccatattacctgaagcctcaacatcccatattgtgcagttccctgaaatacaacacctacttcagcagcccccagatcttcaaccagaaaacactgaacctcaaaaccagcaaattttacaaatgtcatatcaagatattagatcagaagttatggaagagaccaaagaatggaaatctgaggaggaactccatagaagaaaatcctcaagacggcattccttaaaccagcaaaccaaagccttgcaatacttaaggagacattctttagacgtgcaagccaaaggccagaaatcctcaaagaggcattccttagatcagcaaagcaaaggctggcaatctccaaagcagaaatccttagaccagcaaatcaaagactggctatccccaaagaggcactccgtagataagcaagctcaacttaatcaaactaaagagcaactcccagatcagcaagctgaagatcagcaagccaaaggggaacaatacccagaaggacaatctaaagatagacaagttaaagaccagcagactgataaggagcaaaactcaaagaagcaaacccaggatcagcaaactgaagaccagccggcccaagagaagaaatccccgaaaggacaattccaaaatgttcaagccgaaggacagcaagctcaggtggagaaagtgccaaaactgttatgccaagattcagaatcccaaatacagcaataccaattctggcaattccacaaaggcaatctccaggctggacaacccaggactgtcaatcttttggccaagaatcccctgactggataactcagggctggagaaacaaagattataaagcacgagaatggcaatttgaaatgaagcactggcaaacacaggatctattagagaaagaagccctaaagcagaaagctctataccaagaagtccaaacccagcacgcaacagcccaacataacctagaatgtcaagacactcaagataaagaccaacaagaccttcaatccagagttacacaaaaaggagatatgtacactagagacatcaaaccaggggacatgaaatgtatagggcaaacctcaggggacctgcaatcagaagacgtgaaggcagattttcattcttcttctggccaaagctcagtacaagacacatgtttagcctatttgtccaatctagattcagaacaagatgtgcaaccagacacttcagcttcctcaaattcatataaagaagatgtgaatttaacttctacttcatgtgatccaaaagatcaacagcaatctgaagactctgactaacatgcagaatctacccaataccacactgcccccattaatggaattaaattgggaaaaacaatattgcctcctccaatctgtgttctcaactgtggttgccacctcattaacttacaaaaaaatgaagggcatgctgagcactcaaacaatttgttcttacttaaaataaaatgacaacaaaccaaatgttaacactgtatcatcactttatgtatgtgaagaaataattcacatgtatattccttgtcat

SEQ ID NO: 402219 - DNA, 2932 bp, Homo sapiens
aactatgattctgagattctactactgagtagagtcatcactaagggctcatctctaagggctccatgtgactctggtggagaggtagatcatgatttgggcggcaatgtttgctcactctttcccttactagagttctgccatagaatcatggagtcaacatcccaggacagaagggcaactcacgtcatcactataaaaccaaacgaaactgtattgactgcatttccctacagacctcatagctctctgctggattttctgaagggagagccaagagtcttgggggctacccagatcctgcttgctctaatcagtgggctttggaactatatttgcacttaattacatcggtttctcccaaagacttccccttgttgtcctcacaggatatccattctggggagcacttatttttattcttacaggatacctcacagtaaccgataagaaatcaaaacttctgggtcaaggtgtcacgggcatgaatgttatcagctccttggttgcgataactgggattactttcaccattctcagctacagacatcaagacaagtactgccagatgccatcctttgaagaaatatgtgttttcagtagaactcttttcattgttctgtttttcttgccttcggatgttactcaaaatagtgaacaacctgccccagaagaatatgatcaattacaatttgtgcttcaagaagagttttccagtgatgattcaacaacaaatgcacaatctgttatctttggaggctatgctttcttcaagttaacactctctaggagtcctttagtctcccaaccaggtaataaaggtagagaatttgtgccagatgaacaaaagcaaagtatccttccatctcccaaattttcagaggaagaaattgaacctttgcctcccacactagagaagaagccctcagaaaatatgtccattcagctagactctacatttaaacaaatgaaagatgaagatctacaatctgctattgtacaaccttctcaaatgcaaaccaagcttctgcaggaccaagctgcgtcactccaagtttttccatcccattctgcactaaaactcgaagatatatcacctgaagacttgccatcccaagctctaccagtagaaggcctgtcagaacaaaccatgccatctaagtctacatcatcccatgtcaaacagtcttctaatctgacagctaatgacctgccccctcaaggcatactatcccaagacacatcatctcaagatatgctgtttcatgacatgacatcccaagatatgcaatccctagatatgctatctcaagacacaccatcccacgccatgccacctcaagacataccttcccaagatatgctatcccaagctctatcagcgcatgccatattacctgaagcctcaacatcccatattgtgcagttccctgaaatacaacacctacttcagcagcccccagatcttcaaccagaaaacactgaacctcaaaaccagcaaattttacaaatgtcatatcaagatattagatcagaagttatggaagagaccaaagaatggaaatctgaggaggaactccatagaagaaaatcctcaagacggcattccttaaaccagcaaaccaaagccttgcaatacttaaggagacattctttagacgtgcaagccaaaggccagaaatcctcaaagaggcattccttagatcagcaaagcaaaggctggcaatctccaaagcagaaatccttagaccagcaaatcaaagactggctatccccaaagaggcactccgtagataagcaagctcaacttaatcaaactaaagagcaactcccagatcagcaagctgaagatcagcaagccaaaggggaacaatacccagaaggacaatctaaagatagacaagttaaagaccagcagactgataaggagcaaaactcaaagaagcaaacccaggatcagcaaactgaagaccagccggcccaagagaagaaatccccgaaaggacaattccaaaatgttcaagccgaaggacagcaagctcaggtggagaaagtgccaaaactgttatgccaagattcagaatcccaaatacagcaataccaattctggcaattccacaaaggcaatctccaggctggacaacccaggactgtcaatcttttggccaagaatcccctgactggataactcagggctggagaaacaaagattataaagcacgagaatggcaatttgaaatgaagcactggcaaacacaggatctattagagaaagaagccctaaagcagaaagctctataccaagaagtccaaacccagcacgcaacagcccaacataacctagaatgtcaagacactcaagataaagaccaacaagaccttcaatccagagttacacaaaaaggagatatgtacactagagacatcaaaccaggggacatgaaatgtatagggcaaacctcaggggacctgcaatcagaagacgtgaaggcagattttcattcttcttctggccaaagctcagtacaagacacatgtttagcctatttgtccaatctagattcagaacaagatgtgcaaccagacacttcagcttcctcaaattcatataaagaagatgtgaatttaacttctacttcatgtgatccaaaagatcaacagcaatctgaagactctgactaacatgcagaatctacccaataccacactgcccccattaatggaattaaattgggaaaaacaatattgcctcctccaatctgtgttctcaactgtggttgccacctcattaacttacaaaaaaatgaagggcatgctgagcactcaaacaatttgttcttacttaaaataaaatgacaacaaaccaaatgttaacactgtatcatcactttatgtatgtgaagaaataattcacatgtatattccttgtcat

SEQ ID NO: 402220 - DNA, 763 bp, Homo sapiens
aactatgattctgagattctactactgagtagagtcatcactaagggctcatctctaagggctccatgtgactctggtggagaggtagatcatgatttgggcggcaatgtttgctcactctttcccttactagagttctgccatagaatcatggagtcaacatcccaggacagaagggcaactcacgtcatcactataaaaccaaacgaaactgtattgactgcatttccctacagacctcatagctctctgctggattttctgaagggagagccaagagtcttgggggctacccagatcctgcttgctctaatcagtgggctttggaactatatttgcacttaattacatcggtttctcccaaagacttccccttgttgtcctcacaggatatccattctggggagcacttatttttattcttacaggatacctcacagtaaccgataagaaatcaaaacttctgggtcaaggtgtcacgggcatgaatgttatcagctccttggttgcgataactgggattactttcaccattctcagctacagacatcaagacaagtactgccagatgccatcctttgaagaaatatgtgttttcagtagaactcttttcattgacttcatccttctcactcctccacactccagccacttcctataatcccttaatgtgtcaagtatccacggccccaagatgatcagaggatcagcttcttccggctttgaaccgtcaccaggccagttatacaattaactcatcctc

SEQ ID NO: 402221 - DNA, 3100 bp, Homo sapiens
aactatgattctgagattctactactgagtagagtcatcactaagggctcatctctaagggctccatgtgactctggtggagaggtagatcatgatttgggcggcaatgtttgctcactctttcccttactagagttctgccatagaatcatggagtcaacatcccaggacagaagggcaactcacgtcatcactataaaaccaaacgaaactgtattgactgcatttccctacagacctcatagctctctgctggattttctgaagggagagccaagagtcttgggggctacccagatcctgcttgctctaatcagtgggctttggaactatatttgcacttaattacatcggtttctcccaaagacttccccttgttgtcctcacaggatatccattctggggagcacttattggtcaaggtgtcacgggcatgaatgttatcagctccttggttgcgataactgggattactttcaccattctcagctacagacatcaagacaagtactgccagatgccatcctttgaagaaatatgtgttttcagtagaactcttttcattgacttcatccttctcactcctccacactccagccacttcctataatcccttaatgtgtcaagtatccacggccccaagatgatcagaggatcagcttcttccggctttgaaccgtcaccaggaattttgttaatcttactgatcatcagcatagcagagctcagcatctctgtgactattgcatcctttagaagcaagtgctggacacagtcagatgaggttctgtttttcttgccttcggatgttactcaaaatagtgaacaacctgccccagaagaatatgatcaattacaatttgtgcttcaagaagagttttccagtgatgattcaacaacaaatgcacaatctgttatctttggaggctatgctttcttcaagttaacactctctaggagtcctttagtctcccaaccaggtaataaaggtagagaatttgtgccagatgaacaaaagcaaagtatccttccatctcccaaattttcagaggaagaaattgaacctttgcctcccacactagagaagaagccctcagaaaatatgtccattcagctagactctacatttaaacaaatgaaagatgaagatctacaatctgctattgtacaaccttctcaaatgcaaaccaagcttctgcaggaccaagctgcgtcactccaagtttttccatcccattctgcactaaaactcgaagatatatcacctgaagacttgccatcccaagctctaccagtagaaggcctgtcagaacaaaccatgccatctaagtctacatcatcccatgtcaaacagtcttctaatctgacagctaatgacctgccccctcaaggcatactatcccaagacacatcatctcaagatatgctgtttcatgacatgacatcccaagatatgcaatccctagatatgctatctcaagacacaccatcccacgccatgccacctcaagacataccttcccaagatatgctatcccaagctctatcagcgcatgccatattacctgaagcctcaacatcccatattgtgcagttccctgaaatacaacacctacttcagcagcccccagatcttcaaccagaaaacactgaacctcaaaaccagcaaattttacaaatgtcatatcaagatattagatcagaagttatggaagagaccaaagaatggaaatctgaggaggaactccatagaagaaaatcctcaagacggcattccttaaaccagcaaaccaaagccttgcaatacttaaggagacattctttagacgtgcaagccaaaggccagaaatcctcaaagaggcattccttagatcagcaaagcaaaggctggcaatctccaaagcagaaatccttagaccagcaaatcaaagactggctatccccaaagaggcactccgtagataagcaagctcaacttaatcaaactaaagagcaactcccagatcagcaagctgaagatcagcaagccaaaggggaacaatacccagaaggacaatctaaagatagacaagttaaagaccagcagactgataaggagcaaaactcaaagaagcaaacccaggatcagcaaactgaagaccagccggcccaagagaagaaatccccgaaaggacaattccaaaatgttcaagccgaaggacagcaagctcaggtggagaaagtgccaaaactgttatgccaagattcagaatcccaaatacagcaataccaattctggcaattccacaaaggcaatctccaggctggacaacccaggactgtcaatcttttggccaagaatcccctgactggataactcagggctggagaaacaaagattataaagcacgagaatggcaatttgaaatgaagcactggcaaacacaggatctattagagaaagaagccctaaagcagaaagctctataccaagaagtccaaacccagcacgcaacagcccaacataacctagaatgtcaagacactcaagataaagaccaacaagaccttcaatccagagttacacaaaaaggagatatgtacactagagacatcaaaccaggggacatgaaatgtatagggcaaacctcaggggacctgcaatcagaagacgtgaaggcagattttcattcttcttctggccaaagctcagtacaagacacatgtttagcctatttgtccaatctagattcagaacaagatgtgcaaccagacacttcagcttcctcaaattcatataaagaagatgtgaatttaacttctacttcatgtgatccaaaagatcaacagcaatctgaagactctgactaacatgcagaatctacccaataccacactgcccccattaatggaattaaattgggaaaaacaatattgcctcctccaatctgtgttctcaactgtggttgccacctcattaacttacaaaaaaatgaagggcatgctgagcactcaaacaatttgttcttacttaaaataaaatgacaacaaaccaaatgttaacactgtatcatcactttatgtatgtgaagaaataattcacatgtatattccttgtcat

SEQ ID NO: 402222 - DNA, 3001 bp, Homo sapiens
aactatgattctgagattctactactgagtagagtcatcactaagggctcatctctaagggctccatgtgactctggtggagaggtagatcatgatttgggcggcaatgtttgctcactctttcccttactagagttctgccatagaatcatggagtcaacatcccaggacagaagggcaactcacgtcatcactataaaaccaaacgaaactgtattgactgcatttccctacagacctcatagctctctgctggattttctgaagggagagccaagagtcttgggggctacccagatcctgcttgctctaatcagtgggctttggaactatatttgcacttaattacatcggtttctcccaaagacttccccttgttgtcctcacaggatatccattctggggagcacttattggtcaaggtgtcacgggcatgaatgttatcagctccttggttgcgataactgggattactttcaccattctcagctacagacatcaagacaagtactgccagatgccatcctttgaagaaatatgtgttttcagtagaactcttttcattgacttcatccttctcactcctccacactccagccacttcctataatcccttaatgtgtcaagtatccacggccccaagatgatcagaggatcagcttcttccggctttgaaccgtcaccagttctgtttttcttgccttcggatgttactcaaaatagtgaacaacctgccccagaagaatatgatcaattacaatttgtgcttcaagaagagttttccagtgatgattcaacaacaaatgcacaatctgttatctttggaggctatgctttcttcaagttaacactctctaggagtcctttagtctcccaaccaggtaataaaggtagagaatttgtgccagatgaacaaaagcaaagtatccttccatctcccaaattttcagaggaagaaattgaacctttgcctcccacactagagaagaagccctcagaaaatatgtccattcagctagactctacatttaaacaaatgaaagatgaagatctacaatctgctattgtacaaccttctcaaatgcaaaccaagcttctgcaggaccaagctgcgtcactccaagtttttccatcccattctgcactaaaactcgaagatatatcacctgaagacttgccatcccaagctctaccagtagaaggcctgtcagaacaaaccatgccatctaagtctacatcatcccatgtcaaacagtcttctaatctgacagctaatgacctgccccctcaaggcatactatcccaagacacatcatctcaagatatgctgtttcatgacatgacatcccaagatatgcaatccctagatatgctatctcaagacacaccatcccacgccatgccacctcaagacataccttcccaagatatgctatcccaagctctatcagcgcatgccatattacctgaagcctcaacatcccatattgtgcagttccctgaaatacaacacctacttcagcagcccccagatcttcaaccagaaaacactgaacctcaaaaccagcaaattttacaaatgtcatatcaagatattagatcagaagttatggaagagaccaaagaatggaaatctgaggaggaactccatagaagaaaatcctcaagacggcattccttaaaccagcaaaccaaagccttgcaatacttaaggagacattctttagacgtgcaagccaaaggccagaaatcctcaaagaggcattccttagatcagcaaagcaaaggctggcaatctccaaagcagaaatccttagaccagcaaatcaaagactggctatccccaaagaggcactccgtagataagcaagctcaacttaatcaaactaaagagcaactcccagatcagcaagctgaagatcagcaagccaaaggggaacaatacccagaaggacaatctaaagatagacaagttaaagaccagcagactgataaggagcaaaactcaaagaagcaaacccaggatcagcaaactgaagaccagccggcccaagagaagaaatccccgaaaggacaattccaaaatgttcaagccgaaggacagcaagctcaggtggagaaagtgccaaaactgttatgccaagattcagaatcccaaatacagcaataccaattctggcaattccacaaaggcaatctccaggctggacaacccaggactgtcaatcttttggccaagaatcccctgactggataactcagggctggagaaacaaagattataaagcacgagaatggcaatttgaaatgaagcactggcaaacacaggatctattagagaaagaagccctaaagcagaaagctctataccaagaagtccaaacccagcacgcaacagcccaacataacctagaatgtcaagacactcaagataaagaccaacaagaccttcaatccagagttacacaaaaaggagatatgtacactagagacatcaaaccaggggacatgaaatgtatagggcaaacctcaggggacctgcaatcagaagacgtgaaggcagattttcattcttcttctggccaaagctcagtacaagacacatgtttagcctatttgtccaatctagattcagaacaagatgtgcaaccagacacttcagcttcctcaaattcatataaagaagatgtgaatttaacttctacttcatgtgatccaaaagatcaacagcaatctgaagactctgactaacatgcagaatctacccaataccacactgcccccattaatggaattaaattgggaaaaacaatattgcctcctccaatctgtgttctcaactgtggttgccacctcattaacttacaaaaaaatgaagggcatgctgagcactcaaacaatttgttcttacttaaaataaaatgacaacaaaccaaatgttaacactgtatcatcactttatgtatgtgaagaaataattcacatgtatattccttgtcat

SEQ ID NO: 402223 - DNA, 2866 bp, Homo sapiens
aactatgattctgagattctactactgagtagagtcatcactaagggctcatctctaagggctccatgtgactctggtggagaggtagatcatgatttgggcggcaatgtttgctcactctttcccttactagagttctgccatagaatcatggagtcaacatcccaggacagaagggcaactcacgtcatcactataaaaccaaacgaaactgtattgactgcatttccctacagacctcatagctctctgctggattttctgaagggagagccaagagtcttgggggctacccagatcctgcttgctctaatcagtgggctttggaactatatttgcacttaattacatcggtttctcccaaagacttccccttgttgtcctcacaggatatccattctggggagcacttatttttattcttacaggatacctcacagtaaccgataagaaatcaaaacttctgggtcaaggtgtcacgggcatgaatgttatcagctccttggttgcgataactgggattactttcaccattctcagctacagacatcaagacaagtactgccagatgccatcctttgaagaaatatgtgttttcagtagaactcttttcattgttctgtttttcttgccttcggatgttactcaaaatagtgaacaacctgccccagaagaatatgatcaattacaatttgtgcttcaagaagagttttccagtgatgattcaacaacaaatgcacaatctgttatctttggaggctatgctttcttcaagttaacactctctaggagtcctttagtctcccaaccaggtaataaaggtagagaatttgtgccagatgaacaaaagcaaagtatccttccatctcccaaattttcagaggaagaaattgaacctttgcctcccacactagagaagaagccctcagaaaatatgtccattcagctagactctacatttaaacaaatgaaagatgaagatctacaatctgctattgtacaaccttctcaaatgcaaaccaagcttctgcaggaccaagctgcgtcactccaagtttttccatcccattctgcactaaaactcgaagatatatcacctgaagacttgccatcccaagctctaccagtagaaggcctgtcagaacaaaccatgccatctaagtctacatcatcccatgtcaaacagtcttctaatctgacagctaatgacctgccccctcaaggcatactatcccaagacacatcatctcaagatatgctgtttcatgacatgacatcccaagatatgcaatccctagatatgctatctcaagacacaccatcccacgccatgccacctcaagacataccttcccaagatatgctatcccaagctctatcagcgcatgccatattacctgaagcctcaacatcccatattgtgcagttccctgaaatacaacacctacttcagcagcccccagatcttcaaccagaaaacactgaacctcaaaaccagcaaattttacaaatgtcatatcaagatattagatcagaagttatggaagagaccaaagaatggaaatctgaggaggaactccatagaagaaaatcctcaagacggcattccttaaaccagcaaaccaaagccttgcaatacttaaggagacattctttagacgtgcaagccaaaggccagaaatcctcaaagaggcattccttagatcagcaaagcaaaggctggcaatctccaaagcagaaatccttagaccagcaaatcaaagactggctatccccaaagaggcactccgtagataagcaagctcaacttaatcaaactaaagagcaactcccagatcagcaagctgaagatcagcaagccaaaggggaacaatacccagaaggacaatctaaagatagacaagttaaagaccagcagactgataaggagcaaaactcaaagaagcaaacccaggatcagcaaactgaagaccagccggcccaagagaagaaatccccgaaaggacaattccaaaatgttcaagccgaaggacagcaagctcaggtggagaaagtgccaaaactgttatgccaagattcagaatcccaaatacagcaataccaattctggcaattccacaaaggcaatctccaggctggacaacccaggactgtcaatcttttggccaagaatcccctgactggataactcagggctggagaaacaaagattataaagcacgagaatggcaatttgaaatgaagcactggcaaacacaggatctattagagaaagaagccctaaagcagaaagctctataccaagaagtccaaacccagcacgcaacagcccaacataacctagaatgtcaagacactcaagataaagaccaacaagaccttcaatccagagttacacaaaaaggagatatgtacactagagacatcaaaccaggggacatgaaatgtatagggcaaacctcaggggacctgcaatcagaagacgtgaaggcagattttcattcttcttctggccaaagctcagtacaagacacatgtttagcctatttgtccaatctagattcagaacaagatgtgcaaccagacacttcagcttcctcaaattcatataaagaagatgtgaatttaacttctacttcatgtgatccaaaagatcaacagcaatctgaagactctgactaacatgcagaatctacccaataccacactgcccccattaatggaattaaattgggaaaaacaatattgcctcctccaatctgtgttctcaactgtggttgccacctcattaacttacaaaaaaatgaagggcatgctgagcactcaaacaatttgttcttacttaaaataaaatgacaacaaacca

SEQ ID NO: 402224 - DNA, 1889 bp, Homo sapiens
  misc_feature (1889)..(1889): n is a, c, g, or t
tttatggagtttacattccaatggagaagacagacaataacatatatcaaatgctataaagaaagggcagggaatagggatacaatgtgttgaattttgtcaaatgctttttttgtatcttttgagattatcatatggcttttgtccttcattctgttaacatgatatatcacatttactgatttgtgtatactgaatcatctttgcatcccgggatgaatcccactgggacagaatgtggagagggttgaaactttagataagatggtttgggaaagcctgtttgaagagatgacatatgcagaggccccagtgaagtaagcatatgagtcatataaatatttggggaaagagcattctggacaaaggtaaaaaacaagtgaaaaggccctaaaatgttaacttacttggcatgtttgaggaataacaaagaggccagtaaggttacagcatagtgattaagagagaagaatggtaagaagtgacataaggaagaaagccaggtccttatagcctggcatggatatgtaaatgggaagcaattagattgagaagaggagtgacataatttgatttacctttatgaaatatggagctacaatgtcaaggttagactgaagaagattaaagaggaaagcagagactggttaggttattatagtgtcctaggtaacagttttggacaagtgtgataaatgttgaggtgggaggggttagaggttggattcagactctgttttgtaagtagagaagataatgtctgctgatagcttggatatgaggaggaaaaggagaggagtaaaggatgactcagatttttgacctgtcaattgggtgaactctgagattaaattctgttttggctatgttaggttggaaatgctgtgtaggcaattggatatccaagtctggacttcagagtacaatttgggactagaaaattaatttgggagtcattagggaataaccatgactttggatgagatcacctagtacagctagagaagagaaggtagcaaaagacagagacctaaggtatgccagcattgagaagtagaggagaagaggaaccagcaaaagactgagaaggacccaccagtgacctagaagaaaaatcaggaggctggtattctggaagccatcagaagaaaatgtttcacaaaaggaaggtagtattgaatggtgtgaaatgttacctatatacctggaaaaaagcaacttcagctgctttttaagtaaatgtgatagtttgtactgcaaataactttccatattgcttttcagatcatgatattttggtccttaagatcatgtagaactttccattgtgagaagggagttgattattttatcattaaagaaacttttctaaacttaaatttatgaaaaataaaaaaaaaacaaaaaaaaagaacaaaaaaaaacacaaaaaaacaaaaaaaaaaaaaaaaaaaaaaagaaaaacaaaaaaaaaaacaaacaagcaaaaaaaaagagggaggggggggcggaccaaaaaaacacccgccgcggagcggccaccacacaagagacacccacacgcgcttttttgataaaacgggggccccccaacaaggggcagcgtcaaacaaaacaggagcgaccgggggctttaaaaacaaacagcggtcgccggcgaaaaactgactgctatcgagtgatgcatcatgtaggagaaagacaccaacaccatcggggggggaggaacacaaaactggggaacacacccacaaaaaaggatagaagcgccgcgtagggaaaaaaacaagacagcgagagaggggctgaagacaccacatcatgatgcggctgcaggagatgtgcagtgagttaattaataatatttacccggcgttatctaataatgn

SEQ ID NO: 402225 - DNA, 1393 bp, Homo sapiens
tttatggagtttacattccaatggagaagacagacaataacatatatcaaatgctataaagaaagggcagggaatagggatacaatgtgttgaattttgtcaaatgctttttttgtatcttttgagattatcatatggcttttgtccttcattctgttaacatgatatatcacatttactgatttgtgtatactgaatcatctttgcatcccgggatgaatcccactgggacagaatgtggagagggttgaaactttagataagatggtttgggaaagcctgtttgaagagatgacatatgcagaggccccagtgaagtaagcatatgagtcatataaatatttggggaaagagcattctggacaaaggtaaaaaacaagtgaaaaggccctaaaatgttaacttacttggcatgtttgaggaataacaaagaggccagtaaggttacagcatagtgattaagagagaagaatggtaagaagtgacataaggaagaaagccaggtccttatagcctggcatggatatgtaaatgggaagcaattagattgagaagaggagtgacataatttgatttacctttatgaaatatggagctacaatgtcaaggttagactgaagaagattaaagaggaaagcagagactggttaggttattatagtgtcctaggtaacagttttggacaagtgtgataaatgttgaggtgggaggggttagaggttggattcagactctgttttgtaagtagagaagataatgtctgctgatagcttggatatgaggaggaaaaggagaggagtaaaggatgactcagatttttgacctgtcaattgggtgaactctgagattaaattctgttttggctatgttaggttggaaatgctgtgtaggcaattggatatccaagtctggacttcagagtacaatttgggactagaaaattaatttgggagtcattagggaataaccatgactttggatgagatcacctagtacagctagagaagagaaggtagcaaaagacagagacctaaggtatgccagcattgagaagtagaggagaagaggaaccagcaaaagactgagaaggacccaccagtgacctagaagaaaaatcaggaggctggtattctggaagccatcagaagaaaatgtttcacaaaaggaaggtagtattgaatggtgtgaaatgttacctatatacctggaaaaaagcaacttcagctgctttttaagtaaatgtgatagtttgtactgcaaataactttccatattgcttttcagatcatgatattttggtccttaagatcatgtagaactttccattgtgagaagggagttgattattttatcattaaagaaacttttctaaacttaaatttatgaaaaataa

SEQ ID NO: 402226 - DNA, 416 bp, Homo sapiens
aggaaccagcaaaagactgagaaggacccaccagtgacctagaagaaaaatcaggaggctggtattctggaagccatcagaagaaaatgtttcacaaaaggaaggtagtattgaatggtgtgaaatgttacctatatacctggaaaaaagcaacttcagctgctttttaagtaaatgtgatagtttgtactgcaaataactttccatattgcttttcagatcatgatattttggtccttaagatcatgtagaactttccattgtgagaagggagttgattattttatcattaaagaaacttttctaaacttaaatttatgaaaaataatttttcccttaggtttgtctttttgttcaataatgattccctgggtatctttttttgccccacaaataaaatacttagacatacctgg

SEQ ID NO: 402227 - DNA, 464 bp, Homo sapiens
tcagcttaggcagcagtgccatgacatggcaggaagactggcctagagggagaagaccctggaagaagcctgtctctgtcacttcttagaaacgcccactgttgcttagcctctgcagatgggaaatggatgcgaaatggccttacttctcatgagatgacactggcaccactgtgagcctgagtgcctccttaacttttgtgcctgaggtgcctctctagtctcaccctggtcctggcgctgctggggataagtagagggagtggagtcttggatgaactagaggcatgttgcacacagccggagagggagaaaccgaggagagaaaagagaagagaaagtgagtgggatggaacagcctgcaggagtctggatggaaggggtctttggtttaggttggtctgcttttgaggcaaagacacacattcccagagatttgaaggaagcctgcataaaacagagac

SEQ ID NO: 402228 - DNA, 393 bp, Homo sapiens
gctccaacagagcagaggggacagcatatggctgtgtgtcacgtccagaatgcagacttggagctttgtggtgttcaggatgaagtcacacactgtccagctttcagctacatcatgtcagaatatgaacgaataaacaatctcttgtgcttccctggttgatctggccttgtctggctcatgtgctgttaaacaccatcggcccttataaacagaaatacaacatgctctacataaagacatcacatctaaattagccagaggcagtggcatgcacctgtactcccagctactcttgaggctgaggcgggaggatcattcgagcccaaaaatttgatgctgcagtgagctatgcttgactgagacctgcctgtcaaaaaaagaaaaaaaaga

SEQ ID NO: 402229 - DNA, 230 bp, Homo sapiens
tcagggtttcccagaggaagagagagaatttggacaaatgaatgaggaacaacgctctcctgagggttttctttaaggggcgaggatcactgccgctagctcctttgaaagcaaagttaagaggcagcgcaggaaggcacagcaggaaggctcatggttagactacagagaaggaagcagccactgctggggacctaccctgtgctggtcactgacaagctgtctcatta

SEQ ID NO: 402230 - DNA, 240 bp, Homo sapiens
atacagatgtaaaagttatttaaaatttattagcaaattaagtccaaaatgcataaaaagaataggttttgataaattggcatcatcgacaggaatacaaggttgatttaacacttgaaaatcattgtaatatactgcattaagactcagaatcatataatcatcttagtatttacaaaatttaaaagttttgacaaaattcaacaaccatttaaactgtcaacaaatagaatcatataa

SEQ ID NO: 402231 - DNA, 344 bp, Homo sapiens
ttggaaattaagccaggctcctctagtaaaggagagctggaagttggaagtacagtagaagtcagagtgtcttatgttgaaaaccctggctatttctggtgtcagctgaccaggaacatacaaggacttaaaactctaatgtctgatattcagtactattgcaaaaatacagctgctcctcaccagagaaacacccttgcttgtttggctaagcgaacagtaaacagacagtggtccagagcacttattagtgggatacagtctgtggagcatgtcaatgtaacatttgtagattatggagacagagaaatggtatctgtgaagaatatttattcaattagtga

SEQ ID NO: 402232 - DNA, 390 bp, Homo sapiens
attgtgccactgcactccagcctcggtggcagtgagaacctgttttcaaaaaaaaaaaaaagtatatccccttcaatgcagaaattttatttctagaactgctatggaaatatacaagcaggcaaatatatgtctggatgaggaggctgtagccattatggcatagaaaactcaaagaggcctaaatgtttattaacagtggattggttatacatatcttggcatatcaccacaacaagctgctgtgcagttgtttaaaaaaagaatgaggcatttataagagggaagaaagatctatttaaacaaaaaccaaacagatataaactcaagaggcgggcagatcacaaggtcaggagttcgagaccagcctggccaacatagtgaaactcc

SEQ ID NO: 402233 - DNA, 393 bp, Homo sapiens
ctgggagggtgggagtcgccagcacaaagccggagcccaggccggcctggcttttctttgtcttttaaacctggttttgattagggacaagagagcgttattacaccattagagagcaattaaagatagaaaaagccctcacctcggcccatcccaacaccaccgctctctccatctgctggggctctcttctgaccccgtcccagcagcatccatgcaaccgcaggcacaatgcacgtgccttttcgtactctgcttttccaccctatggtctgtcccgattgctgctccatgtcgcccctgttttgtatttaagtttctattttagaatgtcacggtgctgagaaaattgacattctaccctaatagttctgccttatgctggaaatcctc

SEQ ID NO: 402234 - DNA, 790 bp, Homo sapiens
agcatgcgcccgagggtgtttcggggcgtccgaagcgggcgtgctccagcctgctcagcagcgagtggttggaaattagcaaagtgagagggtgaaaggaagcaggaggaggagggagttctagcgaagacttcggagggaagcaacccatcccctgccacaagaaagcaccgccactccagtgggaacggacacgcgtgcacacagccacgagtgagagaatacagcagttccaaggacaagggattcgtaccactgctcctcactcagtaaatagcagagacagaatttgaacgtctcactctgtcacctgagctggagtgcagtggtgcgatcacagcttactgcagcattgaactcctgggctcaagtgatcctcttgcctcaggctcccaagtagctgtgactgcagtgtccttgctggccttgcaaaatgagttcggaagggtcgattccatcctcttcagttgtggaaagagtttaagaagggctggtgttaattcttctctttacaatattcgatgaaattcaccagtgaagccgtgacatcctgggatactcttggtgagaggttgaatgcctttgagaacttgatgccgtaaaatttgcatgactctccatcctttctggatctctcattggactcaagccagcatggctcacagcacaaaggttaacggcagttgcctcaggaaaagccggtgatattctcagtggacgacacaggaccagggaaccgcaaagacccgtaactttgtggaagaacccactatggttattcaactagaac

SEQ ID NO: 402235 - DNA, 159 bp, Homo sapiens
agcatgcgcccgagggtgtttcggggcgtccgaagcgggcgtgctccagcctgctcagcagcgagtggttggaaattagcaaagtgagagggtgcgtggcctgagggactcggggaggctgagggctttttttctcaacactgtgaagctcagggaaag

SEQ ID NO: 402236 - DNA, 642 bp, Homo sapiens
agcatgcgcccgagggtgtttcggggcgtccgaagcgggcgtgctccagcctgctcagcagcgagtggttggaaattagcaaagtgagagggtgaaaggaagcaggaggaggagggagttctagcgaagacttcggagggaagcaacccatcccctgccacaagaaagcaccgccactccagtgggaacggacacgcgtgcacacagccacgagtatggtgatgacactcccaagtccatgtgggactccctccttatgcgggcctcagtctgtcatcttccttggagcaggaccaaagtaaataagataaagtcacaatttctcatccttcttcactcaacttttctttgaggagagaatacagcagttccaaggacaagggattcgtaccactgctcctcactcagtaaatagcagagacagaatttgaacgctagctgtgtggcctcacctaacttctctgaaccattgctcacatgtaaaacacggaaaaaattatccacttctcagggatgttgtgaagattaaaagaacaagagatgtagagtgctcagcacagtgcctctgctctgggaagcactccagatgtgtctgcttttgttgtgattttgccattcttcaacaaagttaaaagagcctca

SEQ ID NO: 402237 - DNA, 749 bp, Homo sapiens
agcatgcgcccgagggtgtttcggggcgtccgaagcgggcgtgctccagcctgctcagcagcgagtggttggaaattagcaaagtgagagggtgaaaggaagcaggaggaggagggagttctagcgaagacttcggagggaagcaacccatcccctgccacaagaaagcaccgccactccagtgggaacggacacgcgtgcacacagccacgagtatggtgatgacactcccaagtccatgtgggactccctccttatgcgggcctcagtctgtcatcttccttggagcaggaccaaagtaaataagataaagtcacaatttctcatccttcttcactcaacttttctttgaggagagaatacagcagttccaaggacaagggattcgtaccactgctcctcactcagtaaatagcagagacagaatttgaacgaatgctacgctggtaagggaagaaagcctcaagaaagcatctgtaccattccagcaaatacactgtgcatgctcccctcccaaatgctagcaggccactgcacatatggacagcccaccccaagggaagaattgggagaagtaacccaagaccccgaaagtatgccaacctgtaagaccgcaagtcaaaggtcaaactgtgcacttgatctcacaaggtgcccactcggccctcttccaaatatactctacttcctttcattcctgctctgaagctttttaataaattttcactcctgcttgaggactaagctct

SEQ ID NO: 402238 - DNA, 577 bp, Homo sapiens
agcatgcgcccgagggtgtttcggggcgtccgaagcgggcgtgctccagcctgctcagcagcgagtggttggaaattagcaaagtgagagggtgaaaggaagcaggaggaggagggagttctagcgaagacttcggagggaagcaacccatcccctgccacaagaaagcaccgccactccagtgggaacggacacgcgtgcacacagccacgagtatggtgatgacactcccaagtccatgtgggactccctccttatgcgggcctcagtctgtcatcttccttggagcaggaccaaagtaaataagataaagtcacaatttctcatccttcttcactcaacttttctttgaggagagaatacagcagttccaaggacaagggattcgtaccactgctcctcactcagtaaatagcagagacagaatttgaaccactttaccgtctttcctgcccagctgttgaaatatcaaactgtaccaagattttggccatgatggactctgttctctgcacactaagagatttatcttcctgatcatcagtagaaatattaataaataatattggttgccatt

SEQ ID NO: 402239 - DNA, 762 bp, Homo sapiens
gcctgagggactcggggaggctgagggctttttttctcaacactgtgaagctcagggaaaggagtagaactgggaaccaagtaaagtaaaatcgtggcaagtgggcatagacctgaaatctccttcgtgagggaacccagaacgtgcagctcaatgtatgtttggaacgaacaggtgaaaggaagcaggaggaggagggagttctagcgaagacttcggagggaagcaacccatcccctgccacaagaaagcaccgccactccagtgggaacggacacgcgtgcacacagccacgagtgaggtttgaaagaggccccaccctccattacacctgtgctccaccgtggcccccagccaagtttaatctcccattcagcacttacttctggaagcttctttccctttccttcccaccactcattggcctttcaccccctagttttttgtctgtgtgtgggactgtcttcccccactccccttgactgaagttccttgagagcagcagccctctttttatcagggaagagatttgaagctcaggacattcttatccaagtaggtgctagccacctgggtagtcaagacagggccctgcacagttaatgtgaatcttgtcataatgccagggttattgttttgcaaggagccggtcatagaacactagattgcattgtcactgggaaataagctcattctattagcttgtttctcagctagcttatgtagaaatttgccacagttgttactgctgggcacctgccc

SEQ ID NO: 402240 - DNA, 359 bp, Homo sapiens
acatagatgtttatagcagctttattcataatttatccaaaacttggaaacaagatgtctttcagtaggtaagtggataactgtggtacttctgaataatggaatgttatttagagttaaaaagaaatgcattcactttgggaggccgaagtgggtggattgcttgaggccaggagtttgagaccagcctggtcaacatgggaaaaccccaattagccgggcatagtggcgtgagcctgtaatcccagctactcgggaggctgagatatgagaatcgtttgaacctgggagatggaggttgcagtgagccagtgccactgcacttcagcctgggcaacagagcaagactcctctgtctc

SEQ ID NO: 402241 - DNA, 361 bp, Homo sapiens
tttttttttgagatggagtctcgctctgttgccctggctggagtgcagtggtgcgatctcagctcactgcaagctccgcctcctgggttcacaccattctcccgcctcagcctcctgagcagctgggattacaggcacctgccaccacgcccagctaattttttgtatttctttttagtagcgacggggtttcaccacgttagccaggattgtctcgatctcctgacctcatgatccgcccacctctgcctcccaaagtacaggcgttagccaccgcgcccagccaaaaaacattcttaggatgatttttctctttgtgtaaccctcagaagtagacataagaggcctttatcagggaagc

SEQ ID NO: 402242 - DNA, 438 bp, Homo sapiens
gttccgagaacacctgtatttggtgtaaaaatgggtggcaccacagttcaagaaatcttcacctttttccagaaatcttcatgaatattccactccctggtaaaaaaaaaacaaaaaacaaaaaacaaaacccataaataaagaggccagatgcagtggttcatgtctataatcccagtactttgggaggccaaggtgggtggatcgcttgatccctggcggtcgaggctgcattgagccgtgatcgctccactgcaatccagcctaggcaacagaaagagaccctgtctcaaaacaaacaaacaaaacagaaaaacaaaaacccataaggatagaaacctcaaaccccatagcatgacattcttgagtatgctcacactcccctttcttgagtgcgtacttctcgatttgcaataaatctctgtactttcactattt

SEQ ID NO: 402243 - DNA, 482 bp, Homo sapiens
agaatccccaaaaggagagcaaggcttggctaacaaaaacaggcatccactgtgtggttatgtctattctatagattttgtagatgaggtttaaaagcatggccccaagtaaaggtggcatctctatcctatcctcgcctttatctaaactctgtgaccgatcaatagcatatgatggtggtggtgctctgccagtctcccagtcccagactgaagcactagcagcttccacttattatctcttgggactctagctcttgggacccaaccaccatgctgtgaagcagcccaggccacacagagaggccacgtgtacatgttcagctgacagcagtatcaaatgtcagacatgagagaggaaggcttcaagatgactccagcccagccaccgtctgagaacaaagtaagaactgcctcactgatgccattcaaagcccagcaccatgagagataataaaacgttgtttgaagatgctaacttt

SEQ ID NO: 402244 - DNA, 623 bp, Homo sapiens
agctggaacacagccaggacacagacgcggatgatggggccttgcagtaagcagcctgacaggagcaatggccaccagcaggtgaagggcatcgctgccccaggcctcaagccgggcccccaagagaacacaacttctgaggcaggcctgccccagggggaagcacggacccgagacgacggcgatgaggaagggctcctgacacacagcgaggaagagctggaacacagccaggacacagacgcggatgatggggccttgcagtaagcagcctgacaggagcaatggccaccagcaggtgaagggcatcgctgccccaggcctcaagccgggcacccaaccctggatgccaccccccagcgggtaccagaggaaagctggcagcaggcgcctcctcccccaacgcatcccagccagtgccatgtcctctgcaggtggagttactggcctactccttccccatgagccctccctgtctgcactgcccaggccagagggtagagcacaggggtttccccatactacctcccctccccaggacactcccaggcttgggttttttctataggtttggcggggggccacagggaggggaccctgacaataaagagattggatcccaa

SEQ ID NO: 402245 - DNA, 1167 bp, Homo sapiens
tctggacctttccaaagccaggctgagagggtggggagagcccatgcgcctgggaagccgggctgtttctgggcggggctgcagactcctcgtgctcgtgtcaccgtgtccttcccaggagacagagaaggaggagagcccggaaccagggccggagcggcgggcggagccgagctgcggggagccgctccgggtgcccccacccccgcgcgcctcagtggtgccggccgagggcagggctcgcggttgcggggctcgcgccgctgtcagtgcggcggggcgcgcgagcggcgccagctcggggcagcggaacccagagaagctgagggggcggtagcggcggcgacggcgacgacgacgactcccgcgcgtgtgcccagcctcttcccgccgcagccgcccttttcctccctcccttacgtccccgagtgcggcagtaccgcctccttcccagccgcgcggcttcctccagacctctcggcgcgggtgagccctattcccagaggcaggtggtgctgaccctgtaacccaaaggaggaaacagctggctaagctcatcattgttactggtgggcaccatgtccttgaagcttcaggcaagcaatgtaaccaacaagaatgaccccaagtccatcaactctcgagtcttcattggaaacctcaacacagctctggtgaagaaatcagatgtggagaccatcttctctaagtatggccgtgtggccggctgttctgtgcacaagggctatgcctttgttcagtactccaatgagcgccatgcccgggcagctgtgctgggagagaatgggcgggtgctggccgggcagaccctggacatcaacatggctggagagcctaagcctgacagacccaaggggctaaagagagcagcatctgccatatacagtggctacatctttgactatgattactaccgggacgacttctacgacaggtgagcaggggaggggcgtgcccaggcatgaaacagccaagctggaagggtcttgagagattgttggtgcagcccactgagttctccaaatgagaaccaaaacccagaggtttgcctggggttgctccaccagtcggtagcagagctgagactggggtcctgtgctgcaggtgctcaggccagagctcctaccaccatacaacactgtctgc

SEQ ID NO: 402246 - DNA, 336 bp, Homo sapiens
  misc_feature (264)..(264): n is a, c, g, or t
  misc_feature (311)..(312): n is a, c, g, or t
cggaatacacagcgaggaagagctggaacacagccaggacacagacgcggatgatggggccttgcagtaagcagcctgacaggagcaatggccaccagcaggtgaagggcatcgctgccccaggcctcaagccgggcacccaaccctggatgccaccccccagcgggtaccagaggaaagctggcagcaggcccggcaccagccccccaagagacacaacttctgagcagcctgcccagggggaagcacggacccgagacgacngcgatgaggaaggctcctgacacacagcgaggaagagctgaacacannagacacaaccgcgctggtgtatta

SEQ ID NO: 402247 - DNA, 536 bp, Homo sapiens
taaagtgtgtttttaaccgaattctttcatgctgtgcccttgggtggacactgaatgtggatagccatcctcatttggcatatggggaaactgaggctcaggtaggctcagttgacccccactcccatacctctctattcctagctggggatttgtgctgctttgagatttgcaaactctgagcagaggttggggtggcagttgaccaagcagaagccaggtcatgtaatagagcaggcctgggtgccaggggacctagggatgtctcctcttttgaatggggtataactgctaccacctgatgccttgcctgcccttactgggcctggatggttggagaggttgtagtgaggtagtgaggatcccaacagccatcagggtccggcaagcccttcctcttcactccagggcttgctaggagccagcagaggtgtgtagtgcaggcctcccagcccctcaccagcttgggttttttctataggtttggcggggggccacagggaggggaccctgacaataaagagattggatcccaa

SEQ ID NO: 402248 - DNA, 361 bp, Homo sapiens
ctgaatctagaacttggggaggtgtctggagatgagggcctgtggaaagtgggctgagtggccgtccctaagctccagccctctcccctttgtttccccagtggctacatctttgactatgattactaccgggacgacttctacgacaggtgagcaggggaggggcgtgcccaggcatgaaacagccaagctggaagggtcttgagagattgttggtgcagcccactgagttctccaaatgagaaccaaaacccagaggtttgcctggggttgctccaccagtcggtagcagagctgagactggggtcctgtgctgcaggtgctcaggccagagctcctaccaccatacaacactgtctgc

SEQ ID NO: 402249 - DNA, 402 bp, Homo sapiens
ccaacttaaagaagtgtccctaccaagatagaagagcaaagaggaaagagtcccccactgcaaggagtactgcaataatacagggaagtagctacatttcatcttcattctagaaatagggagacttggcaaaaggacagacaaaactctagacactataaatttggttctggaagggattaccatccatttattgcattttttcaagcatcaagttccctagaatattaattgccttttaaccattattcatcaagacagactgaagatggcaaggatcctgatatcaccagaagacagcctcacaagtgccttcttatcccctgaaaaaccttatggtctacagctaaacagtttggttgtagccttgtaaaggataataaacatccaggaatcataaac

SEQ ID NO: 402250 - DNA, 1810 bp, Homo sapiens
tctggacctttccaaagccaggctgagagggtggggagagcccatgcgcctgggaagccgggctgtttctgggcggggctgcagactcctcgtgctcgtgtcaccgtgtccttcccaggagacagagaaggaggagagcccggaaccagggccggagcggcgggcggagccgagctgcggggagccgctccgggtgcccccacccccgcgcgcctcagtggtgccggccgagggcagggctcgcggttgcggggctcgcgccgctgtcagtgcggcggggcgcgcgagcggcgccagctcggggcagcggaacccagagaagctgagggggcggtagcggcggcgacggcgacgacgacgactcccgcgcgtgtgcccagcctcttcccgccgcagccgcccttttcctccctcccttacgtccccgagtgcggcagtaccgcctccttcccagccgcgcggcttcctccagacctctcggcgcgggtgagccctattcccagaggcaggtggtgctgaccctgtaacccaaaggaggaaacagctggctaagctcatcattgttactggtgggcaccatgtccttgaagcttcaggcaagcaatgtaaccaacaagaatgaccccaagtccatcaactctcgagtcttcattggaaacctcaacacagctctggtgaagaaatcagatgtggagaccatcttctctaagtatggccgtgtggccggctgttctgtgcacaagggctatgcctttgttcagtactccaatgagcgccatgcccgggcagctgtgctgggagagaatgggcgggtgctggccgggcagaccctggacatcaacatggctggagagcctaagcctgacagacccaaggggctaaagagagcagcatctgccatatacaggctcttcgactaccggggccgtctgtcgcccgtgccagtgcccagggcggtccctgtgaagcgaccccgggtcacagtccctttggtccggcgtgtcaaaactaacgtacctgtcaagctctttgcccgctccacagctgtcaccaccagctcagccaagatcaagttaaagagcagtgagctgcaggccatcaagacggagctgacacagatcaagtccaatatcgatgccctgctgagccgcttggagcagatcgctgcggagcaaaaggccaatccagatggcaagaagaagggtgatggaggtggcgccagcggcggcggcggcggtggtggtggcagcggtggcggtggcagtggtggtggcggtggcggtggcagcagccggccaccagccccccaagagaacacaacttctgaggcaggcctgccccagggggaagcacggacccgagacgacggcgatgaggaagggctcctgacacacagcgaggaagagctggaacacagccaggacacagacgcggatgatggggccttgcagtaagcagcctgacaggagcaatggccaccagcaggtgaagggcatcgctgccccaggcctcaagccgggcacccaaccctggatgccaccccccagcgggtaccagaggaaagctggcagcaggcgcctcctcccccaacgcatcccagccagtgccatgtcctctgcaggtggagttactggcctactccttccccatgagccctccctgtctgcactgcccaggccagagggtagagcacaggggtttccccatactacctcccctccccaggacactcccaggcttgggttttttctataggtttggcggggggccacagggaggggaccctgacaataaagagattggatcccaa

SEQ ID NO: 402251 - DNA, 1775 bp, Homo sapiens
tctggacctttccaaagccaggctgagagggtggggagagcccatgcgcctgggaagccgggctgtttctgggcggggctgcagactcctcgtgctcgtgtcaccgtgtccttcccaggagacagagaaggaggagagcccggaaccagggccggagcggcgggcggagccgagctgcggggagccgctccgggtgcccccacccccgcgcgcctcagtggtgccggccgagggcagggctcgcggttgcggggctcgcgccgctgtcagtgcggcggggcgcgcgagcggcgccagctcggggcagcggaacccagagaagctgagggggcggtagcggcggcgacggcgacgacgacgactcccgcgcgtgtgcccagcctcttcccgccgcagccgcccttttcctccctcccttacgtccccgagtgcggcagtaccgcctccttcccagccgcgcggcttcctccagacctctcggcgcgggtgggcaccatgtccttgaagcttcaggcaagcaatgtaaccaacaagaatgaccccaagtccatcaactctcgagtcttcattggaaacctcaacacagctctggtgaagaaatcagatgtggagaccatcttctctaagtatggccgtgtggccggctgttctgtgcacaagggctatgcctttgttcagtactccaatgagcgccatgcccgggcagctgtgctgggagagaatgggcgggtgctggccgggcagaccctggacatcaacatggctggagagcctaagcctgacagacccaaggggctaaagagagcagcatctgccatatacagtggctacatctttgactatgattactaccgggacgacttctacgacaggctcttcgactaccggggccgtctgtcgcccgtgccagtgcccagggcggtccctgtgaagcgaccccgggtcacagtccctttggtccggcgtgtcaaaactaacgtacctgtcaagctctttgcccgctccacagctgtcaccaccagctcagccaagatcaagttaaagagcagtgagctgcaggccatcaagacggagctgacacagatcaagtccaatatcgatgccctgctgagccgcttggagcagatcgctgcggagcaaaaggccaatccagatggcaagaagaagggtgatggaggtggcgccagcggcggcggcggcggtggtggtggcagcggtggcggtggcagtggtggtggcggtggcggtggcagcagccggccaccagccccccaagagaacacaacttctgaggcaggcctgccccagggggaagcacggacccgagacgacggcgatgaggaagggctcctgacacacagcgaggaagagctggaacacagccaggacacagacgcggatgatggggccttgcagtaagcagcctgacaggagcaatggccaccagcaggtgaagggcatcgctgccccaggcctcaagccgggcacccaaccctggatgccaccccccagcgggtaccagaggaaagctggcagcaggcgcctcctcccccaacgcatcccagccagtgccatgtcctctgcaggtggagttactggcctactccttccccatgagccctccctgtctgcactgcccaggccagagggtagagcacaggggtttccccatactacctcccctccccaggacactcccaggcttgggttttttctataggtttggcggggggccacagggaggggaccctgacaataaagagattggatcccaa

SEQ ID NO: 402252 - DNA, 2002 bp, Homo sapiens
tctggacctttccaaagccaggctgagagggtggggagagcccatgcgcctgggaagccgggctgtttctgggcggggctgcagactcctcgtgctcgtgtcaccgtgtccttcccaggagacagagaaggaggagagcccggaaccagggccggagcggcgggcggagccgagctgcggggagccgctccgggtgcccccacccccgcgcgcctcagtggtgccggccgagggcagggctcgcggttgcggggctcgcgccgctgtcagtgcggcggggcgcgcgagcggcgccagctcggggcagcggaacccagagaagctgagggggcggtagcggcggcgacggcgacgacgacgactcccgcgcgtgtgcccagcctcttcccgccgcagccgcccttttcctccctcccttacgtccccgagtgcggcagtaccgcctccttcccagccgcgcggcttcctccagacctctcggcgcgggtgagccctattcccagaggcaggtggtgctgaccctgtaacccaaaggaggaaacagctggctaagctcatcattgttactggtgggcaccatgtccttgaagcttcaggcaagcaatgtaaccaacaagaatgaccccaagtccatcaactctcgagtcttcattggaaacctcaacacagctctggtgaagaaatcagatgtggagaccatcttctctaagtatggccgtgtggccggctgttctgtgcacaagggctatgcctttgttcagtactccaatgagcgccatgcccgggcagctgtgctgggagagaatgggcgggtgctggccgggcagaccctggacatcaacatggctggagagcctaagcctgacagacccaaggggctaaagagagcagcatctgccatatacagtggctacatctttgactatgattactaccgggacgacttctacgacaggctcttcgactaccggggccgtctgtcgcccgtgccagtgcccagggcggtccctgtgaagcgaccccgggtcacagtccctttggtccggcgtgtcaaaactaacgtacctgtcaagctctttgcccgctccacagctgtcaccaccagctcagccaagatcaagttaaagagcagtgagctgcaggccatcaagacggagctgacacagatcaagtccaatatcgatgccctgctgagccgcttggagcagatcgctgcggagcaaaaggccaatccagatggcaagaagaagggtgatggaggtggcgccagcggcggcggcggcggtggtggtggcagcggtggcggtggcagtggtggtggcggtggcggtggcagcagccggccaccagccccccaagagaacacaacttctgaggcaggcctgccccagggggaagcacggacccgagacgacggcgatgaggaagggctcctgacacacagcgaggaagagctggaacacagccaggacacagacgcggatgatggggccttgcagtaagcagcctgacaggagcaatggccaccagcaggtgaagggcatcgctgccccaggcctcaagccgggcacccaaccctggatgccaccccccagcgggtaccagaggaaagctggcagcaggcgcctcctcccccaacgcatcccagccagtgccatgtcctctgcaggtggagttactggcctactccttccccatgagccctccctgtctgcactgcccaggccagagggtagagcacaggggtttccccatactacctcccctccccaggacactcccaggcttgggttttttctataggtttggcggggggccacagggaggggaccctgacaataaagagattggatcccaaaaaaaaaaaaaaaaaaaaaaactccggggactaagtgaggggggggaaaaggggtctggatggcactgggcatactgtttccggaccagtttttgtcaaggtgaatgtgggacccaaaaggagggataatcataagcgtacgct

SEQ ID NO: 402253 - DNA, 1769 bp, Homo sapiens
tctggacctttccaaagccaggctgagagggtggggagagcccatgcgcctgggaagccgggctgtttctgggcggggctgcagactcctcgtgctcgtgtcaccgtgtccttcccaggagacagagaaggaggagagcccggaaccagggccggagcggcgggcggagccgagctgcggggagccgctccgggtgcccccacccccgcgcgcctcagtggtgccggccgagggcagggctcgcggttgcggggctcgcgccgctgtcagtgcggcggggcgcgcgagcggcgccagctcggggcagcggaacccagagaagctgagggggcggtagcggcggcgacggcgacgacgacgactcccgcgcgtgtgcccagcctcttcccgccgcagccgcccttttcctccctcccttacgtccccgagtgcggcagtaccgcctccttcccagccgcgcggcttcctccagacctctcggcgcgggtgagccctattcccagaggcaggtggtgctgaccctgtaacccaaaggaggaaacagctggctaagctcatcattgttactggtgggcaccatgtccttgaagcttcaggcaagcaatgtaaccaacaagaatgaccccaagtccatcaactctcgagtcttcattggaaacctcaacacagctctggtgaagaaatcagatgtggagaccatcttctctaagtatggccgtgtggccggctgttctgtgcacaagggctatgcctttgttcagtactccaatgagcgccatgcccgggcagctgtgctgggagagaatgggcgggtgctggccgggcagaccctggacatcaacatggctggagagcctaagcctgacagacccaaggggctaaagagagcagcatctgccatatacagccagggcggtccctgtgaagcgaccccgggtcacagtccctttggtccggcgtgtcaaaactaacgtacctgtcaagctctttgcccgctccacagctgtcaccaccagctcagccaagatcaagttaaagagcagtgagctgcaggccatcaagacggagctgacacagatcaagtccaatatcgatgccctgctgagccgcttggagcagatcgctgcggagcaaaaggccaatccagatggcaagaagaagggtgatggaggtggcgccagcggcggcggcggcggtggtggtggcagcggtggcggtggcagtggtggtggcggtggcggtggcagcagccggccaccagccccccaagagaacacaacttctgaggcaggcctgccccagggggaagcacggacccgagacgacggcgatgaggaagggctcctgacacacagcgaggaagagctggaacacagccaggacacagacgcggatgatggggccttgcagtaagcagcctgacaggagcaatggccaccagcaggtgaagggcatcgctgccccaggcctcaagccgggcacccaaccctggatgccaccccccagcgggtaccagaggaaagctggcagcaggcgcctcctcccccaacgcatcccagccagtgccatgtcctctgcaggtggagttactggcctactccttccccatgagccctccctgtctgcactgcccaggccagagggtagagcacaggggtttccccatactacctcccctccccaggacactcccaggcttgggttttttctataggtttggcggggggccacagggaggggaccctgacaataaagagattggatcccaa

SEQ ID NO: 402254 - DNA, 1173 bp, Homo sapiens
caaggcatagcccttgtgcacagaacagccggcacacggcatacttagagaagatggtctccaatgagcgccatgcccggccagcacccgcccattctctcccagcacagctgcccgggcatggcgggtgctggccgggcagaccctggacatcaacatggctggagagcctaagcctgacagacccaaggggctaaagagagcagcatctgccatatacagtggctacatctttgactatgattactaccgggacgacttctacgacaggctcttcgactaccggggccgtctgtcgcccgtgccagtgcccagggcggtccctgtgaagcgaccccgggtcacagtccctttggtccggcgtgtcaaaactaacgtacctgtcaagctctttgcccgctccacagctgtcaccaccagctcagccaagatcaagttaaagagcagtgagctgcaggccatcaagacggagctgacacagatcaagtccaatatcgatgccctgctgagccgcttggagcagatcgctgcggagcaaaaggccaatccagatggcaagaagaagggtgatggaggtggcgccagcggcggcggcggcggtggtggtggcagcggtggcggtggcagtggtggtggcggtggcggtggcagcagccggccaccagccccccaagagaacacaacttctgaggcaggcctgccccagggggaagcacggacccgagacgacggcgatgaggaagggctcctgacacacagcgaggaagagctggaacacagccaggacacagacgcggatgatggggccttgcagtaagcagcctgacaggagcaatggccaccagcaggtgaagggcatcgctgccccaggcctcaagccgggcacccaaccctggatgccaccccccagcgggtaccagaggaaagctggcagcaggcgcctcctcccccaacgcatcccagccagtgccatgtcctctgcaggtggagttactggcctactccttccccatgagccctccctgtctgcactgcccaggccagagggtagagcacaggggtttccccatactacctcccctccccaggacactcccaggcttgggttttttctataggtttggcggggggccacagggaggggaccctgacaataaagagattggatcccaa

SEQ ID NO: 402255 - DNA, 1408 bp, Homo sapiens
tctggacctttccaaagccaggctgagagggtggggagagcccatgcgcctgggaagccgggctgtttctgggcggggctgcagactcctcgtgctcgtgtcaccgtgtccttcccaggagacagagaaggaggagagcccggaaccagggccggagcggcgggcggagccgagctgcggggagccgctccgggtgcccccacccccgcgcgcctcagtggtgccggccgagggcagggctcgcggttgcggggctcgcgccgctgtcagtgcggcggggcgcgcgagcggcgccagctcggggcagcggaacccagagaagctgagggggcggtagcggcggcgacggcgacgacgacgactcccgcgcgtgtgcccagcctcttcccgccgcagccgcccttttcctccctcccttacgtccccgagtgcggcagtaccgcctccttcccagccgcgcggcttcctccagacctctcggcgcgggtgagccctattcccagaggcaggtggtgctgaccctgtaacccaaaggaggaaacagctggctaagctcatcattgttactggtgggcaccatgtccttgaagcttcaggcaagcaatgtaaccaacaagaatgaccccaagtccatcaactctcgagtcttcattggaaacctcaacacagctctggtgaagaaatcagatgtggagaccatcttctctaagtatggccgtgtggccggctgttctgtgcacaagggctatgcctttgttcagtactccaatgagcgccatgcccgggcagctgtgctgggagagaatgggcgggtgctggccgggcagaccctggacatcaacatggctggagagcctaagcctgacagacccaaggggctaaagagagcagcatctgccatatacagtggctacatctttgactatgattactaccgggacgacttctacgacaggctcttcgactaccggggccgtctgtcgcccgtgccagtgcccagggcggtccctgtgaagcgaccccgggtcacagtccctttggtccggcgtgtcaaaactaacgtacctgtcaagctctttgcccgctccacagctgtcaccaccagctcagccaagatcaagttaaagagcagtgagctgcaggccatcaagacggagctgacacagatcaagtccaatatcgatgccctgctgagccgcttggagcagatcgctgcggagcaaaaggccaatccagatggcaagaagaagggtgatggaggtggctccagcggcggtgtttgttgtttatgtttcttcttttgctttgtttttgatattggtcttttttcttagggttcctactactgtatttttatcctcgatatatagtatgatattataaaatatagttctattaaattctatat

SEQ ID NO: 402256 - DNA, 1787 bp, Homo sapiens
tctggacctttccaaagccaggctgagagggtggggagagcccatgcgcctgggaagccgggctgtttctgggcggggctgcagactcctcgtgctcgtgtcaccgtgtccttcccaggagacagagaaggaggagagcccggaaccagggccggagcggcgggcggagccgagctgcggggagccgctccgggtgcccccacccccgcgcgcctcagtggtgccggccgagggcagggctcgcggttgcggggctcgcgccgctgtcagtgcggcggggcgcgcgagcggcgccagctcggggcagcggaacccagagaagctgagggggcggtagcggcggcgacggcgacgacgacgactcccgcgcgtgtgcccagcctcttcccgccgcagccgcccttttcctccctcccttacgtccccgagtgcggcagtaccgcctccttcccagccgcgcggcttcctccagacctctcggcgcgggtgagccctattcccagaggcaggtggtgctgaccctgtaacccaaaggaggaaacagctggctaagctcatcattgttactggtgggcaccatgtccttgaagcttcaggcaagcaatgtaaccaacaagaatgaccccaagtccatcaactctcgagtcttcattggaaacctcaacacagctctggtgaagaaatcagatgtggagaccatcttctctaagtatggccgtgtggccggctgttctgtgcacaagggctatgcctttgttcagtactccaatgagcgccatgcccgggcagctgtgctgggagagaatgggcgggtgctggccgggcagaccctggacatcaacatggctggagagcctaagcctgacagacccaaggggctaaagagagcagcatctgccatatacagtggctacatctttgactatgattactaccgggacgacttctacgacaggctcttcgactaccggggccgtctgtcgcccgtgccagtgcccagggcggtccctgtgaagcgaccccgggtcacagtccctttggtccggcgtgtcaaaactaacgtacctgtcaagctctttgcccgctccacagctgtcaccaccagctcagccaagatcaagttaaagagcagtgagctgcaggccatcaagacggagctgacacagatcaagtccaatatcgatgccctgctgagccgcttggagcagatcgctgcggagcaaaaggccaatccagatggcaagaagaagggtgatggaggtggcgccagcggcggcggcggcggtggtggtggcagcggtggcggtggcagtggtggtggcggtggcggtggcagcagccggccaccagccccccaagagaacacaacttctgaggcaggcctgccccagggggaagcacggacccgagacgacggcgatgaggaagggctcctgacacacagcgaggaagagctggaacacagccaggacacagacgcggatgatggggccttgcagtaagcagcctgacaggagcaatggccaccagcaggtgaagggcatcgctgccccgcctcctcccccaacgcatcccagccagtgccatgtcctctgcaggtggagttactggcctactccttccccatgagccctccctgtctgcactgcccaggccagagggtagagcacaggggtttccccatactacctcccctccccaggacactcccaggcttgggttttttctataggtttggcggggggccacagggaggggaccctgacaataaagagattggatcccaa

SEQ ID NO: 402257 - DNA, 1450 bp, Homo sapiens
taaagtgtgtttttaaccgaattctttcatgctgtgcccttgggtggacactgaatgtggatagccatcctcatttggcatatggggaaactgaggctcaggtaggctcagttgacccccactcccatacctctctattcctagctggggatttgtgctgctttgagatttgcaaactctgagcagaggttggggtggcagttgaccaagcagaagccaggtcatgtaatagagcaggcctgggtgccaggggacctagggatgtctcctcttttgaatggggtataactgctaccacctgatgccttgcctgcccttactgggcctggatggttggagaggttgtagtgaggtagtgaggatcccaacagccatcagggtccggcaagcccttcctcttcactccagggcttgctaggagccagcagaggtgtgtagtgcaggcctcccagcccctcaccagccacacacgtttgtagccggagctgcaataccgccctggtggccacaagccatgctgcagcctctggcccatctgccctcacaggctcttcgactaccggggccgtctgtcgcccgtgccagtgcccagggcggtccctgtgaagcgaccccgggtcacagtccctttggtccggcgtgtcaaaactaacgtacctgtcaagctctttgcccgctccacagctgtcaccaccagctcagccaagatcaagttaaagagcagtgagctgcaggccatcaagacggagctgacacagatcaagtccaatatcgatgccctgctgagccgcttggagcagatcgctgcggagcaaaaggccaatccagatggcaagaagaagggtgatggaggtggcgccagcggcggcggcggcggtggtggtggcagcggtggcggtggcagtggtggtggcggtggcggtggcagcagccggccaccagccccccaagagaacacaacttctgaggcaggcctgccccagggggaagcacggacccgagacgacggcgatgaggaagggctcctgacacacagcgaggaagagctggaacacagccaggacacagacgcggatgatggggccttgcagtaagcagcctgacaggagcaatggccaccagcaggtgaagggcatcgctgccccaggcctcaagccgggcacccaaccctggatgccaccccccagcgggtaccagaggaaagctggcagcaggcgcctcctcccccaacgcatcccagccagtgccatgtcctctgcaggtggagttactggcctactccttccccatgagccctccctgtctgcactgcccaggccagagggtagagcacaggggtttccccatactacctcccctccccaggacactcccaggcttgggttttttctataggtttggcggggggccacagggaggggaccctgacaataaagagattggatcccaa

SEQ ID NO: 402258 - DNA, 1734 bp, Homo sapiens
tctggacctttccaaagccaggctgagagggtggggagagcccatgcgcctgggaagccgggctgtttctgggcggggctgcagactcctcgtgctcgtgtcaccgtgtccttcccaggagacagagaaggaggagagcccggaaccagggccggagcggcgggcggagccgagctgcggggagccgctccgggtgcccccacccccgcgcgcctcagtggtgccggccgagggcagggctcgcggttgcggggctcgcgccgctgtcagtgcggcggggcgcgcgagcggcgccagctcggggcagcggaacccagagaagctgagggggcggtagcggcggcgacggcgacgacgacgactcccgcgcgtgtgcccagcctcttcccgccgcagccgcccttttcctccctcccttacgtccccgagtgcggcagtaccgcctccttcccagccgcgcggcttcctccagacctctcggcgcgggtgagccctattcccagaggcaggtggtgctgaccctgtaacccaaaggaggaaacagctggctaagctcatcattgttactggtgggcaccatgtccttgaagcttcaggcaagcaatgtaaccaacaagaatgaccccaagtccatcaactctcgagtcttcattggaaacctcaacacagctctggtgaagaaatcagatgtggagaccatcttctctaagtatggccgtgtggccggctgttctgtgcacaagggctatgcctttgttcagtactccaatgagcgccatgcccgggcagctgtgctgggagagaatgggcgggtgctggccgggcagaccctggacatcaacatggctggagagcctaagcctgacagacccaaggggctaaagagagcagcatctgccatatacagtggctacatctttgactatgattactaccgggacgacttctacgacaggctcttcgactaccggggccgtctgtcgcccgtgccagtgcccagggcggtccctgtgaagcgaccccgggtcacagtccctttggtccggcgtgtcaaaactaacgtacctgtcaagctctttgcccgctccacagctgtcaccaccagctcagccaagatcaagttaaagagcagtgagctgcaggccatcaagacggagctgacacagatcaagtccaatatcgatgccctgctgagccgcttggagcagatcgctgcggagcaaaaggccaatccagatggcaagaagaagggtgatggaggtggcgccagcggcggcggcggcggtggtggtggcagcggtggcggtggcagtggtggtggcggtggcggtggcagcagccggccaccagccccccaagagaacacaacttctgaggcaggcctgccccagggggaagcacggacccgagacgacggcgatgaggaagggctcctgacacacagcgaggaagagctggaacacagccaggacacagacgcggatgatggggccttgcagtaagcagctcttgggacccaaccaccatgctgtgaagcagcccaggccacacagagaggccacgtgtacatgttcagctgacagcagtatcaaatgtcagacatgagagaggaaggcttcaagatgactccagcccagccaccgtctgagaacaaagtaagaactgcctcactgatgccattcaaagcccagcaccatgagagataataaaacgttgtttgaagatgctaacttt

SEQ ID NO: 402259 - DNA, 1565 bp, Homo sapiens
tctggacctttccaaagccaggctgagagggtggggagagcccatgcgcctgggaagccgggctgtttctgggcggggctgcagactcctcgtgctcgtgtcaccgtgtccttcccaggagacagagaaggaggagagcccggaaccagggccggagcggcgggcggagccgagctgcggggagccgctccgggtgcccccacccccgcgcgcctcagtggtgccggccgagggcagggctcgcggttgcggggctcgcgccgctgtcagtgcggcggggcgcgcgagcggcgccagctcggggcagcggaacccagagaagctgagggggcggtagcggcggcgacggcgacgacgacgactcccgcgcgtgtgcccagcctcttcccgccgcagccgcccttttcctccctcccttacgtccccgagtgcggcagtaccgcctccttcccagccgcgcggcttcctccagacctctcggcgcgggtgagccctattcccagaggcaggtggtgctgaccctgtaacccaaaggaggaaacagctggctaagctcatcattgttactggtgggcaccatgtccttgaagcttcaggcaagcaatgtaaccaacaagaatgaccccaagtccatcaactctcgagtcttcattggaaacctcaacacagctctggtgaagaaatcagatgtggagaccatcttctctaagtatggccgtgtggccggctgttctgtgcacaagggctatgcctttgttcagtactccaatgagcgccatgcccgggcagctgtgctgggagagaatgggcgggtgctggccgggcagaccctggacatcaacatggctggagagcctaagcctgacagacccaaggggctaaagagagcagcatctgccatatacagtggctacatctttgactatgattactaccgggacgacttctacgacaggctcttcgactaccggggccgtctgtcgcccgtgccagtgcccagggcggtccctgtgaagcgaccccgggtcacagtccctttggtccggcgtgtcaaaactaacgtacctgtcaagctctttgcccgctccacagctgtcaccaccagctcagccaagatcaagttaaagagcagtgagctgcaggccatcaagacggagctgacacgaacacagccaggacacagacgcggatgatggggccttgcagtaagcagcctgacaggagcaatggccaccagcaggtgaagggcatcgctgccccaggcctcaagccgggcacccaaccctggatgccaccccccagcgggtaccagaggaaagctggcagcaggcgcctcctcccccaacgcatcccagccagtgccatgtcctctgcaggtggagttactggcctactccttccccatgagccctccctgtctgcactgcccaggccagagggtagagcacaggggtttccccatactacctcccctccccaggacactcccaggcttgggttttttctataggtttggcggggggccacagggaggggaccctgacaataaagagattggatcccaa

SEQ ID NO: 402260 - DNA, 1899 bp, Homo sapiens
tctggacctttccaaagccaggctgagagggtggggagagcccatgcgcctgggaagccgggctgtttctgggcggggctgcagactcctcgtgctcgtgtcaccgtgtccttcccaggagacagagaaggaggagagcccggaaccagggccggagcggcgggcggagccgagctgcggggagccgctccgggtgcccccacccccgcgcgcctcagtggtgccggccgagggcagggctcgcggttgcggggctcgcgccgctgtcagtgcggcggggcgcgcgagcggcgccagctcggggcagcggaacccagagaagctgagggggcggtagcggcggcgacggcgacgacgacgactcccgcgcgtgtgcccagcctcttcccgccgcagccgcccttttcctccctcccttacgtccccgagtgcggcagtaccgcctccttcccagccgcgcggcttcctccagacctctcggcgcgggtgagccctattcccagaggcaggtggtgctgaccctgtaacccaaaggaggaaacagctggctaagctcatcattgttactggtgggcaccatgtccttgaagcttcaggcaagcaatgtaaccaacaagaatgaccccaagtccatcaactctcgagtcttcattggaaacctcaacacagctctggtgaagaaatcagatgtggagaccatcttctctaagtatggccgtgtggccggctgttctgtgcacaagggctatgcctttgttcagtactccaatgagcgccatgcccgggcagctgtgctgggagagaatgggcgggtgctggccgggcagaccctggacatcaacatggctggagagcctaagcctgacagacccaaggggctaaagagagcagcatctgccatatacagtggctacatctttgactatgattactaccgggacgacttctacgacaggctcttcgactaccggggccgtctgtcgcccgtgccagtgcccagggcggtccctgtgaagcgaccccgggtcacagtccctttggtccggcgtgtcaaaactaacgtacctgtcaagctctttgcccgctccacagctgtcaccaccagctcagccaagatcaagttaaagagcagtgagctgcaggccatcaagacggagctgacacagatcaagtccaatatcgatgccctgctgagccgcttggagcagatcgctgcggagcaaaaggccaatccagatggcaagaagaagggtgatggaggtggcgccagcggcggcggcggcggtggtggtggcagcggtggcggtggcagtggtggtggcggtggcggtggcagcagccggccaccagccccccaagagaacacaacttctgaggcaggcctgccccagggggaagcacggacccgagacgacggcgatgaggaagggctcctgacacacagcgaggaagagctggtgagggcctggccaggggcacgactgggactcgactgtgctcctactctcaggaggccaacaggggaatgggcagcctgagctggttgcccccactgtgaacttcctgttctctccttcccaggggttctggtcctgggggaaagagggaagaatgagcagggggcacttgcctatctcagacaccatcagaagtcccactgaggcctagggcagacctcccccaaatgcgggcacattctggcctccggtttccacatgagttggagaatgggagattcggacataagggagcacacacggcctgcagagcttcagagcagggctggggtggcttgtggaggccacagccaggaggtgggtttttctaaaagccattgctgcttaagcatgaagcaaaagctgtctcataagggggtgagctccccgcctgttactagaa

SEQ ID NO: 402261 - DNA, 1399 bp, Homo sapiens
  misc_feature (1361)..(1361): n is a, c, g, or t
tctggacctttccaaagccaggctgagagggtggggagagcccatgcgcctgggaagccgggctgtttctgggcggggctgcagactcctcgtgctcgtgtcaccgtgtccttcccaggagacagagaaggaggagagcccggaaccagggccggagcggcgggcggagccgagctgcggggagccgctccgggtgcccccacccccgcgcgcctcagtggtgccggccgagggcagggctcgcggttgcggggctcgcgccgctgtcagtgcggcggggcgcgcgagcggcgccagctcggggcagcggaacccagagaagctgagggggcggtagcggcggcgacggcgacgacgacgactcccgcgcgtgtgcccagcctcttcccgccgcagccgcccttttcctccctcccttacgtccccgagtgcggcagtaccgcctccttcccagccgcgcggcttcctccagacctctcggcgcgggtgagccctattcccagaggcaggtggtgctgaccctgtaacccaaaggaggaaacagctggctaagctcatcattgttactggtgggcaccatgtccttgaagcttcaggcaagcaatgtaaccaacaagaatgaccccaagtccatcaactctcgagtcttcattggaaacctcaacacagctctggtgaagaaatcagatgtggagaccatcttctctaagtatggccgtgtggccggctgttctgtgcacaagggctatgcctttgttcagtactccaatgagcgccatgcccgggcagctgtgctgggagagaatgggcgggtgctggccgggcagaccctggacatcaacatggctggagagcctaagcctgacagacccaaggggctaaagagagcagcatctgccatatacagtggctacatctttgactatgattactaccgggacgacttctacgacaggctcttcgactaccggggccgtctgtcgcccgtgccagtgcccagggcggtccctgtgaagcgaccccgggtcacagtccctttggtccggcgtgtcaaaactaacgtacctgtcaagctctttgcccgctccacagctgtcaccaccagctcagccaagatcaagttaaagagcagtgagctgcaggccatcaagacggagctgacacagatcaagtccaatatcgatgccctgctgagccgcttggagcagatcgctgcggagcaaaaggccaatccagatggcaagaagaagggtgatggaggtggcgccagcggcggcggcggcggtggtggtggcagcggtggcggtgtggtgcggggggggggcagcggcacaccccagagacacatctgagaggctccngggaacacggccgaagacggaaggaaggcgccagggaa

SEQ ID NO: 402262 - DNA, 1108 bp, Homo sapiens
tctggacctttccaaagccaggctgagagggtggggagagcccatgcgcctgggaagccgggctgtttctgggcggggctgcagactcctcgtgctcgtgtcaccgtgtccttcccaggagacagagaaggaggagagcccggaaccagggccggagcggcgggcggagccgagctgcggggagccgctccgggtgcccccacccccgcgcgcctcagtggtgccggccgagggcagggctcgcggttgcggggctcgcgccgctgtcagtgcggcggggcgcgcgagcggcgccagctcggggcagcggaacccagagaagctgagggggcggtagcggcggcgacggcgacgacgacgactcccgcgcgtgtgcccagcctcttcccgccgcagccgcccttttcctccctcccttacgtccccgagtgcggcagtaccgcctccttcccagccgcgcggcttcctccagacctctcggcgcgggtgagccctattcccagaggcaggtggtgctgaccctgtaacccaaaggaggaaacagctggctaagctcatcattgttactggtgggcaccatgtccttgaagcttcaggcaagcaatgtaaccaacaagaatgaccccaagtccatcaactctcgagtcttcattggaaacctcaacacagctctggtgaagaaatcagatgtggagaccatcttctctaagtatggccgtgtggccggctgttctgtgcacaagggctatgcctttgttcagtactccaatgagcgccatgcccgggcagctgtgctgggagagaatgggcgggtgctggccgggcagaccctggacatcaacatggctggagagcctaagcctgacagacccaaggggctaaagagagcagcatctgccatatacagctacatctttgactatgattactggcctactccttccccatgagccctccctgtctgcactgcccaggccagagggtagagcacaggggtttccccatactacctcccctccccaggacactcccaggcttgggttttttctataggtttggcggggggccacagggaggggaccctgacaataaagagattggatcccaa

SEQ ID NO: 402263 - DNA, 1071 bp, Homo sapiens
tctggacctttccaaagccaggctgagagggtggggagagcccatgcgcctgggaagccgggctgtttctgggcggggctgcagactcctcgtgctcgtgtcaccgtgtccttcccaggagacagagaaggaggagagcccggaaccagggccggagcggcgggcggagccgagctgcggggagccgctccgggtgcccccacccccgcgcgcctcagtggtgccggccgagggcagggctcgcggttgcggggctcgcgccgctgtcagtgcggcggggcgcgcgagcggcgccagctcggggcagcggaacccagagaagctgagggggcggtagcggcggcgacggcgacgacgacgactcccgcgcgtgtgcccagcctcttcccgccgcagccgcccttttcctccctcccttacgtccccgagtgcggcagtaccgcctccttcccagccgcgcggcttcctccagacctctcggcgcgggtgagccctattcccagaggcaggtggtgctgaccctgtaacccaaaggaggaaacagctggctaagctcatcattgttactggtgggcaccatgtccttgaagcttcaggcaagcaatgtaaccaacaagaatgaccccaagtccatcaactctcgagtcttcattggaaacctcaacacagctctggtgaagaaatcagatgtggagaccatcttctctaagtatggccgtgtggccggctgttctgtgcacaagggctatgcctttgttcagtactccaatgagcgccatgcccgggcagctgtgctgggagagaatgggcgggtgctggccgggcagaccctggacatcaacatggctggagagcctaagcctgacagacccaaggggctaaagagagcagcatctgccatatacagctacatctttgactatgattactcctgccatcatgacccttggccataatatgattatctccacactagcagagaccaaccgaacccccttcgacctgccgaaggggagtccgaactagtcatcaggcttgaacatcgaaacgccgagataaatcgggccgagc

SEQ ID NO: 402264 - DNA, 1316 bp, Homo sapiens
  misc_feature (1278)..(1278): n is a, c, g, or t
tctggacctttccaaagccaggctgagagggtggggagagcccatgcgcctgggaagccgggctgtttctgggcggggctgcagactcctcgtgctcgtgtcaccgtgtccttcccaggagacagagaaggaggagagcccggaaccagggccggagcggcgggcggagccgagctgcggggagccgctccgggtgcccccacccccgcgcgcctcagtggtgccggccgagggcagggctcgcggttgcggggctcgcgccgctgtcagtgcggcggggcgcgcgagcggcgccagctcggggcagcggaacccagagaagctgagggggcggtagcggcggcgacggcgacgacgacgactcccgcgcgtgtgcccagcctcttcccgccgcagccgcccttttcctccctcccttacgtccccgagtgcggcagtaccgcctccttcccagccgcgcggcttcctccagacctctcggcgcgggtgggcaccatgtccttgaagcttcaggcaagcaatgtaaccaacaagaatgaccccaagtccatcaactctcgagtcttcattggaaacctcaacacagctctggtgaagaaatcagatgtggagaccatcttctctaagtatggccgtgtggccggctgttctgtgcacaagggctatgcctttgttcagtactccaatgagcgccatgcccgggcagctgtgctgggagagaatgggcgggtgctggccgggcagaccctggacatcaacatggctggagagcctaagcctgacagacccaaggggctaaagagagcagcatctgccatatacagtggctacatctttgactatgattactaccgggacgacttctacgacaggctcttcgactaccggggccgtctgtcgcccgtgccagtgcccagggcggtccctgtgaagcgaccccgggtcacagtccctttggtccggcgtgtcaaaactaacgtacctgtcaagctctttgcccgctccacagctgtcaccaccagctcagccaagatcaagttaaagagcagtgagctgcaggccatcaagacggagctgacacagatcaagtccaatatcgatgccctgctgagccgcttggagcagatcgctgcggagcaaaaggccaatccagatggcaagaagaagggtgatggaggtggcgccagcggcggcggcggcggtggtggtggcagcggtggcggtgtggtgcggggggggggcagcggcacaccccagagacacatctgagaggctccngggaacacggccgaagacggaaggaaggcgccagggaa

SEQ ID NO: 402265 - DNA, 1154 bp, Homo sapiens
tctggacctttccaaagccaggctgagagggtggggagagcccatgcgcctgggaagccgggctgtttctgggcggggctgcagactcctcgtgctcgtgtcaccgtgtccttcccaggagacagagaaggaggagagcccggaaccagggccggagcggcgggcggagccgagctgcggggagccgctccgggtgcccccacccccgcgcgcctcagtggtgccggccgagggcagggctcgcggttgcggggctcgcgccgctgtcagtgcggcggggcgcgcgagcggcgccagctcggggcagcggaacccagagaagctgagggggcggtagcggcggcgacggcgacgacgacgactcccgcgcgtgtgcccagcctcttcccgccgcagccgcccttttcctccctcccttacgtccccgagtgcggcagtaccgcctccttcccagccgcgcggcttcctccagacctctcggcgcgggtgagccctattcccagaggcaggtggtgctgaccctgtaacccaaaggaggaaacagctggctaagctcatcattgttactgtcttcatttccctatttgtaaagttggagtgcctccctgtcccctcacgtctcatgtgtgtactcctaccatgcaggtgggcaccatgtccttgaagcttcaggcaagcaatgtaaccaacaagaatgaccccaagtccatcaactctcgagtcttcattggaaacctcaacacagctctggtgaagaaatcagatgtggagaccatcttctctaagtatggccgtgtggccggctgttctgtgcacaagggctatgcctttgttcagtactccaatgagaggcctcaagccgggcacccaaccctggatgccaccccccagcgggtaccagaggaaagctggcagcaggcgcctcctcccccaacgcatcccagccagtgccatgtcctctgcaggtggagttactggcctactccttccccatgagccctccctgtctgcactgcccaggccagagggtagagcacaggggtttccccatactacctcccctccccaggacactcccaggcttgggttttttctataggtttggcggggggccacagggaggggaccctgacaataaagagattggatcccaa

SEQ ID NO: 402266 - DNA, 973 bp, Homo sapiens
taaagtgtgtttttaaccgaattctttcatgctgtgcccttgggtggacactgaatgtggatagccatcctcatttggcatatggggaaactgaggctcaggtaggctcagttgacccccactcccatacctctctattcctagctggggatttgtgctgctttgagatttgcaaactctgagcagaggttggggtggcagttgaccaagcagaagccaggtcatgtaatagagcaggcctgggtgccaggggacctagggatgtctcctcttttgaatggggtataactgctaccacctgatgccttgcctgcccttactgggcctggatggttggagaggttgtagtgaggtagtgaggatcccaacagccatcagggtccggcaagcccttcctcttcactccagggcttgctaggagccagcagaggtgtgtagtgcaggcctcccagcccctcaccagccacacacgtttgtagccggagctgcaataccgccctggtggccacaagccatgctgcagcctctggcccatctgccctcacaggctcttcgactaccggggccgtctgtcgcccgtgccagtgcccagggcggtccctgtgaagcgaccccgggtcacagtccctttggtccggcgtgtcaaaactaacgtacctgtcaagctcaggcctcaagccgggcacccaaccctggatgccaccccccagcgggtaccagaggaaagctggcagcaggcgcctcctcccccaacgcatcccagccagtgccatgtcctctgcaggtggagttactggcctactccttccccatgagccctccctgtctgcactgcccaggccagagggtagagcacaggggtttccccatactacctcccctccccaggacactcccaggcttgggttttttctataggtttggcggggggccacagggaggggaccctgacaataaagagattggatcccaa

SEQ ID NO: 402267 - DNA, 988 bp, Homo sapiens
tctggacctttccaaagccaggctgagagggtggggagagcccatgcgcctgggaagccgggctgtttctgggcggggctgcagactcctcgtgctcgtgtcaccgtgtccttcccaggagacagagaaggaggagagcccggaaccagggccggagcggcgggcggagccgagctgcggggagccgctccgggtgcccccacccccgcgcgcctcagtggtgccggccgagggcagggctcgcggttgcggggctcgcgccgctgtcagtgcggcggggcgcgcgagcggcgccagctcggggcagcggaacccagagaagctgagggggcggtagcggcggcgacggcgacgacgacgactcccgcgcgtgtgcccagcctcttcccgccgcagccgcccttttcctccctcccttacgtccccgagtgcggcagtaccgcctccttcccagccgcgcggcttcctccagacctctcggcgcgggtgggcaccatgtccttgaagcttcaggcaagcaatgtaaccaacaagaatgaccccaagtccatcaactctcgagtcttcattggaaacctcaacacagctctggtgaagaaatcagatgtggagaccatcttctctaagtatggccgtgtggccggctgttctgtgcacaagggctatgcctttgttcagtactccaatgagcgccatgcccgggcagctgtgctgggagagaatgggcgggtgctggccgggcagaccctggacatcaacatggctggagagcctaagcctgacagacccaaggggctaaagagagcagcatctgccatatacagctacatctttgactatgattactcctgccatcatgacccttggccataatatgattatctccacactagcagagaccaaccgaacccccttcgacctgccgaaggggagtccgaactagtcatcaggcttgaacatcgaaacgccgagataaatcgggccgagc

SEQ ID NO: 402268 - DNA, 683 bp, Homo sapiens
atttgcatgtgggtagttgtctatactgagtgtacttgagaatacacgttacctgtgtgtgagtttcttacctggatatgtgaatgtatgtgtgagtgtggctctgtgtatgcgttcccatgtacctgatgtgttacgcatttacatgagtgtatttgagaatgcatataggaatattcgacgtgtgtgtgtggtggggcgggggggaggacatgtttatgagcatgcctggatggatctgaaagtgtatggacatataaacaggcatatccatgtgatacctggatatgaatctaatgtttgaagattagatgtatgaagacctttgttggcaccatcagtgagcagaatccatgtgtataccgtgtaagcacatgaattgctgtgcgtgtgcatgaggttgatgtgtgtgggcacactgtcatgttagcattccaactctgccttctccctccacacagacatcaacatggctggagagcctaagcctgacagacccaaggggctaaagagagcagcatctgccatatacaggtggggctgtctgactgtctgtctgtctggtgggatgactctctctttccacagagggagtaaatgctggtgtgacagtgtgctgaatctagaacttggggaggtgtctggagatgagggcctgtggaaagtgggctgagtggccgtcc

SEQ ID NO: 402269 - DNA, 1858 bp, Homo sapiens
tctggacctttccaaagccaggctgagagggtggggagagcccatgcgcctgggaagccgggctgtttctgggcggggctgcagactcctcgtgctcgtgtcaccgtgtccttcccaggagacagagaaggaggagagcccggaaccagggccggagcggcgggcggagccgagctgcggggagccgctccgggtgcccccacccccgcgcgcctcagtggtgccggccgagggcagggctcgcggttgcggggctcgcgccgctgtcagtgcggcggggcgcgcgagcggcgccagctcggggcagcggaacccagagaagctgagggggcggtagcggcggcgacggcgacgacgacgactcccgcgcgtgtgcccagcctcttcccgccgcagccgcccttttcctccctcccttacgtccccgagtgcggcagtaccgcctccttcccagccgcgcggcttcctccagacctctcggcgcgggtgagccctattcccagaggcaggtggtgctgaccctgtaacccaaaggaggaaacagctggctaagctcatcattgttactggtgggcaccatgtccttgaagcttcaggcaagcaatgtaaccaacaagaatgaccccaagtccatcaactctcgagtcttcattggaaacctcaacacagctctggtgaagaaatcagatgtggagaccatcttctctaagtatggccgtgtggccggctgttctgtgcacaagggctatgcctttgttcagtactccaatgagcgccatgcccgggcagctgtgctgggagagaatgggcgggtgctggccgggcagaccctggacatcaacatggctggagagcctaagcctgacagacccaaggggctaaagagagcagcatctgccatatacagtggctacatctttgactatgattactaccgggacgacttctacgacaggctcttcgactaccggggccgtctgtcgcccgtgccagtgcccagggcggtccctgtgaagcgaccccgggtcacagtccctttggtccggcgtgtcaaaactaacgtacctgtcaagctctttgcccgctccacagctgtcaccaccagctcagccaagatcaagttaaagagcagtgagctgcaggccatcaagacggagctgacacagatcaagtccaatatcgatgccctgctgagccgcttggagcagatcgctgcggagcaaaaggccaatccagatggcaagaagaagggtgatggaggtggcgccagcggcggcggcggcggtggtggtggcagcggtggcggtggcagtggtggtggcggtggcggtggcagcagccggccaccagccccccaagagaacacaacttctgaggcaggcctgccccagggggaagcacggacccgagacgacggcgatgaggaagggctcctgacacacagcgaggaagagctggaacacagccaggacacagacgcggatgatggggccttgcagtaagcagcctgacaggagcaatggccaccagcaggtgaagggcatcgctgccccaggcctcaagccgggcacccaaccctggatgccaccccccagcgggtaccagaggaaagctggcagcaggcgcctcctcccccaacgcatcccagccagtgccatgtcctctgcaggtggagttactggcctactccttccccatgagccctccctgtctgcactgcccaggccagagggtagagcacaggggtttccccatactacctcccctccccaggacactcccaggcttgggttttttctataggtttggcggggggccacagggaggggaccctgacaataaagagattggatcccaa

SEQ ID NO: 402270 - DNA, 1817 bp, Homo sapiens
tctggacctttccaaagccaggctgagagggtggggagagcccatgcgcctgggaagccgggctgtttctgggcggggctgcagactcctcgtgctcgtgtcaccgtgtccttcccaggagacagagaaggaggagagcccggaaccagggccggagcggcgggcggagccgagctgcggggagccgctccgggtgcccccacccccgcgcgcctcagtggtgccggccgagggcagggctcgcggttgcggggctcgcgccgctgtcagtgcggcggggcgcgcgagcggcgccagctcggggcagcggaacccagagaagctgagggggcggtagcggcggcgacggcgacgacgacgactcccgcgcgtgtgcccagcctcttcccgccgcagccgcccttttcctccctcccttacgtccccgagtgcggcagtaccgcctccttcccagccgcgcggcttcctccagacctctcggcgcgggtgagccctattcccagaggcaggtggtgctgaccctgtaacccaaaggaggaaacagctggctaagctcatcattgttactggtgggcaccatgtccttgaagcttcaggcaagcaatgtaaccaacaagaatgaccccaagtccatcaactctcgagtcttcattggaaacctcaacacagctctggtgaagaaatcagatgtggagaccatcttctctaagtatggccgtgtggccggctgttctgtgcacaagggctatgcctttgttcagtactccaatgagcgccatgcccgggcagctgtgctgggagagaatgggcgggtgctggccgggcagaccctggacatcaacatggctggagagcctaagcctgacagacccaaggggctaaagagagcagcatctgccatatacagtggctacatctttgactatgattactaccgggacgacttctacgacagccagggcggtccctgtgaagcgaccccgggtcacagtccctttggtccggcgtgtcaaaactaacgtacctgtcaagctctttgcccgctccacagctgtcaccaccagctcagccaagatcaagttaaagagcagtgagctgcaggccatcaagacggagctgacacagatcaagtccaatatcgatgccctgctgagccgcttggagcagatcgctgcggagcaaaaggccaatccagatggcaagaagaagggtgatggaggtggcgccagcggcggcggcggcggtggtggtggcagcggtggcggtggcagtggtggtggcggtggcggtggcagcagccggccaccagccccccaagagaacacaacttctgaggcaggcctgccccagggggaagcacggacccgagacgacggcgatgaggaagggctcctgacacacagcgaggaagagctggaacacagccaggacacagacgcggatgatggggccttgcagtaagcagcctgacaggagcaatggccaccagcaggtgaagggcatcgctgccccaggcctcaagccgggcacccaaccctggatgccaccccccagcgggtaccagaggaaagctggcagcaggcgcctcctcccccaacgcatcccagccagtgccatgtcctctgcaggtggagttactggcctactccttccccatgagccctccctgtctgcactgcccaggccagagggtagagcacaggggtttccccatactacctcccctccccaggacactcccaggcttgggttttttctataggtttggcggggggccacagggaggggaccctgacaataaagagattggatcccaa

SEQ ID NO: 402271 - DNA, 1752 bp, Homo sapiens
tctggacctttccaaagccaggctgagagggtggggagagcccatgcgcctgggaagccgggctgtttctgggcggggctgcagactcctcgtgctcgtgtcaccgtgtccttcccaggagacagagaaggaggagagcccggaaccagggccggagcggcgggcggagccgagctgcggggagccgctccgggtgcccccacccccgcgcgcctcagtggtgccggccgagggcagggctcgcggttgcggggctcgcgccgctgtcagtgcggcggggcgcgcgagcgccgcccttttcctccctcccttacgtccccgagtgcggcagtaccgcctccttcccagccgcgcggcttcctccagacctctcggcgcgggtgagccctattcccagaggcaggtggtgctgaccctgtaacccaaaggaggaaacagctggctaagctcatcattgttactggtgggcaccatgtccttgaagcttcaggcaagcaatgtaaccaacaagaatgaccccaagtccatcaactctcgagtcttcattggaaacctcaacacagctctggtgaagaaatcagatgtggagaccatcttctctaagtatggccgtgtggccggctgttctgtgcacaagggctatgcctttgttcagtactccaatgagcgccatgcccgggcagctgtgctgggagagaatgggcgggtgctggccgggcagaccctggacatcaacatggctggagagcctaagcctgacagacccaaggggctaaagagagcagcatctgccatatacagtggctacatctttgactatgattactaccgggacgacttctacgacaggctcttcgactaccggggccgtctgtcgcccgtgccagtgcccagggcggtccctgtgaagcgaccccgggtcacagtccctttggtccggcgtgtcaaaactaacgtacctgtcaagctctttgcccgctccacagctgtcaccaccagctcagccaagatcaagttaaagagcagtgagctgcaggccatcaagacggagctgacacagatcaagtccaatatcgatgccctgctgagccgcttggagcagatcgctgcggagcaaaaggccaatccagatggcaagaagaagggtgatggaggtggcgccagcggcggcggcggcggtggtggtggcagcggtggcggtggcagtggtggtggcggtggcggtggcagcagccggccaccagccccccaagagaacacaacttctgaggcaggcctgccccagggggaagcacggacccgagacgacggcgatgaggaagggctcctgacacacagcgaggaagagctggaacacagccaggacacagacgcggatgatggggccttgcagtaagcagcctgacaggagcaatggccaccagcaggtgaagggcatcgctgccccaggcctcaagccgggcacccaaccctggatgccaccccccagcgggtaccagaggaaagctggcagcaggcgcctcctcccccaacgcatcccagccagtgccatgtcctctgcaggtggagttactggcctactccttccccatgagccctccctgtctgcactgcccaggccagagggtagagcacaggggtttccccatactacctcccctccccaggacactcccaggcttgggttttttctataggtttggcggggggccacagggaggggaccctgacaataaagagattggatcccaa

SEQ ID NO: 402272 - DNA, 1975 bp, Homo sapiens
tctggacctttccaaagccaggctgagagggtggggagagcccatgcgcctgggaagccgggctgtttctgggcggggctgcagactcctcgtgctcgtgtcaccgtgtccttcccaggagacagagaaggaggagagcccggaaccagggccggagcggcgggcggagccgagctgcggggagccgctccgggtgcccccacccccgcgcgcctcagtggtgccggccgagggcagggctcgcggttgcggggctcgcgccgctgtcagtgcggcggggcgcgcgagcggcgccagctcggggcagcggaacccagagaagctgagggggcggtagcggcggcgacggcgacgacgacgactcccgcgcgtgtgcccagcctcttcccgccgcagccgcccttttcctccctcccttacgtccccgagtgcggcagtaccgcctccttcccagccgcgcggcttcctccagacctctcggcgcgggtgagccctattcccagaggcaggtggtgctgaccctgtaacccaaaggaggaaacagctggctaagctcatcattgttactggttcccagagagggggcttcttgaaaagcaagtagagcagaagactggtgagcacggtgtttcccagcatctccacagtgccagcacagaggaggacactcaagaaatgtttgttaagtgggcaccatgtccttgaagcttcaggcaagcaatgtaaccaacaagaatgaccccaagtccatcaactctcgagtcttcattggaaacctcaacacagctctggtgaagaaatcagatgtggagaccatcttctctaagtatggccgtgtggccggctgttctgtgcacaagggctatgcctttgttcagtactccaatgagcgccatgcccgggcagctgtgctgggagagaatgggcgggtgctggccgggcagaccctggacatcaacatggctggagagcctaagcctgacagacccaaggggctaaagagagcagcatctgccatatacagtggctacatctttgactatgattactaccgggacgacttctacgacaggctcttcgactaccggggccgtctgtcgcccgtgccagtgcccagggcggtccctgtgaagcgaccccgggtcacagtccctttggtccggcgtgtcaaaactaacgtacctgtcaagctctttgcccgctccacagctgtcaccaccagctcagccaagatcaagttaaagagcagtgagctgcaggccatcaagacggagctgacacagatcaagtccaatatcgatgccctgctgagccgcttggagcagatcgctgcggagcaaaaggccaatccagatggcaagaagaagggtgatggaggtggcgccagcggcggcggcggcggtggtggtggcagcggtggcggtggcagtggtggtggcggtggcggtggcagcagccggccaccagccccccaagagaacacaacttctgaggcaggcctgccccagggggaagcacggacccgagacgacggcgatgaggaagggctcctgacacacagcgaggaagagctggaacacagccaggacacagacgcggatgatggggccttgcagtaagcagcctgacaggagcaatggccaccagcaggtgaagggcatcgctgccccaggcctcaagccgggcacccaaccctggatgccaccccccagcgggtaccagaggaaagctggcagcaggcgcctcctcccccaacgcatcccagccagtgccatgtcctctgcaggtggagttactggcctactccttccccatgagccctccctgtctgcactgcccaggccagagggtagagcacaggggtttccccatactacctcccctccccaggacactcccaggcttgggttttttctataggtttggcggggggccacagggaggggaccctgacaataaagagattggatcccaa

SEQ ID NO: 402273 - DNA, 1391 bp, Homo sapiens
gcaactttcattccctctgaaataaaacagtgcttaggccagtacctagtctgtttccaactgtgcggtgagccctattcccagaggcaggtggtgctgaccctgtaacccaaaggaggaaacagctggctaagctcatcattgttactggtgggcaccatgtccttgaagcttcaggcaagcaatgtaaccaacaagaatgaccccaagtccatcaactctcgagtcttcattggaaacctcaacacagctctggtgaagaaatcagatgtggagaccatcttctctaagtatggccgtgtggccggctgttctgtgcacaagggctatgcctttgttcagtactccaatgagcgccatgcccgggcagctgtgctgggagagaatgggcgggtgctggccgggcagaccctggacatcaacatggctggagagcctaagcctgacagacccaaggggctaaagagagcagcatctgccatatacaggctcttcgactaccggggccgtctgtcgcccgtgccagtgcccagggcggtccctgtgaagcgaccccgggtcacagtccctttggtccggcgtgtcaaaactaacgtacctgtcaagctctttgcccgctccacagctgtcaccaccagctcagccaagatcaagttaaagagcagtgagctgcaggccatcaagacggagctgacacagatcaagtccaatatcgatgccctgctgagccgcttggagcagatcgctgcggagcaaaaggccaatccagatggcaagaagaagggtgatggaggtggcgccagcggcggcggcggcggtggtggtggcagcggtggcggtggcagtggtggtggcggtggcggtggcagcagccggccaccagccccccaagagaacacaacttctgaggcaggcctgccccagggggaagcacggacccgagacgacggcgatgaggaagggctcctgacacacagcgaggaagagctggaacacagccaggacacagacgcggatgatggggccttgcagtaagcagcctgacaggagcaatggccaccagcaggtgaagggcatcgctgccccaggcctcaagccgggcacccaaccctggatgccaccccccagcgggtaccagaggaaagctggcagcaggcgcctcctcccccaacgcatcccagccagtgccatgtcctctgcaggtggagttactggcctactccttccccatgagccctccctgtctgcactgcccaggccagagggtagagcacaggggtttccccatactacctcccctccccaggacactcccaggcttgggttttttctataggtttggcggggggccacagggaggggaccctgacaataaagagattggatcccaa

SEQ ID NO: 402274 - DNA, 1465 bp, Homo sapiens
tctggacctttccaaagccaggctgagagggtggggagagcccatgcgcctgggaagccgggctgtttctgggcggggctgcagactcctcgtgctcgtgtcaccgtgtccttcccaggagacagagaaggaggagagcccggaaccagggccggagcggcgggcggagccgagctgcggggagccgctccgggtgcccccacccccgcgcgcctcagtggtgccggccgagggcagggctcgcggttgcggggctcgcgccgctgtcagtgcggcggggcgcgcgagcggcgccagctcggggcagcggaacccagagaagctgagggggcggtagcggcggcgacggcgacgacgacgactcccgcgcgtgtgcccagcctcttcccgccgcagccgcccttttcctccctcccttacgtccccgagtgcggcagtaccgcctccttcccagccgcgcggcttcctccagacctctcggcgcgggtgagccctattcccagaggcaggtggtgctgaccctgtaacccaaaggaggaaacagctggctaagctcatcattgttactggtgggcaccatgtccttgaagcttcaggcaagcaatgtaaccaacaagaatgaccccaagtccatcaactctcgagtcttcattggaaacctcaacacagctctggtgaagaaatcagatgtggagaccatcttctctaagtatggccgtgtggccggctgttctgtgcacaagggctatgcctttgttcagtactccaatgagcgccatgcccgggcagctgtgctgggagagaatgggcgggtgctggccgggcagaccctggacatcaacatggctggagagcctaagcctgacagacccaaggggctaaagagagcagcatctgccatatacagtggctacatctttgactatgattactaccgggacgacttctacgacaggctcttcgactaccggggccgtctgtcgcccgtgccagtgcccagggcggtccctgtgaagcgaccccgggtcacagtccctttggtccggcgtgtcaaaactaacgtacctgtcaagctctttgcccgctccacagctgtcaccaccagctcagccaagatcaagttaaagagcagtgagctgcaggccatcaagacggagctgacacagatcaagtccaatatcgatgccctgctgagccgcttggagcagatcgctgcggagcaaaaggccaatccagatggcaagaagaagggtgatggaggtggcgccttccgccaggccgtttccaccgaggaaaaggaatcgtatcgtatgtccgctatccagaactccactctttcgaacccttgctgatgcagtaagggtgatgacttgattctgctgccactgaggattatattcctatagaattcaacagagaacgggggaaacctaatactgtccaggattcgctgagattacaataa

SEQ ID NO: 402275 - DNA, 1651 bp, Homo sapiens
tctggacctttccaaagccaggctgagagggtggggagagcccatgcgcctgggaagccgggctgtttctgggcggggctgcagactcctcgtgctcgtgtcaccgtgtccttcccaggagacagagaaggaggagagcccggaaccagggccggagcggcgggcggagccgagctgcggggagccgctccgggtgcccccacccccgcgcgcctcagtggtgccggccgagggcagggctcgcggttgcggggctcgcgccgctgtcagtgcggcggggcgcgcgagcggcgccagctcggggcagcggaacccagagaagctgagggggcggtagcggcggcgacggcgacgacgacgactcccgcgcgtgtgcccagcctcttcccgccgcagccgcccttttcctccctcccttacgtccccgagtgcggcagtaccgcctccttcccagccgcgcggcttcctccagacctctcggcgcgggtgagccctattcccagaggcaggtggtgctgaccctgtaacccaaaggaggaaacagctggctaagctcatcattgttactggtgggcaccatgtccttgaagcttcaggcaagcaatgtaaccaacaagaatgaccccaagtccatcaactctcgagtcttcattggaaacctcaacacagctctggtgaagaaatcagatgtggagaccatcttctctaagtatggccgtgtggccggctgttctgtgcacaagggctatgcctttgttcagtactccaatgagcgccatgcccgggcagctgtgctgggagagaatgggcgggtgctggccgggcagaccctggacatcaacatggctggagagcctaagcctgacagacccaaggggctaaagagagcagcatctgccatatacagtggctacatctttgactatgattactaccgggacgacttctacgacaggctcttcgactaccggggccgtctgtcgcccgtgccagtgcccagggcggtccctgtgaagcgaccccgggtcacagtccctttggtccggcgtgtcaaaactaacgtacctgtcaagctctttgcccgctccacagctgtcaccaccagctcagccaagatcaagttaaagagcagtgagctgcaggccatcaagacggagctgacacagatcaagtccaatatcgatgccctgctgagccgcttggagcagatcgctgcggagcaaaaggccaatccagatggcaagaagaagggtgatggaggtggcgccagcggcggcggcggcggtggtggtggcagcggtggcggtggcagtggtggtggcggtggcggtggcagcagccggccaccagccccccaagagaacacaacttctgaggcaggcctgccccagggggaagcacggacccgagacgacggcgatgaggaagggctcctgacacacagcgaggaagagctggaacacagccaggacacagacgcggatgatggggccttgcagtaagcagacagactgaagatggcaaggatcctgatatcaccagaagacagcctcacaagtgccttcttatcccctgaaaaaccttatggtctacagctaaacagtttggttgtagccttgtaaaggataataaacatccaggaatcataaac

SEQ ID NO: 402276 - DNA, 1569 bp, Homo sapiens
tctggacctttccaaagccaggctgagagggtggggagagcccatgcgcctgggaagccgggctgtttctgggcggggctgcagactcctcgtgctcgtgtcaccgtgtccttcccaggagacagagaaggaggagagcccggaaccagggccggagcggcgggcggagccgagctgcggggagccgctccgggtgcccccacccccgcgcgcctcagtggtgccggccgagggcagggctcgcggttgcggggctcgcgccgctgtcagtgcggcggggcgcgcgagcggcgccagctcggggcagcggaacccagagaagctgagggggcggtagcggcggcgacggcgacgacgacgactcccgcgcgtgtgcccagcctcttcccgccgcagccgcccttttcctccctcccttacgtccccgagtgcggcagtaccgcctccttcccagccgcgcggcttcctccagacctctcggcgcgggtgagccctattcccagaggcaggtggtgctgaccctgtaacccaaaggaggaaacagctggctaagctcatcattgttactggtgggcaccatgtccttgaagcttcaggcaagcaatgtaaccaacaagaatgaccccaagtccatcaactctcgagtcttcattggaaacctcaacacagctctggtgaagaaatcagatgtggagaccatcttctctaagtatggccgtgtggccggctgttctgtgcacaagggctatgcctttgttcagtactccaatgagcgccatgcccgggcagctgtgctgggagagaatgggcgggtgctggccgggcagaccctggacatcaacatggctggagagcctaagcctgacagacccaaggggctaaagagagcagcatctgccatatacagtggctacatctttgactatgattactaccgggacgacttctacgacaggctcttcgactaccggggccgtctgtcgcccgtgccagtgcccagggcggtccctgtgaagcgaccccgggtcacagtccctttggtccggcgtgtcaaaactaacgtacctgtcaagctctttgcccgctccacagctgtcaccaccagctcagccaagatcaagttaaagagcagtgagctgcaggccatcaagacggagctgacacagatcaagtccaatatcgatgccctgctgagccgcttggagcagatcgctgcggagcaaaaggccaatccagatggcaagaagaagggtgatggaggtggcgccagcggcggcggcggcggtggtggtggcagcggtggcggtggcagtggtggtggcggtggcggtggcagcagccggccaccagccccccaagagaacacaacttctgaggcaggcctgccccagggggaagcacggacccgagacgacggcgatgagcgcacaggggggctcccttggaacacaacaagccgcaggcaagagctggaacaacaggcccagggaacacacaaggaacgccggggacatcgcaatcggcgcgcccttcggcagaacagcaagcctgacaggagcccaacggggc

SEQ ID NO: 402277 - DNA, 1333 bp, Homo sapiens
tctggacctttccaaagccaggctgagagggtggggagagcccatgcgcctgggaagccgggctgtttctgggcggggctgcagactcctcgtgctcgtgtcaccgtgtccttcccaggagacagagaaggaggagagcccggaaccagggccggagcggcgggcggagccgagctgcggggagccgctccgggtgcccccacccccgcgcgcctcagtggtgccggccgagggcagggctcgcggttgcggggctcgcgccgctgtcagtgcggcggggcgcgcgagcggcgccagctcggggcagcggaacccagagaagctgagggggcggtagcggcggcgacggcgacgacgacgactcccgcgcgtgtgcccagcctcttcccgccgcagccgcccttttcctccctcccttacgtccccgagtgcggcagtaccgcctccttcccagccgcgcggcttcctccagacctctcggcgcgggtgagccctattcccagaggcaggtggtgctgaccctgtaacccaaaggaggaaacagctggctaagctcatcattgttactggtgggcaccatgtccttgaagcttcaggcaagcaatgtaaccaacaagaatgaccccaagtccatcaactctcgagtcttcattggaaacctcaacacagctctggtgaagaaatcagatgtggagaccatcttctctaagtatggccgtgtggccggctgttctgtgcacaagggctatgcctttgttcagtactccaatgagcgccatgcccgggcagctgtgctgggagagaatgggcgggtgctggccgggcagaccctggacatcaacatggctggagagcctaagcctgacagacccaaggggctaaagagagcagcatctgccatatacaggctcttcgactaccggggccgtctgtcgcccgtgccagtgcccagggcggtccctgtgaagcgaccccgggtcacagtccctttggtccggcgtgtcaaaactaacgtacctgtcaagctcaggcctcaagccgggcacccaaccctggatgccaccccccagcgggtaccagaggaaagctggcagcaggcgcctcctcccccaacgcatcccagccagtgccatgtcctctgcaggtggagttactggcctactccttccccatgagccctccctgtctgcactgcccaggccagagggtagagcacaggggtttccccatactacctcccctccccaggacactcccaggcttgggttttttctataggtttggcggggggccacagggaggggaccctgacaataaagagattggatcccaa

SEQ ID NO: 402278 - DNA, 1078 bp, Homo sapiens
tctggacctttccaaagccaggctgagagggtggggagagcccatgcgcctgggaagccgggctgtttctgggcggggctgcagactcctcgtgctcgtgtcaccgtgtccttcccaggagacagagaaggaggagagcccggaaccagggccggagcggcgggcggagccgagctgcggggagccgctccgggtgcccccacccccgcgcgcctcagtggtgccggccgagggcagggctcgcggttgcggggctcgcgccgctgtcagtgcggcggggcgcgcgagcggcgccagctcggggcagcggaacccagagaagctgagggggcggtagcggcggcgacggcgacgacgacgactcccgcgcgtgtgcccagcctcttcccgccgcagccgcccttttcctccctcccttacgtccccgagtgcggcagtaccgcctccttcccagccgcgcggcttcctccagacctctcggcgcgggtgagccctattcccagaggcaggtggtgctgaccctgtaacccaaaggaggaaacagctggctaagctcatcattgttactggtgggcaccatgtccttgaagcttcaggcaagcaatgtaaccaacaagaatgaccccaagtccatcaactctcgagtcttcattggaaacctcaacacagctctggtgaagaaatcagatgtggagaccatcttctctaagtatggccgtgtggccggctgttctgtgcacaagggctatgcctttgttcagtactccaatgagaggcctcaagccgggcacccaaccctggatgccaccccccagcgggtaccagaggaaagctggcagcaggcgcctcctcccccaacgcatcccagccagtgccatgtcctctgcaggtggagttactggcctactccttccccatgagccctccctgtctgcactgcccaggccagagggtagagcacaggggtttccccatactacctcccctccccaggacactcccaggcttgggttttttctataggtttggcggggggccacagggaggggaccctgacaataaagagattggatcccaa

SEQ ID NO: 402279 - DNA, 921 bp, Homo sapiens
tctggacctttccaaagccaggctgagagggtggggagagcccatgcgcctgggaagccgggctgtttctgggcggggctgcagactcctcgtgctcgtgtcaccgtgtccttcccaggagacagagaaggaggagagcccggaaccagggccggagcggcgggcggagccgagctgcggggagccgctccgggtgcccccacccccgcgcgcctcagtggtgccggccgagggcagggctcgcggttgcggggctcgcgccgctgtcagtgcggcggggcgcgcgagcggcgccagctcggggcagcggaacccagagaagctgagggggcggtagcggcggcgacggcgacgacgacgactcccgcgcgtgtgcccagcctcttcccgccgcagccgcccttttcctccctcccttacgtccccgagtgcggcagtaccgcctccttcccagccgcgcggcttcctccagacctctcggcgcgggtgagccctattcccagaggcaggtggtgctgaccctgtaacccaaaggaggaaacagctggctaagctcatcattgttactgcctgacaggagcaatggccaccagcaggtgaagggcatcgctgccccaggcctcaagccgggcacccaaccctggatgccaccccccagcgggtaccagaggaaagctggcagcaggcgcctcctcccccaacgcatcccagccagtgccatgtcctctgcaggtggagttactggcctactccttccccatgagccctccctgtctgcactgcccaggccagagggtagagcacaggggtttccccatactacctcccctccccaggacactcccaggcttgggttttttctataggtttggcggggggccacagggaggggaccctgacaataaagagattggatcccaa

SEQ ID NO: 402280 - DNA, 955 bp, Homo sapiens
  misc_feature (779)..(779): n is a, c, g, or t
  misc_feature (782)..(782): n is a, c, g, or t
  misc_feature (789)..(790): n is a, c, g, or t
  misc_feature (798)..(798): n is a, c, g, or t
  misc_feature (809)..(809): n is a, c, g, or t
  misc_feature (812)..(812): n is a, c, g, or t
  misc_feature (826)..(828): n is a, c, g, or t
  misc_feature (837)..(837): n is a, c, g, or t
  misc_feature (847)..(848): n is a, c, g, or t
  misc_feature (867)..(867): n is a, c, g, or t
  misc_feature (871)..(871): n is a, c, g, or t
  misc_feature (873)..(873): n is a, c, g, or t
  misc_feature (876)..(876): n is a, c, g, or t
  misc_feature (878)..(878): n is a, c, g, or t
  misc_feature (884)..(884): n is a, c, g, or t
  misc_feature (893)..(893): n is a, c, g, or t
  misc_feature (895)..(895): n is a, c, g, or t
  misc_feature (915)..(915): n is a, c, g, or t
tctggacctttccaaagccaggctgagagggtggggagagcccatgcgcctgggaagccgggctgtttctgggcggggctgcagactcctcgtgctcgtgtcaccgtgtccttcccaggagacagagaaggaggagagcccggaaccagggccggagcggcgggcggagccgagctgcggggagccgctccgggtgcccccacccccgcgcgcctcagtggtgccggccgagggcagggctcgcggttgcggggctcgcgccgctgtcagtgcggcggggcgcgcgagcggcgccagctcggggcagcggaacccagagaagctgagggggcggtagcggcggcgacggcgacgacgacgactcccgcgcgtgtgcccagcctcttcccgccgcagccgcccttttcctccctcccttacgtccccgagtgcggcagtaccgcctccttcccagccgcgcggcttcctccagacctctcggcgcgggtgagccctattcccagaggcaggtggtgctgaccctgtaacccaaaggaggaaacagctggctaagctcatcattgttactggtgggcaccatgtccttgaagcttcaggcaagcaatgtaaccaacaagaatgaccccaagtccatcaactctcgagtcttcattggaaacctcaacacagctctggtgaagaaatcagatgtggagaccatcttctctaagtatggccgtgtggccggctgttctgtgcacaagggctatgcctttgttcagtactccaatgaggtcacnccnatccccnncacgtgtngtctcacacantcnctccgtcgtctccnnnataccgtcnacataacatnngtcacaccgtaaccgtcanacancnaancncgtaanacaccaccntntcccatatacagtccgtacntgtgtcagtatcagtacgtacgcccatcagttgtaacaca

SEQ ID NO: 402281 - DNA, 375 bp, Homo sapiens
  misc_feature (11)..(11): n is a, c, g, or t
  misc_feature (63)..(63): n is a, c, g, or t
  misc_feature (70)..(71): n is a, c, g, or t
  misc_feature (74)..(74): n is a, c, g, or t
  misc_feature (90)..(90): n is a, c, g, or t
  misc_feature (140)..(140): n is a, c, g, or t
  misc_feature (143)..(143): n is a, c, g, or t
  misc_feature (163)..(163): n is a, c, g, or t
  misc_feature (169)..(170): n is a, c, g, or t
  misc_feature (172)..(172): n is a, c, g, or t
  misc_feature (174)..(174): n is a, c, g, or t
  misc_feature (177)..(178): n is a, c, g, or t
  misc_feature (181)..(181): n is a, c, g, or t
  misc_feature (184)..(187): n is a, c, g, or t
  misc_feature (189)..(190): n is a, c, g, or t
  misc_feature (192)..(192): n is a, c, g, or t
atactaccaanagaaacgaatcagcaattggcgagcgtgctattccatagcagtgataggagnttggagnnagntttacgggccggattnctgggcgggggaatgttatacgaactcttcccagatttgctgcttatggnagngggggcacgtgctagaggcnggcatnncntnatnntantannnntnncnttactggcctactccttccccatgagccctccctgtctgcactgcccaggccagagggtagagcacaggggtttccccatactacctcccctccccaggacactcccaggcttgggttttttctataggtttggcggggggccacagggaggggaccctgacaataaagagattggatcccaa

SEQ ID NO: 402282 - DNA, 191 bp, Homo sapiens
tggcatgatatgcttcttatcaaaatgatctgtgagctctgaaataaagcatgccggggctaccactgaagggtggtcaggacacaatactttcattaagtataatccatagtcttggaaatgatatttttttctgtagaagttatattttagttactatgccacaaaggcagctgtatgtatctttaaaa

SEQ ID NO: 402283 - DNA, 305 bp, Homo sapiens
gtttcctgcactacactggggatcgacaacctacaacctatgactacaaaatgctaaaaagctatcaatttgtagtgctctttcattgctgaaggtgaccttcaaatgtcagcacaaattaattttccatgagtgaacattgttagcagggttgagagtcacttcaacaaactatatattttatatttatagtcttaaatatatagtttttagattatatatttaatatacataaaatagacttcatgatattctctatactttcttatatatttgaaatatttcaaaaaaaacttttaaaatcc

SEQ ID NO: 402284 - DNA, 475 bp, Homo sapiens
ggacttcccctgacttggagacagccttattctcagatctctctctcttttaaaatggactatcctctttacaacccagagagccccatccaaatatcactcattgtggaagaaatctgatgccatgtcttgaggacactcaagtggcctatggagaggcgaacataaagacaagaaacccaatctcaagcactatgagactccctcctctccatctccaagggtcaggccatggtcttagtcattgccaagagcatcacagaaggcctctgcctccggttcctacctgggccctttctatgctcgttaactgatgctgcagcctgacttcttcaagactaagttgggctgtatgcttgcagtcatgggaggaaaacaaaagagggtataaacacaatgcaatgcctcgacacatcactccatctcagggggtcagaaaataaattaaatgttaggaaaaacagaaaagaaataa

SEQ ID NO: 402285 - DNA, 464 bp, Homo sapiens
gtcttggcggtggggtgagagtttctgggatggggataagaattaccaggtttagtaaggaagaattcctctccttaaatagattttaacttgaaaacctgatgacagaagcggctgagtctcagcaaagagagaaaaaacaaaggaggccgatttcaccttgacttcaccttggggacccagcagccgccgctgacccctgagggctgcagctgggcgcttcggggcaaggagtgggaaccacatcttcagtgtgtccccctgtcaggcagtaccaccctcatctcctctgcaagccacatggcttctgctctccgtggtttagctggtccaggatccactttctcaggaactcacaatgcttctcattcaggttctcatcgcccccctgaggacgggtgtattttggggacacttgatcttcatctctgcagcctgttcttattaaagttcacttaaggata

SEQ ID NO: 402286 - DNA, 364 bp, Homo sapiens
atggctcgctacagcctccacctcttgggctcaagcgatccttccacctcagcctcctaagtagctgggaccacagatgtgcatcaccatgccagctaagctgttaaagttttgtagagacggaggcctccgtatgttgtctaggctggtctcaaactggcctcaagcaatcctcccgcctcagcctcccaaaatgttgggattctgggtgtgagcaccacacctagcaacatttttattgtattgtattgtatttattgtattgtattgtattttttgagatgtggtctcacactgttgcccaggctggactgcagtggcatgatattaactcactgtagtctttgcagccttgagagaactt

SEQ ID NO: 402287 - DNA, 488 bp, Homo sapiens
ctctaagaagtaaagatgatttattcgtattttctagatgaagtaactgaggctaactctgcccaaggccacctagctaacaaagatggaactgaatttaggtttacatgaatctctattatgttgtactacttctccaagacagcatttttgatagtttatattggctgagtttagtttgtttacatatgaaaataataggccgggtgtggtggctcatgcctgtaatcccagcactctgggaggccagggtgggtggattacctgaggtcaggagttcaagaccagcctgaccaacatggtgaaacatcgtctcaactaaaaatgcaaaaataagccaggcgtggtggcgcatgcctgtaatcccagctactggggaggctgagtcaggagaattgcctgaatcctggaggtggaggttgcattgagccaaagtcgcaccgttgtactccagcctgggcaacaagagcgaaaactctgtctcgagg

SEQ ID NO: 402288 - DNA, 478 bp, Homo sapiens
atctaaacataaatacaaataagagcattaagaactaaggactatattgtgtgttttgtttgtttgttttgttttgtttttcagcctggtggcagagcaagaccatgtctcagaaaaaaaaaaaaaatgtttacacaagatgttaaagacagcatgggtcattatgtttaaattcaaaactggaaacttgtaagtgaaaatcaatcctgaactatcttgtattcagtgatattctctttataactattttacagacatctgtgtaactggctaggacaatgataatcatatgacaggatcagtcattttagtcttaaaaaaatggcaagtttttaatctatatgtgtacactggttataaaattccactttaggattttgaagtcccaggagttacatagttccctttttgaactaataagttgaacttagtggtccttaacctttttgtaccatggatatatattagaaaaaagaaa

SEQ ID NO: 402289 - DNA, 420 bp, Homo sapiens
ttaaccctagttattaaatgaagaaacttagttatggaaaggttatgagttgcctaaggtgacataactaacgaaaaaagcacaattcaaatctagacagtctatctccatagttcatgttcttaattattattccatactcaaaaagttctacaaaagtatgaatttttgcctcagtgataagaataccttacatttgcataatgcttacattttcacccaaggattttatggtcttatgttttagaggcttatttttgtgtactttgtagaattagatagctgatagaaaataatcttataaatctaaataacggacatcttggtatcacctccattttgtattgttcagagcccagaaacttccaagaaccacaagttaagaacatttattgaagcctcaaataaaagtttttgata

SEQ ID NO: 402290 - DNA, 853 bp, Homo sapiens
gcaacatgaccatccaaagtgggaagatcgaattggggaggagatgaaaagcaatcacggtccccactctgtctcccagggcctctctgccgctcagctctggagactcacagcgccacctctcggactaatgcaaggctgcagcctaaacaactcagctgatctttctctgaacttcctgtctttctgcttactctgctggggtagagtggtggggcgggtggggatggtggtagaggggcagtaattacattttatgtgttaaagtttcaccatgcagctcatgctggactagagcaaatagagagtagtgaggtcaatagggggcttccttcaagcggagtggttgatgatagggcggctcggctccaggaaagccggctgtgtcactgcagggctggcacatggcagagatggggagaggtctgccttccctcccttcctgcagaaaattgcccccacagcgcctccttttggataaggcacaaaacaccctttcttaaagttgccggtgttctggggcaacggatgaaacatcctggagaagcgtacaagctaatattagccattagccagacatccatagtcccctaacaaaaaggacaggctgtgacaatgcggggagcaagagctctgggccctgaccccagccagattgaagcctgccatgtggcctagggcaggcaggaagccacctgcagacaggggagggagagaatgtaaaagaccagggtgcagaaaggggccggccccagcatctccaggctccaaccccaccatctgtttcaccagactcatactttttatttattttttttaggatttgcaataaagcaagcctgtcttaataaaa

SEQ ID NO: 402291 - DNA, 336 bp, Homo sapiens
agcaaacgcaaactagccaagtactattcatcaaatgcattgagtttaaatttcaaactgtctcaaaacttttgtagtgctaacaaacagaggttataacttggcttatagatccctcactttactataaaaatcaacccccccccactcttctgcaacaaaacccatacagagtaattatattttttacttgtccttaactatcacaagggcttagaatatgatggaagtgaagtgatattgtttcatgattcaaacactagagagcctcatctaactgtaccagatcatcaaaaaactagggcataaaaactattatgagaattctattcattc

SEQ ID NO: 402292 - DNA, 217 bp, Homo sapiens
ccaggccgtcgctcctggctttcctgctgcctcaggcctcctcctcagtctcctttgctgtcccctctccttcccagtctgtaatggtcagcatgcccgtgggccctgctttgggtgtgtttcaagagtcatggctctaaattccttcatcttctcctcactcccaaatggacatctttagctcagatctgtccctggaattgaatctcaaatccaa

SEQ ID NO: 402293 - DNA, 783 bp, Homo sapiens
  misc_feature (750)..(750): n is a, c, g, or t
  misc_feature (757)..(757): n is a, c, g, or t
ctaggtatttaattttatgtgtagctattgtatatgggattactttttaatttattttttacattgttcactgttgacatatagaaatgctactgattttgtacattgattttgtatcctataaatatactgaatttgtttatcagttttaatagtttcttggtgatatctataggtttttccaaatataagattatatcatcagcaaacaaggacaatttgacttcttcctttccaatttggattctcttcatatctttctcttgtctgattactctagctaggacttacagtacaatgttgaataatagtaatgacagtgggcatccttgtgttccagattttaaaggaaagtcttttagtttttccccattcagtatgatactcactgtggatctgttgtatataaattttattatattgaggtatgcttttatctatattcagtattttgagggttttaaaaatgatggatgtttaattttatcaaatgctttgtcagtatcaattgaaatgatatggcttttatccttcattttcttgatgtgatgtatcatgttgattgatgtgcaattgttgaaacattcttgctcccagaattaaatcccacttgatcataatgaataatcctgttaatatattgtagaacttagtttgctactattttgttgatgatttttgcattaatattgttgtattagtctgttctcacactgctaataaagacagcatgcgcgcaggcctccgccngccaatncatatctagttcaggccgagaccgtc

SEQ ID NO: 402294 - DNA, 465 bp, Homo sapiens
gctttctttcctgttctaaagccttttaactaaacttccactcctgctctgaaacttgctctctttttctgccttaacgcccctcagtcgaattctttcttctgaggaggcaaggactgaagttgctgtggacccatagggattcgccattggtaactcggggtaactcggctctcttccactgctgacgtatgtagcaagtcctgtcttcgggttggcaggcaccacggctgacaccacatgcgcagagagaggggaaagaccaagaagtgactcatgacatcaccctcgtctctgaaagacaagatgttggtctcctcaggtgccgtgcagtcttcagtgttggctgcagccacagcccctgcaatgcagaccaggatgagggaaagccgctggaagaggcctacagcattttttattagtaaatccagaggacgtgttatataaagtgtaagacaaccacca

SEQ ID NO: 402295 - DNA, 217 bp, Homo sapiens
tttttctctttttactggtatttgttttttatactcattcactaaacagggaattcctcaagctgtacttcccccattaccaaagaggcctgctcttgaaaaaaccaacggtgccaccgcagtctttaacactggtattttccaataccaacaggctctagccaacatgcagttacaacagcatacagcatttctcccaccaggtaaggggtggggt

SEQ ID NO: 402296 - DNA, 571 bp, Homo sapiens
  misc_feature (7)..(7): n is a, c, g, or t
tccgggntgtccctgtacccttgcagctgctgcagctgctgcacagaaattaatgcgaacagacagacttgaggtattgtcgagagtaccaacgtggcaattgcaaccgaggagaaaatgattgtcgggtttgctcattcctgctgacagcacaatgattgacaccaatgacaacacagtcactgtgtgtatggattacatcaaaaggggaaaatgcttctcggggaaaaagtgcaaaatactttcaaccccccctgcaacatttgccaagccaaagatcaaagctgccccaaataccaagtccaaccaggctgcagctgcataggctgcagccaccgcagctgccatgactcagtcggctgtcaaatcactgaagcgacccctcgaggcaacctttgacctgggaattcctcaagctgtacttcccccattaccaaagaggcctgctcttgaaaaaaccaacggtgccaccgcagtctttaacactggtattttccaataccaacaggctctagccaacatgcagttacaacagcatacagcatttctcccaccaggtaaggggtggggt

SEQ ID NO: 402297 - DNA, 576 bp, Homo sapiens
tcttctgcatcagtttctatgacgacataggcagccgagtagtcagggtccgtgtgctgcaggagaagagttccccgccgaaacaatgccagtgtgagaaacccgaaaagaaccatgagaatgatgtcacatgaggacagacaatgccacaggggccgtgccacaagagctcccatagaaggaactgttgctataccccaaagaaaacaaagggctctgaatggagaaaaggaatgtcctcctgaaagatccaaaatgtttcaacaagagcaatactccaaaaagccaggcagaagatgtgaatgcattcataaagaagaattgtgcataaggctatgaaaatttattactgttattattctataatatttattgtgccagacacactatattctaagagctccacatggtttaatttaatcttataacaatattataaagtaggtgctcttatccttattaaagaggaaatgaagttttaaggagctttagtaatttacaaaaggtcacaccacaagtaaataatgttttattattattattattattatttttgagactgactctcactctgtt

SEQ ID NO: 402298 - DNA, 375 bp, Homo sapiens
gaaaatgaagaagtaaagcttcgagattaattcactaattttttgttttgttctatgtcatggaataatggagactccaaaaagccaggcagaagatgtgaatgcattcataaagaagaattgtgcataaggctatgaaaatttattactgttattattctataatatttattgtgccagacacactatattctaagagctccacatggtttaatttaatcttataacaatattataaagtaggtgctcttatccttattaaagaggaaatgaagttttaaggagctttagtaatttacaaaaggtcacaccacaagtaaataatgttttattattattattattattatttttgagactgactctcactctgtt

SEQ ID NO: 402299 - DNA, 2122 bp, Homo sapiens
acccggggcccgcccccggctccatcttgcgggagaccgggttgggctgtgacgctgctgctggggtcagaatgtcatacccaggctatcccccaacaggctacccacctttccctggatatcctcctgcaggtcaggagtcatcttttcccccttctggtcagtatccttatcctagtggctttcctccaatgggaggaggtgcctacccacaagtgccaagtagtggctacccaggagctggaggctaccctgcgcctggaggttatccagcccctggaggctatcctggtgccccacagccagggggagctccatcctatcccggagttcctccaggccaaggatttggagtcccaccaggtggagcaggcttttctgggtatccacagccaccttcacagtcttatggaggtggtccagcacaggttccactacctggtggctttcctggaggacagatgccttctcagtatcctggaggacaacctacttaccctagtcagcctgccacagtgactcaggtcactcaaggaactatccgaccagctgccaacttcgatgctataagagatgcagaaattcttcgtaaggcaatgaagggttttgggacagatgagcaggcaattgtggatgtggtggccaaccgttccaatgatcagaggcaaaaaattaaagcagcatttaagacctcctatggcaaggatttaatcaaagatctcaaatcagagttaagtggaaatatggaagaactgatcctggccctcttcatgcctcctacgtattacgatgcctggagcttacggaaagcaatgcagggagcaggaactcaggaacgtgtattgattgagattttgtgcacaagaacaaatcaggaaatccgagaaattgtcagatgttatcagtcagaatttggacgagaccttgaaaaggacattaggtcagatacatcaggacattttgaacgtttacttgtgtccatgtgccagggaaatcgtgatgagaaccagagtataaaccaccaaatggctcaggaagatgctcagcgtctctatcaagctggtgaggggagactagggaccgatgaatcttgctttaacatgatccttgccacaagaagctttcctcagctgagagctaccatggaggcttattctaggatggctaatcgagacttgttaagcagtgtgagccgtgagttttccggatatgtagaaagtggtttgaagaccatcttgcagtgtgccctgaaccgccctgccttctttgctgagaggctctactatgctatgaaaggtgctggcacagatgactccaccctggtccggattgtggtcactcgaagtgagattgaccttgtacaaataaaacagatgttcgctcagatgtatcagaagactctgggcacaatgattgcaggtgacacgagtggagattaccgaagacttcttctggctattgtgggccagtaggagggatttttttttttttaatgaaaaaaaatttctattcatagcttatccttcagagcaatgacctgcatgcagcaatatcaaacatcagctaaccgaaagagctttctgtcaaggaccgtatcagggtaatgtgcttggtttgcacatgttgttattgccttaattctaattttattttgttctctacatacaatcaatgtaaagccatatcacaatgatacagtaatattgcaatgtttgtaaaccttcattcttactagtttcattctaatcaagatgtcaaattgaataaaaatcacagcaatctctgattctgtgtaataatattgaataattttttagaaggttactgaaagctctgccttccggaatccctctaagtctgcttgatagagtggatagtatgttaaaactgtgtactttaaaaaaaaattcaacctttacatctagaataatttgcatctcattttgcctaaattggttctgtattcataaacactttccacatagaaaatagattagtattacctgtggcaccttttaagaaagggtcaaatgtttatatgcttaagatacatagcctacttttttttcgcagttgttttctttttttaaattgagttatgacaaataaaaaattgcatata

SEQ ID NO: 402300 - DNA, 2188 bp, Homo sapiens
acccggggcccgcccccggctccatcttgcgggagaccgggttgggctgtgacgctgctgctggggtcagaatgtcatacccaggctatcccccaacaggctacccacctttccctggatatcctcctgcaggtcaggagtcatcttttcccccttctggtcagtatccttatcctagtggctttcctccaatgggaggaggtgcctacccacaagtgccaagtagtggctacccaggagctggaggctaccctgcgcctggaggttatccagcccctggaggctatcctggtgccccacagccagggggagctccatcctatcccggagttcctccaggccaaggatttggagtcccaccaggtggagcaggcttttctgggtatccacagccaccttcacagtcttatggaggtggtccagcacaggttccactacctggtggctttcctggaggacagatgccttctcagtatcctggaggacaacctacttaccctagtcagatcaatacagattctttttcttcctatcctgttttctctcctgtttctttggattatagcagtgaacctgccacagtgactcaggtcactcaaggaactatccgaccagctgccaacttcgatgctataagagatgcagaaattcttcgtaaggcaatgaagggttttgggacagatgagcaggcaattgtggatgtggtggccaaccgttccaatgatcagaggcaaaaaattaaagcagcatttaagacctcctatggcaaggatttaatcaaagatctcaaatcagagttaagtggaaatatggaagaactgatcctggccctcttcatgcctcctacgtattacgatgcctggagcttacggaaagcaatgcagggagcaggaactcaggaacgtgtattgattgagattttgtgcacaagaacaaatcaggaaatccgagaaattgtcagatgttatcagtcagaatttggacgagaccttgaaaaggacattaggtcagatacatcaggacattttgaacgtttacttgtgtccatgtgccagggaaatcgtgatgagaaccagagtataaaccaccaaatggctcaggaagatgctcagcgtctctatcaagctggtgaggggagactagggaccgatgaatcttgctttaacatgatccttgccacaagaagctttcctcagctgagagctaccatggaggcttattctaggatggctaatcgagacttgttaagcagtgtgagccgtgagttttccggatatgtagaaagtggtttgaagaccatcttgcagtgtgccctgaaccgccctgccttctttgctgagaggctctactatgctatgaaaggtgctggcacagatgactccaccctggtccggattgtggtcactcgaagtgagattgaccttgtacaaataaaacagatgttcgctcagatgtatcagaagactctgggcacaatgattgcaggtgacacgagtggagattaccgaagacttcttctggctattgtgggccagtaggagggatttttttttttttaatgaaaaaaaatttctattcatagcttatccttcagagcaatgacctgcatgcagcaatatcaaacatcagctaaccgaaagagctttctgtcaaggaccgtatcagggtaatgtgcttggtttgcacatgttgttattgccttaattctaattttattttgttctctacatacaatcaatgtaaagccatatcacaatgatacagtaatattgcaatgtttgtaaaccttcattcttactagtttcattctaatcaagatgtcaaattgaataaaaatcacagcaatctctgattctgtgtaataatattgaataattttttagaaggttactgaaagctctgccttccggaatccctctaagtctgcttgatagagtggatagtatgttaaaactgtgtactttaaaaaaaaattcaacctttacatctagaataatttgcatctcattttgcctaaattggttctgtattcataaacactttccacatagaaaatagattagtattacctgtggcaccttttaagaaagggtcaaatgtttatatgcttaagatacatagcctacttttttttcgcagttgttttctttttttaaattgagttatgacaaataaaaaattgcatata

SEQ ID NO: 402301 - DNA, 1784 bp, Homo sapiens
acccggggcccgcccccggctccatcttgcgggagaccgggttgggctgtgacgctgctgctggggtcagaatgtcatacccaggctatcccccaacaggctacccacctttccctggatatcctcctgcaggtcaggagtcatcttttcccccttctggtcagtatccttatcctagtggctttcctccaatgggaggaggtgcctacccacaagtgccaagtagtggctacccaggagctggaggctaccctgcgcctggaggttatccagcccctggaggctatcctggtgccccacagccagggggagctccatcctatcccggagttcctccaggccaaggatttggagtcccaccaggtggagcaggcttttctgggtatccacagccaccttcacagtcttatggaggtggtccagcacaggttccactacctggtggctttcctggaggacagatgccttctcagtatcctggaggacaacctacttaccctagtcagcctgccacagtgactcaggtcactcaaggaactatccgaccagctgccaacttcgatgctataagagatgcagaaattcttcgtaaggcaatgaagggttttgggacagatgagcaggcaattgtggatgtggtggccaaccgttccaatgatcagaggcaaaaaattaaagcagcatttaagacctcctatggcaaggatttaatcaaagatctcaaatcagagttaagtggaaatatggaagaactgatcctggccctcttcatgcctcctacgtattacgatgcctggagcttacggaaagcaatgcagggagcaggaactcaggaacgtgtattgattgagattttgtgcacaagaacaaatcaggaaatccgagaaattgtcagatgttatcagtcagaatttggacgagaccttgaaaaggacattaggtcagatacatcaggacattttgaacgtttacttgtgtccatgtgccagggaaatcgtgatgagaaccagagtataaaccaccaaatggctcaggaagatgctcagcgtctctatcaagctggtgaggggagactagggaccgatgaatcttgctttaacatgatccttgccacaagaagctttcctcagctgagagctaccatggaggcttattctaggatggctaatcgagacttgttaagcagtgtgagccgtgagttttccggatatgtagaaagtggtttgaagaccatcttgcagtgtgccctgaaccgccctgccttctttgctgagaggctctactatgctatgaaaggtgctggcacagatgactccaccctggtccggattgtggtcactcgaagtgagattgaccttgtacaaataaaacagatgttcgctcagatgtatcagaagactctgggcacaatgattgcaggtgacacgagtggagattaccgaagacttcttctggctattgtgggccagtaggagggatttttttttttttaatgaaaaaaaatttctattcatagcttatccttcagagcaatgacctgcatgcagcaatatcaaacatcagctaaccgaaagagctttctgtcaaggaccgtatcagggtaatgtgcttggtttgcacatgttgttattgccttaattctaattttattttgttctctacatacaatcaatgtaaagccatatcacaatgatacagtaatattgcaatgtttgtaaaccttcattcttactagtttcattctaatcaagatgtcaaattgaataaaaatcacagcaatctct

SEQ ID NO: 402302 - DNA, 1307 bp, Homo sapiens
acagtaactccccattctcctttctcccaactgctggcaacaaaccatgtgactttctgtgcctgtgtttgactactctaggtacgtcatattggtggaatcatacaatatttgtctttttgtgagtgttgtcttttacttagcatagcgtcctcaaggtttattcatgttatagcatgtcagaatttccttccttttgagactgagtaattaaatagtctattgtacgtgtatcccaccttttggttttttttttaattcatctgtgacacttggtttgtttctgcctgaataatgctgctatgaacatggatgtacaaatatctgttcaagtctactttcacttatttggaatatacccagaagtggaatttctaggtcatattgtaattcttgggaagtgttttgttttgctttgaggaattaaccatattagtttccacagcagctgcacccttttacttttccatcaacctgtgtacaagtgttcccatttcatggcatccttgccaatacttactatttttttggttttgataatagccatcctatcaaatgtttttaaatgactaatatctttggaataatagatgaaactagtactaccctgaccaagtattttacagagctgtgaatcagaccttcattgggtagtgctagcattggtatgagtgccagccataaaatgtcagtcacttggtgttttcccccccaagttttgattattattaagatcttattatttaaaaagaattttaagaaatgtcagttgtcacagatgtttttctgacagaaatattatttcttatgcagattgaccttgtacaaataaaacagatgttcgctcagatgtatcagaagactctgggcacaatgattgcaggtgacacgagtggagattaccgaagacttcttctggctattgtgggccagtaggagggatttttttttttttaatgaaaaaaaatttctattcatagcttatccttcagagcaatgacctgcatgcagcaatatcaaacatcagctaaccgaaagagctttctgtcaaggaccgtatcagggtaatgtgcttggtttgcacatgttgttattgccttaattctaattttattttgttctctacatacaatcaatgtaaagccatatcacaatgatacagtaatattgcaatgtttgtaaaccttcattcttactagtttcattctaatcaagatgtcaaattgaataaaaatcacagcaatctcttgaaaacaaaaaaaacttgccgccgtttacacgtgtgactggtaaaccttgcgtaccca

SEQ ID NO: 402303 - DNA, 2384 bp, Homo sapiens
acccggggcccgcccccggctccatcttgcgggagaccgggttgggctgtgacgctgctgctggggtcagaatgtcatacccaggctatcccccaacaggctacccacctttccctggatatcctcctgcaggtcaggagtcatcttttcccccttctggtcagtatccttatcctagtggctttcctccaatgggaggaggtgcctacccacaagtgccaagtagtggctacccaggagctggaggctaccctgcgcctggaggttatccagcccctggaggctatcctggtgccccacagccagggggagctccatcctatcccggagttcctccaggccaaggatttggagtcccaccaggtggagcaggcttttctgggtatccacagccaccttcacagtcttatggaggtggtccagcacaggttccactacctggtggctttcctggaggacagatgccttctcagtatcctggaggacaacctacttaccctagtcagcctgccacagtgactcaggtcactcaaggaactatccgaccagctgccaacttcgatgctataagagatgcagaaattcttcgtaaggcaatgaagggttttgggacagatgagcaggcaattgtggatgtggtggccaaccgttccaatgatcagaggcaaaaaattaaagcagcatttaagacctcctatggcaaggatttaatcaaagatctcaaatcagagttaagtggaaatatggaagaactgatcctggccctcttcatgcctcctacgtattacgatgcctggagcttacggaaagcaatgcagggagcaggaactcaggaacgtgtattgattgagattttgtgcacaagaacaaatcaggaaatccgagaaattgtcagatgttatcagtcagaatttggacgagaccttgaaaaggacattaggtcagatacatcaggacattttgaacgtttacttgtgtccatgtgccagggaaatcgtgatgagaaccagagtataaaccaccaaatggctcaggaagatgctcagcgtctctatcaagctggtgaggggagactagggaccgatgaatcttgctttaacatgatccttgccacaagaagctttcctcagctgagagctaccatggaggcttattctaggatggctaatcgagacttgttaagcagtgtgagccgtgagttttccggatatgtagaaagtggtttgaagaccatcttgcagtgtgccctgaaccgccctgccttctttgctgagaggctctactatgctatgaaaggtgctggcacagatgactccaccctggtccggattgtggtcactcgaagtgagattgaccttgtacaaataaaacagatgttcgctcagatgtatcagaagactctgggcacaatgattgcaggtgacacgagtggagattaccgaagacttcttctggctattgtgggccagtaggagggatttttttttttttaatgaaaaaaaatttctattcatagcttatccttcagagcaatgacctgcatgcagcaatatcaaacatcagctaaccgaaagagctttctgtcaaggaccgtatcagggtaatgtgcttggtttgcacatgttgttattgccttaattctaattttattttgttctctacatacaatcaatgtaaagccatatcacaatgatacagtaatattgcaatgtttgtaaaccttcattcttactagtttcattctaatcaagatgtcaaattgaataaaaatcacagcaatctctgattctgtgtaataatattgaataattttttagaaggttactgaaagctctgccttccggaatccctctaagtctgcttgatagagtggatagtatgttaaaactgtgtactttaaaaaaaaattcaacctttacatctagaataatttgcatctcattttgcctaaattggttctgtattcataaacactttccacatagaaaatagattagtattacctgtggcaccttttaagaaagggtcaaatgtttatatgcttaagatacatagcctacttttttttcgcagttgttttctttttttaaattgagttatgacaaataaaaaattgcatataaaaaaaaaaaaaaaaaactcgagttttttttttttttttttttttttaaggtctcagttcaagtttaatacaaactacaaaagattaatgggttgctctactaatacatcatacaaaccagttgccttgccacaacggcaacttaagccatttctaccaaaggaagaaaggctggtctttccaccccctgtaggaaagccttccttgtaagacaccacaattcggctgaatctgaaagcttgggttttacctatgggaaaaa

SEQ ID NO: 402304 - DNA, 2128 bp, Homo sapiens
aaacataggctaggtacgaggccgcgtgcttaattcggccgaggccgggttgtgctgtgaagctgctgctggggtcaatgtcatacccaggctatcccccaacaggctacccacctttccctggatatcctcctgcaggtcaggagtcatcttttcccccttctggtcagtatccttatcctagtggctttcctccaatgggaggaggtgcctacccacaagtgccaagtagtggctacccaggagctggaggctaccctgcgcctggaggttatccagcccctggaggctatcctggtgccccacagccagggggagctccatcctatcccggagttcctccaggccaaggatttggagtcccaccaggtggagcaggcttttctgggtatccacagccaccttcacagtcttatggaggtggtccagcacaggttccactacctggtggctttcctggaggacagatgccttctcagtatcctggaggacaacctacttaccctagtcagcctgccacagtgactcaggtcactcaaggaactatccgaccagctgccaacttcgatgctataagagatgcagaaattcttcgtaaggcaatgaagggttttgggacagatgagcaggcaattgtggatgtggtggccaaccgttccaatgatcagaggcaaaaaattaaagcagcatttaagacctcctatggcaaggatttaatcaaagatctcaaatcagagttaagtggaaatatggaagaactgatcctggccctcttcatgcctcctacgtattacgatgcctggagcttacggaaagcaatgcagggagcaggaactcaggaacgtgtattgattgagattttgtgcacaagaacaaatcaggaaatccgagaaattgtcagatgttatcagtcagaatttggacgagaccttgaaaaggacattaggtcagatacatcaggacattttgaacgtttacttgtgtccatgtgccagggaaatcgtgatgagaaccagagtataaaccaccaaatggctcaggaagatgctcagcgtctctatcaagctggtgaggggagactagggaccgatgaatcttgctttaacatgatccttgccacaagaagctttcctcagctgagagctaccatggaggcttattctaggatggctaatcgagacttgttaagcagtgtgagccgtgagttttccggatatgtagaaagtggtttgaagaccatcttgcagtgtgccctgaaccgccctgccttctttgctgagaggctctactatgctatgaaaggtgctggcacagatgactccaccctggtccggattgtggtcactcgaagtgagattgaccttgtacaaataaaacagatgttcgctcagatgtatcagaagactctgggcacaatgattgcaggtgacacgagtggagattaccgaagacttcttctggctattgtgggccagtaggagggatttttttttttttaatgaaaaaaaatttctattcatagcttatccttcagagcaatgacctgcatgcagcaatatcaaacatcagctaaccgaaagagctttctgtcaaggaccgtatcagggtaatgtgcttggtttgcacatgttgttattgccttaattctaattttattttgttctctacatacaatcaatgtaaagccatatcacaatgatacagtaatattgcaatgtttgtaaaccttcattcttactagtttcattctaatcaagatgtcaaattgaataaaaatcacagcaatctctgattctgtgtaataatattgaataattttttagaaggttactgaaagctctgccttccggaatccctctaagtctgcttgatagagtggatagtatgttaaaactgtgtactttaaaaaaaaattcaacctttacatctagaataatttgcatctcattttgcctaaattggttctgtattcataaacactttccacatagaaaatagattagtattacctgtggcaccttttaagaaagggtcaaatgtttatatgcttaagatacatagcctacttttttttcgcagttgttttctttttttaaattgagttatgacaaataaaaaattgcatata

SEQ ID NO: 402305 - DNA, 2177 bp, Homo sapiens
acccggggcccgcccccggctccatcttgcgggagaccgggttgggctgtgacgctgctgctggggtcagtgcaatgatgcaaacacgactcactgccgccttgacctcctggcctcaagcaattctcccacctcagcttcctgaatagtttggactacaggtgggcgccgctgcactggcctgcaggtcaggagtcatcttttcccccttctggtcagtatccttatcctagtggctttcctccaatgggaggaggtgcctacccacaagtgccaagtagtggctacccaggagctggaggctaccctgcgcctggaggttatccagcccctggaggctatcctggtgccccacagccagggggagctccatcctatcccggagttcctccaggccaaggatttggagtcccaccaggtggagcaggcttttctgggtatccacagccaccttcacagtcttatggaggtggtccagcacaggttccactacctggtggctttcctggaggacagatgccttctcagtatcctggaggacaacctacttaccctagtcagcctgccacagtgactcaggtcactcaaggaactatccgaccagctgccaacttcgatgctataagagatgcagaaattcttcgtaaggcaatgaagggttttgggacagatgagcaggcaattgtggatgtggtggccaaccgttccaatgatcagaggcaaaaaattaaagcagcatttaagacctcctatggcaaggatttaatcaaagatctcaaatcagagttaagtggaaatatggaagaactgatcctggccctcttcatgcctcctacgtattacgatgcctggagcttacggaaagcaatgcagggagcaggaactcaggaacgtgtattgattgagattttgtgcacaagaacaaatcaggaaatccgagaaattgtcagatgttatcagtcagaatttggacgagaccttgaaaaggacattaggtcagatacatcaggacattttgaacgtttacttgtgtccatgtgccagggaaatcgtgatgagaaccagagtataaaccaccaaatggctcaggaagatgctcagcgtctctatcaagctggtgaggggagactagggaccgatgaatcttgctttaacatgatccttgccacaagaagctttcctcagctgagagctaccatggaggcttattctaggatggctaatcgagacttgttaagcagtgtgagccgtgagttttccggatatgtagaaagtggtttgaagaccatcttgcagtgtgccctgaaccgccctgccttctttgctgagaggctctactatgctatgaaaggtgctggcacagatgactccaccctggtccggattgtggtcactcgaagtgagattgaccttgtacaaataaaacagatgttcgctcagatgtatcagaagactctgggcacaatgattgcaggtgacacgagtggagattaccgaagacttcttctggctattgtgggccagtaggagggatttttttttttttaatgaaaaaaaatttctattcatagcttatccttcagagcaatgacctgcatgcagcaatatcaaacatcagctaaccgaaagagctttctgtcaaggaccgtatcagggtaatgtgcttggtttgcacatgttgttattgccttaattctaattttattttgttctctacatacaatcaatgtaaagccatatcacaatgatacagtaatattgcaatgtttgtaaaccttcattcttactagtttcattctaatcaagatgtcaaattgaataaaaatcacagcaatctctgattctgtgtaataatattgaataattttttagaaggttactgaaagctctgccttccggaatccctctaagtctgcttgatagagtggatagtatgttaaaactgtgtactttaaaaaaaaattcaacctttacatctagaataatttgcatctcattttgcctaaattggttctgtattcataaacactttccacatagaaaatagattagtattacctgtggcaccttttaagaaagggtcaaatgtttatatgcttaagatacatagcctacttttttttcgcagttgttttctttttttaaattgagttatgacaaataaaaaattgcatata

SEQ ID NO: 402306 - DNA, 2056 bp, Homo sapiens
acccggggcccgcccccggctccatcttgcgggagaccgggttgggctgtgacgctgctgctggggtcagaatgtcatacccaggctatcccccaacaggctacccacctttccctggatatcctcctgcaggtcaggagtcatcttttcccccttctggtcagtatccttatcctagtggctttcctccaatgggaggaggtgcctacccacaagtgccaagtagtggctacccaggagctggaggctaccctgcgcctggaggttatccagcccctggaggctatcctggtgccccacagccagggggagctccatcctatcccggagttcctccaggccaaggatttggagtcccaccaggtggagcaggcttttctgggtatccacagccaccttcacagtcttatggaggtggtccagcacaggttccactacctggtggctttcctggaggacagatgccttctcagtatcctggaggacaacctacttaccctagtcagcctgccacagtgactcaggtcactcaaggaactatccgaccagctgccaacttcgatgctataagagatgcagaaattcttcgtaaggcaatgaagggttttgggacagatgagcaggcaattgtggatgtggtggccaaccgttccaatgatcagaggcaaaaaattaaagcagcatttaagacctcctatggcaaggatttaatcaaagatctcaaatcagagttaagtggaaatatggaagaactgatcctggccctcttcatgcctcctacgtattacgatgcctggagcttacggaaagcaatgcagggagcaggaactcaggaacgtgtattgattgagattttgtgcacaagaacaaatcaggaaatccgagaaattgtcagatgttatcagtcagaatttggacgagacggaaatcgtgatgagaaccagagtataaaccaccaaatggctcaggaagatgctcagcgtctctatcaagctggtgaggggagactagggaccgatgaatcttgctttaacatgatccttgccacaagaagctttcctcagctgagagctaccatggaggcttattctaggatggctaatcgagacttgttaagcagtgtgagccgtgagttttccggatatgtagaaagtggtttgaagaccatcttgcagtgtgccctgaaccgccctgccttctttgctgagaggctctactatgctatgaaaggtgctggcacagatgactccaccctggtccggattgtggtcactcgaagtgagattgaccttgtacaaataaaacagatgttcgctcagatgtatcagaagactctgggcacaatgattgcaggtgacacgagtggagattaccgaagacttcttctggctattgtgggccagtaggagggatttttttttttttaatgaaaaaaaatttctattcatagcttatccttcagagcaatgacctgcatgcagcaatatcaaacatcagctaaccgaaagagctttctgtcaaggaccgtatcagggtaatgtgcttggtttgcacatgttgttattgccttaattctaattttattttgttctctacatacaatcaatgtaaagccatatcacaatgatacagtaatattgcaatgtttgtaaaccttcattcttactagtttcattctaatcaagatgtcaaattgaataaaaatcacagcaatctctgattctgtgtaataatattgaataattttttagaaggttactgaaagctctgccttccggaatccctctaagtctgcttgatagagtggatagtatgttaaaactgtgtactttaaaaaaaaattcaacctttacatctagaataatttgcatctcattttgcctaaattggttctgtattcataaacactttccacatagaaaatagattagtattacctgtggcaccttttaagaaagggtcaaatgtttatatgcttaagatacatagcctacttttttttcgcagttgttttctttttttaaattgagttatgacaaataaaaaattgcatata

SEQ ID NO: 402307 - DNA, 2130 bp, Homo sapiens
acccggggcccgcccccggctccatcttgcgggagaccgggttgggctgtgacgctgctgctggggtcagaatgtcatacccaggctatcccccaacaggctacccacctttccctggatatcctcctgcaggtcaggagtcatcttttcccccttctggtcagtatccttatcctagtggctttcctccaatgggaggaggtgcctacccacaacccctggaggctatcctggtgccccacagccagggggagctccatcctatcccggagttcctccaggccaaggatttggagtcccaccaggtggagcaggcttttctgggtatccacagccaccttcacagtcttatggaggtggtccagcacaggttccactacctggtggctttcctggaggacagatgccttctcagtatcctggaggacaacctacttaccctagtcagatcaatacagattctttttcttcctatcctgttttctctcctgtttctttggattatagcagtgaacctgccacagtgactcaggtcactcaaggaactatccgaccagctgccaacttcgatgctataagagatgcagaaattcttcgtaaggcaatgaagggttttgggacagatgagcaggcaattgtggatgtggtggccaaccgttccaatgatcagaggcaaaaaattaaagcagcatttaagacctcctatggcaaggatttaatcaaagatctcaaatcagagttaagtggaaatatggaagaactgatcctggccctcttcatgcctcctacgtattacgatgcctggagcttacggaaagcaatgcagggagcaggaactcaggaacgtgtattgattgagattttgtgcacaagaacaaatcaggaaatccgagaaattgtcagatgttatcagtcagaatttggacgagaccttgaaaaggacattaggtcagatacatcaggacattttgaacgtttacttgtgtccatgtgccagggaaatcgtgatgagaaccagagtataaaccaccaaatggctcaggaagatgctcagcgtctctatcaagctggtgaggggagactagggaccgatgaatcttgctttaacatgatccttgccacaagaagctttcctcagctgagagctaccatggaggcttattctaggatggctaatcgagacttgttaagcagtgtgagccgtgagttttccggatatgtagaaagtggtttgaagaccatcttgcagtgtgccctgaaccgccctgccttctttgctgagaggctctactatgctatgaaaggtgctggcacagatgactccaccctggtccggattgtggtcactcgaagtgagattgaccttgtacaaataaaacagatgttcgctcagatgtatcagaagactctgggcacaatgattgcaggtgacacgagtggagattaccgaagacttcttctggctattgtgggccagtaggagggatttttttttttttaatgaaaaaaaatttctattcatagcttatccttcagagcaatgacctgcatgcagcaatatcaaacatcagctaaccgaaagagctttctgtcaaggaccgtatcagggtaatgtgcttggtttgcacatgttgttattgccttaattctaattttattttgttctctacatacaatcaatgtaaagccatatcacaatgatacagtaatattgcaatgtttgtaaaccttcattcttactagtttcattctaatcaagatgtcaaattgaataaaaatcacagcaatctctgattctgtgtaataatattgaataattttttagaaggttactgaaagctctgccttccggaatccctctaagtctgcttgatagagtggatagtatgttaaaactgtgtactttaaaaaaaaattcaacctttacatctagaataatttgcatctcattttgcctaaattggttctgtattcataaacactttccacatagaaaatagattagtattacctgtggcaccttttaagaaagggtcaaatgtttatatgcttaagatacatagcctacttttttttcgcagttgttttctttttttaaattgagttatgacaaataaaaaattgcatata

SEQ ID NO: 402308 - DNA, 1837 bp, Homo sapiens
acccggggcccgcccccggctccatcttgcgggagaccgggttgggctgtgacgctgctgctggggtcagaatgtcatacccaggctatcccccaacaggctacccacctttccctggatatcctcctgcaggtcaggagtcatcttttcccccttctggtcagtatccttatcctagtggctttcctccaatgggaggaggtgcctacccacaagtgccaagtagtggctacccaggagctggaggctaccctgcgcctggaggttatccagcccctggaggctatcctggtgccccacagccagggggagctccatcctatcccggagttcctccaggccaaggatttggagtcccaccaggtggagcaggcttttctgggtatccacagccaccttcacagtcttatggaggtggtccagcacaggttccactacctggtggctttcctggaggacagatgccttctcagtatcctggaggacaacctacttaccctagtcagcctgccacagtgactcaggtcactcaaggaactatccgaccagctgccaacttcgatgctataagagatgcagaaattcttcgtaaggcaatgaagggttttgggacagatgagcaggcaattgtggatgtggtggccaaccgttccaatgatcagaggcaaaaaattaaagcagcatttaagacctcctatggcaagggaaatcgtgatgagaaccagagtataaaccaccaaatggctcaggaagatgctcagcgtctctatcaagctggtgaggggagactagggaccgatgaatcttgctttaacatgatccttgccacaagaagctttcctcagctgagagctaccatggaggcttattctaggatggctaatcgagacttgttaagcagtgtgagccgtgagttttccggatatgtagaaagtggtttgaagaccatcttgcagtgtgccctgaaccgccctgccttctttgctgagaggctctactatgctatgaaaggtgctggcacagatgactccaccctggtccggattgtggtcactcgaagtgagattgaccttgtacaaataaaacagatgttcgctcagatgtatcagaagactctgggcacaatgattgcaggtgacacgagtggagattaccgaagacttcttctggctattgtgggccagtaggagggatttttttttttttaatgaaaaaaaatttctattcatagcttatccttcagagcaatgacctgcatgcagcaatatcaaacatcagctaaccgaaagagctttctgtcaaggaccgtatcagggtaatgtgcttggtttgcacatgttgttattgccttaattctaattttattttgttctctacatacaatcaatgtaaagccatatcacaatgatacagtaatattgcaatgtttgtaaaccttcattcttactagtttcattctaatcaagatgtcaaattgaataaaaatcacagcaatctctgattctgtgtaataatattgaataattttttagaaggttactgaaagctctgccttccggaatccctctaagtctgcttgatagagtggatagtatgttaaaactgtgtactttaaaaaaaaattcaacctttacatctagaataatttgcatctcattttgcctaaattggttctgtattcataaacactttccacatagaaaatagattagtattacctgtggcaccttttaagaaagggtcaaatgtttatatgcttaagatacatagcctacttttttttcgcagttgttttctttttttaaattgagttatgacaaataaaaaattgcatata

SEQ ID NO: 402309 - DNA, 1548 bp, Homo sapiens
acccggggcccgcccccggctccatcttgcgggagaccgggttgggctgtgacgctgctgctggggtcagaatgtcatacccaggctatcccccaacaggctacccacctttccctggatatcctcctgcaggtcaggagtcatcttttcccccttctggtcagtatccttatcctagtggctttcctccaatgggaggaggtgcctacccacaagtgccaagtagtggctacccaggagctggaggctaccctgcgcctggaggttatccagcccctggaggctatcctggtgccccacagccagggggagctccatcctatcccggagttcctccaggccaaggatttggagtcccaccaggtggagcaggcttttctgggtatccacagccaccttcacagtcttatggaggtggtccagcacaggttccactacctggtggctttcctggaggacagatgccttctcagtatcctggaggacaacctacttaccctagtcagcctgccacagtgactcaggtcactcaaggaactatccgaccagctgccaacttcgatgctataagagatgcagaaattcttcgtaaggcaatgaagggttttgggacagatgagcaggcaattgtggatgtggtggccaaccgttccaatgatcagaggcaaaaaattaaagcagcatttaagacctcctatggcaaggatttaatcaaagatctcaaatcagagttaagtggaaatatggaagaactgatcctggccctcttcatgcctcctacgtattacgatgcctggagcttacggaaagcaatgcagggagcaggaactcaggaacgtgtattgattgagattttgtgcacaagaacaaatcaggaaatccgagaaattgtcagatgttatcagtcagaatttggacgagaccttgaaaaggacattaggtcagatacatcaggacattttgaacgtttacttgtgtccatgtgccagggaaatcgtgatgagaaccagagtataaaccaccaaatggctcaggaagatgctcagcgtctctatcaagctggtgaggggagactagggaccgatgaatcttgctttaacatgatccttgccacaagaagctttcctcagctgagagctaccatggaggcttattctaggatggctaatcgagacttgttaagcagtgtgagccgtgagttttccggatatgtagaaagtggtttgaagaccatcttgcagtgtgccctgaaccgccctgccttctttgctgagaggctctactatgctatgaaaggtgctggcacagatgactccaccctggtccggattgtggtcactcgaagtgagattgaccttgtacaaataaaacagatgttcgctcagatgtatcagaagactctgggcacaatgattgcaggtgacacgagtggagattaccgaagactttctgcatctcttatagcatcgaagtaggcagctggtcggatagttccttgagtgacctgagtcactgtggcaggctgactagggtaagtaggttgtcctc

SEQ ID NO: 402310 - DNA, 1448 bp, Homo sapiens
  misc_feature (1380)..(1380): n is a, c, g, or t
acccggggcccgcccccggctccatcttgcgggagaccgggttgggctgtgacgctgctgctggggtcagaatgtcatacccaggctatcccccaacaggctacccacctttccctggatatcctcctgcaggtcaggagtcatcttttcccccttctggtcagtatccttatcctagtggctttcctccaatgggaggaggtgcctacccacaagtgccaagtagtggctacccaggagctggaggctaccctgcgcctggaggttatccagcccctggaggctatcctggtgccccacagccagggggagctccatcctatcccggagttcctccaggccaaggatttggagtcccaccaggtggagcaggcttttctgggtatccacagccaccttcacagtcttatggaggtggtccagcacaggttccactacctggtggctttcctggaggacagatgccttctcagtatcctggaggacaacctacttaccctagtcagcctgccacagtgactcaggtcactcaaggaactatccgaccagctgccaacttcgatgctataagagatgcagaaattcttcgtaaggcaatgaagggttttgggacagatgagcaggcaattgtggatgtggtggccaaccgttccaatgatcagaggcaaaaaattaaagcagcatttaagacctcctatggcaaggatttaatcaaagatctcaaatcagagttaagtggaaatatggaagaactgatcctggccctcttcatgcctcctacgtattacgatgcctggagcttacggaaagcaatgcagggagcaggaactcaggaacgtgtattgattgagattttgtgcacaagaacaaatcaggaaatccgagaaattgtcagatgttatcagtcagaatttggacgagaccttgaaaaggacattaggtcagatacatcaggacattttgaacgtttacttgtgtccatgtgccagggaaatcgtgatgagaaccagagtataaaccaccaaatggctcaggaagatgctcagcgtctctatcaagctggtgaggggagactagggaccgatgaatcttgctttaacatgatccttgccacaagaagctttcctcagctgagagctaccatggaggcttattctaggatggctaatcgagacttgttaagcagtgtgagccgtgagttttccggatatgtagaaagtggtttgaagaccatcttgcagtgtgccctgaaccgccctgccttctttgctgagaggctctactatgctatgaaaggtgctggcacagatgactccaccctggtccggattgtggtcactcgaagtgagccttgtcaataaacaatgtcgctgatgttanaacttggccatgatgcggcacagtggatacaactttctgttgggcagagagtttttttaaaaatttat

SEQ ID NO: 402311 - DNA, 1586 bp, Homo sapiens
acagtaactccccattctcctttctcccaactgctggcaacaaaccatgtgactttctgtgcctgtgtttgactactctaggtacgtcatattggtggaatcatacaatatttgtctttttgtgagtgttgtcttttacttagcatagcgtcctcaaggtttattcatgttatagcatgtcagaatttccttccttttgagactgagtaattaaatagtctattgtacgtgtatcccaccttttggttttttttttaattcatctgtgacacttggtttgtttctgcctgaataatgctgctatgaacatggatgtacaaatatctgttcaagtctactttcacttatttggaatatacccagaagtggaatttctaggtcatattgtaattcttgggaagtgttttgttttgctttgaggaattaaccatattagtttccacagcagctgcacccttttacttttccatcaacctgtgtacaagtgttcccatttcatggcatccttgccaatacttactatttttttggttttgataatagccatcctatcaaatgtttttaaatgactaatatctttggaataatagatgaaactagtactaccctgaccaagtattttacagagctgtgaatcagaccttcattgggtagtgctagcattggtatgagtgccagccataaaatgtcagtcacttggtgttttcccccccaagttttgattattattaagatcttattatttaaaaagaattttaagaaatgtcagttgtcacagatgtttttctgacagaaatattatttcttatgcagattgaccttgtacaaataaaacagatgttcgctcagatgtatcagaagactctgggcacaatgattgcaggtgacacgagtggagattaccgaagacttcttctggctattgtgggccagtaggagggatttttttttttttaatgaaaaaaaatttctattcatagcttatccttcagagcaatgacctgcatgcagcaatatcaaacatcagctaaccgaaagagctttctgtcaaggaccgtatcagggtaatgtgcttggtttgcacatgttgttattgccttaattctaattttattttgttctctacatacaatcaatgtaaagccatatcacaatgatacagtaatattgcaatgtttgtaaaccttcattcttactagtttcattctaatcaagatgtcaaattgaataaaaatcacagcaatctctgattctgtgtaataatattgaataattttttagaaggttactgaaagctctgccttccggaatccctctaagtctgcttgatagagtggatagtatgttaaaactgtgtactttaaaaaaaaattcaacctttacatctagaataatttgcatctcattttgcctaaattggttctgtattcataaacactttccacatagaaaatagattagtattacctgtggcaccttttaagaaagggtcaaatgtttatatgcttaagatacatagcctacttttttttcgcagttgttttctttttttaaattgagttatgacaaataaaaaattgcatata

SEQ ID NO: 402312 - DNA, 2446 bp, Homo sapiens
acccggggcccgcccccggctccatcttgcgggagaccgggttgggctgtgacgctgctgctggggtcagaatgtcatacccaggctatcccccaacaggctacccacctttccctggatatcctcctgcaggtcaggagtcatcttttcccccttctggtcagtatccttatcctagtggctttcctccaatgggaggaggtgcctacccacaagtgccaagtagtggctacccaggagctggaggctaccctgcgcctggaggttatccagcccctggaggctatcctggtgccccacagccagggggagctccatcctatcccggagttcctccaggccaaggatttggagtcccaccaggtggagcaggcttttctgggtatccacagccaccttcacagtcttatggaggtggtccagcacaggttccactacctggtggctttcctggaggacagatgccttctcagtatcctggaggacaacctacttaccctagtcagcctgccacagtgactcaggtcactcaaggaactatccgaccagctgccaacttcgatgctataagagatgcagaaattcttcgtaaggcaatgaagggttttgggacagatgagcaggcaattgtggatgtggtggccaaccgttccaatgatcagaggcaaaaaattaaagcagcatttaagacctcctatggcaaggatttaatcaaagatctcaaatcagagttaagtggaaatatggaagaactgatcctggccctcttcatgcctcctacgtattacgatgcctggagcttacggaaagcaatgcagggagcaggaactcaggaacgtgtattgattgagattttgtgcacaagaacaaatcaggaaatccgagaaattgtcagatgttatcagtcagaatttggacgagaccttgaaaaggacattaggtcagatacatcaggacattttgaacgtttacttgtgtccatgtgccagggaaatcgtgatgagaaccagagtataaaccaccaaatggctcaggaagatgctcagcgtctctatcaagctggtgaggggagactagggaccgatgaatcttgctttaacatgatccttgccacaagaagctttcctcagctgagagctaccatggaggcttattctaggatggctaatcgagacttgttaagcagtgtgagccgtgagttttccggatatgtagaaagtggtttgaagaccatcttgcagtgtgccctgaaccgccctgccttctttgctgagaggctctactatgctatgaaaggtgctggcacagatgactccaccctggtccggattgtggtcactcgaagtgagattgaccttgtacaaataaaacagatgttcgctcagatgtatcagaagactctgggcacaatgattgcaggtgacacgagtggagattaccgaagacttcttctggctattgtgggccagtaggagggatttttttttttttaatgaaaaaaaatttctattcatagcttatccttcagagcaatgacctgcatgcagcaatatcaaacatcagctaaccgaaagagctttctgtcaaggaccgtatcagggtaatgtgcttggtttgcacatgttgttattgccttaattctaattttattttgttctctacatacaatcaatgtaaagccatatcacaatgatacagtaatattgcaatgtttgtaaaccttcattcttactagtttcattctaatcaagatgtcaaattgaataaaaatcacagcaatctctgattctgtgtaataatattgaataattttttagaaggttactgaaagctctgccttccggaatccctctaagtctgcttgatagagtggatagtatgttaaaactgtgtactttaaaaaaaaattcaacctttacatctagaataatttgcatctcattttgcctaaattggttctgtattcataaacactttccacatagaaaatagattagtattacctgtggcaccttttaagaaagggtcaaatgtttatatgcttaagatacatagcctacttttttttcgcagttgttttctttttttaaattgagttatgacaaataaaaaattgcatatatttaaggtgtaaaaatatggtgttttgatatcagcattccttgtgtaatgattccacaattaaggtcaggctaattacgtatctgtcaccttgacatagttaccattttttcatgtgtggtgaaaacacttaagatctactaccttagcaaattttaagtgttcagtacattattaactatagatactgtgctctacattaaacctctagcatttattcgttttataactgaaagtttataccctttgaccaacatctccccattttccccacctctcacctggacaaccaccactgtgtttaagttcagctattttagattcc

SEQ ID NO: 402313 - DNA, 2178 bp, Homo sapiens
tccttgtcttgtcttgtcttttctttcaactggagtgcaatgatgcaaacacgactcactgccgccttgacctcctggcctcaagcaattctcccacctcagcttcctgaatagtttggactacagaatgtcatacccaggctatcccccaacaggctacccacctttccctggatatcctcctgcaggtcaggagtcatcttttcccccttctggtcagtatccttatcctagtggctttcctccaatgggaggaggtgcctacccacaagtgccaagtagtggctacccaggagctggaggctaccctgcgcctggaggttatccagcccctggaggctatcctggtgccccacagccagggggagctccatcctatcccggagttcctccaggccaaggatttggagtcccaccaggtggagcaggcttttctgggtatccacagccaccttcacagtcttatggaggtggtccagcacaggttccactacctggtggctttcctggaggacagatgccttctcagtatcctggaggacaacctacttaccctagtcagcctgccacagtgactcaggtcactcaaggaactatccgaccagctgccaacttcgatgctataagagatgcagaaattcttcgtaaggcaatgaagggttttgggacagatgagcaggcaattgtggatgtggtggccaaccgttccaatgatcagaggcaaaaaattaaagcagcatttaagacctcctatggcaaggatttaatcaaagatctcaaatcagagttaagtggaaatatggaagaactgatcctggccctcttcatgcctcctacgtattacgatgcctggagcttacggaaagcaatgcagggagcaggaactcaggaacgtgtattgattgagattttgtgcacaagaacaaatcaggaaatccgagaaattgtcagatgttatcagtcagaatttggacgagaccttgaaaaggacattaggtcagatacatcaggacattttgaacgtttacttgtgtccatgtgccagggaaatcgtgatgagaaccagagtataaaccaccaaatggctcaggaagatgctcagcgtctctatcaagctggtgaggggagactagggaccgatgaatcttgctttaacatgatccttgccacaagaagctttcctcagctgagagctaccatggaggcttattctaggatggctaatcgagacttgttaagcagtgtgagccgtgagttttccggatatgtagaaagtggtttgaagaccatcttgcagtgtgccctgaaccgccctgccttctttgctgagaggctctactatgctatgaaaggtgctggcacagatgactccaccctggtccggattgtggtcactcgaagtgagattgaccttgtacaaataaaacagatgttcgctcagatgtatcagaagactctgggcacaatgattgcaggtgacacgagtggagattaccgaagacttcttctggctattgtgggccagtaggagggatttttttttttttaatgaaaaaaaatttctattcatagcttatccttcagagcaatgacctgcatgcagcaatatcaaacatcagctaaccgaaagagctttctgtcaaggaccgtatcagggtaatgtgcttggtttgcacatgttgttattgccttaattctaattttattttgttctctacatacaatcaatgtaaagccatatcacaatgatacagtaatattgcaatgtttgtaaaccttcattcttactagtttcattctaatcaagatgtcaaattgaataaaaatcacagcaatctctgattctgtgtaataatattgaataattttttagaaggttactgaaagctctgccttccggaatccctctaagtctgcttgatagagtggatagtatgttaaaactgtgtactttaaaaaaaaattcaacctttacatctagaataatttgcatctcattttgcctaaattggttctgtattcataaacactttccacatagaaaatagattagtattacctgtggcaccttttaagaaagggtcaaatgtttatatgcttaagatacatagcctacttttttttcgcagttgttttctttttttaaattgagttatgacaaataaaaaattgcatata

SEQ ID NO: 402314 - DNA, 2067 bp, Homo sapiens
acccggggcccgcccccggctccatcttgcgggagaccgggttgggctgtgacgctgctgctggggtcagcctgcaggtcaggagtcatcttttcccccttctggtcagtatccttatcctagtggctttcctccaatgggaggaggtgcctacccacaagtgccaagtagtggctacccaggagctggaggctaccctgcgcctggaggttatccagcccctggaggctatcctggtgccccacagccagggggagctccatcctatcccggagttcctccaggccaaggatttggagtcccaccaggtggagcaggcttttctgggtatccacagccaccttcacagtcttatggaggtggtccagcacaggttccactacctggtggctttcctggaggacagatgccttctcagtatcctggaggacaacctacttaccctagtcagcctgccacagtgactcaggtcactcaaggaactatccgaccagctgccaacttcgatgctataagagatgcagaaattcttcgtaaggcaatgaagggttttgggacagatgagcaggcaattgtggatgtggtggccaaccgttccaatgatcagaggcaaaaaattaaagcagcatttaagacctcctatggcaaggatttaatcaaagatctcaaatcagagttaagtggaaatatggaagaactgatcctggccctcttcatgcctcctacgtattacgatgcctggagcttacggaaagcaatgcagggagcaggaactcaggaacgtgtattgattgagattttgtgcacaagaacaaatcaggaaatccgagaaattgtcagatgttatcagtcagaatttggacgagaccttgaaaaggacattaggtcagatacatcaggacattttgaacgtttacttgtgtccatgtgccagggaaatcgtgatgagaaccagagtataaaccaccaaatggctcaggaagatgctcagcgtctctatcaagctggtgaggggagactagggaccgatgaatcttgctttaacatgatccttgccacaagaagctttcctcagctgagagctaccatggaggcttattctaggatggctaatcgagacttgttaagcagtgtgagccgtgagttttccggatatgtagaaagtggtttgaagaccatcttgcagtgtgccctgaaccgccctgccttctttgctgagaggctctactatgctatgaaaggtgctggcacagatgactccaccctggtccggattgtggtcactcgaagtgagattgaccttgtacaaataaaacagatgttcgctcagatgtatcagaagactctgggcacaatgattgcaggtgacacgagtggagattaccgaagacttcttctggctattgtgggccagtaggagggatttttttttttttaatgaaaaaaaatttctattcatagcttatccttcagagcaatgacctgcatgcagcaatatcaaacatcagctaaccgaaagagctttctgtcaaggaccgtatcagggtaatgtgcttggtttgcacatgttgttattgccttaattctaattttattttgttctctacatacaatcaatgtaaagccatatcacaatgatacagtaatattgcaatgtttgtaaaccttcattcttactagtttcattctaatcaagatgtcaaattgaataaaaatcacagcaatctctgattctgtgtaataatattgaataattttttagaaggttactgaaagctctgccttccggaatccctctaagtctgcttgatagagtggatagtatgttaaaactgtgtactttaaaaaaaaattcaacctttacatctagaataatttgcatctcattttgcctaaattggttctgtattcataaacactttccacatagaaaatagattagtattacctgtggcaccttttaagaaagggtcaaatgtttatatgcttaagatacatagcctacttttttttcgcagttgttttctttttttaaattgagttatgacaaataaaaaattgcatata

SEQ ID NO: 402315 - DNA, 1812 bp, Homo sapiens
aaacataggctaggtacgaggccgcgtgcttaattcggccgaggccgggttgtgctgtgaagctgctgctggggtcaatgtcatacccaggctatcccccaacaggctacccacctttccctggatatcctgtggctttcctggaggacagatgccttctcagtatcctggaggacaacctacttaccctagtcagcctgccacagtgactcaggtcactcaaggaactatccgaccagctgccaacttcgatgctataagagatgcagaaattcttcgtaaggcaatgaagggttttgggacagatgagcaggcaattgtggatgtggtggccaaccgttccaatgatcagaggcaaaaaattaaagcagcatttaagacctcctatggcaaggatttaatcaaagatctcaaatcagagttaagtggaaatatggaagaactgatcctggccctcttcatgcctcctacgtattacgatgcctggagcttacggaaagcaatgcagggagcaggaactcaggaacgtgtattgattgagattttgtgcacaagaacaaatcaggaaatccgagaaattgtcagatgttatcagtcagaatttggacgagaccttgaaaaggacattaggtcagatacatcaggacattttgaacgtttacttgtgtccatgtgccagggaaatcgtgatgagaaccagagtataaaccaccaaatggctcaggaagatgctcagcgtctctatcaagctggtgaggggagactagggaccgatgaatcttgctttaacatgatccttgccacaagaagctttcctcagctgagagctaccatggaggcttattctaggatggctaatcgagacttgttaagcagtgtgagccgtgagttttccggatatgtagaaagtggtttgaagaccatcttgcagtgtgccctgaaccgccctgccttctttgctgagaggctctactatgctatgaaaggtgctggcacagatgactccaccctggtccggattgtggtcactcgaagtgagattgaccttgtacaaataaaacagatgttcgctcagatgtatcagaagactctgggcacaatgattgcaggtgacacgagtggagattaccgaagacttcttctggctattgtgggccagtaggagggatttttttttttttaatgaaaaaaaatttctattcatagcttatccttcagagcaatgacctgcatgcagcaatatcaaacatcagctaaccgaaagagctttctgtcaaggaccgtatcagggtaatgtgcttggtttgcacatgttgttattgccttaattctaattttattttgttctctacatacaatcaatgtaaagccatatcacaatgatacagtaatattgcaatgtttgtaaaccttcattcttactagtttcattctaatcaagatgtcaaattgaataaaaatcacagcaatctctgattctgtgtaataatattgaataattttttagaaggttactgaaagctctgccttccggaatccctctaagtctgcttgatagagtggatagtatgttaaaactgtgtactttaaaaaaaaattcaacctttacatctagaataatttgcatctcattttgcctaaattggttctgtattcataaacactttccacatagaaaatagattagtattacctgtggcaccttttaagaaagggtcaaatgtttatatgcttaagatacatagcctacttttttttcgcagttgttttctttttttaaattgagttatgacaaataaaaaattgcatata

SEQ ID NO: 402316 - DNA, 1758 bp, Homo sapiens
gtttaccagacgatggcgggcggctccagaagggtaatggaagttggtccagagcatgtttcctatactaggtggttctggtgtagagcaggggttgtctcctaattcatgaagcacggcctatgagactggtctggctggatcagaggctgtcatgtgttcgtgataaactgtatggatagtatggaagtgtgagtctgatgatcagattatacataagtccttggctagcagtgaagggtttgggacagatgagcaggcaattgtggatgtggtggccaaccgttccaatgatcagaggcaaaaaattaaagcagcatttaagacctcctatggcaaggatttaatcaaagatctcaaatcagagttaagtggaaatatggaagaactgatcctggccctcttcatgcctcctacgtattacgatgcctggagcttacggaaagcaatgcagggagcaggaactcaggaacgtgtattgattgagattttgtgcacaagaacaaatcaggaaatccgagaaattgtcagatgttatcagtcagaatttggacgagaccttgaaaaggacattaggtcagatacatcaggacattttgaacgtttacttgtgtccatgtgccagggaaatcgtgatgagaaccagagtataaaccaccaaatggctcaggaagatgctcagcgtctctatcaagctggtgaggggagactagggaccgatgaatcttgctttaacatgatccttgccacaagaagctttcctcagctgagagctaccatggaggcttattctaggatggctaatcgagacttgttaagcagtgtgagccgtgagttttccggatatgtagaaagtggtttgaagaccatcttgcagtgtgccctgaaccgccctgccttctttgctgagaggctctactatgctatgaaaggtgctggcacagatgactccaccctggtccggattgtggtcactcgaagtgagattgaccttgtacaaataaaacagatgttcgctcagatgtatcagaagactctgggcacaatgattgcaggtgacacgagtggagattaccgaagacttcttctggctattgtgggccagtaggagggatttttttttttttaatgaaaaaaaatttctattcatagcttatccttcagagcaatgacctgcatgcagcaatatcaaacatcagctaaccgaaagagctttctgtcaaggaccgtatcagggtaatgtgcttggtttgcacatgttgttattgccttaattctaattttattttgttctctacatacaatcaatgtaaagccatatcacaatgatacagtaatattgcaatgtttgtaaaccttcattcttactagtttcattctaatcaagatgtcaaattgaataaaaatcacagcaatctctgattctgtgtaataatattgaataattttttagaaggttactgaaagctctgccttccggaatccctctaagtctgcttgatagagtggatagtatgttaaaactgtgtactttaaaaaaaaattcaacctttacatctagaataatttgcatctcattttgcctaaattggttctgtattcataaacactttccacatagaaaatagattagtattacctgtggcaccttttaagaaagggtcaaatgtttatatgcttaagatacatagcctacttttttttcgcagttgttttctttttttaaattgagttatgacaaataaaaaattgcatata

SEQ ID NO: 402317 - DNA, 1522 bp, Homo sapiens
acccggggcccgcccccggctccatcttgcgggagaccgggttgggctgtgacgctgctgctggggtcagaatgtcatacccaggctatcccccaacaggctacccacctttccctggatatcctcctgcaggtcaggagtcatcttttcccccttctggtcagtatccttatcctagtggctttcctccaatgggaggaggtgcctacccacaagtgccaagtagtggctacccaggagctggaggctaccctgcgcctggaggttatccagcccctggaggctatcctggtgccccacagccagggggagctccatcctatcccggagttcctccaggccaaggatttggagtcccaccaggtggagcaggcttttctgggtatccacagccaccttcacagtcttatggaggtggtccagcacaggttccactacctggtggctttcctggaggacagatgccttctcagtatcctggaggacaacctacttaccctagtcagcctgccacagtgactcaggtcactcaaggaactatccgaccagctgccaacttcgatgctataagagatgcagaaattcttcgtaaggcaatgaagggttttgggacagatgagcaggcaattgtggatgtggtggccaaccgttccaatgatcagaggcaaaaaattaaagcagcatttaagacctcctatggcaaggatttaatcaaagatctcaaatcagagttaagtggaaatatggaagaactgatcctggccctcttcatgcctcctacgtattacgatgcctggagcttacggaaagcaatgcagggagcaggaactcaggaacgtgtattgattgagattttgtgcacaagaacaaatcaggaaatccgagaaattgtcagatgttatcagtcagaatttggacgagaccttgaaaaggacattaggtcagatacatcaggacattttgaacgtttacttgtgtccatgtgccagggaaatcgtgatgagaaccagagtataaaccaccaaatggctcaggaagatgctcagcgtctctatcaagctggtgaggggagactagggaccgatgaatcttgctttaacatgatccttgccacaagaagctttcctcagctgagagctaccatggaggcttattctaggatggctaatcgagacttgttaagcagtgtgagccgtgagttttccggatatgtagaaagtggtttgaagaccatcttgcagtgtgccctgaaccgccctgccttctttgctgagaggctctactatgctatgaaaggtgctggcacagatgactccaccctggtccggattgtggtcactcgaagtgagattgaccttgtacaaataaaacagatgttcgctcagatgtatcagaagactctgggcacaatgattgcaggtgacacgagtggagattaccgaagacttcttctggctattgtgggccagtaggagggatttttttttttttttttttttttttttttttttttttttttttt

SEQ ID NO: 402318 - DNA, 1170 bp, Homo sapiens
tcgagctcggctacctgtacattcgtgtcatgtgccaggaaatcgtgatgagaaccagagtataaaccaccaaatggctcaggaagatgctcagcgtctctatcaagctggtgaggggagactagggaccgatgaatcttgctttaacatgatccttgccacaagaagctttcctcagctgagagctaccatggaggcttattctaggatggctaatcgagacttgttaagcagtgtgagccgtgagttttccggatatgtagaaagtggtttgaagaccatcttgcagtgtgccctgaaccgccctgccttctttgctgagaggctctactatgctatgaaaggtgctggcacagatgactccaccctggtccggattgtggtcactcgaagtgagattgaccttgtacaaataaaacagatgttcgctcagatgtatcagaagactctgggcacaatgattgcaggtgacacgagtggagattaccgaagacttcttctggctattgtgggccagtaggagggatttttttttttttaatgaaaaaaaatttctattcatagcttatccttcagagcaatgacctgcatgcagcaatatcaaacatcagctaaccgaaagagctttctgtcaaggaccgtatcagggtaatgtgcttggtttgcacatgttgttattgccttaattctaattttattttgttctctacatacaatcaatgtaaagccatatcacaatgatacagtaatattgcaatgtttgtaaaccttcattcttactagtttcattctaatcaagatgtcaaattgaataaaaatcacagcaatctctgattctgtgtaataatattgaataattttttagaaggttactgaaagctctgccttccggaatccctctaagtctgcttgatagagtggatagtatgttaaaactgtgtactttaaaaaaaaattcaacctttacatctagaataatttgcatctcattttgcctaaattggttctgtattcataaacactttccacatagaaaatagattagtattacctgtggcaccttttaagaaagggtcaaatgtttatatgcttaagatacatagcctacttttttttcgcagttgttttctttttttaaattgagttatgacaaataaaaaattgcatata

SEQ ID NO: 402319 - DNA, 412 bp, Homo sapiens
agccatacaggagaacaaagaatctcagggtatcagagagaggaggcaacatagccaagtccagtatgagaaacctgccttctggggatttcttcatatagctgttctttcagctggtctttccagcttctgtctgcccccagtaggttgcctcaaaagcccagttttcctttgatcattccaagccccagcgaaatacctctttaatgcttaatgtggcagtcacctttggatctgacttcccttctgacagttcaccaccctgtgaactggttccattgtcttccctggaaaggtagttccctttcttagcctcttattcacttctgttggcctctttttccttcctgctgtttctcctaaaacattttgctggccttcaataataaaagctttgcctaaaaaaaaaaaa

SEQ ID NO: 402320 - DNA, 484 bp, Homo sapiens
agccatacaggagaacaaagaatctcagggtatcagagagaggaggcaacatagccaagtccagtatgagaaacctgccttctggggatttcttcatatagctgttctttcagctggtctttccagcttctgtctgcccccagtaggttgcctcaaaagcccagttttcctttgatcattccaagccccagcgaaatacctctttaatgcttaatgtggcagtcacctttggatctgacttcccttctgacagttcaccaccctgtgaactggttccattgtcttccctggaaaggtagttccctttcttagcctcttattcacttctgttggcctctttttccttcctgctgtttctcctaaaacattttgctggccttcaataatattggtgtccaaattcagtttggggcctaccaccgttttatgtctctgtgggttacaattttctttgaggaatgtcctcattaccatatatttttaa

SEQ ID NO: 402321 - DNA, 329 bp, Homo sapiens
atacagctaagtacttttaacttatttttttaagccggcattggaagagaaaaatgtttttccattttatcttaaaaatctttttaataaggtattttccaaaatctctgttgcccatgagctagcaattctaattgctatgtcaagggtaattaattttatatactctcaaagccactctaatccttctatctccagattgcaaaactttgcagaacagcggctcccacttcaccttcatgaagcaaatttccagtctgctgagtacttcagcatcttggtacattaagtttctatctgtttgaattgatcaggaagaaactagcagg

SEQ ID NO: 402322 - DNA, 549 bp, Homo sapiens
cagaatatatactgaaaggaggcttgttcattgcattagtttttaaaaatgatccatagcatgtgtgtgtgttttctcatctataaaatggagatacacccctctcagaggatggttgtggtgattcagcgaggtcgtggctgtgaaagcccctttagacaatacctgcacagagtcggtgtaaatgtcactcctgttttttctgctccccaccccctcctgaactagatatcagctattttggcttaacagcttctttctcatcttaggcctgcctgaaaacgttatagttccctttctggcaggcggtggtttcaatgagtacgtatactttgaattattataaatagttgagggacaggctgcctaaagtctaattggagagttaacctaatgtctgtgaaactaatgaacaaaacgagatagtgtagatcaggaatgtccagtcttttggcttccctgggccactttggaagaattgctttgggccacacataaaatacactgatactaatgatagctgatgagctaacaacaacaaaaagcaaa

SEQ ID NO: 402323 - DNA, 480 bp, Homo sapiens
ttggtttatcactaactgttcagattctgaaggtattaatatgactggaaagaccatctgaggcttgtacagttctggcgtaagtcaaaatcctggttgatgacattccttctttagcaccacgtatgctacatcttcctttgccttttacattcttagagaaaaggaagaggggactggagacttgggctttctggggcatagggcagttggggcagcagaggatgatgccaccatccttactctacagcttcactattgtcttacggggacttttttcctgtgggctttcacccagcaaaagcagcagccgtcaatcatatccttgccagagagattcttaatataggagaaactgtaataaggagaaactacgtagaagtagcctgcctagcactacgttcgtaagttttaatggttggcaaaccccgagaggtggttaggacccttggcgatgtacatagcagcattgtacagctg

SEQ ID NO: 402324 - DNA, 487 bp, Homo sapiens
tttattcctcaatttatcatcaaataattgtttcgactgtgaggaaaggcagactgtgaccctgatatgaagctatttggggaggaatttagcttcacatttaggattctccttttaggcttcaaagtaaagcattattcatctattatatttctgtttttcatcaacatgtacggacccttacatatggccagccacttcatcttcaagctgtgatgccaggattggagggcaagaacaggaaacaatgactttggtgaaagtgtaaccactcttttagaacaaaaacagcacagtgttatttgaaaaattattaacatatgtgatggagcagtctgtaagcacgatcaaataaactggccaaagatgaggctaattgtaaatgggaataaaacacaccacaaacaattcacaaaaaacagattttaaaatactctcctttcatttccccattagctaaacaataaactgaaatctattcttacca

SEQ ID NO: 402325 - DNA, 887 bp, Homo sapiens
gccactgccctgtcaacttcacagtggggagagcctttctgcctgtaacaggaggactaatggctgatttcttacgaaagggcatagccttcagcacatttatcaatttgctttaggttctgagcttggactacagaaaatctttaaatttacagaaaccatcatgtatcttaattttaatgaaacacagtattcatttagtatttacagcatctaagctactgaaattgggggtaaacaaacaaaagcagggcaataaaaatgcaaacgttagaatcctaggtaggcaaataattgactcttcacagggaagttttaaatctgagaaattttaaattttgatcccagaggcccacatgtatcctaactttctacaccatataaaactgaaagaaattcctcttccaggtaagaagcacatcactgtctttggaagtacagaaggagaatcatctgatgacagccttgtcgatttggctgttgggcttggtgtccggttcatcaagttggggggtctttcccgtggtgaacgagtgactaaatacaaccgccttctcactatagaggaagaacttgtccagaatggaacactggccacttcatcttcaagctgtgatgccaggattggagggcaagaacaggaaacaatgactttggtgaaagtgtaaccactcttttagaacaaaaacagcacagtgttatttgaaaaattattaacatatgtgatggagcagtctgtaagcacgatcaaataaactggccaaagatgaggctaattgtaaatgggaataaaacacaccacaaacaattcacaaaaaacagattttaaaatactctcctttcatttccccattagctaaacaataaactgaaatctattcttacca

SEQ ID NO: 402326 - DNA, 973 bp, Homo sapiens
gcaggacgcggggagcagcaggcagagcagcggcccgaggcggcggggaccggcccgcgggctccatgggccgcggctacgccgcccgcgagggctggaaggcactagaagcgccgccggggctgcccagaggccgggtccccgctccactttgcgcaaacttgtttttctgaggtcagcgctgcgagctggctacatcgtcctcttaaggtggcctggggaagttgcggcgacctcccctcgcctccggactccggccgcgcggctactcccgcttcccactggcgagaggctggaggcggcgaaggagtcggggagtggaggcgcgggggtgggggggtgtctgccttttaaccctccccaagaggtcgtgcctctgagccccaaagctgaaggcccctcttgggggtgggtgcgggccggaggggaccgatcctttcagagccgtgccgaggtgaaggaaaagctggagtggactttctgttccgggagaacatccaagatgtgctatctgcgctgcccaatcctgatgactacttcctcctgcgctggctccgaggaaaagggccccaaggcccaccaaggggcatgcccagggaatcaaggagcctgtgtccagtgttcctgggtctccggatatctcagccattgtggctccccaggtcaagaacaaggccctctggctcggagctttgacctgcagaaatcagaggacatgctgaggaagcatatggagttccggaagcaacaagacctggccaacatccttgcctggcagcccccagaggtggtcaggctgtacaacgctaacggcatatgcggccacgacggtgagggcagccctgtctggtaccacattgtgggaagcctggaccccaaaggcctcttgctctcagcctccaaacaggagttgctcagggacagcttccggagctgcgagctgctcctgcgggagtgtgagctgcagagtcag

SEQ ID NO: 402327 - DNA, 871 bp, Homo sapiens
  misc_feature (670)..(670): n is a, c, g, or t
  misc_feature (680)..(680): n is a, c, g, or t
  misc_feature (682)..(682): n is a, c, g, or t
  misc_feature (685)..(686): n is a, c, g, or t
  misc_feature (695)..(695): n is a, c, g, or t
  misc_feature (705)..(705): n is a, c, g, or t
  misc_feature (707)..(708): n is a, c, g, or t
  misc_feature (710)..(711): n is a, c, g, or t
  misc_feature (721)..(721): n is a, c, g, or t
gcaggacgcggggagcagcaggcagagcagcggcccgaggcggcggggaccggcccgcgggctccatgggccgcggctacgccgcccgcgagggctggaaggcactagaagcgccgccggggctgcccagaggccgggtccccgctccactttgcgcaaacttgtttttctgaggtcagcgctgcgagctggctacatcgtcctcttaaggtggcctggggaagttgcggcgacctcccctcgcctccggactccggccgcgcggctactcccgcttcccactggcgagaggctggaggcggcgaaggagtcggggagtggaggcgcgggggtgggggggtgtctgccttttaaccctccccaagaggtcgtgcctctgagccccaaagctgaaggcccctcttgggggtgggtgcgggccggaggggaccgatcctttcagagccgtgccgaggtgaaggaaaagctggagtggactttctgttccgggagaacatccaagatgtgctatctgcgctgcccaatcctgatgactacttcctcctgcgctggctccgagctcggagctttgacctgcagaaatcagaggacatgctgaggaagcatatggagttccggaagcaacaagacctggccaacatccttgcctggcagcccccagagctggggnagacaggggngnacnncatagctcnttggtctcgnanngnnggcctgcggnatcggcggctgccggaatagcagcctccaggagtttctagcactgacgatctccgtgatcggcagttatgtcgtaacgcccgagtacacgcacaccacctggccgtcacgcggatgcccggcaggccaacgcaacactccggcgacctcc

SEQ ID NO: 402328 - DNA, 528 bp, Homo sapiens
ttaataaactctgcactaggctaaggttccaactcactccctggaggatgctacgtctcacaggaagattacagaggcgattgcagtatgaaggcaaccagccatgtcgttgctgtctgacaaatgggatgcgattttcttgtgctttacacttggggctcagattattttcgtggaaaatttttagcactttgagatgttataacactggcatcctagagaccgaaatatgaaataacttagtacaaaataggtcctcgtgggaagccaatgtgcacgttttcccaccatattctgccaacggtgcactattctcaactactccatttatctctacggggcaaataatggatgtgttccagcacccactcaatttctgtgttttcgtctagctgaaataataatagatgtaaaatatggctctctgtctaaaattagcctctggttagacactatcagctaccactcaacacaaggaaattttacacagaaataaaatgattacataggtagaatgatgcatgattt

SEQ ID NO: 402329 - DNA, 249 bp, Homo sapiens
ctgtatccggggagcaacacagcataaatataaccctctttagtaagatgggcctttcactagctgaagccaatcattatggctcccctaagttttttatccagttatcctttggataaaaataagtaatgcgctcaggggagatggcgtgttggtttactctgcctcttgtgcccccagactgtctactgttgtcgaagagcattgacatacggggtgtgacatgaacacgaactcgcgcgggaacag

SEQ ID NO: 402330 - DNA, 1747 bp, Homo sapiens
ctgtatccggggagcaacacagcataaatataaccctctttagtaagatgggcctttcactagctgaagccaatcattatggctcccctaagttttttatccagttatcctttggataaaaataagtaatgcgctcaggggagatggcgtgttggtttactctgcctcttgtgcccccagatgtctactgttgtggagctgaacgtcgggggtgagttccacaccaccaccctgggtaccctgaggaagtttccgggctcaaagctggcagagatgttctctagcttagccaaggcctccacggacgcggagggccgcttcttcatcgaccgccccagcacctatttcagacccatcctggactacctgcgcactgggcaagtgcccacacagcacatccctgaagtgtaccgtgaggctcagttctacgaaatcaagcctttggtcaagctgctggaggacatgccacagatctttggtgagcaggtgtctcggaagcagtttttgctgcaagtgccgggctacagcgagaacctggagctcatggtgcgcctggcacgtgcagaagccataacagcacggaagtccagcgtgcttgtgtgcctggtggaaactgaggagcaggatgcatattattcagaggtcctgtgttttctgcaggataagaagatgttcaagtctgttgtcaagtttgggccctggaaggcggtcctagacaacagcgacctcatgcactgcctggagatggacattaaggcccaggggtacaaggtattctccaagttctacctgacgtaccccaccaaaagaaacgaattccattttaacatttattcattcaccttcacctggtggtgatcctcaggagcagagactgttatgaattctggcgtggcttatgaaattaaaagttgccatcaaagccattttcttttaatttcacaaacatcaggcaatttccagggttggtctagagtcttgccactaaatattgatcactcgtttaaggactttccactccattgcaactgatgccactatatttgcctagcaacttgcagctacttccttttcaaagcctcatgtatctcccagacccttctcttgaagtccaataacaagaccaagtaagaatgtttcaacaatgcgttggcaagagatgtgagatgacaacaggaacatacaagatactgtgaatctagatgttctgacctaaagatgtagtctacatagccccagcttggggtccaatccatctgtccctggcatgtgccttcatgtagtaggtgctttcctgatcccctttgcgagatgctgtgggtgctaacacctcagagctgtcctcttctctagagtggaggttttcaaagtgcatcatcagcattacctgtgaacttgctggaaatacaaatcctcaggccccacctcagacctactgaatcagaatctctgggggttggcacagcattctgatttaccaaaccctccaagtgattttgatgtattctaattttgagaccatctctagaaaagaattgctacctcttgtatggaggtacaaaagactgacctcttacatcaaggaacttcctttcccagagctcctcatggaatcaagctgaagtcagtcttcttctgagagcacattcttactcagtttttttcctctgtcctacgctgcttccctcactccccttctcctaagagcactccatcaataaaccacttgcacgagaaaaatcagttt

SEQ ID NO: 402331 - DNA, 516 bp, Homo sapiens
gtaagttttgcttttccgtggggctgggctggtctgggggatttttccattctccaaatttcttctctcccctttgcgagatgctgtgggtgctaacacctcagagctgtcctcttctctagagtggaggttttcaaagtgcatcatcagcattacctgtgaacttgctggaaatacaaatcctcaggccccacctcagacctactgaatcagaatctctgggggttggcacagcattctgatttaccaaaccctccaagtgattttgatgtattctaattttgagaccatctctagaaaagaattgctacctcttgtatggaggtacaaaagactgacctcttacatcaaggaacttcctttcccagagctcctcatggaatcaagctgaagtcagtcttcttctgagagcacattcttactcagtttttttcctctgtcctacgctgcttccctcactccccttctcctaagagcactccatcaataaaccacttgcacgagaaaaatcagttt

SEQ ID NO: 402332 - DNA, 1667 bp, Homo sapiens
agtgatctgcatgtggcagggctgcgcagtggagcggccagtgggcaggatgacgagccagacccctctgccccagtccccccggcccaggcggccgacgatgtctactgttgtggagctgaacgtcgggggtgagttccacaccaccaccctgggtaccctgaggaagtttccgggctcaaagctggcagagatgttctctagcttagccaaggcctccacggacgcggagggccgcttcttcatcgaccgccccagcacctatttcagacccatcctggactacctgcgcactgggcaagtgcccacacagcacatccctgaagtgtaccgtgaggctcagttctacgaaatcaagcctttggtcaagctgctggaggacatgccacagatctttggtgagcaggtgtctcggaagcagtttttgctgcaagtgccgggctacagcgagaacctggagctcatggtgcgcctggcacgtgcagaagccataacagcacggaagtccagcgtgcttgtgtgcctggtggaaactgaggagcaggatgcatattattcagaggtcctgtgttttctgcaggataagaagatgttcaagtctgttgtcaagtttgggccctggaaggcggtcctagacaacagcgacctcatgcactgcctggagatggacattaaggcccaggggtacaaggtattctccaagttctacctgacgtaccccaccaaaagaaacgaattccattttaacatttattcattcaccttcacctggtggtgatcctcaggagcagagactgttatgaattctggcgtggcttatgaaattaaaagttgccatcaaagccattttcttttaatttcacaaacatcaggcaatttccagggttggtctagagtcttgccactaaatattgatcactcgtttaaggactttccactccattgcaactgatgccactatatttgcctagcaacttgcagctacttccttttcaaagcctcatgtatctcccagacccttctcttgaagtccaataacaagaccaagtaagaatgtttcaacaatgcgttggcaagagatgtgagatgacaacaggaacatacaagatactgtgaatctagatgttctgacctaaagatgtagtctacatagccccagcttggggtccaatccatctgtccctggcatgtgccttcatgtagtaggtgctttcctgatcccctttgcgagatgctgtgggtgctaacacctcagagctgtcctcttctctagagtggaggttttcaaagtgcatcatcagcattacctgtgaacttgctggaaatacaaatcctcaggccccacctcagacctactgaatcagaatctctgggggttggcacagcattctgatttaccaaaccctccaagtgattttgatgtattctaattttgagaccatctctagaaaagaattgctacctcttgtatggaggtacaaaagactgacctcttacatcaaggaacttcctttcccagagctcctcatggaatcaagctgaagtcagtcttcttctgagagcacattcttactcagtttttttcctctgtcctacgctgcttccctcactccccttctcctaagagcactccatcaataaaccacttgcacgagaaaaatcagttt

SEQ ID NO: 402333 - DNA, 1611 bp, Homo sapiens
agtgatctgcatgtggcagggctgcgcagtggagcggccagtgggcaggatgacgagccagacccctctgccccagtccccccggcccaggcggccgacgatgtctactgttgtggagctgaacgtcgggggtgagttccacaccaccaccctgggtaccctgaggaagtttccgggctcaaagctggcagagatgttctctagcttagccaaggcctccacggacgcggagggccgcttcttcatcgaccgccccagcacctatttcagacccatcctggactacctgcgcactgggcaagtgcccacacagcacatccctgaagtgtaccgtgaggctcagttctacgaaatcaagcctttggtcaagctgctggaggacatgccacagatctttggtgagcaggtgtctcggaagcagtttttgctgcaagtgccgggctacagcgagaacctggagctcatggtgcgcctggcacgtgcagaagccataacagcacggaagtccagcgtgcttgtgtgcctggtggaaactgaggagcaggatgcatattattcagaggtcctgtgttttctgcaggataagaagatgttcaagtctgttgtcaagtttgggccctggaaggcggtcctagacaacagcgacctcatgcactgcctggagatggacattaaggcccaggggtacaaggtattctccaagttctacctgacgtaccccaccaaaagaaacgaattccattttaacatttattcattcaccttcacctggtggtgatcctcaggagcagagactgttatgaattctggcgtggcttatgaaattaggttggtctagagtcttgccactaaatattgatcactcgtttaaggactttccactccattgcaactgatgccactatatttgcctagcaacttgcagctacttccttttcaaagcctcatgtatctcccagacccttctcttgaagtccaataacaagaccaagtaagaatgtttcaacaatgcgttggcaagagatgtgagatgacaacaggaacatacaagatactgtgaatctagatgttctgacctaaagatgtagtctacatagccccagcttggggtccaatccatctgtccctggcatgtgccttcatgtagtaggtgctttcctgatcccctttgcgagatgctgtgggtgctaacacctcagagctgtcctcttctctagagtggaggttttcaaagtgcatcatcagcattacctgtgaacttgctggaaatacaaatcctcaggccccacctcagacctactgaatcagaatctctgggggttggcacagcattctgatttaccaaaccctccaagtgattttgatgtattctaattttgagaccatctctagaaaagaattgctacctcttgtatggaggtacaaaagactgacctcttacatcaaggaacttcctttcccagagctcctcatggaatcaagctgaagtcagtcttcttctgagagcacattcttactcagtttttttcctctgtcctacgctgcttccctcactccccttctcctaagagcactccatcaataaaccacttgcacgagaaaaatcagttt

SEQ ID NO: 402334 - DNA, 1700 bp, Homo sapiens
aatgggaaggcaacagacagacccaagtggcagcagtcttacttgaaggctaatcccaagaagttgctgccctgggacactcagcgggaaagagagcaggctctgtgtgtcgccatctgctttaggtttcccattggttaatgaagcccatgcatcttggaaccctgatagttgtactctttagaaaggaaaatgactaattcttttagagcagtgttatgaaagacgtgtctgttgttaatttttaatggaagtgctttggcattaaaagcccagcaggctattaggtttacattacaataacaataattcactgtcccttagtttccttttattctgaatcctcttttggggatgccttttaattgccttctcattggcttttgttcatctttcctgttgcttttgctcccatattgtccttctctagttctatcaggcaatagatcatcttgttggttttcagagaaatcccaacctgaggttaaattcaaatgccgaatttggttgttggttcttattttaatttggaggaagccagcagagatgcttgtttggttatatatggttattaatttttacttataatatagcggttcctcaattggtatatccaggtgttacaccgcatggtattacatacaaaaccaaaaacatgagcaaattctttttaagggtcttaagaaaagttttatttgccaaccacggcaatactgaaagtaatagatactttaaaagaaaaaacatatatatatgcccacattacactaatcattgacatgaaagcaaggtacccaccctcacatgtttaatgtggaaactgaatctgcctttttcttcatttccccagattatcttctcattagaatatgaatggataaaaggaatgaatgtattgtttcatctatacaaggaaactaaccctaatgcacagggcttttggggtggttgaatatatatatatcttctgattttggcctctcttatacatgctttcctctcctgctctgtgcagtagcttttccagaactatggacaaattgatcagaagaagattgattatttcctcatctttttttcttttttttgagacagagtctctctctgtcccccaggctgaagtgcagcggcatgatctcagctcactgcaacctctgcctcccgggttcaagtgattctcctgcctcagcctcctgagtagctgggattacaggcacccaccaccacacctggctaattttttgtatttttagtagagacagggttttaccatgttggtcaggctggtctcaaactcctgacctcaggtgatccacctgcctcggcctcccaaagtgctgggattacaggcgtgagccactgcgcccggcctatttccccacctttcgtgtaaggtgctactgaacatgacagcttcttgtcatgacaggaaacttgcatcagttggatatccttttgagaaactgaattttgcaaagggccaaatttccccaaactgaacgggctcaggaaatgttcctttacactcagaacattctattttaagtatattatttattgttggcagttcctcagggatttcccttttctctgtattggtcagtgtagttgatgtaaaaccgttttgtggatggaaaatatttttattttattgctcttttagtttggtaggttaaataaaggttcttggtaatttggga

SEQ ID NO: 402335 - DNA, 2603 bp, Homo sapiens
tatgagaaaaggatcataactcctatcctatcattggagaaaatgaaacacaaagagttttgacatgttgctctccccaaatgaacagtgaagaatttcttgtgcctgggattgaggaaactttttgtgaaactggcaacttcaaagaccgcagtagaggactcagacaaagcatacatgctgcacatcggcaccctggataaggtccgagaagagtggcagagtgagcacatcaaggcctgcgaggcatttgaggctcaagaatgtgaacgaataaacttcttccggaatgcattgtggttacatgtgaatcagctgtcacaacaatgtgtcaccagtgatgaaaattgggttaaacccccgggggccaaaaaaaaaccccccccaaaaaaaaaggggggccttttcccccccccatgtacgaacaagtccgaaagagtttagaaatgtgcagcattcagagggacattgaatactttgtgaatcaacgcaaaactggacagattccaccagcacccatcatgcatgagaatttctactcctcccagaagaatgcagtcccagcaggaaaggctacagggcctaacttggcaaggagaggacccctcccaattcctaaaagctcaccagatgatcccaattactctttggttgatgactacagtttgctctatcagtaaaatcaatgaaaccagagctttttccggctagtgcttctgtgatatggaaagggcacccagagcagcaggacctatagccacgttatgtcagcaatgaagactttgaagtgaacccttgctataattttttagagatttaaaatttatggtagacatttaggacaacataagcaagtagagttctgcagttttttgaagtttacaaattgccccattctgaagaattattctttcccagttactcaggttatgaatgaattaggttttcaacatgggaagcatgaaatccacttctggatttggagcatccacttgaggagcagaggtggcagcagaggattctgagccaccaactgcagtagtggctcctttggctttgggcagcctggctgtggagtttccacggcgacacacagcctcagtggtgcaagatttaaaattaccttcctttttggctggaagacttagaagccgcctgatcatactttctcattttacagatgaggaaataaagcctacaagtgtgaaattaatttccttacagttttcctagctgatgagggacagaaccagaactagagcctgagcccaacccacatcactattcttctaacccttcctgaagttgtgatgctcatgctgaaatttaagatgccaaatatttttgccagcactttttcagttgggagaatcaccagggtttaaatgtcagatttatttttatgtggatccctgtgtatgctgaactacagagcatgatgtttaatctaatttaaggagccactgattgtaaaacatgccattattttatgttgcactaagaaggtggggtcgaggagttgccaataaacttgggacagactattgatggccaagcccatctgaatttaagatgctaaagtatgaaaaaaatacatcttagaatcaatgaaataccatattttgattccattcctcaagataattttagagttataaaaccagtcctcaattttgggtcttcacagagaatctttcccttgctagaccccagaattttaaatgcatccgtcttacactttcacaaatatttgggttttcctttttcactcacaaacagcagggaggtcatgtactttttgtacaacacctgtgcactatgagaaaatggtaccttttagttattgacaagttaaaatagcactctcagtttttcagtattacagagagcaaatagtttcctctcctgctctgtgcagtagcttttccagaactatggacaaattgatcagaagaagattgattatttcctcatctttttttcttttttttgagacagagtctctctctgtcccccaggctgaagtgcagcggcatgatctcagctcactgcaacctctgcctcccgggttcaagtgattctcctgcctcagcctcctgagtagctgggattacaggcacccaccaccacacctggctaattttttgtatttttagtagagacagggttttaccatgttggtcaggctggtctcaaactcctgacctcaggtgatccacctgcctcggcctcccaaagtgctgggattacaggcgtgagccactgcgcccggcctatttccccacctttcgtgtaaggtgctactgaacatgacagcttcttgtcatgacaggaaacttgcatcagttggatatccttttgagaaactgaattttgcaaagggccaaatttccccaaactgaacgggctcaggaaatgttcctttacactcagaacattctattttaagtatattatttattgttggcagttcctcagggatttcccttttctctgtattggtcagtgtagttgatgtaaaaccgttttgtggatggaaaatatttttattttattgctcttttagtttggtaggttaaataaaggttcttggtaatttggga

SEQ ID NO: 402336 - DNA, 1844 bp, Homo sapiens
cacgcgtcgcccacgcgtccgctttgaagtgaacccttgctataattttttagagatttaaaatttatggtagacatttaggacaacataagcaagtagagttctgcagttttttgaagtttacaaattgccccattctgaagaattattctttcccagttactcaggttatgaatgaattaggttttcaacatgggaagcatgaaatccacttctggatttggagcatccacttgaggagcagaggtggcagcagaggattctgagccaccaactgcagtagtggctcctttggctttgggcagcctggctgtggagtttccacggcgacacacagcctcagtggtgcaagatttaaaattaccttcctttttggctggaagacttagaagccgcctgatcatactttctcattttacagatgaggaaataaagcctacaagtgtgaaattaatttccttacagttttcctagctgatgagggacagaaccagaactagagcctgagcccaacccacatcactattcttctaacccttcctgaagttgtgatgctcatgctgaaatttaagatgccaaatatttttgccagcactttttcagttgggagaatcaccagggtttaaatgtcagatttatttttatgtggatccctgtgtatgctgaactacagagcatgatgtttaatctaatttaaggagccactgattgtaaaacatgccattattttatgttgcactaagaaggtggggtcgaggagttgccaataaacttgggacagactattgatggccaagcccatctgaatttaagatgctaaagtatgaaaaaaatacatcttagaatcaatgaaataccatattttgattccattcctcaagataattttagagttataaaaccagtcctcaattttgggtcttcacagagaatctttcccttgctagaccccagaattttaaatgcatccgtcttacactttcacaaatatttgggttttcctttttcactcacaaacagcagggaggtcatgtactttttgtacaacacctgtgcactatgagaaaatggtaccttttagttattgacaagttaaaatagcactctcagtttttcagtattacagagagcaaatagtttcctctcctgctctgtgcagtagcttttccagaactatggacaaattgatcagaagaagattgattatttcctcatctttttttcttttttttgagacagagtctctctctgtcccccaggctgaagtgcagcggcatgatctcagctcactgcaacctctgcctcccgggttcaagtgattctcctgcctcagcctcctgagtagctgggattacaggcacccaccaccacacctggctaattttttgtatttttagtagagacagggttttaccatgttggtcaggctggtctcaaactcctgacctcaggtgatccacctgcctcggcctcccaaagtgctgggattacaggcgtgagccactgcgcccggcctatttccccacctttcgtgtaaggtgctactgaacatgacagcttcttgtcatgacaggaaacttgcatcagttggatatccttttgagaaactgaattttgcaaagggccaaatttccccaaactgaacgggctcaggaaatgttcctttacactcagaacattctattttaagtatattatttattgttggcagttcctcagggatttcccttttctctgtattggtcagtgtagttgatgtaaaaccgttttgtggatggaaaatatttttattttattgctcttttagtttggtaggttaaataaaggttcttggtaatttggga

SEQ ID NO: 402337 - DNA, 422 bp, Homo sapiens
gcaggctgctcaggtggagatgatgttagatagttggaaatgtcggtaggaactcagttagaacattggtatctgggatcatcattactttttaccctcagaactatttccaagcctgtttgtgttactgtgatattaggatttgtttgcattctttgtgatatgagtttatgagtttcctcagtggtgggggagaagcattctaaattggacaataagtttacagataactgaaggttgacactgtttcttaagtcacagctagccaaaatgaatggtccttttccttgcatatctatgtacacgtagctatttttctgtaggcatttgaggctcaagaatgtgaacgaataaacttcttccggaatgcattgtggttacatgtgaatcagctgtcacaacaatgtgtcaccagtgatgaa

SEQ ID NO: 402338 - DNA, 2625 bp, Homo sapiens
gccaggaagatggaagaattcagggaaaagcaaaaactacaacgaaaaaagacagagctcataatggatgctatccataaacaaaagagcttacaattcaagaaaaccatggatgcaaagaagaactatgagcagaaatgccgggacaaagatgaggcagaacaggccgtcagccggagtgccaacctggtgaacccgaagcaacaagaaaagctttttgtgaaactggcaacttcaaagaccgcagtagaggactcagacaaagcatacatgctgcacatcggcaccctggataaggtccgagaagagtggcagagtgagcacatcaaggcctgcgaggcatttgaggctcaagaatgtgaacgaataaacttcttccggaatgcattgtggttacatgtgaatcagctgtcacaacaatgtgtcaccagtgatgaaatgtacgaacaagtccgaaagagtttagaaatgtgcagcattcagagggacattgaatactttgtgaatcaacgcaaaactggacagattccaccagcacccatcatgcatgagaatttctactcctcccagaagaatgcagtcccagcaggaaaggctacagggcctaacttggcaaggagaggacccctcccaattcctaaaagctcaccagatgatcccaattactctttggttgatgactacagtttgctctatcagtaaaatcaatgaaaccagagctttttccggctagtgcttctgtgatatggaaagggcacccagagcagcaggacctatagccacgttatgtcagcaatgaagactttgaagtgaacccttgctataattttttagagatttaaaatttatggtagacatttaggacaacataagcaagtagagttctgcagttttttgaagtttacaaattgccccattctgaagaattattctttcccagttactcaggttatgaatgaattaggttttcaacatgggaagcatgaaatccacttctggatttggagcatccacttgaggagcagaggtggcagcagaggattctgagccaccaactgcagtagtggctcctttggctttgggcagcctggctgtggagtttccacggcgacacacagcctcagtggtgcaagatttaaaattaccttcctttttggctggaagacttagaagccgcctgatcatactttctcattttacagatgaggaaataaagcctacaagtgtgaaattaatttccttacagttttcctagctgatgagggacagaaccagaactagagcctgagcccaacccacatcactattcttctaacccttcctgaagttgtgatgctcatgctgaaatttaagatgccaaatatttttgccagcactttttcagttgggagaatcaccagggtttaaatgtcagatttatttttatgtggatccctgtgtatgctgaactacagagcatgatgtttaatctaatttaaggagccactgattgtaaaacatgccattattttatgttgcactaagaaggtggggtcgaggagttgccaataaacttgggacagactattgatggccaagcccatctgaatttaagatgctaaagtatgaaaaaaatacatcttagaatcaatgaaataccatattttgattccattcctcaagataattttagagttataaaaccagtcctcaattttgggtcttcacagagaatctttcccttgctagaccccagaattttaaatgcatccgtcttacactttcacaaatatttgggttttcctttttcactcacaaacagcagggaggtcatgtactttttgtacaacacctgtgcactatgagaaaatggtaccttttagttattgacaagttaaaatagcactctcagtttttcagtattacagagagcaaatagtttcctctcctgctctgtgcagtagcttttccagaactatggacaaattgatcagaagaagattgattatttcctcatctttttttcttttttttgagacagagtctctctctgtcccccaggctgaagtgcagcggcatgatctcagctcactgcaacctctgcctcccgggttcaagtgattctcctgcctcagcctcctgagtagctgggattacaggcacccaccaccacacctggctaattttttgtatttttagtagagacagggttttaccatgttggtcaggctggtctcaaactcctgacctcaggtgatccacctgcctcggcctcccaaagtgctgggattacaggcgtgagccactgcgcccggcctatttccccacctttcgtgtaaggtgctactgaacatgacagcttcttgtcatgacaggaaacttgcatcagttggatatccttttgagaaactgaattttgcaaagggccaaatttccccaaactgaacgggctcaggaaatgttcctttacactcagaacattctattttaagtatattatttattgttggcagttcctcagggatttcccttttctctgtattggtcagtgtagttgatgtaaaaccgttttgtggatggaaaatatttttattttattgctcttttagtttggtaggttaaataaaggttcttggtaatttggga

SEQ ID NO: 402339 - DNA, 1596 bp, Homo sapiens
gccaggaagatggaagaattcagggaaaagcaaaaactacaacgaaaaaagacagagctcataatggatgctatccataaacaaaagagcttacaattcaagaaaaccatggatgcaaagaagaactatgagcagaaatgccgggacaaagatgaggcagaacaggccgtcagccggagtgccaacctggtgaacccgaagcaacaagaaaagctttttgtgaaactggcaacttcaaagaccgcagtagaggactcagacaaagcatacatgctgcacatcggcaccctggataaggtccgagaagagtggcagagtgagcacatcaaggcctgcgaggcatttgaggctcaagaatgtgaacgaataaacttcttccggaatgcattgtggttacatgtgaatcagctgtcacaacaatgtgtcaccagtgatgaaatgtacgaacaagtccgaaagagtttagaaatgtgcagcattcagagggacattgaatactttgtgaatcaacgcaaaactggacagattccaccagcacccatcatgcatgagaatttctactcctcccagaagaatgcagtcccagcaggaaaggctacagggcctaacttggcaaggagaggacccctcccaattcctaaaagctcaccagatgatcccaattactctttggttgatgactacagtttgctctatcagtaaaatcaatgaaaccagagctttttccggctagtgcttctgtgatatggaaagggcacccagagcagcaggacctatagccacgttatgtcagcaatgaagactttgaagtgaacccttgctataattttttagagatttaaaatttatggtagacatttaggacaacataagcaagtagagttctgcagttttttgaagtttacaaattgccccattctgaagaattattctttcccagttactcaggttatgaatgaattaggttttcaacatgggaagcatgaaatccacttctggatttggagcatccacttgaggagcagaggtggcagcagaggattctgagccaccaactgcagtagtggctcctttggctttgggcagcctggctgtggagtttccacggcgacacacagcctcagtggtgcaagatttctcattttacagatgaggaaataaagcctacaagtgtgaaattaatttccttacagttttcctagctgatgagggacagaaccagaactagagcctgagcccaacccacatcactattcttctaacccttcctgaagttgtgatgctcatgctgaaatttaagatgccaaatatttttgccagcactttttcagttgggagaatcaccagggtttaaatgtcagatttatttttatgtggatccctgtgtatgctgaactacagagcatgatgtttaatctaatttaaggagccactgattgtaaaacatgccattattttatgttgcactaagaagcgccccccccggagctcccatcaatttttttccccccttttcctggccacgccgatccgcctctaagagcccacccttggaacccacccttctttgctctctgattcccatatcttcgtcct

SEQ ID NO: 402340 - DNA, 118 bp, Homo sapiens
actttagtcaaagcccgtgtgtgcaatatccctcttggaggtggtctattattggagtcccatatgctttttgtttgggaagaaagcagccactgtgtcatactgttacatggagtat

SEQ ID NO: 402341 - DNA, 381 bp, Homo sapiens
acatcccactagatggggaccaccaaaccacaaaatggacctgcttgaatttggccacagtgtaaaggtgttcttagaatgcaactctctcttaacactcattccactgttgaaccagccctactctagacttttacctacttttagagacaatgcaactgattcagcagtcccttgagatggtaccttgagcaatatctccttctgctcagacaaaaagctattgactggacgctcccagaggcaagcttctgaagccctctgtctctgagaatcccaagtctgccacgttcacaagcaacagaggaagccttacattctaaggtaattagctcaggcgtttcaacacttggggtgggggtagggggagagaaatcctgc

SEQ ID NO: 402342 - DNA, 495 bp, Homo sapiens
acataaattgaatcacacaatatgtggccttttgtgtctagcatagtgttttcaacgttcacccatgttgtagtgtgtatcagtacctcatttctttttattgctgaataatattctgttgtatggatatactacttattgtctgtcttcttaattataatcatcctagtagatgtgaagtggtatctcactgtggttttgatttacattcttgtaatgactaatgatgaacatctttttattatgtttattgctatattattatatttttatgtttattgctatataatattgttgttgttattatatattctccagggagacctgtctattcaaattatttgcctatttttaaacttaatttctgtctttttatcgttgagttataagagttctttatatattctggatactggacctctgtcatatgtatgacttccaaatattttatcccattctgtggactgccttttcactttcttgatagtatctttt

SEQ ID NO: 402343 - DNA, 618 bp, Homo sapiens
cgcggtggctctcacctgtaatcccagcactttgtgaggccaaggcaggtggattacctgaggtcaggagttcaagaccagcctgaccaacatggtgaaatcccatctctactaaaaacacaaaaaagttagccaagtgtgggggcgggcaccggtagtcctagctactcaggagctgagactacaggcgcatgccaccaagcccggctaatttcttgtatttttagtagagacggggtttcaccgtgttagccaggatggtctcgatctcctgaccttgtgatctgcccgccctggcctcccgaagtgctgggattacaggcgtgagccgctgcacctggcccctcgtttgtgtgatttaatgttttgactatccctgagaagcaaaacaagtgaatagtataaagaaggctaaggaaggcaatttgaattatacaaaatcatcatacacatacaagttgagtatccttatctgaaatgtttgggaccagaagtgttttagattttggaatgtttccattatattattggaaaaggagcatttcctttttgaacatcatgtcagtactgaaaaattttggatcttgaagcattttggatcttagattctcagatttg

SEQ ID NO: 402344 - DNA, 240 bp, Homo sapiens
cactgtaaacaggctccttagaaagttcagtcacttttttgctgttatcctgttgtgcacccaagtgcttctcaaggaatgtcttttttgcaaagtgctgcagtccatttggctgcttcttgagaggagagtcgtggaccccctgaggcctagttcttaaacatctcttcttagtccccattgcattagttgtttcagaacaggtcattgagcatttcgcctttgcattttggtggttca

SEQ ID NO: 402345 - DNA, 1063 bp, Homo sapiens
tgcattgcacacagtaaaatgttgcatacatgtgcattttattagtctcacatttcactcatttaatgttgtcttctgggaaaaggaatctcaatatctatagcaaatctaattctagagtaggaagggaggaaaactttcactgctggtgtcaaaagccggagagaagagcagcctgagagccaggcttcaggcagcagagagaggggacgaaggctgccctgaagccacagtctggcagcacacaatgtatcatcagagtgtcacctagtgaataacctccgtggcctttccattctcctcagagggactcatgggagcagacgttgcctgacggtctcagccagcctgaccctgtgtctgccgatgccctgctgaccttgccacccagcacgagttgcctctcccagcttgagtccgggagcatcgcccagcacaggggctcaagctgggggtcatccctggctggggctcagtcatactcgctgcatgctctggaagatctgcaccacactccggggtaccctaccccgcctccttaccccttcacccctttcatgacggtgtcaaatgacctaccgcccaaggtggggccactctccccagatgaggaagcagacaccggttccctccatgacccttccccttgggtgaaagaagatgggagtattgcctgggggtcatatgaatgccgcagagcttattgaggggagggccaaatgacttctgggtttttctttaacttgaggtgtattccaaagattgttttaggtgtgtcagcccattcaggactggattttcagaataagcctcaatgctgctctttgttagtggacgagggcatttatttgtaatcctctccactgtaaccccactgaaataaaacagaatgttaattaaatgtgtcagagaccgtattctagtaagataaccttacaatgtggtctttttggaactgttgtaacccattacgttctgaatcttctgttatctttgaagtatcatttttggcactgatttttcttaaattacattaaaaagtttatgcagatcataaaagata

SEQ ID NO: 402346 - DNA, 1214 bp, Homo sapiens
gtcccaggagactacagcaaacgagtgtatcaaggagtgagagtgaagcatacagtcaaagatctcctggcagaaaaacgatccgggcagacaagtaactcaagacttaatggcagcgtcagttcctctcagtctccatttgtgcagatgccaggttcgccggtcacgtcaggttactacggtgtcagaagatctttcttatctgactcagacttccacaacagtaaacagttttcaaatgacgtctacacctccagcgtggggaagccgtttccctgtgagtcctccgcagggcagagccatgcggctctcctggagccctacttcccccaggagccctacggagactaccggcctccggcgctgacgcccaacgcgggctctctgttcagcgcctcgcccctaccgccgctcctgccaccgcccttccccggagacccagctcacttcctatttagggactcatgggagcagacgttgcctgacggtctcagccagcctgaccctgtgtctgccgatgccctgctgaccttgccacccagcacgagttgcctctcccagcttgagtccgggagcatcgcccagcacaggggctcaagctgggggtcatccctggctggggctcagtcatactcgctgcatgctctggaagatctgcaccacactccggggtaccctaccccgcctccttaccccttcacccctttcatgacggtgtcaaatgacctaccgcccaaggtggggccactctccccagatgaggaagcagacaccggttccctccatgacccttccccttgggtgaaagaagatgggagtattgcctgggggtcatatgaatgccgcagagcttattgaggggagggccaaatgacttctgggtttttctttaacttgaggtgtattccaaagattgttttaggtgtgtcagcccattcaggactggattttcagaataagcctcaatgctgctctttgttagtggacgagggcatttatttgtaatcctctccactgtaaccccactgaaataaaacagaatgttaattaaatgtgtcagagaccgtattctagtaagataaccttacaatgtggtctttttggaactgttgtaacccattacgttctgaatcttctgttatctttgaagtatcatttttggcactgatttttcttaaattacattaaaaagtttatgcagatcataaaagata

SEQ ID NO: 402347 - DNA, 284 bp, Homo sapiens
aatgagagaaatgaatcatgaagctatgtcttttgcatatggtatattcagaaattatagtgacttttgcccatagggcatatgagccttttaaacctaactccatagttcaaatcttgccaattcttatttactactattttttaaaaagttaccaattgttatattactttggaaatgataaaaaaaatttcaaatggtaccaagggcatatggtaaaatatgagtttctttttcacctttgaatcccagtgatcttgtgtcccctagtaagcacagtaggc

SEQ ID NO: 402348 - DNA, 884 bp, Homo sapiens
gctcactatagcctccaattcctgggcttaagtgattctcccacttcagcctcccgagcagctgggattacaggcatgcgcgccactgctcccagcttcaattcctttccttacttatttttacatttatgttcttccttaaaatgaacatcttgaccgagcgcggtggctcactcttgtaatcccagcactttgggaggccgaggcaggcggatcacgaggtcaggagattgagaccatggtgaaaccctgtctttactaaaaatacaaaaaaaaaaaaaaaaaaattagccaggcatggtggcgggtgcctgtagtcccagctacttgggaggctgagtcaggagaatggcatcaacccaggaggcagagcttgcagtgagccgagatcgcgccactgctttccagcctgggcgacagagcgagactctttcaaaaaaaaaaaaaaaaaaaaaaaaaagaacatcttaacatatactgccttgttctccatttggctatgaatctatcacactccagcacttgtttcttgttacctgtgtgggtgctttacctgcctagaatagagttaaagctcctaatgacaacctattggtatgaacttttggaacctccagtgccacatttataagaaatcaaaatcttgttgatcaattgacaatcaatatgggaaactattgtttcccatcaatatgtgagattatgcttttgcttaattttattgggcacaaatattgttgaacaatttatttgaatagtatgttgttgcctttatagatatccatttccactttcttagttgatgatttttcactctacattatgattttcacttatcctttgagtgtttgatctacaaatgattgcttgcccaggtgatgaag

SEQ ID NO: 402349 - DNA, 322 bp, Homo sapiens
tttgtcaccaaggtggctctctgcaaatttgaggtggttctagaagatctttccatatttcttaatccagagggagatggagatgggtgagaaatggctttgtccatgaggaactcatgttctggttggaggacaggcggagcctggcattgaagttggtgagtcagagacggatctgtgggtggggccagaatggggcttgggcttcagacctcacaaagcagaccacatggcagcctggggcgttagtatccaaacgtcctgccctccaggttttattccttgccataaaatatcacattaaaggaaaacgttttgttaa

SEQ ID NO: 402350 - DNA, 432 bp, Homo sapiens
gtgagccgagatggcgccactgcactccagcctgggcgacagagcaagactccgtcccccccgcaaaaaaagaagtctattcccttatctaaagactgaggtctttgtactttttctttttctttttttgaggcagggtcttgctttgtcactcaagctgagtgcagtggtgccattatgggtcactgcaggctccacctgggctcaaaccatccacctgcctcagtctcccacctcaacctcccaagtagctgcgattacaggcaagtgccaccacacccagcttatttttttgtgttgttttgtagagctgggggaggtctcattttgttgcccaggctggtcttgaacgcctggtctcaagtgatccttccgccttggcctcccaaactactgggattacaggcgtgaaccaccatgcccagcccattt

SEQ ID NO: 402351 - DNA, 420 bp, Homo sapiens
actatcgactgtgactatgtactgacaagagcttcaaaatcgtacatctcaaagccattccatgcctgtcaccaagcaggctggtagggtgccatccactgcccctccaggtcctgctgcctttcaggcccctccctgagttttccataatttttctggaggcgcatagccccgcaggcatctcctgccccatctgttcttccggaggactgcactaaggctctttcttcctctgctcctcaagactctcaggaagcccaaagagttctattctcaaaaggtggagcagatccccaaggggagcactgccaagagttccataccagatgcagaatagctatggcttttatataattaccaacttaatggtctgtaaaattcactatttaaagtaagaaaaagggttttgaaagtctttga

SEQ ID NO: 402352 - DNA, 412 bp, Homo sapiens
tcctacaactgtggatgtatagggttgaaagacagaatcaagtgttctagagatggcccatcagaaataagcaagctctactatgccagtgctctagtctaagaacatggacttcagagtggggctcatgcaggactgaggattctaggcaatgctacgggagcggattccagagtagaagccgacatgctagggaggtagtgctttgtttaagaggcatggttgctcagtgctctactggtttattgaattctgtagctgggtgaccagatgccagatgtagaaagcatttataccaagctggccaaggtcacgggagaggctattgaaaatcaatctgtctctgtgtttagttcacagaggaccaggaggaacctgaaaatgaggccatatatgtgagaggatatgagag

SEQ ID NO: 402353 - DNA, 432 bp, Homo sapiens
tgattacaggaagatgaaaggtgatagtagcaaaatgaaaaagaaatttgacctgaggcatgcagcctgaagcaagtggaaagccaaatcatatgtgtggaattgactcttccagttagctctccagaaaactcccttattgccaggaaggctttaatttgattagcaaagggctgcaggaaaagggcatgtgaaaccttgaggctggctagctatccttagctccaaaccaaattaattttgggagatttatcataattcccttgctgcagcacctaagcccatcctgagtaagcttcctgaaactcaaaagaatgctgtgccctggaccctgtgtttctgcatgtaactctgggttcacttcactgctgccgcctgtatccctgcctccccagcttcccactgcctgtctacttcacatccttattgcac

SEQ ID NO: 402354 - DNA, 344 bp, Homo sapiens
ctcctccttccccaatccaactcgggccagaggcgtttgtcatgtattcacatgccaaaaatatctccactatttcaaggtccccagccaaatcccaccagctgtctcatgacccaccctccaaatatttctgttatattttggattcttgaacactagtcaaagtgataaagaagaaaagtagaaccacttggcttgttaaaaaaatttaaaaatagccaggcgcggtggctcaagcctgtaatcccagcattttgggaggccgaggtgggtggatcacgaggtcaggagttcgagaccagcctggccaacatggtgaaacccccatctctactaaaaataca

SEQ ID NO: 402355 - DNA, 610 bp, Homo sapiens
ggaggataactacagctcttacatgtaagacaaaaagtacaagggaatattatgaataacatgtctaacaatttgataacttagatgaacaaagtccttgtataacacaaattagcaaaactgtctaaagaaacagaaaacttaaaacatctctacatcaactttaaaaatgaattcgtaatttaaaacgtttctaaaaacaaaagtcctagcacaaatagtctcactagtgtgtcaaacattcaagaaagattatcaatctacacaaactgtttcagagaagaggaggtggaaagacttgtgaaccccttttatgaggctggtattattactctgataaccaaagctagaaaaaatttaagaaaccacaagaaaactatagaccaataactctcacaaacgtagatgtgaagatctttaacaaaatattaacaaataaaattcagcaatatacaaaaatgatgttatgaccgagtgatggatttatcccattaactcaaggttggtttaacatgggaaatccatttatttaactcaccatattaagagaataaaggagaaaaaaatatcatctcaataaagtaactgacaaagttcaacagtcactcaa

SEQ ID NO: 402356 - DNA, 561 bp, Homo sapiens
tttgtctttataagaagaggaagatcgaccagagctctctctctcttctctaggcatgtgctctgagaaaaggtcatctgaggacaaagtacccgtctgcaagccaggaagagagcccttgccagaaactaaaccccgctggaaacttgattttgcgctttccagcctctagaactaatatgtgaaaaacatttaaatcagaaagtaaatgacaggatgatttgcaagacacagggatgtaaaattaaaaagcctctcgagctccaaagaagcagattctgctttgctctatttgtgaaagacaactggatgagtaaagattactacttgcaaggagactagcaatttatccaaaattggaaacagagaaaacggcatcttcttttcactcattctgactcaaaatgggtgtagctcatcagagtacatcgttacattttcgggacttttgctacctggctcacatcactttggtagcttgaactctgccatgattgggaatatttacaccacaaaaatgggctaatctcctaggaatggattctaggacggcatcagcat

SEQ ID NO: 402357 - DNA, 483 bp, Homo sapiens
tttgtctttataagaagaggaagatcgaccagagctctctctctcttctctaggcatgtgctctgagaaaaggtcatctgaggacaaagtacccgtctgcaagccaggaagagagcccttgccagaaactaaaccccgctggaaacttgattttgcgctttccagcctctagaactgtggacaccgaaattctttgcctgaaaaccttttaaaaatatgaaaacaagacaaaaaatggctgggttttcttttagagtggcaatgtcatttgtccagaagggggagctctcagtccgcatgcagcggagcaaggcagacagtctggtatcttatctgctgcttgggaaattgtctgacaggaaaatatcaacacaaaccatgcgatttgccgctggagcacgctggacctcatctgcttaaaaagatgcacggatatagtcatcacagttcataatttaataaactgctaaaaaaaccaaacat

SEQ ID NO: 402358 - DNA, 467 bp, Homo sapiens
tttgtctttataagaagaggaagatcgaccagagctctctctctcttctctaggcatgtgctctgagaaaaggtcatctgaggacaaagtacccgtctgcaagccaggaagagagcccttgccagaaactaaaccccgctggaaacttgattttgcgctttccagcctctagaactaatatgtgaaaaacatttaaatcagaaagtaaatgacaggatgatttgcaagacacagggatgtaaaattaaaaagcctctcgagctccaaagctacctgttaacttcaacaagcacactggcctggagactacatgatggtgtatcagtaatggtgcctctccatcattgcccatcaaagacatttctgatgctccagaaggatacccttgaggtcatcctgttctcacctccaatattcattatgatctctaacatcactatatacaacatttttgtatatatagaata

SEQ ID NO: 402359 - DNA, 556 bp, Homo sapiens
tttgtctttataagaagaggaagatcgaccagagctctctctctcttctctaggcatgtgctctgagaaaaggtcatctgaggacaaagtacccgtctgcaagccaggaagagagcccttgccagaaactaaaccccgctggaaacttgattttgcgctttccagcctctagaactaatatgtgaaaaacatttaaatcagaaagtaaatgacaggatgatttgcaagacacagggatgtaaaattaaaaagcctctcgagctccaaagggggatgcatcaggacgataattccaagagttcaatggtgaatttccttggcttccactgagctacctgttaacttcaacaagcacactggcctggagactacatgatggtgtatcagtaatggatttacaactgcaaacatctcaagcagcagtgccacatccctgctacctccctgcttgtgcgtgtgtccctacattatccaaaataggggtgggctaatgacgattgcaggctaactccagcctaccacttgcttctataaataaagtcttattgtacacaaa

SEQ ID NO: 402360 - DNA, 303 bp, Homo sapiens
ttttatgagtccagtctgttgaaagataagaaaactatcacagtggagatggaagatggaaattgggctcagagagcaaagaagggtgaaaaagatatggacacatatatccatggcacaaattttaatgatttctgtaaagtataattaaaggaaattacaggaagtttcatttgattttcttagaggtcctgaaactcacgagtgttacagagttatagtatttacagaaagaaaggctattaaaattcaagagaatgtggaaggagctgccgtcttttttgaaaaaattcctttacattg

SEQ ID NO: 402361 - DNA, 589 bp, Homo sapiens
agcatgtatggagatgtcagatgcaatccctgtattgtaaggcaatgacatttaatgaaggataagatgaattcacagataactagaactcagggccaaacgcacacagcctgtagcaacagtgtcatgctgagatttaaaggaagaagaggtgccgtggcagaactccacgtgaccgtcccctccctgcacgcagccaggatgagaggagcagagctgagcgccacctccctgtcggtgccacggctgaggtgaggagctcttgccggatggtggggtgggggcagcagggcagattgaagtcagggattctcttatacctgagtttggaatgcctcctattcaaacaaagcaaaatatctaacagatggttggatatgagtctcagggaggaattcaatttgaaaagcacagaattaacatgtattgcttatatgaagaatctcagctagaataacaaggtcggatgggaggaatcaggactgatttgaagcacgatttactaaatcattctttccttttcctccttagcagatcataccgccagctgcttaacacgtaatagtttaataaattgtttcttcttacc

SEQ ID NO: 402362 - DNA, 618 bp, Homo sapiens
attcactagtagaaactgagaagtaggtgggggtggggcagggactgttaggagaaagtaaaagcccagcctttattttttactgttttatttttgtttttgataattagaaaaatacaggtagtggtatggttttaaaaaaaaattaaagataatcactagaaaattcaaagtaggatgttcacattccacgtcacacatctacatgtgtgaggatatatgcattcctcgctggaggagggaaaacaaaagataaatttgatcacaggataaggtcatgtcacgcaaaaattctatggtatttggttttgtaaattggcttttaaaacttacttagaattttggtctggcatggtagctcgtggctataatcccacggttttgggagttgaggcgggaggaacacttgaggcaggagttcgccaccagcctggggagcaaagtgagacccctgtctcttttaaaaaaaaaaaaaaaattatccaggtgttgtggcatgctactcaggaggctgaggcaggacgattacttgagctcaagagtttgaggccgcagtgagctgtgatcatgtctctgcgttccagtctgggtgacagagcaagactgtctcaaaaaagt

SEQ ID NO: 402363 - DNA, 669 bp, Homo sapiens
taaagacagctctcactgtgttgcccaggctggctcctgctcttgagtgatcctcccacctcagcctcccaaagtgctgggctaacaggcatgagccactgtgccctgcccttgctggcttgttgtttggggctgccatcagctcctagaagccacccacagttccttgccacatgaccctctcacaacatggcagttcctatcttcaaagccagcaagaaagtctctctagcatacccagcaagaatgtatagggctgttcagggctcacagtagattacctttctcaacagatggagtagggggtgacttaaagtgtgcataatctttaaaaattagcattttccatttgtactctctaaatttgggttagctggatccaaaccccatgattctgctacatatgggatcccagtccacctatctctagcatacttcctctattaatcattctctcttgacatttgccacctcattttagccagctgtgcttgttttcacttatgttattttatgagcagtgcttattttgacagcagcatacatagtggaatgatggctggttctggcatttaaaaagctggattcacattcaagctctaccatttgccaaataagaaaccaatactcccatcagccaactcaagtagtaaagttggaatagcatag

SEQ ID NO: 402364 - DNA, 466 bp, Homo sapiens
tcaggtgtcagccaattggaaaacacataagtggacaacctctgagggctgacttctgaccttggaacaagaatgtctttgagaggaggaggacatgggcaaacctgactctggtcacctttccatgaggaacacctacaagctctgaaagtggtgagaatccacagtggccgaatggaaggtcaaccttgacaatcctgtttgagcccgggaagcctaacctgcatcttgggaaggatctataggagatgggctggcagaacaatccaaaagggttcctgacaaagaaatacaggactcagaaactgacattcaacatcaagtatcagactgcagaaataagcccagggcataatgtgatggaggactcaagatattaggagaaatcattgaaaaagttaacgccaggttagttaaagtgaattatttcaagttcaggccattgctgcatcctggtaccggctgg

SEQ ID NO: 402365 - DNA, 240 bp, Homo sapiens
ccaggagatggaggttgcagtaagccgagatcatgccactgcactccagcctgggtgacagagcgagactctgtctcaagaaaatactttatctggactacccagactctacagtaccttccacaatggacacttgattggaaacactggatcacctgtctttgtgtatgggcaggagtgcacacgccaagaccagggtggagactcaggcctttccaaatgtctgcatggggagtccat

SEQ ID NO: 402366 - DNA, 464 bp, Homo sapiens
ggttgcagtgagccgagatcgcaccactgcactccggcctgggcaacagaggaagactgtgtctcaaaaaaaaagaaaaaagaaagacggaaagtagatactaattcccattctttttaaaatagaatgtttttaattttttttgaaattcactcatttttataagaatatttttcaaattttaatcgtagtatattgtgaatttatttagtgtagagtagaaaatgtgtgcctaactcttgatattttttccaaattctctcttttttttgagagggagtctcgctgtgtcgcccaagctggagtgcagtggcgcgatcttgactcactgcaagctccacctcctgggttcacaccattctcctccctcagcctcctgagtatctgagactacaggtgcccaccaccacacccagctaattttttgtatttttagtagagatggagtttcaccgtcttagcca

SEQ ID NO: 402367 - DNA, 330 bp, Homo sapiens
tggtactttaaaggtgacatgttaagccaagtcctgtttcccctggtaatggtcagccatatgagctccagcttgtcctgtttctacgtacggtaatagaacagtcagctaccagtcttagctgtggacaaagaggggtcagctgccctgagaagtgttggaatttttttaattaagtgcattgtctataaacttttgaacaagctgtagaactgttgtcagcaaagtaaagagccactgcatcaatgaaagttcaagaaagaaccttctgtacttaaatgtgattttcagtgttctggggttttttgtgtatgtttagaatgctgaaat

SEQ ID NO: 402368 - DNA, 470 bp, Homo sapiens
agctgctcagaggatccccctagtatatgtcgtgctaaaatactgtaggtatgtgtcaatatgagctactctgtaaatgataaataataattgactggtgagtctaggcaaggcaagtcaatgagattacaagaaaagagatgttaggccctcagaaagatggaaatttctctttgtccctgcagggactgttgcagagcattagagccaccctcaaacagttacccagtgagtctcctcaaagcaagtggcactgagatacagccttcctacaggttttcaagtcatctcgtgtggtgcacagtcctcgccctacctcgaaggcccgggcgaagttttcctgagtgtgtatactcatctcttggtgttgtctctggcagggagcaagtgagtacaggattggagtaataggcatttttaggcttgagatggctttgtgtgttgggttaatggcacgacatatacctagg

SEQ ID NO: 402369 - DNA, 420 bp, Homo sapiens
cttcagagaccttacttttaccatcttaccatgctgtcttctaaacagggataggacactttaaaggaaacacttactgccatttcaacctggaacctcagcctgtcctattccccacaacactatgagccatttctaagagatcagctccaccgtcagagacaaggcataatctcacaagcccctcctacatgcacactgaacttcacagggaaatgacaaatttaagaccaagggggaagagtaagacctactgtttgacttggccaaccattgagacacgggcagactccagatttcgaatctggccactcttcacactgggaaagaaaagaaaggaagagagaaggttattcagtatctattgtatcacatcattggaatcaaataaataattctacagattatgtgagacctaat

SEQ ID NO: 402370 - DNA, 470 bp, Homo sapiens
agagaaactcttagaaatttgacctgcttaccaattggctactaatatagagtcccccacttcctttggaaatgcttccaatctggaagattcaagaccagcttttagccaagatagagtaataggtcgtaggtttacccccatgccttacctagaagactggacaagatatatctgagacagtggttttccagatgtcatgtaacaggcaacacagaacagtaatacctaagaagaaaaactgaaaaagtaagttctacaattacaccagcttagtgcttaagggcagattccaggcctcactacagggaggggaaatgaagcctggttaattcactaagtcagggagacagagtcagagcttagaggccaaggcagccagaatttgcaaggcagatcactggaagggagggagatgcacagacagcaccagaaacctacagagggtcccctgtggtatcacttgagta

SEQ ID NO: 402371 - DNA, 917 bp, Homo sapiens
gcggccgcccgccgacatcacgtggagcctggcggacccggccgaggccgcggtgcccgcggggtcgcgcctcctgctgcccgcggtcggaccgggccacgcaggcacctacgcctgcctggcggcgaacccgcgtaccggccgccgccgccgctcgctgctcaaccttacagtggcggacctgccccccggggccccacagtgctcagttgaagggggtcccggggaccgcagcctccgcttccgctgctcgtggcccggcggggcccctgctgcctccctgcagttccaggtctccccgaaggcatccgcgccgggccagtgtcctctgtgctgctggcggccgtccccgcccacccccggctcagcggcgtccccatcacctgccttgctcgccacctggtggccacgcgtacctgcacagtcacgccggaggcccccccgagaggtgctgctgcatccgctggtggcagagacacagttgggggaggcagaggtggcactggaggcctctggttgtcccccaccctcacgggcatcctgggcccgggaagggaggcccctggctccaggaggcgggagtcgcctgcggctcagtcaagatgggcggaaactccacatcggcaacttcagcctggattgggacctgggaaattactccgtgctgtgcagtggggcgctgggtgctggcggtgaccagatcaccctcattggaccctccatatcctcgtggaggcttcagagagccagagatgcagccgtgctgacttgggatgtggagcgcggggccctgatcacgcagttttgagatccaggcatggccagatgggcctgctctgggccaggacttccacctacagggactgggtctccctgctcatcctggggcctcaggagcggtcagccgtggtgcccct

SEQ ID NO: 402372 - DNA, 800 bp, Homo sapiens
ggcggggctggagaagaaatgagaaagggactccatcttcattctctcccttctctccgcagacctgccccccggggccccacagtgctcagttgaagggggtcccggggaccgcagcctccgcttccgctgctcgtggcccggcggggcccctgctgcctccctgcagttccaggtctccccgaaggcatccgcgccgggccagtgtcctctgtgctgctggcggccgtccccgcccacccccggctcagcggcgtccccatcacctgccttgctcgccacctggtggccacgcgtacctgcacagtcacgccggaggcccccccgagaggtgctgctgcatccgctggtggcagagacacagttgggggaggcagaggtggcactggaggcctctggttgtcccccaccctcacgggcatcctgggcccgggaagggaggcccctggctccaggaggcgggagtcgcctgcggctcagtcaagatgggcggaaactccacatcggcaacttcagcctggattgggacctgggaaattactccgtgctgtgcagtggggcgctgggtgctggcggtgaccagatcaccctcattggaccctccatatcctcgtggaggcttcagagagccagagatgcagccgtgctgacttgggatgtggagcgcggggccctgatcacgcagttttgagatccaggcatggccagatgggcctgctctgggccaggacttccacctacagggactgggtctccctgctcatcctggggcctcaggagcggtcagccgtggtgcccct

SEQ ID NO: 402373 - DNA, 1268 bp, Homo sapiens
gcggccgcccgccgacatcacgtggagcctggcggacccggccgaggccgcggtgcccgcggggtcgcgcctcctgctgcccgcggtcggaccgggccacgcaggcacctacgcctgcctggcggcgaacccgcgtaccggccgccgccgccgctcgctgctcaaccttacagtggcgggtgagaggctggagcgggagtaggggaatgcctgggagaggggcggggccagaacgagggcggggctagaggaaaggggcggggccagcaaggaggagcagcataccggtgggtggggcagggccagcgggagggcgggtcaccaagaaggagctgggatacccgtggtggggcgggccagcgcggaggggcggagacacctaggataagaggcggggccagaaagaggataagggaaggagccaaatagagtggcagggatgaccaggactgacgggccggcccagcactgagagggcggacattcctgggcatggaacactcgacaaagtcgacaagcggagttaaatgacctgccccccggggccccacagtgctcagttgaagggggtcccggggaccgcagcctccgcttccgctgctcgtggcccggcggggcccctgctgcctccctgcagttccaggtctccccgaaggcatccgcgccgggccagtgtcctctgtgctgctggcggccgtccccgcccacccccggctcagcggcgtccccatcacctgccttgctcgccacctggtggccacgcgtacctgcacagtcacgccggaggcccccccgagaggtgctgctgcatccgctggtggcagagacacagttgggggaggcagaggtggcactggaggcctctggttgtcccccaccctcacgggcatcctgggcccgggaagggaggcccctggctccaggaggcgggagtcgcctgcggctcagtcaagatgggcggaaactccacatcggcaacttcagcctggattgggacctgggaaattactccgtgctgtgcagtggggcgctgggtgctggcggtgaccagatcaccctcattggaccctccatatcctcgtggaggcttcagagagccagagatgcagccgtgctgacttgggatgtggagcgcggggccctgatcacgcagttttgagatccaggcatggccagatgggcctgctctgggccaggacttccacctacagggactgggtctccctgctcatcctggggcctcaggagcggtcagccgtggtgcccct

SEQ ID NO: 402374 - DNA, 488 bp, Homo sapiens
aagggggaggacccggaaggatggggtgggggcgtaaagatgaaggttaatcaaggtcctcatggactgaaccttgaggcccttctgctgcagtcacttttgccctatcagacttttagagtaacttcctctctttatttcctctttggtggggttatcagaattattttgtgactattggtttcctttgcggtttttagtgaaattcagaatcatcttcgacggataggaaatagtgcaatcatatgtgtcagtattccggtattctaggaacttaaggaaatgcatataagggtttgaacatttttttcttcagctcactaaatgaacgaaaggtaggcgtaggcgttaaagagacacataatgtggaacgatgctgtattttcttagctactaaaacttcatttgtcattgactgtctcagggctttaaaattttatgtaggtctatattcagcttttattaaaatagaaaattccttgaaaagt

SEQ ID NO: 402375 - DNA, 355 bp, Homo sapiens
cacccaggctggagtgcagtggcatgatctcggctcactgcaaccaccatctcccggtttcaagcgattctcccatctcagcctcccgagtagctaggattacaggcacctgccatcatgcccggctaatttttgtattttagtagagacagggtttcaccatgttggccaggctggtcttgaactcctgacttcaggtgatccgcccgcctcggcctcccaaagtgctaggattacaggcgagagccaccgtacctggcctcaacttacatatttctaagaaaaagaacattttcctacataaccacaaaatcattatgacactcaggagacctataattgattgataatatta

SEQ ID NO: 402376 - DNA, 575 bp, Homo sapiens
gctgctcctgcactattttacaggtgaggggacagccctgggccacctctgtgacccgagtcaccgaggtgcagtgtgtgactggagggtcctctctgtccctgataacaagacactgagctcttactctagcagagctgggccaggagcccttaggcaacaaggcgacccctcccaggatgaggctttatttcacatactttaaagattacccaatagcttataattcgctgactaaaagcatacaagtttgctaagacaataactaaatatcacccacgtagtctccaggggaggaggaatcgctgaaaaataccatcaataaaagttaaaaactgaaaggataggtctaacagtgaaatagtttccagttttcaacacttctctttaagaaagcatactgtaaaaatgagagaaaaaaagatcttgactagaaggcatttgccagtcatagaacttacaaaaaattgtatccagaaaaacaaaactctgtaaatcaatatgaaaaagacaagcaacccatattttttgtttgaagaaggatataaggttgtttgcccattcctgagccaatg

SEQ ID NO: 402377 - DNA, 591 bp, Homo sapiens
agaaccttgacagagaatgtcagctttttatcaaggctctttcccacaatgacttctgataatgggggttggggttcattcccaggtgaaaagcatgagtttgtggcaaagaaaacagtattgtttggtcaccacactggaatggaagccaggatattctgaaggatgccttggcactaatacaaattagcaaatgactttagcacttctgagcctcaatttcttcatctgtaaaatgagaagaatggactgggtgaatatgaagtccttccactctcttaatctatgcttatgggtgctcagagcacgggaacccttccaggtgtctcttgtggttaggctgtccatgtgtcaggaccctgattgtgctcccagggacacacaagtgtgagagtggctacaactcaatggaagcaataagtaaacacgtacacactcacaaagctagatccctatatttgattaaaccatgggttagtagacaggaaccatgtcttatgcatcttcacacactcaaaatccagcccagtccaggcactgggcttaacaaatgtttactgcatgcattttgaggcaaatctttaaaatgtc

SEQ ID NO: 402378 - DNA, 947 bp, Homo sapiens
gaggagccagagagagctgcggagagctgccagctgcaccgggcgtgttccgcagctgtaggcacctgtcgtcctgccttcgatggctcctccctccgtccccctggtcctcctcctcgtcctcttgctgagcctggcagagactccagcatccgcacctgcccaccggggacgaggaggctggaccctcaatagtgctggctaccttctgggtcccgtcctccaccttccccaaatgggtgaccaagacggaaagagggagacagcccttgagatcctagacctgtggaaggccatcgacgggctcccctactcccaccctccacagccctccaagaggaatgtgatggagacgtttgccaaaccagagattggagatctgggcatgctcagcatgaaaattcccaaggaggaagatgtcctgaagtcatagatgtcttcaaatccctgttcctatccttcttctccagctcctcctgctccctctgaaaccttttctaggtaccctatgctgagactaagatcctgaagttaaatacccaggtctcatgaagacattgtaaagcatttgaattattctaaaaaatttctggagtttcttaggttttattgattcatccttgaaatcagtataatgtgctattaatggaaccaatagtaattcgaggactagttgggagattctggggtaatcagggaatattcctgcaacacatttaaaggaattgtgttcttttggaatcatcccaattataacacgagctattgcataatacaaataaccctcttaagtctgagagtctgtgtctttatttgaaaagattcttcaaattgcgtacttactcctccatattctttcaacccacatgagtctcctcgagaagtgaggagaggcagtttggagcagaatggagagaataaaatgtttcttgtcaaacgaaaaaaaa

SEQ ID NO: 402379 - DNA, 370 bp, Homo sapiens
tccatttgcggctctcctgggtaatggggtctggcaggtctgggtttgactcctttcttaggaaatctcggaactgactgaatccctctccttacgctaactccaggagaagtcgaattcgtatcctactcaattactaatgacaacaatttttgagtgcttactatgtgaggattcttatttaattgatctaataactcagtaagttttaaaaagtattagcctcatttttctgattaaaaaagaaaagtggccaggtgcagtggctcacacctgtaatcccatcactttgggaggccaaggtaggaggattgcttgagtccaggagtttaagaccagcctgagcaacatagtgagacctcatctctac

SEQ ID NO: 402380 - DNA, 269 bp, Homo sapiens
aaattaagtcatcaggtttagctcatgaagagactaaaattctaagtgtgatggcataattcactataagtcactggtgcatgaagcagtattgtttaatatcccccaacatggtaatcagggaagaacttagccatagacattatcagagggagggaactagagtagggcatggggaaaaaaaatacatacctgagttggtagttgatgggatttgtttgtgaacacctatgacacatgttaggggtggggagatggcaagaagaatg

SEQ ID NO: 402381 - DNA, 319 bp, Homo sapiens
cacatctgctttcctttcagcgaaactggaactagggtccccggcacccaggactctgcgagcatcccccaacagcaagcccttctgcaagggagacgggttggcccaccccaggctgtccagctccagcagccttgcaggcagcctctccagaaaaagagcctggtcctccccaccctgctccccacaggctgtccctgaccctgaggcccagaggcacaagaggacttctgtagagcccaggggagcaggctgttctcttggggccccagcgggctcaaggtgtggccaggctgtccccaactcaggatagatcata

SEQ ID NO: 402382 - DNA, 4234 bp, Homo sapiens
  misc_feature (741)..(741): n is a, c, g, or t
  misc_feature (1018)..(1018): n is a, c, g, or t
cccgcgcgccgcccctgcggccccctccgcccgtgtggcctttgtgccgggcgcgcaccggagagcgagcgagcgggcgggcgagcgcgagaagtacaaaacccttaggagaaatcttgagagtggacagcaattgtgaagatcgccagagagttctgtgtttcatcaccgccgaaaggttaaaaaataaatcatgactgaatctgcctctagcacaagtggtcaagagtttgatgtgttcagtgttatggactggaaagatggagtgggcacgttaccaggaagtgacttaaagtttcgggtaaatgagtttggagccctggaagttattacagatgagaatgagatggaaaatgttaaaaaagcaactgctaccaccacttggatggtaccaactgctcaagaagccccgacctctcccccgagctccaggcccgtatttccacctgcctactggacatctccacctggatgtcccacagtcttttcagagaagactgggatgcctttcaggttgaaggatccagtgaaagtagaagggcttcagttctgtgagaactgttgtcagtatggcaacgtagatgagtgtctttctggaggaaactattgcagccagaattgtgctcggcacatcaaagataaagatcagaaggaagaaagggacgtagaagaagacaatgaggaagaagatcctaagtgtagtcggaagaaaaaaccaaaattatctctgaaagctgacancaaggaggatggagaagagagagatgatgaaatggagaacaaacaagatgtaagaatcctgaggggttcgcagagagcacggaggaaaagacgaggggattcggctgtactaaagcagggtttgcctcctaaaggaaagaaagcgtggtgctgggcatcctacctggaagaggagaaagcggtggcagtgccggcgaagctgttcaaggagcatcaatcctttccatataacaaaaatggattcaaagttggcatgaaattagaaggcgtggatccngagcatcagtctgtgtactgtgtcctcaccgtcgcggaggtttgtggataccggataaagcttcactttgatgggtattctgattgctatgacttctgggtgaatgcagacgctctggatatccacccagttgggtggtgtgagaaaaccggccacaaactccatcctccaaaagggtataaagaagaagaattcaattggcagacctatcttaagacatgtaaagctcaagctgctcctaagtcattatttgaaaatcagaatataacagtgatcccatcgggctttcgagttggtatgaagcttgaggcagtagacaaaaagaatccctcattcatctgtgttgctacggtaacagatatggtggacaatcgtttcctggtacattttgacaactgggatgagagctatgactattggtgtgaagcatcaagtccacatattcatccagttggttggtgtaaggaacatagaagaacccttattactccaccaggttatccaaatgtgaaacatttttcttgggataaatacttagaagaaaccaattctttacctgctcctgcaagagctttcaaagtgaaacctcctcatggattccagaaaaaaatgaagcttgaggttgtagacaaaaggaaccctatgtttattagagtagcaactgtggcagacacagatgatcaccgggtaaaagttcactttgatggctggaacaattgctatgattactggatagatgcagattctcctgatattcaccctgtaggctggtgttcaaaaacaggacatccccttcagcctcctttgagccccttagaattaatggaagcttcagaacatggtggatgctcaaccccgggatgtaaagggattggccatttcaagagagcgagacatctgggccctcacagtgctgccaactgtccctattcagaaatcaatttgaataaagaccgtatttttccagaccgcttaagtggtgagatgcctccggctagtccgtcatttccaagaaataaaaggacagatgcaaatgaaagctcttcttcccctgaaatcagagaccagcatgctgatgatgtcaaagaagactttgaagagagaacagaaagtgaaatgagaacatcacatgaagccagaggtgcccgggaagaacccaccgtccagcaggcacagcgtcggtcagctgtctttctgtcctttaagtccccaattccatgtctgcccttgcgctgggagcagcaaagcaaacttcttccaactgtcgcaggaatccctgccagtaaagtttccaaatggagcacagacgaggtgtcagaatttatacagagcttacctgggtgtgaagaacatggaaaggtatttaaagatgaacaaattgatggagaagcatttctacttatgactcaaacagacattgttaaaattatgagcattaaactgggccctgctctcaaaattttcaattccatcctgatgttcaaagctgcagagaagaattctcacaatgaactttgaagatggtgaattctgaataccatcagcattctgctttaaagctcatgttttattcaaagcacaaggacggttataactcctaagtgagaagtctccaaaactcaaaagagcaacactatcggattatttatattactcaagagacaatatatatgaattcttatgaaagtgcttgagcttttaaccaggtactgtctaacaacagtcatcttttggttctgttcactgagctaaatttatctttgtaaatctttttgagtctggggggtggggggaaggggggcttcattaattatttatggtaatggggggcagagtaagaacttttggcattttgtaaacattgttgaattctctttcatgtacactgtttctttttcaatactttcagaaacctttttatataatcaaatttcaatttaaaccaaattagtcgaaacctggctaagtttagccagtaggactgttatctgtattgttaattttgtgccatattttgaattgcaacattatgctaagtataactttgcaagtcatgatattgcctaactgcttgtcataattgtcagggctgaatagttgtaagaatgacttttctttgaatcagtatttttccttttgcacgcattatgaaatgttaaacaaattacttttcaccagcatctttactataattaccaaaaacatgtatataaaagaatgaaattgaaaaataaaatatataaacataaataaattaggtagtgtattttgagtggcatcagtctcactcatcttggtgccccggtgtttacaagagccagatggtgtcagaggagtacgcagttgtatgcagttatggttggggggaatgtttgtgagggtcttgaactatttatgagatgatcttgagcttctaattttcattgatgaaattgtggtggtttacagagactaagagctcattctgtcaacagaaacactaatctgtacagagcgctgtctcaggtcatgcattgtcctccaaacccaaaggtttttttcagggttggctagagagcgagtattgtgattttgctgaaaagacaaggtgtgaaggagcaacttcagttgacacaaaatttgaaatgctcacagatcagggaggtgatttcccaaagtaattgcccaagaacctccgttttggaaggattcctttttctgtagaatactttgcctcgatatataagcatacagatgcactttaaatgaaaacccttgattataaattgatagctggtagtgtttcttttgcaagaatgcatttctaaggcaaaaggtaaattattttgtccgtcttttgatgtactttctgattccaggattggatatttattcaaggactattttaaaaatagaaagtaagtttgtagcatgctgtctgaattctggggtaagttccacctcttctttagttgctttcgttttttatgatgtaggacttcctttgatatccctgttggaagtccattagcagtcctttgcatttgccaattcaaggtaaaacagggtcagtgacatctgcagtgtcccagtcatttatttgcatgaatctgcttaaataagttttttgttgctgttttttcttttttatgttttgttcagaatttgtacattcaagttgtacttgttatatctgacatgaatgaaataaaatcttaattacagatgctttttaca

SEQ ID NO: 402383 - DNA, 453 bp, Homo sapiens
cctcctctcagttaaagagaggagtacatgagccagacctggccaatgagattcagccctaggatttttgctagaatgatttgaaaggaaattctcttgtcctgttaggttatcaagttggtaaagcacaatcccagagctgctggtagctctctttaacaatgcttttagagggtctatctgaaagtaaagccaaaccaagagacggaaacagattactgatgatgaggctggatgcagccttacctgaaggcactgtggccctggactttccagtattatgaatcaatatcttccttttctttctcttaagccatttttagttgagttttcattacttgcaacagaaagaatcccttgtaatacaaaaaaatactgttttgaaactgtgtatttcactgaatgtaacattatcatatgttcatgttattaaaattattcttcaacattatt

SEQ ID NO: 402384 - DNA, 665 bp, Homo sapiens
gaagagaggcagttcgcagatgaatgatcttattcagagccaacaacatccaagtgttttatgagaggcgaaaatagtgcagggagagcatgggaggtaaacaggtgctgctgccctgggggcaggggtggaatggggagggctggggtggggagagagctgcaccaccccatgagcttgtcagttctgatcaaagtcagcacctgcagctcccgatcaccatcgcccccttggaaaatgggtgttgattcatcatgtcaaggtcgatcactttgtagttctgcctaaaatacttaaaacattgttaggataggttttagatgtttttttaagtgcaagtattccctaaaatgccacaaattgcatcctttgaggacatctgttgcaagagaccacctgggaacatcccatcccatctacagaacccctgaagcccccagcatctgggaaggagatgggcgtgtggcaagggttgctgttatgaatcccttcctataaaccaaaggcccctggagggcagcctggtaccaaacaatgtatataaaaacagaaacattcagaaagtcttagaataacaaagcgacaggcactgactttggggaagtccggatgggctgcggacattgtgtgggatccaacagtgtcattttcctaggagtgtcccc

SEQ ID NO: 402385 - DNA, 1111 bp, Homo sapiens
ccgtgcgggaatgggcgtggcctgggcggggcgggcgctaggacccaccggagcgccgtgaacgtcaccgagcggcgccgaggccccgggttgagcgggaggcgcgatcggtccggtcggtggctccccgcggcggggccgggcccgatctcgggcgggaaccgagcgcagagccggtagcgggaaggatgaccacgctcacacgacaagacctcaactttggccaagtggtggccgatgtgctctgcgagttcctggaggtggctgtgcatctcatcctctacgtgcgcgaggtctaccccgtgggcatcttccagaaacgcaagaagtacaacgtgccggtccagatgtcctgccacccggagctgaatcagtatatccaggacacgctgcactgcgtcaagccactcctggagaagaatgatgtggagaaagtggtggtggtgattttggataaagagcaccgcccagtggagaaattcgtctttgagatcacccagcctccactgctgtccatcagctcagactcgctgttgtctcatgtggagcagctgctccgggccttcatcctgaagatcagcgtgtgcgatgccgtcctggaccacaaccccccaggctgtaccttcacagtcctggtgcacacgagagaagccgccactcgcaacatggagaagatccaggtcatcaaggatttcccctggatcctggcggatgagcaggatgtccacatgcatgacccccggctgataccactaaaaaccatgacgtcggacattttaaagatgcagctttacgtggaagagcgcgctcataaaggcagctgagggggcacctgccaccccactgatgcccaaactgtcagactttgggggatccccgcctagggcagtgctgcatggctgccctgattccaagtgctcttatcgcctctgtgtgtggatcgcccgccccagcccggggccgctcaggtctgcttggaggatgcctcccccaggagggcagtgagggatgccgcaacctcgacttctcagcctcctggggttccgccggccaacactgtctgtctcaaatactgtgctgtgagttgtttcaataaaggggccccaagggc

SEQ ID NO: 402386 - DNA, 735 bp, Homo sapiens
cggacgcgtgggtcgacccacgcgtccgccactcctggagaagaatgatgtggagaaagtggtggtggtgattttggataaagagcaccgcccagtggagaaattcgtctttgagatcacccagcctccactgctgtccatcagctcagactcgctgttgtctcatgtggagcagctgctccgggccttcatcctgaagatcagcgtgtgcgatgccgtcctggaccacaaccccccaggctgtaccttcacagtcctggtgcacacgagagaagccgccactcgcaacatggagaagatccaggtcatcaaggatttcccctggatcctggcggatgagcaggatgtccacatgcatgacccccggctgataccactaaaaaccatgacgtcggacattttaaagatgcagctttacgtggaagagcgcgctcataaaggcagctgagggggcacctgccaccccactgatgcccaaactgtcagactttgggggatccccgcctagggcagtgctgcatggctgccctgattccaagtgctcttatcgcctctgtgtgtggatcgcccgccccagcccggggccgctcaggtctgcttggaggatgcctcccccaggagggcagtgagggatgccgcaacctcgacttctcagcctcctggggttccgccggccaacactgtctgtctcaaatactgtgctgtgagttgtttcaataaaggggccccaagggc

SEQ ID NO: 402387 - DNA, 1103 bp, Homo sapiens
  misc_feature (5)..(5): n is a, c, g, or t
acaanagagggaggggcacacaaaacttaggctaggtacgaggctgggtgttaggccccgggttgagcgggaggcgcgatcggtccggtcggtggctccccgcggcggggccgggcccgatctcgggcgggaaccgagcgcagagccggtagcgggaaggatgaccacgctcacacgacaagacctcaactttggccaagtggtggccgatgtgctctgcgagttcctggaggtggctgtgcatctcatcctctacgtgcgcgaggtctaccccgtgggcatcttccagaaacgcaagaagtacaacgtgccggtccagatgtcctgccacccggagctgaatcagtatatccaggacacgctgcactgcgtcaagccactcctggagaagaatgatgtggagaaagtggtggtggtgattttggataaagagcaccgcccagtggagaaattcgtctttgagatcacccagcctccactgctgtccatcagctcagactcgctgttgtctcatgtggagcagctgctccgggccttcatcctgaagatcagcgtgtgcgatgccgtcctggaccacaaccccccaggctgtaccttcacagtcctggtgcacacgagagaagccgccactcgcaacatggagaagatccaggtcatcaaggatttcccctggatcctggcggatgagcaggatgtccacatgcatgacccccggctgataccactaaaaaccatgacgtcggacattttaaagatgcagctttacgtggaagagcgcgctcataaaggcagctgagggggcacctgccaccccactgatgcccaaactgtcagactttgggggatccccgcctagggcagtgctgcatggctgccctgattccaagtgctcttatcgcctctgtgtgtggatcgcccgccccagcccggggccgctcaggtctgcttggaggatgcctcccccaggagggcagtgagggatgccgcaacctcgacttctcagcctcctggggttccgccggccaacactgtctgtctcaaatactgtgctgtgagttgtttcaataaaggggccccaagggctgggctgagctgagccatca

SEQ ID NO: 402388 - DNA, 1164 bp, Homo sapiens
tgcccccagccgaggggcagccccggggccgggcccggcgcgcacccggccagcgcgccctcgccagctgcgctctgagttctgggccagctccccagaggcctaggcgccgccgccgcgagggcgcggggcagacaaaggaggcagacaaaggcgggcgcagcccagcagccgtgcgggcaccgggcgaggcaggcccactcctcccggtagcgggaaggatgaccacgctcacacgacaagacctcaactttggccaagtggtggccgatgtgctctgcgagttcctggaggtggctgtgcatctcatcctctacgtgcgcgaggtctaccccgtgggcatcttccagaaacgcaagaagtacaacgtgccggtccagatgtcctgccacccggagctgaatcagtatatccaggacacgctgcactgcgtcaagccactcctggagaagaatgatgtggagaaagtggtggtggtgattttggataaagagcaccgcccagtggagaaattcgtctttgagatcacccagcctccactgctgtccatcagctcagactcgctgttgtctcatgtggagcagctgctccgggccttcatcctgaagatcagcgtgtgcgatgccgtcctggaccacaaccccccaggctgtaccttcacagtcctggtgcacacgagagaagccgccactcgcaacatggagaagatccaggtcatcaaggatttcccctggatcctggcggatgagcaggatgtccacatgcatgacccccggctgataccactaaaaaccatgacgtcggacattttaaagatgcagctttacgtggaagagcgcgctcataaaggcagctgagggggcacctgccaccccactgatgcccaaactgtcagactttgggggatccccgcctagggcagtgctgcatggctgccctgattccaagtgctcttatcgcctctgtgtgtggatcgcccgccccagcccggggccgctcaggtctgcttggaggatgcctcccccaggagggcagtgagggatgccgcaacctcgacttctcagcctcctggggttccgccggccaacactgtctgtctcaaatactgtgctgtgagttgtttcaataaaggggccccaagggctgggctgagctgagccatca

SEQ ID NO: 402389 - DNA, 928 bp, Homo sapiens
tttttttttcctttttgcccccaagtggtggccgatgtgctctgcgagttcctggaggtggctgtgcatctcatcctctacgtgcgcgaggtctaccccgtgggcatcttccagaaacgcaagaagtacaacgtgccggtccagatgtcctgccacccggagctgaatcagtatatccaggacacgctgcactgcgtcaagccactcctggagaagaatgatgtggagaaagtggtggtggtgattttggataaagagcaccgcccagtggagaaattcgtctttgagatcacccagcctccactgctgtccatcagctcagactcgctgttgtctcatgtggagcagctgctccgggccttcatcctgaagatcagcgtgtgcgatgccgtcctggaccacaaccccccaggctgtaccttcacagtcctggtgcacacgagagaagccgccactcgcaacatggagaagatccaggtcatcaaggatttcccctggatcctggcggatgagcaggatgtccacatgcatgacccccggctgataccactaaaaaccatgacgtcggacattttaaagatgcagctttacgtggaagagcgcgctcataaaggcagctgagggggcacctgccaccccactgatgcccaaactgtcagactttgggggatccccgcctagggcagtgctgcatggctgccctgattccaagtgctcttatcgcctctgtgtgtggatcgcccgccccagcccggggccgctcaggtctgcttggaggatgcctcccccaggagggcagtgagggatgccgcaacctcgacttctcagcctcctggggttccgccggccaacactgtctgtctcaaatactgtgctgtgagttgtttcaataaaggggccccaagggctgggctgagctgagccatca

SEQ ID NO: 402390 - DNA, 637 bp, Homo sapiens
ccgtgcgggaatgggcgtggcctgggcggggcgggcgctaggacccaccggagcgccgtgaacgtcaccgagcggcgccgaggccccgggttgagcgggaggcgcgatcggtccggtcggtggctccccgcggcggggccgggcccgatctcgggcgggaaccgagcgcagagccggtagcgggaaggatgaccacgctcacacgacaagacctcaactttggccaagtggtggccgatgtgctctgcgagttcctggaggtggctgtgcatctcatcctctacgtgcgcgaggtctaccccgtgggcatcttccagaaacgcaagaagtacaacgtgccggtccagatgtcctgccacccggagctgaatcagtatatccaggacacgctgcactgcgtcaagccactcctggagaagaatgatgtggagaaagtggtggtggtgattttggataaagagcaccgcccagtggagaaattcgtctttgagatcacccagcctccactgctgtccatcagctcagactcgctgttgtctcatgtggagccctcacactcattctcaaccccctgacaaaacacatagcctaccccttccttgtactatccctatgaggcataattataacaagctcc

SEQ ID NO: 402391 - DNA, 1295 bp, Homo sapiens
cgctttccgcatgtcccgctttgcgctcccggccctgggcatcccgctgtttccctctgcgtccgcggccctgcccttttcgggggcacagctgtggtctttccaccccgcgagacagcggggcgagggggcgcgggcggccagtggatagaggctgatgcccccaagcacggacgccagcgtgggggtggaggttcttccagctgccctgagcctgtgcgaagcgggaggtccttccccagttcccacagactgtggggagggaagagacggtggaagcgagcgggttctgggctcctgggtctctggaactaccctctgcccttgccccaacactcaggtagcgggaaggatgaccacgctcacacgacaagacctcaactttggccaagtggtggccgatgtgctctgcgagttcctggaggtggctgtgcatctcatcctctacgtgcgcgaggtctaccccgtgggcatcttccagaaacgcaagaagtacaacgtgccggtccagatgtcctgccacccggagctgaatcagtatatccaggacacgctgcactgcgtcaagccactcctggagaagaatgatgtggagaaagtggtggtggtgattttggataaagagcaccgcccagtggagaaattcgtctttgagatcacccagcctccactgctgtccatcagctcagactcgctgttgtctcatgtggagcagctgctccgggccttcatcctgaagatcagcgtgtgcgatgccgtcctggaccacaaccccccaggctgtaccttcacagtcctggtgcacacgagagaagccgccactcgcaacatggagaagatccaggtcatcaaggatttcccctggatcctggcggatgagcaggatgtccacatgcatgacccccggctgataccactaaaaaccatgacgtcggacattttaaagatgcagctttacgtggaagagcgcgctcataaaggcagctgagggggcacctgccaccccactgatgcccaaactgtcagactttgggggatccccgcctagggcagtgctgcatggctgccctgattccaagtgctcttatcgcctctgtgtgtggatcgcccgccccagcccggggccgctcaggtctgcttggaggatgcctcccccaggagggcagtgagggatgccgcaacctcgacttctcagcctcctggggttccgccggccaacactgtctgtctcaaatactgtgctgtgagttgtttcaataaaggggccccaagggctgggctgagctgagccatca

SEQ ID NO: 402392 - DNA, 1131 bp, Homo sapiens
ccgtgcgggaatgggcgtggcctgggcggggcgggcgctaggacccaccggagcgccgtgaacgtcaccgagcggcgccgaggccccgggttgagcgggaggcgcgatcggtccggtcggtggctccccgcggcggggccgggcccgatctcgggcgggaaccgagcgcagagccggtagcgggaaggatgaccacgctcacacgacaagacctcaactttggccaagtggtggccgatgtgctctgcgagttcctggaggtggctgtgcatctcatcctctacgtgcgcgaggtctaccccgtgggcatcttccagaaacgcaagaagtacaacgtgccggtccagatgtcctgccacccggagctgaatcagtatatccaggacacgctgcactgcgtcaagccactcctggagaagaatgatgtggagaaagtggtggtggtgattttggataaagagcaccgcccagtggagaaattcgtctttgagatcacccagcctccactgctgtccatcagctcagactcgctgttgtctcatgtggagcagctgctccgggccttcatcctgaagatcagcgtgtgcgatgccgtcctggaccacaaccccccaggctgtaccttcacagtcctggtgcacacgagagaagccgccactcgcaacatggagaagatccaggtcatcaaggatttcccctggatcctggcggatgagcaggatgtccacatgcatgacccccggctgataccactaaaaaccatgacgtcggacattttaaagatgcagctttacgtggaagagcgcgctcataaaggcagctgagggggcacctgccaccccactgatgcccaaactgtcagactttgggggatccccgcctagggcagtgctgcatggctgccctgattccaagtgctcttatcgcctctgtgtgtggatcgcccgccccagcccggggccgctcaggtctgcttggaggatgcctcccccaggagggcagtgagggatgccgcaacctcgacttctcagcctcctggggttccgccggccaacactgtctgtctcaaatactgtgctgtgagttgtttcaataaaggggccccaagggctgggctgagctgagccatca

SEQ ID NO: 402393 - DNA, 1617 bp, Homo sapiens
ccgtgcgggaatgggcgtggcctgggcggggcgggcgctaggacccaccggagcgccgtgaacgtcaccgagcggcgccgaggccccgggttgagcgggaggcgcgatcggtccggtcggtggctccccgcggcggggccgggcccgatctcgggcgggaaccgagcgcagagccggtagcgggaaggatgaccacgctcacacgacaagacctcaactttggccaagtggtggccgatgtgctctgcgagttcctggaggtggctgtgcatctcatcctctacgtgcgcgaggtctaccccgtgggcatcttccagaaacgcaagaagtacaacgtgccggtccagatgtcctgccacccggagctgaatcagtatatccaggacacgctgcactgcgtcaagccactcctggagaagaatgatgtggagaaagtggtggtggtgattttggataaagagcaccgcccagtggagaaattcgtctttgagatcacccagcctccactgctgtccatcagctcagactcgctgttgtctcatgtggagcagctgctccgggccttcatcctgaagatcagcgtgtgcgatgccgtcctggaccacaaccccccaggctgtaccttcacagtcctggtgcacacgagagaagccgccactcgcaacatggagaagatccaggtcatcaaggatttcccctggatcctggcggatgagcaggatgtccacatgcatgacccccggctgataccactaaaaaccatgacgtcggacattttaaagatgcagctttacgtggaagagcgcgctcataaaggcagctgagggggcacctgccaccccactgatgcccaaactgtcagactttgggggatccccgcctagggcagtgctgcatggctgccctgattccaagtgctcttatcgcctctgtgtgtggatcgcccgccccagcccggggccgctcaggtctgcttggaggatgcctcccccaggagggcagtgagggatgccgcaacctcgacttctcagcctcctggggttccgccggccaacactgtctgtctcaaatactgtgctgtgagttgtttcaataaaggggccccaagggcaaaaaaaaaaaaaaaaaaaaaaaaaaaaaaaaaaaaaaaaaaaaaaaaaaaaaaaaacaaaaaaacaacgacataagaagaaaaagataagaaagaagataacaagaaattaaggtgacgccgtgatcgagtgacacgtctctttcgacgattggccagacggcacactgggcgtcgaccggctgacatgatcgatgccgaacacgacacgattcgcaccgactgacaagcagcacactagccgcacagcacccagaagataagcaggaggggaggagacgacgctggcagcccgggacagcgcgcagggggggtgccaactccgagaagcgtagcgccacgcagtacaccgacgccggtcagcgcggccgacgcgaggaacacccgctcactgtgagtcgcaggagtgtgcggcgacggacaacaaccatcgcagggggcaggataagcaccgactagcacgaatgccgtgcagcgcacgcgggcgcgtgtgggaggaggcgccg

SEQ ID NO: 402394 - DNA, 1193 bp, Homo sapiens
  misc_feature (5)..(5): n is a, c, g, or t
acaanagagggaggggcacacaaaacttaggctaggtacgaggctgggtgttaggccccgggttgagcgggaggcgcgatcggtccggtcggtggctccccgcggcggggccgggcccgatctcgggcgggaaccgagcgcagagccggtagcgggaaggatgaccacgctcacacgacaagacctcaactttggccaaggtagggaggctggacctgcgggcccgggggcgggggcgtctgggccggcgggcttcctcgagcgcgccaccggcttgtgcccccctgcagtggtggccgatgtgctctgcgagttcctggaggtggctgtgcatctcatcctctacgtgcgcgaggtctaccccgtgggcatcttccagaaacgcaagaagtacaacgtgccggtccagatgtcctgccacccggagctgaatcagtatatccaggacacgctgcactgcgtcaagccactcctggagaagaatgatgtggagaaagtggtggtggtgattttggataaagagcaccgcccagtggagaaattcgtctttgagatcacccagcctccactgctgtccatcagctcagactcgctgttgtctcatgtggagcagctgctccgggccttcatcctgaagatcagcgtgtgcgatgccgtcctggaccacaaccccccaggctgtaccttcacagtcctggtgcacacgagagaagccgccactcgcaacatggagaagatccaggtcatcaaggatttcccctggatcctggcggatgagcaggatgtccacatgcatgacccccggctgataccactaaaaaccatgacgtcggacattttaaagatgcagctttacgtggaagagcgcgctcataaaggcagctgagggggcacctgccaccccactgatgcccaaactgtcagactttgggggatccccgcctagggcagtgctgcatggctgccctgattccaagtgctcttatcgcctctgtgtgtggatcgcccgccccagcccggggccgctcaggtctgcttggaggatgcctcccccaggagggcagtgagggatgccgcaacctcgacttctcagcctcctggggttccgccggccaacactgtctgtctcaaatactgtgctgtgagttgtttcaataaaggggccccaagggctgggctgagctgagccatca

SEQ ID NO: 402395 - DNA, 1170 bp, Homo sapiens
ccgtgcgggaatgggcgtggcctgggcggggcgggcgctaggacccaccggagcgccgtgaacgtcaccgagcggcgccgaggccccgggttgagcgggaggcgcgatcggtccggtcggtggctccccgcggcggggccgggcccgatctcgggcgggaaccgagcgcagagccggtagcgggaaggatgaccacgctcacacgacaagacctcaactttggccaagtggtggccgatgtgctctgcgagttcctggaggtggctgtgcatctcatcctctacgtgcgcgaggtctaccccgtgggcatcttccagaaacgcaagaagtacaacgtgccggtccagatgtcctgccacccggagctgaatcagtatatccaggacacgctgcactgcgtcaagccactcctggagaagaatgatgtggagaaagtggtggtggtgattttggataaagagcaccgcccagtggagaaattcgtctttgagatcacccagcctccactgctgtccatcaggtgggctgcccctgcccctcgcccactagctggcatcagctcagactcgctgttgtctcatgtggagcagctgctccgggccttcatcctgaagatcagcgtgtgcgatgccgtcctggaccacaaccccccaggctgtaccttcacagtcctggtgcacacgagagaagccgccactcgcaacatggagaagatccaggtcatcaaggatttcccctggatcctggcggatgagcaggatgtccacatgcatgacccccggctgataccactaaaaaccatgacgtcggacattttaaagatgcagctttacgtggaagagcgcgctcataaaggcagctgagggggcacctgccaccccactgatgcccaaactgtcagactttgggggatccccgcctagggcagtgctgcatggctgccctgattccaagtgctcttatcgcctctgtgtgtggatcgcccgccccagcccggggccgctcaggtctgcttggaggatgcctcccccaggagggcagtgagggatgccgcaacctcgacttctcagcctcctggggttccgccggccaacactgtctgtctcaaatactgtgctgtgagttgtttcaataaaggggccccaagggctgggctgagctgagccatca

SEQ ID NO: 402396 - DNA, 462 bp, Homo sapiens
atgagcttaaggaaaacaaaaagggagcggggtagaagatttattggcccatgtaactgggaaagccaaattgtgacactggttttaggaatggctggatccagggatttggatgatgtcatagggacttgattctctttccatgtttcaattctccttttctctgtatagtggtaaagctaggctgacattcttatagctagcagctaaagagcatcctctctttcccagcccgtatttatcccttcttatcaagcatttttgatcttcccctcttcccccgtctaattaatcaccaggccacctctgaggttgaggaggcatgactgtgtgattgaaaataccaatgtataataataatacggagttgttttgttttgtttttatgtttttatttttaaacagaacgggtaaggaattctgggtaggcaaaaccaaatgatttctattacatgagcaaaa

SEQ ID NO: 402397 - DNA, 454 bp, Homo sapiens
cagatcagtaatgtcagagatactatcacatgcagaacctgaaatatttactatctttccagatattttagtactgtacaatttagtgtacatttattacattccctatttataggaatagttgtatagtaagtagactgcatttttatgataacggagatatatatatataaagtctctgtccctagatattttaccagattataaatacagcatattcaggtgcttatacaaataggtgataattttgctctgtcccttctagacatggaggcatgtagacatttatagaaatggaggatgaataaaatagcccctatagtttgaattggccatattcttttctttccttagattggtgcttatgagagactttagttagaacttttgtagtttattattttatttatttatttattttattattattattatttttgagatgaggtctcac

SEQ ID NO: 402398 - DNA, 313 bp, Homo sapiens
cagtgggttgtgtaggatgagattaggaggataaatattttggacgtgttaagtttgtggtacatgttaaatatcatccaagtggcagtgtcaaatagggagttagatatttgagtctcatgctcaaaggagagatctgagttagagttttaagtgggaatcttcagcataaatatgttacttaaatccagggacaagggcaaagtcacatgcagagcatataaagagtggagaaggctcaggactatgcctggggcagccccacatctaggggggtcagttgaaggaggaagagctagcaaaggagcctgag

SEQ ID NO: 402399 - DNA, 275 bp, Homo sapiens
agagacagggttcgctatagtggcttaactcctgggttcaagcactcattccgtctcggcctccctaagtgctgggattacaggcgcgagccaccgagcccggcctgtgggtgggaagtttccagggcagatgatggagagtgagtggcggggaatgggactcaggaatgtctgcaggagactgatgaacttgaacttgggggacttgaaaagagaacaatagaccagagcaatcaataaagcctatttcagtgaaggattacagagctgctctg

SEQ ID NO: 402400 - DNA, 384 bp, Homo sapiens
accaaagtatgcaggcaacaaagagcataatgaatgcaatggcacctcacatttcaatagtaacattgaatgtaaatggcctaaatgctccactaaaagatacagaactgcagaatggataagaactaaccaatcaactatctgctatcttcaggagactcacctaacacataaggactcacataaacttaaagtaaaggggtggaaaaaggcgtttcatgcaaatggacaccaaaaacaagcaggggcagctattcttatatcagacaaaacaaactttaaagcaacggtggttaaaagagacaaagagggacattatataacagtaaatggctggtccaacaggaaaacatcccaaccctaaagatatatccacctaatact

SEQ ID NO: 402401 - DNA, 539 bp, Homo sapiens
cagcctgcacgtcaccccactaggcatgtccaggccctttctgcccctccctaaaggcacccctgtcctttctgtcccctccacaatgagccaagccagcctccactcttgccccaggcctgccctctgctgggagccgggacactgagctcctgccacatgagcaggttgacctgcagggggcctccaagcaggtgccaaggcagaatcggatgtgaccaggagaacacccttgaaggataaagcgaatgtgcgaccaccatgcaggtctggcccatggaagggaggggagggggccccgacggggccacagtaaaggagtggaggggccccacaggcagggatggcccagctggccccctggggctgtgaatctgcaggtgcagtgcagcctcttgcctctctcagcccagcccttgcatctgcctcttggtgtgtctgtgaagacaaagtcaccgtggtccctgcagcacctggcttgaagcaggtgtgcagtccgtgtgaaagccttccctttagctattaggtattgagtcaaa

SEQ ID NO: 402402 - DNA, 569 bp, Homo sapiens
aataaatgatgacttcccccaaagctttgcttttcttcatttggcttgcgtcagaaacacaaggctcggcacagcgaaggcttgcacccgcctcccgggacccctcaggccgccacctctgctgccaggcagtccaggtcctcagcttcccggggcccttgttccgtgaactctgtgctcagctgccacaccttcactgtgccctgggcatcgcccgcagccaagagctgagtctgctggctgttgaactccagacagtagacagggctttcatcctgggtttgcttgatcaaaactgtgggtttctgggagcttttctggagattaaacagctgcacgtcacctttcccagaggcagctgcaaaaaccaagggccgcactggggaccagcgcacagcaaacagatacttgagggagagctgcagcgaagtcaagggaggggcctgcagcatggagtacaggtggacatgcccgtcagtcccagcgctcaggaagagattcctgtggaagggggaacagctcacagagtagatgggaccgccgtggggggagaaggtaaactgtgctgg

SEQ ID NO: 402403 - DNA, 424 bp, Homo sapiens
tactctttggcctcaaaacaaacccagctgaagaagcaattgatcctacatggaaaatttcaaatcatgaagagcctggtgtcgcattcaaaacacggctagttgaaaaaaaagtgaaacaaatttgtcttcgcagctataccctccacacaaacactgagtggtagaagaagttaaaaagacaaaatgataagagggcagcagttgctttttgtagcttcttggagacattaatataaatgtataaagccaaataccatggtatattcaaacacaaagagaatcctaaaaatacagcaatgaagcacatcatctaaaatatttatgctttttttttcaatgaaagaagctcagtgaaatataagagacaggatattttacctgaaatgccaaatttttaactaggatggttttcttcagctgt

SEQ ID NO: 402404 - DNA, 586 bp, Homo sapiens
agtcatgtatctgccaagtggtacagttggcacaggcagcccgggactggagtcccagctgccagagcctaaggcgagtctgagccatgtgcacttcctagggcagagcaaacccaatgcggtgacaacctgccagcatcacacacatgcagtattccaggatgctggggggctctaaatggttgattccttgcaattttcagatgcttattcttatgagctcgccagtgtttcctgtgttccgttagtgtttctaggctcgtccccaaagacaaaaatttcaggggtagtaggatcaacattccagcctatcatctctcacagcccataaaaattcagaaagtggggagggtcttgtggaaatttggaaacaatgtatagctccaaagtaggccatatcataaattaagatttacctatgtcttgtactgtactcagagttttaaaattatgcctacggaatatgacagactgacatatagttggatttaggtggaggatatgcttgtatttattgtacaattccctcaacttttctgtatgtatgagaattcttttaataaaaagttggggaagtcttaacata

SEQ ID NO: 402405 - DNA, 423 bp, Homo sapiens
agagggtgcctggcccataggggcagcacggtgactggttatgcttccttcatttgttcacccaacaaacactgactcaagcacctactaagagccaggctgaggaccttaagaatcaggacaaagtacacaggcatagtttaaacatcgtcacagcagatgatgactcagaaaatgcatttgagaaagtgataacagaagactcatttgtgtccttggcccatgtaaagaagaaaattcagagccctccgaaccaaccgaattcaataaacaccttcaaaattacagatttttatatgacatgtgttggtcacaagtaaaacctcttaaacaaagtgtggtaataatttttaaagcgcatactgctgggcacagtgaaccaacccactttatgaaggcactttaacattaaaatagcttaaa

SEQ ID NO: 402406 - DNA, 179 bp, Homo sapiens
ggtcttaaaaattgaagacctggaagagcttttgtttgtgtgaattatgtcaagatttaccatattagaaactaaaactgagaaaaattttaagttatttattaatattaaaataacagtaataaagcctgctaatacaagtaatgtgattttttaataaaaataacatttttaatttt

SEQ ID NO: 402407 - DNA, 467 bp, Homo sapiens
aataaagtgtaagattgaaaaaaaatcaagaaataatagtcgaagcatattatttagaacatggaggtgaatatcagaagaatcagctatagagacgaaagcagctgcctctggtaagcagggctgagaatgtgggaacgtatgcagcacggaactgctctttttgttataaacttgaggtatcatttggcttttaaatcatgtacatgcataaaacaaaaaacctcaacctgaaccaaatgtggcaaaatctgttaaactgagtggtgggtattctcgcatttcatatgtcactctctattcttttcttgttttaaaataattcctatttttttaaattccctttttagctctagaaattccattaatctattactcattacaatgttagttgcccctactatgtggatggagaagagcataaatgaagaaaaatacagtgttctttacattaaaggaaaaaaaaa

SEQ ID NO: 402408 - DNA, 490 bp, Homo sapiens
gggtggatgtgggcatcatcgtggtcgttgagtgtggatgccgagaggcttcacgcaggatggagggtggatgtggcacctgctgaactgagagtggatgtgggcatcatcgtggtcgttgagcatggacaccgagagccttcacacaggacggagggtggatgtggcacctactgaaccgagggtggatgtgggcatcatcatggttgttgcgcgtggacaccgagagccttcacacaggatggtgggtggatgtggcacctgctgaacagagggtggatgtgggcatcatcgtggtcattgagtgtggatgccctccagaccctgtggctttgctggacagagaagtcttgcacaggtgaggagatgaagttgatgttgggctgtgggggcccaagggctcataaaaatgaaagaacacatatttgggggcaccccatgccacacaaataagcacattttgggtaatgggttgaggtggatgaaaact

SEQ ID NO: 402409 - DNA, 346 bp, Homo sapiens
gaaggggacagttgcccacatagccaagtcagtcccagggatagtgaacaataagttgcctccagaacttcaagattaggagccactggataatgagagtcagcacagggacaaaacagatgtcaaggattcttcttttgtcatcctgagtccatgtgactaaatttcaagagggcaggttagaaaaagcaaagttgatggggcattacctgtggtttgaacttctacctgtcatatttcaggaaatcaccatgaggagcttgacttaggaaattaaggaagacgtgtccttttgttgattttcacatgggaagacaagggtgtgtgtgtgtgtgtgtgtgtgtgt

SEQ ID NO: 402410 - DNA, 435 bp, Homo sapiens
aatttacttaaggaaaaaaataattgacactagtaagtttttttatgtcaatcagcaaactgaaaaaaaaaaaagggtttcaaagtgcaaaaacaaaatctgatgttcataatatatttaaatatttaccaaaaatttgagaacacagggctgggcgcagtggctcacacctataatcccagtacattggtaggcaaggtgggcagatcacctgaggtcaggagttcaagaccagcctggacaacatggtgaaaccctgtctctactaaataatacaaaaattagccaggcgtgctggcgggcacctgtaatcccagctactcgggaggctgaggcagggagaattgcttgcaccagggaggtagaggttgcagtgagccaagatcgcaccactgcactccagccagggcaacagagcaagactccatctcaaaa

SEQ ID NO: 402411 - DNA, 539 bp, Homo sapiens
tgcccaggctggtcttgcactcctgggctccaagcagtcctcccacctcagccttccaatgtgctgggattacaggcgtgagccaccacacccagctgagtttatcaaaattgaatcagtctaagggcctcttgaaggaaaaagttaatattttaaggacacattttataattaaatgttttgaatttcatttttcagttttcatgtttcaaactgagtaattaacatttgtattatatataaagatatttgctaagccaattatagtgtatttttaaatgttactggaatataatatacatatagagaaatgcacgtatgagtgaacagttaaatgaatctgtaaagtcagcatcccctgtgtggtccacacctacattgaaaaatgggatctgaccagggctctggaggcctcctgctccttctgaggcactgccccttccctagggatgagtgcctggctcctggtgccatagactgctctgttagtttcgttcttcatgtgtataaacaagatcatgtagtattcactctcttgt

SEQ ID NO: 402412 - DNA, 1004 bp, Homo sapiens
gggttcaagcaattctcctgccttagcctcccgagtatctgggattacaggcaggcatcaccacgcccggctaattttgtatttttagtagagatggggttactccatgttggttaggctggtctcgaactcccaacctcaggtgatccgcccacctcagcctcccaaagtgctgggattataggcgtgagccactgtgcccagtgctcctctgtatttataattcacacttgatatgttcctgtgtcaattttgggtctcttttgtgacttaatttcagttcatttctatgattttaaaagttgcggggaggcttcccgactttttcagtgcccattattatcaggtactgaaattaaaaagaggaagaggaaattagatttgagagaatatggtatgtcgtgctgttgctagacattttacagacctcctttaatattcagtgaacaaggtaactgaatactgacaaggatgtgtcatgcagggatgagaatcagcctggattttagtcttcattttgttaccaagatgatttattaaccttgacaaattatttccttttctgggcttctacttcctcatctacaaaatggggaaagagtgttggatagattaggttctaatctggctctaagattttatgactgatctttttgatagcttgaaatctcaacataacccttttaattgaatgctttcaaaaggactaagtagcaatcactttcttgcttactaactcaaattacaagaaaaacaaaaagttatcccttttttccccgcaaacaactttagtgactatagaaaaaaattgaggcacctatgtagtgttgttttaagtttgcagcttctaatgtaagcttttcttctgaaaggactagggctgggtgcagtggctcacacttgtaataccagcaccttgggaagctgaggtgggaggatcacttgggactaggagttggagaccagcctgggcatcatagagcggccaccctgtctctacaaaa

SEQ ID NO: 402413 - DNA, 261 bp, Homo sapiens
ggcacagccagtgaccttgaaggattcagtgcacaggatgtaaagatcaaggtgcccccaacacatgccacacacgctaccctcacacacgctgcccacgaaaggcctcagaacacccgctcctgccccacatccacactgctcaagtccaaatcaagtccttcctgtggcacaagagcctgttgcctcctccaccccagcccccagggaccactgccgagtcccaggtgctgcagggcagatggggacccagggacagag

SEQ ID NO: 402414 - DNA, 442 bp, Homo sapiens
cttttgtgttcccaagctacaagatcaagctgcagagaccattgaagctctgcatgcagcaggcctgaaagtctgggtgctcactggggacaagatggagacagctaaatccacatgctatgcctgccgccttttccagaccaacactgagctcttagaactaaccacaaaaaccattgaagaaagtgaaaggaaagaagatcgattacatgaattattgatagaatatcgcaagaaattgctgcatgagtttcctaaaagtactagaagctttaaaaaagcatggacagaacatcaggaatatggattaatcatagatggctccacattgtcactcatactaaattctagtcaagactctagttcaaacaattacaaaagcattttcctacaaatatgtatgaagtgtactgcagtgctctgctgtcggatggcaccatta

SEQ ID NO: 402415 - DNA, 445 bp, Homo sapiens
cctgacttttgtatcttgaaggaatgacttctagtgtgtttgttcatacttggttgttgggcaatcattaaagagatttagtctagcagtccagataagagaatctctttccatttatttaatcacttcacagtcctgggatacctagactttgagtcattgctgaggctatatcgtcactttagagttgaagcaacaaaccaagaaacttatctctgaggtcatctgttcctcttcacctcagctttcatgagaggcttgtcttaaaactgagatatatatattcttagaagaggcatggtgaacatacggaaatttaaacctcagggtaacagttttccttgtacagtaataaagatgtatctggagtcagtggctacaggatcaaaaaatagatcacagtaatcggatcaaacctgagaaatggctttttgctgtgtttaaa

SEQ ID NO: 402416 - DNA, 3064 bp, Homo sapiens
cctcctgggtagctgggactacgggtgcccgccaccatgcctggctaattttttttgtatttttagtagagatggggtttcaccgtgttagccaggatggcctcgatttcctgacctcatgatccgcccgccttggcctcccaaagtgctgggattacgggcgtaagccaccgcgtctggcctattttgtttttttttaaagacagttcattattgtctatcttaatatgttagaaatcactcaaaataaagcagctgttttaacaatagctcagtagaaatagtttgttgagagtgttttacttcccaagaagttttttgatgtagttttcttagcaggaaaaatgtttgtctgttgtggatggaaacatttccccccttgcccagaacatgtgtggtttccattaacttatttttccatagaactttggccatggctgtagctgatgctgtgggtcacctgtgctattagggttaaattgagatcttaaggtacctttctccccgctgtagtccggaatgacatgggtttgtgatcagacaaactgattgaaatcccacctttttgcccctcaccggctttttcacgctggaccgactcgcttctctaagtctcagtttcctcatctgcaaaacagacttcacgggaaaacattttgcacagagctgcccctgcatcatgggtcacagacagtagtaattaatgttactggggaatgggcttttccagtactgttttcagacttaaagtcatttgttatctgtggtgtgttatgggaacagaagatgttcctgagagctgataggagagaccaggaagtgtagctgcaggaagaatgacgatgagggcacgtttggaacatcagcgtggcggatgtgggccagctgaagtgtccccagcattaagactgggaaagcagcccagtcacttctctagtgggtcccagccacaggtgcagaggacgcctgcctcccaggcagacccaggaagctgccccatggggccactctgccctagtcaaatactgcctcaggttcagttggaagtttccagtcggctcctccaaagggagttttagttgaagtcactagagctgttttattgattttggttgaggtctttgtgagctcaatttacaaaaagtctggttatccacaaaaaaatgcttgctggtgtcctgagcaactgaagaattccagaaacctttcaacaacaagtgttgagatctcccctgacccccgcctcccagcaactacagaggtctgagtttgcagtaactattattcttgtgtggaattggctctggatcgttaataagtttccctgagcgctgactaacagaaacccacttagtcacagaagaaatgggtccagtgtttgtcccagctatgagtaatgggttatgcatgatttaaaaaggcttctcagaaaggccttgcttatgtagtcaaggatcaatatttttgaaaagaagtttttataggtaagccataacattacttgataatcagacatcattttcaagtagttaaaagggtcattggataaagctcagtggaccgacactggcttcctaattgctaagggctgaaactccacatgccctgtaaattatgagcatgcttgaattttttatgggaaaagaaattatggttttatgtcggataattttcatgtcaaatgttagatcagccagccggctctatcatccaggcaggttgttgtttttccccacctgatccctgcttttccttgagaagtttattttaaatggagagtcaggaatgagagagaacgtaggataggaatgaatcatgagaaaaatgccaccagttgttttccatagtccgtgtccttgttggaatatccttacctttgtcaacagagagtagcagttcatccacaagctcgtgagcagccactggcagcactgcctccatgaggcctcgggagcattctcattgttttctccaggctgtgctgttcttcccctcagccttgagagtgaccagggatctcctaggcctagggaaacgccacctggtcattggccagagccgtttctagatatggtatctgacccctgtgtgagtaccgactgcccaagagctggcagtagttttgtactctgagcctgagcgtgtggccccacgttccatgaggcctttggccggtttgtttgccagagtgtctctgagaggagggagaatgttggtatggagaataattttattgctttcttctcaaaataaaggaaatactcaagggaatggtgggaggggaggggataaatatagcgtttccgatttcctgcttcctctactcttccacagcatttcacttttcatacggttagattttcatcctatcgacttcagctaaaaataattccaaccatttctatcagattggccctcttatcatacttgttattattttgctttcctattcaaaacctttttttccccttaggccaatgaactgttttactttattagcttcatatttatttatttgttattgatggataataggtatacatagttttagggtacatgtgatttagtaccatcatataatttataaaaatcaaatcattatatttgggatctcaatcaacttaaatatttgtcttttctttatgctagaaccattctcaatagcttttctacagggaataaaagatggtctacagtgctcacctgctgcacctggtgcatgtgtcatggtcttatggctggggcagtcttggtgtcctggcttttggatggtcagaaattctggcttgtccttgttcttccttctcccgtgatccattttcccagcagaggccattacatatgctggtgtccccctactccttccagccttctgttaacagatactgtcagcccacagccactgcagacgtggcccattgctacttccttgtccacagcaacagtgctggatacggctcagtgccttgtcagacagacaagagttgttgatgagtctgcaaagcagagctggtaggttagctgccagagctgaccccactgagcaaagcagtgagtttagtag

SEQ ID NO: 402417 - DNA, 521 bp, Homo sapiens
atttccttaggaaactattatttccccattcaaattattaaaatggagcctgtatatattttttttaattttcaatcacctattgtccctccaaaattctcacccagagggggcggtatttattttccccacctcctttctgctgccactttgcccatagatacctgtccctggacattagagaacagtgaaatatccaaaactggtgaagttacaaattccttcagaaattcaataaacatcaaaagccaaagttgccattgtaggtgtgggcggcaatcaatttttcattattaatctccatacttcttatttcagacattttggtaaatatcttctctgtatgtgtttacagcttcctgggagaagatcttcaaagccttctgttctctcaatgagcagtggctatcatgaaatctctttttcccatgtgcccacactgtcttcctgatagttacaatgattccttccaaaaaaataaatcagttcccattctcctccaagaagccagcttctataac

SEQ ID NO: 402418 - DNA, 507 bp, Homo sapiens
ctgttatgcctcttagcagaggcggagcacaatcaggaaatgagtggccgttctctccttcgtatttccagcaagttgcagttgtggctgagcaagttcctgtgcgactgcatgaaagtgatttgttggggggcagatgaacagcatggccagatgccttggagcccagctcatccaggactttcattttcccctctgaagaacagcctgtgttgttcacatgagaaccgactgcacctccgagaacatcatttgtcccgttttgtagggtagatttgccctttatgagggtggagcctgtacacaggacctgcggcagcgtttgacgttggccagggctgggaaggcttaactgttggatgctatcagggctgcttgtgagtcagaaagcttcataccacccatgaggcttgcttagtgctgtcctcgtttctggaatgacacacagtcaccttatataaaccactctacatgtttattactttctattgacatttaaaaatgatg

SEQ ID NO: 402419 - DNA, 397 bp, Homo sapiens
tgcagtagtctaccttcgccacatggcctccattgatccctgaaatgggtgaggggctccttgtttctgctgggcaggagtggactttttggatctgatctggggctgtactcatacctttgtggctgggagggttcgatatttttcagcactgtatccaatatcacctgcacagacaccttaggggatggggacttgctgttgcctggcagggatgaaagtgccagctccctaattggccacctccgacagcaccaaggtagacaggagggatgttacagcttagcaagcatgttacactgagccccctagttggcctttgctggcatgtgtggaagtggggatcaaactatatttctgtggtgttaactagagtaaagcagctcactgtctaaaa

SEQ ID NO: 402420 - DNA, 217 bp, Homo sapiens
atattttctttatagaagttcaaagagaggaaactaaaactcatttttcagccataatgtttaattaactttagagataagttagagagctatcctactgaacataatgcttttgagaactacctatattttagaagtacaaatagttgtttcattgtttgggattccatattaaatctctcttagtccattcctgctgctattgaaacttctaaaa

SEQ ID NO: 402421 - DNA, 405 bp, Homo sapiens
gtttattttcccattctgtgaatctgggttgctctcataatttttgtccaggaaagtaaagtagaagtgttgttgtgtcagctctgagcttaggcctcaagagaccttatagtttgtgttcttactggtcttggaaccccaccacgctgcatataagccctgtgccaagttgctggcagatgagagaccatgtagaacagagatgaaccatcccagcttagccatcttagaccagccagcccccagattccctggcaggaaacacagatgcatgaaaagcccagctcaaaccagcagagcttgagctcaagccaaagtaccaacccacagaattgtgagctatataaatggtggttgtgttaagtcactaattttttgagacggtttcatgaagcaaaaaacaat

SEQ ID NO: 402422 - DNA, 362 bp, Homo sapiens
aaagactttagagagaaagctaaggttaaaagaaaaataggactatgataaggtagaagttaggataatactctaggactcaaagacagcataagtaccattttaggagaaaaacccaacgctgtttaaaatattcaaggattaaggttcattaaagaggaatagtaggcatttggattagaaaattaaggctcagattatatagagtcttagactgctagagttaggaaggaatgaattgttgatggtttcttggctgaagggtgaggagttcaaaagggtgttttaagatccaaatggtataactaacctgcacaatgtgcacatgtaccctaaaacttaaagtataataaaaaataaaa

SEQ ID NO: 402423 - DNA, 343 bp, Homo sapiens
ttccagatttactacacccttgcatggacccaccagtttgtacgtgaacatttatgagtgtgagtccttgtttttttttcctgtcttgaccactggattatgaacagagaaggtcagggaacagaattgtgttccctgctctgcccagcacttggaacagcgcttggaacagagcggtcactgcgcaaataatagcggaatggataaatgaacgcaaggaggcacaggaatcccagaggccgctccaaccgggagcccgacccctcatcccaggctctaggatccgcgacagccggcgaggggcgccagggagcccaaggcacgcgccaaccctctgcggccg

SEQ ID NO: 402424 - DNA, 618 bp, Homo sapiens
aaagctcttcaccacacagcctgtcatagattcttagtgggccatgtggtgaggtctgcaggcagacctgctgctgtaacatgaaaacagggtgtcttggtttggtttctgggtcagcgggtaggcaggactggcacctagatccaaaggcaccaactaggtgcttgggaatgtggagtcagacctggaacctggctcccccagggcaagcctggagattgggtcccctaggataggcatgaatcctgatcccatataatctggcctggtttcattaggtcctaaaggtaggagcctgtcaactggatccataagggccaacctgcagctgtgtttgttgagaccaacttaaaatctgggtccacagtagctggctttctgctggtgttggctttgagcctgagtctgcaaagatcagtctgactctggggtgaacatggtgtctgcgtccacaggggcatgcctgaaatttaagtttaagaaattaaacactttttaaagttacggaatctgatcaagatgttattaagtgacctactacccagtgagagagaggattaggcataacttatttggggtggcagttattgttaaataataaaaccaattcatatttat

SEQ ID NO: 402425 - DNA, 455 bp, Homo sapiens
taaacatggcaaaggagagtttgcagtgtgattaacggtatagatctagagatgggggggatcatcctggattatctgggggcagaggggccagtctagtgacttgagtcctcaagagaggaagggaaaggcagaagggtgggttaaaaagactcactatgagaagtacttcatccttcatttctagctttgaagatgcaagtggggaccatgagccaagcagtgtgacaggctctaagaagctgggaatgtctgtcagctgacagtcaataagaatttgaggaccttcttcttgcacccacagtaaattcatttctgccaacaaactgaatgagattgtcccctagagcctccagaaaggaacacagcttactgtcatgtttattttagtttggtgaaacccaacccagactttccatctatggacctataattaaaatagtttgggggcattc

SEQ ID NO: 402426 - DNA, 192 bp, Homo sapiens
catgacccactaaattcatttcacatttgactgtgaggcatgacccacagttatggggtagctttacagggcaaagaagtacaagctgccgtttggtactcattagatacctttaactgtgctaagtattgaagaaaagcaagatactgcttacaaattgaaggcggtgaaaaggcatacaatatgggcata

SEQ ID NO: 402427 - DNA, 903 bp, Homo sapiens
cgcggagcgatgagacgttgtgaattagatgtgagaagagggacgcttggtctgcgaccaccaagaccccacaggatcgatgcacccacccctgctgatgaccatgaccatctaaaggggaacatcatttgaggggccctactcatggatcagaagcccctcttcactgtggggtgtgctgggttggcgggcagttgccgtggaatcagtttcctcaggacccatatctgaccaccctcataaggttgtcagggcgattccaacattcggggttcccagcagcccagatcccccacatccagctcttcagcctactcagagctctccacgctcactcacatgtccctctcgcaagtagcccgatcaactcacctggtgtcatgggcactaaggtgttaatggattttctctggtcacctttgcagctccactgttttgagtgagttattttaaggggagaaggtgctcctcagacggttgtcacagtgatatttttcctttgtgactgccaggttagcccctttcacctgtaagagctttgagcctagatttgttattcatttattcaagttttactgagtggtgtcatgccaggcacttgtttaggtataaggataaggcagtaaacaaaatatagactctagggacgtggaacttacattccagtgggggtaaagagatgatacataagtaaatgtagatcagatggtgaccgatgttatgaagaaatgtagactggggtaagaatagagtggcagaggaggtgctattttacacacgaagatcagggacaggtctacccttaatatttgcaagaactgagtcagtagtacaaatggaggcccacatatcatgtctacatattttaaaactacaaattaaacggtgatgtaaaattcctat

SEQ ID NO: 402428 - DNA, 297 bp, Homo sapiens
acactttagaggtatagttagcagatatttgtaattttcatgtgtttgcagactctgcaatgttgctgtcaatatatttttagtttcttcctgtttgataagggtataccatacagatgctgctgtggatgcagtattggccccagtcagagtcttgctaccatgagaatctctgctccaggcactatggtcctccctgggcttactaagccagacaagcttccacagagaatgtgatgtttattgaacaacatggaaattggatataaaacctttatgagtgtttgtatcagtaaa

SEQ ID NO: 402429 - DNA, 471 bp, Homo sapiens
gagaaggtgccttaaacaggttcccacgcatttcctggcgctattgagcttggagctgccaagggcctgccttcacttgtggcatcgcagttactgactctccagtgggccaggccctacctagctgggacctgagggtcaggatacgggaagagggctactgccgccctgacttgtaggtaagctaaaacatctaggcaaattactctgtcaactgtcctccctgctcagcctcaggaagaaataagttcctgctgggccccaggctcagccacaaaaccagactgagcacatctgggccttgtgctacaccggggtccccatcagctgctcagaccccaggaagcctcctgacttccagaacacgtcgcttcccaaagctgaccctgttccccctttcacctgccccccaagcctaagttagaaaacaagttaaaggagagaaagtgtgtgcaggcacttcagttaagc

SEQ ID NO: 402430 - DNA, 193 bp, Homo sapiens
  misc_feature (133)..(133): n is a, c, g, or t
  misc_feature (141)..(141): n is a, c, g, or t
  misc_feature (168)..(168): n is a, c, g, or t
aaatttttaacagtatagaaatttccatggaaaataaaaatgcatttgaattcaggaagaaggatactaaaatacatccaagttgagatggttccgtaggtattttttgggggggatctgattaacatttaantcagtagnctttgtataaaatagatcacccttggncctcattcaatcagttgaggcctta

SEQ ID NO: 402431 - DNA, 3928 bp, Homo sapiens
gtcgaggtgagggagtgaaatgcttaattcaggaatggattttggagtttctgggtgctgaagaaatagggcctttccgcctgcgggcccagtgagtcgacacggtgggggcccgcgatccccggaacttaccactgaataaatccagtccagcgtgcgacgacttactggcttcatggggtcgcagccgccgctggggtctccgctgtctcgcgaggagggtgaagcgcccccgcctgctcccgcttcggagggtaggcggagaagtcgccgggtacgccttcgcggatcctgccgacaccgacctagctttctgggctgccgggagctcgcggcgagcgccccagccaggcctgcgccggcatcctccgagataatggcatcagctgctaaggaatttaaaatggacaacttttcacctaaagctggcactagcaaattgcaacagacagtaccagctgatgcatctcctgattctaagtgtcctatatgcttggatagatttgataatgtgtcttacttagatcgctgcttacataagttctgttttcgctgtgtacaggagtggtcaaaaaacaaagctgaatgcccactatgtaaacagccctttgattctattttccattctgtgagggcagaagatgacttcaaggagtatgtcctaaggccttcgtataatggttcttttgtcacccctgatcgacgatttcgctaccgtacaactctgacaagggaacgaaatgcttctgtgtattcacctagtggtcctgtgaacagaagaacaacaactccaccggatagtggagtactgtttgaagggttaggcatttcaacaagacctagagatgttgaaattcctcagtttatgagacagattgcagtaaggaggccaactacggcagatgaaagatctttgcggaaaattcaagaacaagatattattaattttagacgaactctttatcgtgctggtgctcgagttagaaatattgaagatggtggccgctacagggatatttcagctgaatttttccgtagaaatccagcttgccttcacagattagtcccctggttaaaacgtgaacttacagttctttttggagctcatggatctttagtgaatattgtccagcatattatcatgagtaatgttactcgctatgacttggagagtcaggcatttgtgtctgatttaagaccatttttacttaatcgaactgagcattttatacatgaatttatcagttttgcccgatctccttttaacatggcagcctttgaccagcatgccaattatgattgccctgctccttcatacgaagaaggcagccattctgattcttcagtcataacaatatctccagatgaggctgagacccaagagctggatattaatgtagccactgttagtcaggcaccatgggatgatgaaactccaggaccatcttactcaagctcagagcaggtacacgttactatgtcttctcttttaaatacttctgacagttcagatgaagaacttgtcacaggaggagccacgtctcagatacaaggagtacaaaccaatgacgacctaaataatgacagtgatgattcttcagataattgtgtcattgttgggtttgttaaaccactagctgagaggaccccagaacttgttgaactgtcctctgattctgaggacttaggttcttatgagaaaatggagacagtgaagacacaagaacaggagcaatcttacagttctggtgatagcgatgttagtagatgctcatctccacactctgtccttggaaaggatgaacaaataaataaaggtcattgtgattctagtacaagaatcaaatcaaagaaggaagagaaacgatctacatcattgtcatctcccagaaacctgaactcatctgtaagaggagacagagtatattctccatataaccatagacacagaaagaggggaagatcaagaagttcagattcacgttctcagagtagaagtgggcatgatcagaagaatcatagaaagcatcatgggaagaaaagaatgaaaagtaaacgatccagaagcagggaaagtagcagacctagagggagaagagacaaaaagagatcaagaactagagatagcagttggtccagaagaagccaaactctgtctctaagtagtgaaagcacaagcagatcaaggtctcgtagcagtgatcatggtaaaagaagatcacggagcagaaatagagatcgttattatttaagaaataattatggaagcagatacaaatgggagtatacttattacagtagaaacaaggacagggatgggtacgaatcatcttacaggaggaggactctgtccagagctcattattctagacagtcttcaagtccagaatttagagttcagtccttttctgaaagaacaaatgctaggaaaaaaaataatcacagtgagaggaagtattactactatgaaaggcacagatcaaggagcctgtctagtaacagatcaaggactgcatctaccgggactgaccgggtgagaaatgaaaagcctggagggaaacgaaaatacaaaacacggcatttggagggtactaacgaagtggctcagccatctcgtgaatttgcttctaaagcaaaggacagtcattaccaaaaatcttcatcaaaattggatggaaactacaaaaatgagagtgataccttttcagacagccgatcatcagacagagagacaaaacacaaaaggagaaaaaggaagacccggagcctaagtgtagagatagtttatgaaggaaaagctactgatacaactaaacaccataaaaagaaaaagaagaaacataagaagaagcataagaaacaccatggagataatgcttcacgttccccagttgtaattaccattgacagtgacagtgataaggattctgaagtaaaggaggatacagaatgtgacaatagtggtcctcaagaccctctacaaaatgagtttttggctccttccttggaaccatttgaaactaaagatgtagttacaatagaagctgaatttggtgtgctggacaaggaatgtgatattgccacacttagtaacaacttgaataatgccaacaaaactgtagataatattccacctctggcagcttcagttgaacaaactctcgatgtaagagaagagagcacctttgtttctgatttggagaaccagcccagtaacattgtgtctcttcaaactgagccatcaaggcaattgccatcgccacggacatcattaatgtcagtatgtcttggtagagactgtgatatgtcttaaaactgccaaagcatttcattgagaattatgatgttataaaaaggaaaaaggaagaatgtcgtctactgcagtctatttaaagatgacatttggtgaaaactctcttcctccttacaatattttaaatgattttttttttggtgttaatttgtaaaaatcattatttgttcaaaatgtatgtcccaccctcaaagatatgcacttttaagtgaagaaaatgatactgctagcagcttatttaaaacttggggtcctttttaaataagaaaaattatataaattttagaagttatttcataaagccatacggtattgacatatttttaaggtagtcaatgagtatttttgaattttttttttttgagagttattctggaaatgtgttataagctaggagaatccctttggacagtctttatttttcttcttaaaaatttatatgattcaaaaccatttcttcaggttaaattgaggcattttaatctgcacagtttatcttctgccaaaataaaaatttactatttcctttatatacttgtttatctggactgccagtaaaacaaatgtgtattcaacaaaagaaaaaaaataaaacagtaacactttaaaacaaga

SEQ ID NO: 402432 - DNA, 3733 bp, Homo sapiens
gtcgaggtgagggagtgaaatgcttaattcaggaatggattttggagtttctgggtgctgaagaaatagggcctttccgcctgcgggcccagtgagtcgacacggtgggggcccgcgatccccggaacttaccactgaataaatccagtccagcgtgcgacgacttactggcttcatgataatggcatcagctgctaaggaatttaaaatggacaacttttcacctaaagctggcactagcaaattgcaacagacagtaccagctgatgcatctcctgattctaagtgtcctatatgcttggatagatttgataatgtgtcttacttagatcgctgcttacataagttctgttttcgctgtgtacaggagtggtcaaaaaacaaagctgaatgcccactatgtaaacagccctttgattctattttccattctgtgagggcagaagatgacttcaaggagtatgtcctaaggccttcgtataatggttcttttgtcacccctgatcgacgatttcgctaccgtacaactctgacaagggaacgaaatgcttctgtgtattcacctagtggtcctgtgaacagaagaacaacaactccaccggatagtggagtactgtttgaagggttaggcatttcaacaagacctagagatgttgaaattcctcagtttatgagacagattgcagtaaggaggccaactacggcagatgaaagatctttgcggaaaattcaagaacaagatattattaattttagacgaactctttatcgtgctggtgctcgagttagaaatattgaagatggtggccgctacagggatatttcagctgaatttttccgtagaaatccagcttgccttcacagattagtcccctggttaaaacgtgaacttacagttctttttggagctcatggatctttagtgaatattgtccagcatattatcatgagtaatgttactcgctatgacttggagagtcaggcatttgtgtctgatttaagaccatttttacttaatcgaactgagcattttatacatgaatttatcagttttgcccgatctccttttaacatggcagcctttgaccagcatgccaattatgattgccctgctccttcatacgaagaaggcagccattctgattcttcagtcataacaatatctccagatgaggctgagacccaagagctggatattaatgtagccactgttagtcaggcaccatgggatgatgaaactccaggaccatcttactcaagctcagagcaggtacacgttactatgtcttctcttttaaatacttctgacagttcagatgaagaacttgtcacaggaggagccacgtctcagatacaaggagtacaaaccaatgacgacctaaataatgacagtgatgattcttcagataattgtgtcattgttgggtttgttaaaccactagctgagaggaccccagaacttgttgaactgtcctctgattctgaggacttaggttcttatgagaaaatggagacagtgaagacacaagaacaggagcaatcttacagttctggtgatagcgatgttagtagatgctcatctccacactctgtccttggaaaggatgaacaaataaataaaggtcattgtgattctagtacaagaatcaaatcaaagaaggaagagaaacgatctacatcattgtcatctcccagaaacctgaactcatctgtaagaggagacagagtatattctccatataaccatagacacagaaagaggggaagatcaagaagttcagattcacgttctcagagtagaagtgggcatgatcagaagaatcatagaaagcatcatgggaagaaaagaatgaaaagtaaacgatccagaagcagggaaagtagcagacctagagggagaagagacaaaaagagatcaagaactagagatagcagttggtccagaagaagccaaactctgtctctaagtagtgaaagcacaagcagatcaaggtctcgtagcagtgatcatggtaaaagaagatcacggagcagaaatagagatcgttattatttaagaaataattatggaagcagatacaaatgggagtatacttattacagtagaaacaaggacagggatgggtacgaatcatcttacaggaggaggactctgtccagagctcattattctagacagtcttcaagtccagaatttagagttcagtccttttctgaaagaacaaatgctaggaaaaaaaataatcacagtgagaggaagtattactactatgaaaggcacagatcaaggagcctgtctagtaacagatcaaggactgcatctaccgggactgaccgggtgagaaatgaaaagcctggagggaaacgaaaatacaaaacacggcatttggagggtactaacgaagtggctcagccatctcgtgaatttgcttctaaagcaaaggacagtcattaccaaaaatcttcatcaaaattggatggaaactacaaaaatgagagtgataccttttcagacagccgatcatcagacagagagacaaaacacaaaaggagaaaaaggaagacccggagcctaagtgtagagatagtttatgaaggaaaagctactgatacaactaaacaccataaaaagaaaaagaagaaacataagaagaagcataagaaacaccatggagataatgcttcacgttccccagttgtaattaccattgacagtgacagtgataaggattctgaagtaaaggaggatacagaatgtgacaatagtggtcctcaagaccctctacaaaatgagtttttggctccttccttggaaccatttgaaactaaagatgtagttacaatagaagctgaatttggtgtgctggacaaggaatgtgatattgccacacttagtaacaacttgaataatgccaacaaaactgtagataatattccacctctggcagcttcagttgaacaaactctcgatgtaagagaagagagcacctttgtttctgatttggagaaccagcccagtaacattgtgtctcttcaaactgagccatcaaggcaattgccatcgccacggacatcattaatgtcagtatgtcttggtagagactgtgatatgtcttaaaactgccaaagcatttcattgagaattatgatgttataaaaaggaaaaaggaagaatgtcgtctactgcagtctatttaaagatgacatttggtgaaaactctcttcctccttacaatattttaaatgattttttttttggtgttaatttgtaaaaatcattatttgttcaaaatgtatgtcccaccctcaaagatatgcacttttaagtgaagaaaatgatactgctagcagcttatttaaaacttggggtcctttttaaataagaaaaattatataaattttagaagttatttcataaagccatacggtattgacatatttttaaggtagtcaatgagtatttttgaattttttttttttgagagttattctggaaatgtgttataagctaggagaatccctttggacagtctttatttttcttcttaaaaatttatatgattcaaaaccatttcttcaggttaaattgaggcattttaatctgcacagtttatcttctgccaaaataaaaatttactatttcctttatatacttgtttatctggactgccagtaaaacaaatgtgtattcaacaaaagaaaaaaaataaaacagtaacactttaaaacaaga

SEQ ID NO: 402433 - DNA, 3554 bp, Homo sapiens
gtcgaggtgagggagtgaaatgcttaattcaggaatggattttggagtttctgggtgctgaagaaatagggcctttccgcctgcgggcccagtgagtcgacacggtgggggcccgcgatccccggaacttaccactgaataaatccagtccagcgtgcgacgacttactggcttcatggggtcgcagccgccgctggggtctccgctgtctcgcgaggagggtgaagcgcccccgcctgctcccgcttcggagggtaggcggagaagtcgccgggtacgccttcgcggatcctgccgacaccgacctagctttctgggctgccgggagctcgcggcgagcgccccagccaggcctgcgccggcatcctccgagataatggcatcagctgctaaggaatttaaaatggacaacttttcacctaaagctggcactagcaaattgcaacagacagtaccagctgatgcatctcctgattctaagtgtcctatatgcttggatagatttgataatgtgtcttacttagatcgctgcttacataagttctgttttcgctgtgtacaggagtggtcaaaaaacaaagctgaatgcccactatgtaaacagccctttgattctattttccattctgtgagggcagaagatgacttcaaggagtatgtcctaaggccttcgtataatggttcttttgtcacccctgatcgacgatttcgctaccgtacaactctgacaagggaacgaaatgcttctgtgtattcacctagtggtcctgtgaacagaagaacaacaactccaccggatagtggagtactgtttgaagggttaggcatttcaacaagacctagagatgttgaaattcctcagtttatgagacagattgcagtaaggaggccaactacggcagatgaaagatctttgcggaaaattcaagaacaagatattattaattttagacgaactctttatcgtgctggtgctcgagttagaaatattgaagatggtggccgctacagggatatttcagctgaatttttccgtagaaatccagcttgccttcacagattagtcccctggttaaaacgtgaacttacagttctttttggagctcatggatctttagtgaatattgtccagcatattatcatgagtaatgttactcgctatgacttggagagtcaggcatttgtgtctgatttaagaccatttttacttaatcgaactgagcattttatacatgaatttatcagttttgcccgatctccttttaacatggcagcctttgaccagcatgccaattatgattgccctgctccttcatacgaagaaggcagccattctgattcttcagtcataacaatatctccagatgaggctgagacccaagagctggatattaatgtagccactgttagtcaggcaccatgggatgatgaaactccaggaccatcttactcaagctcagagcaggtacacgttactatgtcttctcttttaaatacttctgacagttcagatgaagaacttgtcacaggaggagccacgtctcagatacaaggagtacaaaccaatgacgacctaaataatgacagtgatgattcttcagataattgtgtcattgttgggtttgttaaaccactagctgagaggaccccagaacttgttgaactgtcctctgattctgaggacttaggttcttatgagaaaatggagacagtgaagacacaagaacaggagcaatcttacagttctggtgatagcgatgttagtagatgctcatctccacactctgtccttggaaaggatgaacaaataaataaaggtcattgtgattctagtacaagaatcaaatcaaagaaggaagagaaacgatctacatcattgtcatctcccagaaacctgaactcatctgtaagaggagacagagtatattctccatataaccatagacacagaaagaggggaagatcaagaagttcagattcacgttctcagagtagaagtgggcatgatcagaagaatcatagaaagcatcatgggaagaaaagaatgaaaagtaaacgatccagaagcagggaaagtagcagacctagagggagaagagacaaaaagagatcaagaactagagatagcagttggtccagaagaagccaaactctgtctctaagtagtgaaagcacaagcagatcaaggtctcgtagcagtgatcatggtaaaagaagatcacggagcagaaatagagatcgttattatttaagaaataattatggaagcagatacaaatgggagtatacttattacagtagaaacaaggacagggatgggtacgaatcatcttacaggaggaggactctgtccagagctcattattctagacagtcttcaagtccagaatttagagttcagtccttttctgaaagaacaaatgctaggaaaaaaaataatcacagtgagaggaagtattactactatgaaaggcacagatcaaggagcctgtctagtaacagatcaaggactgcatctaccgggactgaccgggtgagaaatgaaaagcctggagggaaacgaaaatacaaaacacggcatttggagggtactaacgaagtggctcagccatctcgtgaatttgcttctaaagcaaaggacagtcattaccaaaaatcttcatcaaaattggatggaaactacaaaaatgagagtgataccttttcagacagccgatcatcagacagagagacaaaacacaaaaggagaaaaaggaagacccggagcctaagtgtagagatagtttatgaaggaaaagctactgatacaactaaacaccataaaaagaaaaagaagaaacataagaagaagcataagaaacaccatggagataatgcttcacgttccccagttgtaattaccattgacagtgacagtgataaggattctgaagtaaaggaggatacagaatgtgacaatagtggtcctcaagaccctctacaaaatgagtttttggctccttccttggaaccatttgaaactaaagatgtagttacaatagaagctgaatttggtgtgctggacaaggaatgtgatattgccacacttagtaacaacttgaataatgccaacaaaactgtagataatattccacctctggcagcttcagttgaacaaactctcgatgtaagagaagagagcacctttgtttctgatttggagaaccagcccagtaacattgtgtctcttcaaactgagccatcaaggcaattgccatcgccacggacatcattaatgtcagtatgtcttggtagagactgtgatatgtcttaaaactgccaaagcatttcattgagaattatgatgttataaaaaggaaaaaggaagaatgtcgtctactgcagtctatttaaagatgacatttggtgaaaactctcttcctccttacaatattttaaatgagactccgcacgggggtcactcggtgaactcattatctgttcacatggttgtcccacctctaagatttgccctttaagtgacgcaggtactggctacgcttttttctcggggc

SEQ ID NO: 402434 - DNA, 2281 bp, Homo sapiens
gtcgaggtgagggagtgaaatgcttaattcaggaatggattttggagtttctgggtgctgaagaaatagggcctttccgcctgcgggcccagtgagtcgacacggtgggggcccgcgatccccggaacttaccactgaataaatccagtccagcgtgcgacgacttactggcttcatggggtcgcagccgccgctggggtctccgctgtctcgcgaggagggtgaagcgcccccgcctgctcccgcttcggagggtaggcggagaagtcgccgggtacgccttcgcggatcctgccgacaccgacctagctttctgggctgccgggagctcgcggcgagcgccccagccaggcctgcgccggcatcctccgagataatggcatcagctgctaaggaatttaaaatggacaacttttcacctaaagctggcactagcaaattgcaacagacagtaccagctgatgcatctcctgattctaagtgtcctatatgcttggatagatttgataatgtgtcttacttagatcgctgcttacataagttctgttttcgctgtgtacaggagtggtcaaaaaacaaagctgaatgcccactatgtaaacagccctttgattctattttccattctgtgagggcagaagatgacttcaaggagtatgtcctaaggccttcgtataatggttcttttgtcacccctgatcgacgatttcgctaccgtacaactctgacaagggaacgaaatgcttctgtgtattcacctagtggtcctgtgaacagaagaacaacaactccaccggatagtggagtactgtttgaagggttaggcatttcaacaagacctagagatgttgaaattcctcagtttatgagacagattgcagtaaggaggccaactacggcagatgaaagatctttgcggaaaattcaagaacaagatattattaattttagacgaactctttatcgtgctggtgctcgagttagaaatattgaagatggtggccgctacagggatatttcagctgaatttttccgtagaaatccagcttgccttcacagattagtcccctggttaaaacgtgaacttacagttctttttggagctcatggatctttagtgaatattgtccagcatattatcatgagtaatgttactcgctatgacttggagagtcaggcatttgtgtctgatttaagaccatttttacttaatcgaactgagcattttatacatgaatttatcagttttgcccgatctccttttaacatggcagcctttgaccagcatgccaattatgattgccctgctccttcatacgaagaaggcagccattctgattcttcagtcataacaatatctccagatgaggctgagacccaagagctggatattaatgtagccactgttagtcaggcaccatgggatgatgaaactccaggaccatcttactcaagctcagagcaggtacacgttactatgtcttctcttttaaatacttctgacagttcagatgaagaacttgtcacaggaggagccacgtctcagatacaaggagtacaaaccaatgacgacctaaataatgacagtgatgattcttcagataattgtgtcattgttgggtttgttaaaccactagctgagaggaccccagaacttgttgaactgtcctctgattctgaggacttaggttcttatgagaaaatggagacagtgaagacacaagaacaggagcaatcttacagttctggtgatagcgatgttagtagatgctcatctccacactctgtccttggaaaggatgaacaaataaataaaggtcattgtgattctagtacaagaatcaaatcaaagaaggaagagaaacgatctacatcattgtcatctcccagaaacctgaactcatctgtaagaggagacagagtatattctccatataaccatagacacagaaagaggggaagatcaagaagttcagattcacgttctcagagtagaagtgggcatgatcagaagaatcatagaaagcatcatgggaagaaaagaatgaaaagtaaacgatccagaagcagggaaagtagcagacctagaggagtctcggtgttaccggtggagggtgtgcagccaggttcctggcatcttgaacaaagaattggacaaacgcacatacaagcaaggaaagaatgaagccaccaaagcagccgggtggggtggcctcacgcctgtaatcccaacagtttgggagccaagacggtaggttacatgagccaggagttcgagaga

SEQ ID NO: 402435 - DNA, 290 bp, Homo sapiens
cacttaagtattttcaccaaaataagtttcaaggtctttatttgcatttttgttgagactatttagtcattcctctattatcaggttactgatatatttctttcccttttacagataatggcatcagctgctaaggaatttaaaatggacaacttttcacctaaagctggcactagcaaattgcaacagacagtaccagctgatgcatctcctgattctaagtgtcctatatgcttggatagatttgataatgtgtcttacttagatcgctgcttacataagttctgttt

SEQ ID NO: 402436 - DNA, 686 bp, Homo sapiens
gtcgaggtgagggagtgaaatgcttaattcaggaatggattttggagtttctgggtgctgaagaaatagggcctttccgcctgcgggcccagtgagtcgacacggtgggggcccgcgatccccggaacttaccactgaataaatccagtccagcgtgcgacgacttactggcttcatggggtcgcagccgccgctggggtctccgctgtctcgcgaggagggtgaagcgcccccgcctgctcccgcttcggagggtaggcggagaagtcgccgggtacgccttcgcggatcctgccgacaccgacctagctttctgggctgccgggagctcgcggcgagcgccccagccaggcctgcgccggcatcctccgagaagaggtgcagtatattcaggctgagaaaaacaacaagggcccaatggaggctgccacactttttctcaagttcctgttggagctccaggaggaaggctggttccgtggctttttggatgccctagaccatgcaggttattctggactttatgaagccattgaaagttgggatttcaaaaaaattgaaaagttggaggagtatagattacttttaaaacgtttacaaccagaatttaaaaccagaattatcccaaccgatatcatttctgatctgtctgaatgtttaattaatcaggaatgtgaagaaattct

SEQ ID NO: 402437 - DNA, 4224 bp, Homo sapiens
gtcgaggtgagggagtgaaatgcttaattcaggaatggattttggagtttctgggtgctgaagaaatagggcctttccgcctgcgggcccagtgagtcgacacggtgggggcccgcgatccccggaacttaccactgaataaatccagtccagcgtgcgacgacttactggcttcatggggtcgcagccgccgctggggtctccgctgtctcgcgaggagggtgaagcgcccccgcctgctcccgcttcggagggtaggcggagaagtcgccgggtacgccttcgcggatcctgccgacaccgacctagctttctgggctgccgggagctcgcggcgagcgccccagccaggcctgcgccggcatcctccgagataatggcatcagctgctaaggaatttaaaatggacaacttttcacctaaagctggcactagcaaattgcaacagacagtaccagctgatgcatctcctgattctaagtgtcctatatgcttggatagatttgataatgtgtcttacttagatcgctgcttacataagttctgttttcgctgtgtacaggagtggtcaaaaaacaaagctgaatgcccactatgtaaacagccctttgattctattttccattctgtgagggcagaagatgacttcaaggagtatgtcctaaggccttcgtataatggttcttttgtcacccctgatcgacgatttcgctaccgtacaactctgacaagggaacgaaatgcttctgtgtattcacctagtggtcctgtgaacagaagaacaacaactccaccggatagtggagtactgtttgaagggttaggcatttcaacaagacctagagatgttgaaattcctcagtttatgagacagattgcagtaaggaggccaactacggcagatgaaagatctttgcggaaaattcaagaacaagatattattaattttagacgaactctttatcgtgctggtgctcgagttagaaatattgaagatggtggccgctacagggatatttcagctgaatttttccgtagaaatccagcttgccttcacagattagtcccctggttaaaacgtgaacttacagttctttttggagctcatggatctttagtgaatattgtccagcatattatcatgagtaatgttactcgctatgacttggagagtcaggcatttgtgtctgatttaagaccatttttacttaatcgaactgagcattttatacatgaatttatcagttttgcccgatctccttttaacatggcagcctttgaccagcatgccaattatgattgccctgctccttcatacgaagaaggcagccattctgattcttcagtcataacaatatctccagatgaggctgagacccaagagctggatattaatgtagccactgttagtcaggcaccatgggatgatgaaactccaggaccatcttactcaagctcagagcaggtacacgttactatgtcttctcttttaaatacttctgacagttcagatgaagaacttgtcacaggaggagccacgtctcagatacaaggagtacaaaccaatgacgacctaaataatgacagtgatgattcttcagataattgtgtcattgttgggtttgttaaaccactagctgagaggaccccagaacttgttgaactgtcctctgattctgaggacttaggttcttatgagaaaatggagacagtgaagacacaagaacaggagcaatcttacagttctggtgatagcgatgttagtagatgctcatctccacactctgtccttggaaaggatgaacaaataaataaaggtcattgtgattctagtacaagaatcaaatcaaagaaggaagagaaacgatctacatcattgtcatctcccagaaacctgaactcatctgtaagaggagacagagtatattctccatataaccatagacacagaaagaggggaagatcaagaagttcagattcacgttctcagagtagaagtgggcatgatcagaagaatcatagaaagcatcatgggaagaaaagaatgaaaagtaaacgatccagaagcagggaaagtagcagacctagagggagaagagacaaaaagagatcaagaactagagatagcagttggtccagaagaagccaaactctgtctctaagtagtgaaagcacaagcagatcaaggtctcgtagcagtgatcatggtaaaagaagatcacggagcagaaatagagatcgttattatttaagaaataattatggaagcagatacaaatgggagtatacttattacagtagaaacaaggacagggatgggtacgaatcatcttacaggaggaggactctgtccagagctcattattctagacagtcttcaagtccagaatttagagttcagtccttttctgaaagaacaaatgctaggaaaaaaaataatcacagtgagaggaagtattactactatgaaaggcacagatcaaggagcctgtctagtaacagatcaaggactgcatctaccgggactgaccgggtgagaaatgaaaagcctggagggaaacgaaaatacaaaacacggcatttggagggtactaacgaagtggctcagccatctcgtgaatttgcttctaaagcaaaggacagtcattaccaaaaatcttcatcaaaattggatggaaactacaaaaatgagagtgataccttttcagacagccgatcatcagacagagagacaaaacacaaaaggagaaaaaggaagacccggagcctaagtgtagagatagtttatgaaggaaaagctactgatacaactaaacaccataaaaagaaaaagaagaaacataagaagaagcataagaaacaccatggagataatgcttcacgttccccagttgtaattaccattgacagtgacagtgataaggattctgaagtaaaggaggatacagaatgtgacaatagtggtcctcaagaccctctacaaaatgagtttttggctccttccttggaaccatttgaaactaaagatgtagttacaatagaagctgaatttggtgtgctggacaaggaatgtgatattgccacacttagtaacaacttgaataatgccaacaaaactgtagataatattccacctctggcagcttcagttgaacaaactctcgatgtaagagaagagagcacctttgtttctgatttggagaaccagcccagtaacattgtgtctcttcaaactgagccatcaaggcaattgccatcgccacggacatcattaatgtcagtatgtcttggtagagactgtgatatgtcttaaaactgccaaagcatttcattgagaattatgatgttataaaaaggaaaaaggaagaatgtcgtctactgcagtctatttaaagatgacatttggtgaaaactctcttcctccttacaatattttaaatgattttttttttggtgttaatttgtaaaaatcattatttgttcaaaatgtatgtcccaccctcaaagatatgcacttttaagtgaagaaaatgatactgctagcagcttatttaaaacttggggtcctttttaaataagaaaaattatataaattttagaagttatttcataaagccatacggtattgacatatttttaaggtagtcaatgagtatttttgaattttttttttttgagagttattctggaaatgtgttataagctaggagaatccctttggacagtctttatttttcttcttaaaaatttatatgattcaaaaccatttcttcaggttaaattgaggcattttaatctgcacagtttatcttctgccaaaataaaaatttactatttcctttatatacttgtttatctggactgccagtaaaacaaatgtgtattcaacaaaagaaaaaaaataaaacagtaacactttaaaacaagaatcagacattttcctatgcagtatttttttttaaagtttattttagtaaagttaaaatcttgaaagtagctaagggcataattatgtcataaatactgaacttcaggtgaacaaatactttatagttttaattattttctttgattttgaggagtatcttatttgctttctatcatcagtaaaaacagcatttaacttgctaaataaacatgaaaaacccttgtcatacttcttttacattggtagttctttcatataaagtggttatgttttatcttgttttagggatgataaaa

SEQ ID NO: 402438 - DNA, 2363 bp, Homo sapiens
gacccactttcagagtagaagtgggcatgatcagaagaatcatagaaagcatcatgggaagaaaagaatgaaaagtaaacgacccagaacttgttgaactgtcctctgattctgaggacttaggttcttatgagaaaatggagacagtgaagacacaagaacaggagcaatcttacagttctggtgatagcgatgttagtagatgctcatctccacactctgtccttggaaaggatgaacaaataaataaaggtcattgtgattctagtacaagaatcaaatcaaagaaggaagagaaacgatctacatcattgtcatctcccagaaacctgaactcatctgtaagaggagacagagtatattctccatataaccatagacacagaaagaggggaagatcaagaagttcagattcacgttctcagagtagaagtgggcatgatcagaagaatcatagaaagcatcatgggaagaaaagaatgaaaagtaaacgatccagaagcagggaaagtagcagacctagagggagaagagacaaaaagagatcaagaactagagatagcagttggtccagaagaagccaaactctgtctctaagtagtgaaagcacaagcagatcaaggtctcgtagcagtgatcatggtaaaagaagatcacggagcagaaatagagatcgttattatttaagaaataattatggaagcagatacaaatgggagtatacttattacagtagaaacaaggacagggatgggtacgaatcatcttacaggaggaggactctgtccagagctcattattctagacagtcttcaagtccagaatttagagttcagtccttttctgaaagaacaaatgctaggaaaaaaaataatcacagtgagaggaagtattactactatgaaaggcacagatcaaggagcctgtctagtaacagatcaaggactgcatctaccgggactgaccgggtgagaaatgaaaagcctggagggaaacgaaaatacaaaacacggcatttggagggtactaacgaagtggctcagccatctcgtgaatttgcttctaaagcaaaggacagtcattaccaaaaatcttcatcaaaattggatggaaactacaaaaatgagagtgataccttttcagacagccgatcatcagacagagagacaaaacacaaaaggagaaaaaggaagacccggagcctaagtgtagagatagtttatgaaggaaaagctactgatacaactaaacaccataaaaagaaaaagaagaaacataagaagaagcataagaaacaccatggagataatgcttcacgttccccagttgtaattaccattgacagtgacagtgataaggattctgaagtaaaggaggatacagaatgtgacaatagtggtcctcaagaccctctacaaaatgagtttttggctccttccttggaaccatttgaaactaaagatgtagttacaatagaagctgaatttggtgtgctggacaaggaatgtgatattgccacacttagtaacaacttgaataatgccaacaaaactgtagataatattccacctctggcagcttcagttgaacaaactctcgatgtaagagaagagagcacctttgtttctgatttggagaaccagcccagtaacattgtgtctcttcaaactgagccatcaaggcaattgccatcgccacggacatcattaatgtcagtatgtcttggtagagactgtgatatgtcttaaaactgccaaagcatttcattgagaattatgatgttataaaaaggaaaaaggaagaatgtcgtctactgcagtctatttaaagatgacatttggtgaaaactctcttcctccttacaatattttaaatgattttttttttggtgttaatttgtaaaaatcattatttgttcaaaatgtatgtcccaccctcaaagatatgcacttttaagtgaagaaaatgatactgctagcagcttatttaaaacttggggtcctttttaaataagaaaaattatataaattttagaagttatttcataaagccatacggtattgacatatttttaaggtagtcaatgagtatttttgaattttttttttttgagagttattctggaaatgtgttataagctaggagaatccctttggacagtctttatttttcttcttaaaaatttatatgattcaaaaccatttcttcaggttaaattgaggcattttaatctgcacagtttatcttctgccaaaataaaaatttactatttcctttatatacttgtttatctggactgccagtaaaacaaatgtgtattcaacaaaagaaaaaaaataaaacagtaacactttaaaacaaga

SEQ ID NO: 402439 - DNA, 181 bp, Homo sapiens
tgcctctgacttctgcccacttcttgaaatattttaaggctagccgtttggaaactttatcattctccagtgtaatcacagggagactgtgcttcccccaaagctgagatttcaggggccttgtagcaatggacaaattacaggtgattttggtttgtttgtttatttttaatgatctctg

SEQ ID NO: 402440 - DNA, 515 bp, Homo sapiens
tgaatcctggctatttgcattggtgggtgctacattagtgacgcccaggcagaccatgttctctactactaaatcgtattctatctctgcagaaccccagatggcttccagtgcccaaaccctactgtcagtagcttccctagagctgatagccctcagttaattccaaggcccagaaatgaaccttctcatggccccccaccagtccttgccccctgggaaaccgtttggggtgtccattgtccagcaacttttactgtattatccccctatctttctcccagaggtccctcctctcccagaccattaagtttctgacatatattaatcggttagacctttgggcttgctcagatttaagctgatagccgggcatagtgatgcgagcctatagtcccagctactggagaggctgaggcaggaggattgctggagcctgggggaggtagaggttgcagtgagccatgattgtgacactgcagtcccgcctgggtgacagagtgaggcccagtcta

SEQ ID NO: 402441 - DNA, 232 bp, Homo sapiens
cctagttttagaagtttcaatagcacctaagttatttagttgctatgaagattgaatgaattaaggcctgttaagtgtctagaggacttcctggttcttagcaatcatttaatgattgttcagatattattattgtgattattatcattttattgcattctagagtaggagagaagaaatgaacacataatcaaatagatgtgctataatgtcaagtagtgataaatgctat

SEQ ID NO: 402442 - DNA, 703 bp, Homo sapiens
ctcaaaagtgacttttttaaactttccacccccaggaatagtttttcagtcatttagttcacatgttttctgctttgactaaagtattttgaggtcccatttttgtttcctcaactgtttaagctcctttatctgaggaaactagattttctctttgatctgccaaagaatctgctacatcgtttgaccacagggtgaattctacttaaagtgactccatatttttgtggcactctcattcatccctttttaaatgctgcatctctgtcaaggtactccgcaccttggatatcaaagttgtagggcttttttgactagttaacccattgctatcaaatcttatctcagagattaatctgtcatcagtcacttttaccttcatgtgccattagtacgttacttcaattggggatatttgcaaatgaactctgtctttcaaaggtgggaagaaaagtaggagtttgtttgacataaaacataacaagttaacaaactactggcacttttgcaaagaaggcctttccaaagcctatcagcctatagaatacttttccttttgccattcattaagaagaaacagattgtccgggcgcggtggctcatgcctgtaatcccagtactttgcgaagccgagaagggcggatcacctgaggttggaagtttgagaccagcctaaccaacatggagaaaccccatttctact

SEQ ID NO: 402443 - DNA, 227 bp, Homo sapiens
ccaccccaccctcctgcactgcagcgctgcccagacctgggtctgcggagacttctgtttgcctctggcctgatgaaagcagtgtggaaaccaacctccctcctcctccccagatctcttctctttttggggggttttcatgctaacttactattttctctaattaagaagcaatacatggctattatgaaacatttagaaaatgtataataaatactaaaataatg

SEQ ID NO: 402444 - DNA, 717 bp, Homo sapiens
tcagcctcttgagtagctgggactacaggcatgtgtcaccatgcccggctaattttttgtatttttagtagagacggggtttcatcctggtggccaggctggtctccaactcttgacctcatgatccacccacttgggcttcccaaagtgctgggattacaggcgtgagccactgtgccccgcctgagaataaattattttacccaaaagactccttgcactcacgtgtttattgcagcactattcacagtagcaaagacagaattaaactaggtagccatgaatcttaaattggataaaaaaaacttagatacttgtacatcatgcaatactatgcagccacagaagacagtgaagtaatgtcctttgtagcaacatgtctgcagaagatggccattattctaagcaaattaacagaaaactattacatgttcttacttacatgtgggagctaaacattgggtgcatatggaaacaaagatgaaaacaataaacactggggattccaaaaagaagaaagaagggagagaaacagtgaaaaactacttaacaggtatgatgtatgccacttaggtaatgggattattaagtgcccaaacctcaacaccatgcagtatacctgtgttacaaatctgcacacataccctcaatctgtaataataaaatggtttgtggataatgacatgttacacttctcccgttctggcttaatagttg

SEQ ID NO: 402445 - DNA, 335 bp, Homo sapiens
gtgatggctcattgttctttaggtttgcaacctctgaatgctgagaagattgagcatctctgtatatgctagttggctctggggacttcctctactgaaaattgccagctcacatcactgacccatttttcttatgggatggctgtcttttattattaacaggaatattatatatctgtgtgtgtgtgtgtgtgtgtgtgtgtgtgtgtgtgagattaatccctcatgggtaaacatcgtgaattccttcttctgttgtgccatctgccattagctttgtccatagttccccttattgaaaaggaattattaattttgataaaacataatccatc

SEQ ID NO: 402446 - DNA, 407 bp, Homo sapiens
atgtcccatgtatttggtcatcattgtggtgggaggcacagtcctccatttgatccagaagatgcaaatgaattcagcctcagcataataggctcagaaggagtgagtccctaaagagtggcaccctgggctggggatggtggctcgctcctgtaatcccagcactttgggaggccctggcaggtggatcataaggtcaggagttcaagaccagcctggccaagatggtgaaaccctgtctctactaaatataaaaaaatcactcgagcatgatggcatgtgcctgtagtcccagcgactcaggaggctgaggcagagaactgcttgaacccaggaggcagaggtggtgagcccagatcacgccactgcactccagcctgggcaacagagcgagactctgtctccaa

SEQ ID NO: 402447 - DNA, 478 bp, Homo sapiens
acgtgttatccagaggctacatgaattgcacagcacagatctggaggaataaaagggaatccagtagccaccttctgagactccatgcctaagtcacactcaggggaactctgcccaaaatcttgtccagttctgggtcctaagtctttcatgccattactggggaattcacttgataggcttctattattctctgtctcaggaggactcaagatcagtggctttggcctctgaggacaaacaagcttatattctaaatggtatgctgagcttttcagcaggtctaactatcccagagtaggaacaactcagcactgccatccaggctcttaacacagtaatctacccgtgatagggcaagaaacaaagaaggaatcagtggtcctatcgcctcttctcccaacccctgggcccgaggcagagaactttcctagctcccattgtccctcagggcaatcatggataacagtattttttt

SEQ ID NO: 402448 - DNA, 680 bp, Homo sapiens
attcccgcctgaaccactaacaccgaaactgctctgggaaagattacctaccgccaaatcaaatggactcttttctgacctctgtaccgcattccacacaattttccctccctctgatcctccctggctcctctattcgtttcactcccggtaacgccactctttcctcttctccccatctgctgttgtctgttggtttcctccagggctgccttttctctgccagctgtttaaggactgttggttcgcaagcttccatcaattctcttttcactgtacagactctccctgagtaattgcaaacactgccaaattatatctccaggtaaaacgtctacctcaggcctcctatccatgtatatatttacacacccacccacacacacacacacatacacatacatacacagggtgccctctgtatctgtgggttttgcatccatggatttaaccaaccatggaccagaaacatttttgaatcaaataaaaaataatgcaaaatttaaaatacagtacaactatttacctaggatttacattgtattaggtattataagtaacctagagatgatttaaagtatatgggagccagcgcagtggcatgcgaccgtagtcccagctacttgggaggctgagatgggaggattgcttgagactaggagttcgacttcatctcttta

SEQ ID NO: 402449 - DNA, 379 bp, Homo sapiens
gagaaattgtatttgcagaaaaagcagaataaactactagtagaatttactgtatcacatgatactgttggatatgatctgtgatatataaagtgaatgattaatgtgctgtcattgtgaaatgtgaaatagcaagtgttccagattatggtgatccgaactgaatgtgtatatatgccctcagcttatatacagaacatatttgaagaaaaaagtattcttgtttctcttctggttatcattttttaaaaaacaatctatactacattttgttattttgtgatctgtgacataaagtggaaaaggaaaggacgttggggtcactgatgagagagcatctgctatctgtacagtaaaaaagggcattataatctcaata

SEQ ID NO: 402450 - DNA, 254 bp, Homo sapiens
caccatagaatactatgcagccataaaaagaaagggaagggtctttaactgctgctacttgcttgctaattccagtaatgtgctgatagagtcaagaactatcactaggtccagaaatagagaaaggctgatttaggctgaagttctagaacgtgactatcttatttctaaccaaaacaaaaaagagacatgtactgccaagatgtgtagttctgataatgcatcagaaatcaggacaaaaaaaacctaaagca

SEQ ID NO: 402451 - DNA, 158 bp, Homo sapiens
ttattgaggaaatggttgactgggtaatttttaaaaatcactgggcacaaaaaatatattttgacttatattagtttagagtatttacacttgaaagagtctcatcttttctgaagggtgtttctttcatacacattttattgcactgagttttgtga

SEQ ID NO: 402452 - DNA, 549 bp, Homo sapiens
  misc_feature (432)..(432): n is a, c, g, or t
  misc_feature (525)..(525): n is a, c, g, or t
  misc_feature (532)..(532): n is a, c, g, or t
actttctaactctgtaggacacagcaaatcaaaatagaggtcctgggagggatccactaatttagtgagttagacaaagaatgatttatggcagtaaccacattcaggagaaatattcctataaaaactcagcaaatatggaaaactgagcacatgaagcaaaaatatttaaagattttcagaaatttggaaaacctaaattacattttaagacataggatgtcatgatctgttttgtgctgatatagtagaatacctgagactgggtagcttataataaacagaaatgtattggctcacagttctggaagctggaagctcaatatcaaggtgttggcatcttgcaagggcctccttgctgtgccatcatatggcagaacgcacagagaaggagagaaccactccattaatcccaccatgagggcagggctnctgtggcctaacgacctcttaaaagtctccctctaaatactgatggaatgccaattaagactcatgtgagttttggaggggacaaacattcanaccttancacaggaatcatgaatg

SEQ ID NO: 402453 - DNA, 368 bp, Homo sapiens
ttgtcaaatcttcacacttcaattaagagagataatctgcttccaaaaattaactgtcaagaagtgtcgacacactaatgataatgagagcagttaagagctagggcttcagagtcaaactggctcatgtaaatacatctccttcactggtttatggtgaggattaaatgacttaatacatataaagtgcttagaacaaacttcaataaatgttagctaatattatcattattcatcactattattacacattttttaaaaaggctcaaaacctaacttcccacctctttctcctcttaccaatgaaatatactatgtcatacaatcacaaaaatgttgtacgctgctgtactgaatttctggctttt

SEQ ID NO: 402454 - DNA, 444 bp, Homo sapiens
aggtgcagtctgtgtccccgtccttgactctgagaatccctgtgatcaacagaatgcagaaaagtgacactgcatggcttctgaggctaggtccagaaaaggtgatgcagcttccccctttgcgctgaaatgcagtgcttggacctcagagctattgactaagaagtccatgcaccctgagcttctcatgctggggaagccacgtgtaggcattcagttcccagcccagctgagctccatcctggctgcaacaattgttctcatgaggaagccatcttggacactcagctccatggagcctccacgagtcgccagccccaactgacatctgtctcactgcaaccacagaagagcctccaaccaagaactgcacagctgaaccctttctaaattcttgatctccaaaaagccatgcacaaaataaaatggttgttttgagccact

SEQ ID NO: 402455 - DNA, 315 bp, Homo sapiens
tgttattaagccataaccaagtcagtgctgtttctacagaaacagacaagttaacaagtgaaacataatagagagcccagaaacagacccatacatattttggatttgtcacgtgaaagaagtagctttgcaaaactttgggaaaaggagagtgtgtgcaatagatgatgctcgtgctcatgcagacaaaaaggaaattgggatacctgcctcttaccgtacacaaacaccaacctaaacgtgaaagttaaactataacagcttgaggtggtggggaagaaatatctttatctcagtgtagggaagaatttattt

SEQ ID NO: 402456 - DNA, 594 bp, Homo sapiens
ttttttttttttaagacagagtctcactctgtcgcccaggctggagtgcagtggtgtgatcttggctcactgcaacctccacctcccaggttcaagctattctcgtgcctcagcctcctaagtagctgggactacaggggtgcgctgccacgcccaactaattttttgcatttttagtagagatggggttttgccatgttgcccaggctggtcttgaactactgagctcaggcaatctgtttgcctcagcctcccaaactgctaggattacaggtgtgaaccaccacacctggccagttctctaattttaagtgaaaaaaatacctccctccctcccagggttattatagtgacagagaccttagcagtgtgtcttgcattcagtaagcactcactaaatgttagtgctgctgttatttatcacatacatcttcagaaacaccgaggatcctaggattcttatagttaccacctacttgtcacccattaatgttaacatttataaactaactccccagaaatattaactgtaaccttaaaccacctattttgactgagcatataaatacagcatataaagaactgcagttttct

SEQ ID NO: 402457 - DNA, 540 bp, Homo sapiens
ttttttttttttaagacagagtctcactctgtcgcccaggctggagtgcagtggtgtgatcttggctcactgcaacctccacctcccaggttcaagctattctcgtgcctcagcctcctaagtagctgggactacaggggtgcgctgccacgcccaactaattttttgcatttttagtagagatggggttttgccatgttgcccaggctggtcttgaactactgagctcaggcaatctgtttgcctcagcctcccaaactgctaggattacaggtgtgaaccaccacacctggccagttctctaattttaagtgaaagtcttgcattcagtaagcactcactaaatgttagtgctgctgttatttatcacatacatcttcagaaacaccgaggatcctaggattcttatagttaccacctacttgtcacccattaatgttaacatttataaactaactccccagaaatattaactgtaaccttaaaccacctattttgactgagcatataaatacagcatataaagaactgcagttttct

SEQ ID NO: 402458 - DNA, 589 bp, Homo sapiens
catagatttttgtttttcatattttgttcactgtggtatcccctcttcctggaatactccaatattaatagaattgtatatttgaagaacgaattgataaatgtgatggaaatttgggttggataacctataaacacttgctttttggcagtatttttatacagtctttttctgcttgtcaatcttgggtattttccccattataatagtgttttcatattttccaagaatttctatatatgaaagggttaagctccaccaaagatttgcttggcttatttacactaaaggaaaatttatatcaatgtgacattctaattatttggaaaaaattaattctgatatacctaaattcttatttagtagtgaattccaaagttatcttttcatcagaatttaaattcacagatttaccatttatttttcaggattttagtgtttaagagtcattattacatgtgttagttttctgagatgggactgattaaggtcttgagagaaggctagtggaagtggggtgaaagagaagaagaagtgaaggagaagaatggtacaggatgatattgggaggtagacagaggccaaaata

SEQ ID NO: 402459 - DNA, 430 bp, Homo sapiens
gaacatggctgggacaaaaccaacaaccatgaggcatggtcttcatttatattcatgaccacatatatcaactggactaatttcccaatgaatttatttagtatgtttgcatttatattttccgagttgaataatttacaccacctcctctccaaatgtttgttatttcggttggaataaatggtgtcagaaatgaaacctgaaaaagaacactattggaagggattggcaattcttggaactggtgtgcaggacccactagagccctttgagctctctgcttccaaggcttgcctgttcttccctggtgagtcttctctcaggctgagcctctctctttttggtattatttgatattatttgggatctggtttggatcacgcaaccttaataaagaccatacatctctccttgaatgataaaaagactt

SEQ ID NO: 402460 - DNA, 528 bp, Homo sapiens
agtaactaaaatatttaagataaatgttgaattttttaaattctaagaaatttggtttgtataactcaaggcattacaaaaccttgaatatttacaggtctaagacaagcaatgaaaacgagtgaagcaaggacaatatgaaagaaaatggagtgattgtaatgtcattaagccagcaagcccattcctcgctgagaaaagcctgtattatcatagcctagtgccacagactactgccatgcaggaaggtgcaaaagaactaaaaaatctgtatttttctatgaaattccaagacttttaagtgttagtaaccaatttttcaatatcacatcatacaggtcaaatcaaacaaatgattagctattttcttctactggaacaagaaccgtaagttctctcagggtccgagaagtctgggactgatgggctcaactaacatgcgaaggctaacaggaaaaactgctgcacctggaaacacagagaacaaattttgaaaagaaaaagaaaacatctttaaagataaagaga

SEQ ID NO: 402461 - DNA, 368 bp, Homo sapiens
aaataacatataatatcttctatatggttattcatatttttatcacacacacacacacacagtctgtatctcgagctcctctctggttatggagaagaggcagagcaccaggtgcataggctgagactgcagacacctgagcatcctatgctgtgaggcgaaagcatccggttttttcgggatgggcctgtccaggaaggttctcgaatgccacgtgattagaaaaatacaaaaattagccaggcgtgatagcactcgcctgtaatcccagccattcaggaggctgaggcgggagaatcacttgatgcagtgagccgagatcgtgccactgcactccaggctgggtgacaaagcaagaatctgtctca

SEQ ID NO: 402462 - DNA, 135 bp, Homo sapiens
acctctgcagataaaagtggagaaatacacacacagtatgaacagggcctagttcctgcccagaaaactcacaatcaagtggggaagaccaacatacacaaacttagctgtatgttacatgggaacctttgatat

SEQ ID NO: 402463 - DNA, 527 bp, Homo sapiens
agctctagagtacatgtgcacaatgtgcaggtttgttacataggtaaacatgtgccatattggtttgctgcacccatcaactcatcatttacattaggtatatctcctaatactatccctcccccaggctcccacccacctacaggccccggtgtgtaatgttccccgccctgtgtccatgtgttgcattgttcaactcccacctatgagtgagaacatgttgtatttggttttctgttcttgtgacagtttgctaaaaataatggtttccagcttcatccatgtccctgcaaaggacatgaactcattcttttttgtggctgcagtaaaaaggtattgaatactgatgtgtactacaacatgtataaatcttaacaccattttggtaaaaaaaatttttttaaaggatacaaatgtatacttggaagaaataaattctagtgttctataacgctgtaggatgactataatcaacaataatgtattgcatagtttcaaagagctagaagaaggatattaaatatacc

SEQ ID NO: 402464 - DNA, 312 bp, Homo sapiens
tatgctgctgaaatttaacagctgaagtactaacagtagctgaacttcaagccttgagtatcaattatttatgaacctaaaactgacaggactgtgtaggtgaattagctgcatatgtcaagctttgttataaatcccaacctactgtaaaactcattttcatagaatgtaggtacaaggctgacaatatatcaacagcacggcattaataatttagaagaatgagactgtcagggaacaccttgcaaactgtgctctgctccatagttgatattacaaataaaaaagtcaaataaaatgaatttcccataa

SEQ ID NO: 402465 - DNA, 780 bp, Homo sapiens
gtgttctctgtcatgaatttcttcttgaggggcctggagggagtcacagctgtgagccactaatgtgtgcccccatgcacacagcacccttggcataactaactccatcttagagactccattgtatatcttacagggcacttggccaacaaagaaggaaaggccccagcagaactcaccatctgccgcctgaggctccaccacctcgaagacatccttgcaagatccacagactggcccagaccaggaggtttctgtcttcttcttgtgtcttcttcactctcctggactggttcgtgaaccctttctcctatctctgtttcctctggatgttaaatgctactttctttgttgtggaacgttaacctgtaacatgtatatactgattaagtacactattacgttgtcgtgtgcaatattggctgacatgtgcagtggcttgagcccgtgtgaccgcagctctcactactgagggaaaggagcactaagcagcatgcctccttgggaacgccgtgtggctcgtggctttagggattgaaatagcctcaataaaattctgacattgtgaaagacacaggcatgcttggatgtgattatctctaactttgcactgctcatgacaccccatgtattggttaatgattttgcctgcaacttctgctttcctgaaatgtacccatacccctaaaaaccccagcttgtaagccactggggagtttgggtcttaagcgtgagctgtccgttctccttgcttgtccgagcgaataaatatcatctttc

SEQ ID NO: 402466 - DNA, 110 bp, Homo sapiens
gacgcaagcaagcgcactcttcagatgtcacttctcacgggaggcctctgtgattgcagaaggaaaggccccagcagaactcaccatctgccgcctgaggctccaccacc

SEQ ID NO: 402467 - DNA, 280 bp, Homo sapiens
actaactttaaacaggttcaaaggtaaataccatattttgttaattttcatattcattaaagatctaaatattgagaagtttgcttgaggattaagtatcttccaaccaggggcaccaaggtgaggacactttaaactagatatacctgggctacagcactgaaaagtagggcctatgagggtgggggattttgtgtcttgtttgttgctgtattcccagagcctggaacactgctgagtatataacaggcactaaataaatacttctaaatgaatgaat

SEQ ID NO: 402468 - DNA, 373 bp, Homo sapiens
tgaagaaccttcaaactgctcaccgagagtgaacacagtgtgcctcgtgggagatcgccaagcagcctggcagtccgtccaacgcagcccatttttctgccacaatttggccacgtgactccatcctcagtcagaccagatcaagcatcttcttgtatttagggcccatgttgcaaaaaacatttacacgtcgtcacacagcagggttagggtacatgtagcaagctgactaaaggacggagtcatggctctatgaaggcatcaaggtctggaggttggttttgtttgcttcgctgagtacgtagttaaatttgtgaacattagaggatccgtagtgccaccgcccagccctcccagagtgcttggtaggaat

SEQ ID NO: 402469 - DNA, 132 bp, Homo sapiens
taaataacttacatttctccaatgaggaagagtccgcatctctcagtatatttcacctaaaaaggtgtagccaaccaaacttttgtctattttatttaaaaaatttaaagaaatacagtacttaaaaacatt

SEQ ID NO: 402470 - DNA, 154 bp, Homo sapiens
gatgacagcaagaccatgtctaattactgatgggtagcgagggatatactggaggataacaaatgaccaccgacacagccataatgatgaaatgaaatatggtagaacatacaacactgccttaggatagactgaaatgttcccacactctttc

SEQ ID NO: 402471 - DNA, 379 bp, Homo sapiens
atggagaagaaataagatgaactgcttgtcccagaaagcgatagaactttgaaagcagctatatatttcctagctacctctaaaaaatggagctgtcttcatgagacctgtaagaagccaacagttttcctcactgccaccatgtgaagaaggatgtgtttgtttcccttccttcatgattatcaaatggaggttcccatgattttctttttcctcatggaaacatgtttggtcagaagggaaacaaaccaattaaggtgataccaaaggatgatccttgatacagttgtattttggtggagcgttgagattcgccagtgaactctaacagtgaggatggcactggaataaaaagagaagaaacatgtactagaagcca

SEQ ID NO: 402472 - DNA, 438 bp, Homo sapiens
gcctatatttggatcttttacaacaagaacatttacatcgattgcccttgtaattaaaaatcataaaatcgtaactgcttcttttgaaaaggcttgactgttagtcttcttcctaggtggcttctcataagcttggctgccttttgaaggatgaaaaacaaattactctctctattaaagtgctctccgaaaatttaacaaattgggcaattgctttgaggtgaacgagtcaccaggccaggttgcagacacccttggctaaggtcaatggccatgcatcagggaagtggtaccctaaaggagctggatttgtcccaggccagggtgccagcgggggacgggggtgtgttctgtgacatgagctcagaaacgtcttcccactatctttgatttcaacattctcctgcctcaggtgctggtgcagagaggagaaagaaa

SEQ ID NO: 402473 - DNA, 607 bp, Homo sapiens
ccactgggctcagccctggagctgagagcatcgctggagatagacgtggcagagaagaggttgcgagcatggccccagccagcagctcccacgctgcccctagtcctgggcatggagcgagccttggtgtcagagaccagggtgtgcagtctgagctcctctaccttactaaagagaggcctcttttatttaccagagccacagccctgctgcctcaggaccttttcattctgccggtgctggggctgtctatctgcaagctggaggtgttgagagcaggaaaaggaggctgtgaggaagggttcgggcagctcctcctgctctcagaggtggcctcctcctccaggcatggaggtctgtccactactgggcttctgggctatttgcccctgatttgctccctggtacgggctcttgttaacaggcaggcaaggggtgcggggaccaggcgagggcttcaaagggtacagtaccaaatcttccaaactcagcacttgtgccctggggtctccaaactgtcttctgccctaggatttattcatactgttaaattaccagtttatgcaaatgatatgtaaataaagctcaattttttgaaacttcaaaa

SEQ ID NO: 402474 - DNA, 400 bp, Homo sapiens
agaatttcacaaagcccctgactccgggacactgtgcagctctctggaaaaatgttttaaaggcaaaacaggatagaacgcatggccccccatgtctctcgcctgagtcactacattccatcaaagataaatgaccctagtcctcgcctttctctactcataaaataacacccgacaagaatagtgactatgtttctgtaatctataaccagatgtactctaacacccaaaccttgatgtaatttttcacatactaaatcttcaccacctatgtataaactaaaatactacgttggaggagtctgagagaacctttctaacagcctcctcccaggctacaggccttggtctataatcctcaagaagacttctaaataaaactaactttaattctttaaaa

SEQ ID NO: 402475 - DNA, 680 bp, Homo sapiens
ccgggttcaagcgattctcctgtctcagcctcgtgagtagatgggactaccgttgcacgccaccacacccagctaatttttgtatttttagtagagacgggatttcaccatgttggccaggctggtctcgaactcctgacctcaggtgatccacctgtcttggcctcccaaagtgctgggattacaggtgtgagccaccacgcccagccaaaccttcttttattagtgaactatcaattaactagaacttaattgtcacccagcaaataggcttgccggttaaaggtttaactgatttccatatactttcctatctttcaaaaaaaggtgaaagaaaattttttaagattttttaagttgcccattataatgttctatcaataacatttcatagatatctgcattttttgctttctgtgcacttcattttaaatagttaacttattttctgtcatcacagaaaatagtataaatgagtttaatagaaatccacaggtgccagtaaaagattagaagattgttcagactgctaaattgcaggctatttggaggtaaagtactccttgcacagtaattccacctcttcaaagcgtccttgttcgtgagaaatatttgccagcactgcactacttagagacaatgaagtatcttgtctacagcttgtcaaaagaggtaccaaa

SEQ ID NO: 402476 - DNA, 1021 bp, Homo sapiens
ttctctccctcttgggtcctttttcttttgaaccacacaggtgttctaccttcattctttttcttctctatttttttctggggcatctcatcctctttcacaacttgaattacaccttctggggttaaactatttctgtttggttctaatcccaacttctatgctataatcaggttacctgctaccaatttcctccaaatcccaccaactctctttgtataaaatagaattgataatcttacatacacatatacttgcctctcttccctgacttacccattcctttttaaaaacaggcacttcatctactcagccacctgggctggaaaccagtgttctctagttctgttcctttccattctctgcatatctggtcactcagttcagaatattctgtcttttaaaaaagtgcctgaaagttgggcaaggtggctcatacttgtagtcccacctactcagaaggctgagacaggaggatccttttgagcctaagagttcaaggctagagtgagctgtggttgcaccactacactctagcctggtgacagagcaagacactgtctcaaaaacaaaacaaaacttctgaagtgatctctccattcccattcactctattcatcattattgcattctgctacccagtctatttcctaaatatttttgctgccacttaattttatccttccaaaacatgcgatgggttttatctctcactactccctgtttaagaaaacagtgccggccgggcatggtgcctcatgcctgtaatcccagcactttgggatttggccgaggtgggtggatcatgaggtcaggagttcgagaccagcccaaccaacatggtgaaacctcatctcttaaaaatacaaaaattagccgggcgtggtggcagttgcctgtaatcccagctactcaggaggctgaggcaggagaactgcttgaacccaagaggtggaggttacagtgagccgatactgcaccactgcactccagcctgggtgacagagcaagactccgtctc

SEQ ID NO: 402477 - DNA, 754 bp, Homo sapiens
  misc_feature (496)..(496): n is a, c, g, or t
  misc_feature (688)..(688): n is a, c, g, or t
agagccttggccctccctgggagtctggtcggcgggctgtggggtcccaaaatcgtgaccccggcccctctcccctcctcccccaccatgtcccatgtcaggatcagttcgaggtgctcgagcgccacacgcagtgggggctggacctgttggacagatatgtaaagttcgtgaaagaacgcaccgaagtggaacaggcttacgccaaacaactgcggagcctggtgaaaaaatatctgcccaagagacctgccaaggatgatcctgagtccaaattcagccagcaacagtccttcgtacagattctccaggaggtgaatgactttgcaggccagcgggagctggtggctgagaacctcagtgtccgtgtatgtcttgagctgaccaagtactcacaagagatgaaacaggagaggaagatgcacttccaagaagggcggcgggcccagcagcagctggaaaatggctttaaacagctggagaatagtaagcgtanatttgagcgggactgccgggaggcagagaaggcagcccagactgctgaacggctagaccaggatatcaacgccaccaaggctgatgtggagaaggccaaggcagcaagcccaccttcggagtcacatggccgaagaaagcaaaaacgaatatgcggctcaactgcagcgcttcaaccgagaccaagccccanttctatttttcacagatgccccagatattcgataagctccagacatgatgaacgcagggcacccgc

SEQ ID NO: 402478 - DNA, 744 bp, Homo sapiens
  misc_feature (17)..(17): n is a, c, g, or t
  misc_feature (42)..(42): n is a, c, g, or t
  misc_feature (486)..(486): n is a, c, g, or t
  misc_feature (678)..(678): n is a, c, g, or t
caaagaattcggcacgngggcggggaccgggtgcggtggtgnctgcggcggcggcggcgggagcagcatggattggggcactgagctgtgggatcagttcgaggtgctcgagcgccacacgcagtgggggctggacctgttggacagatatgtaaagttcgtgaaagaacgcaccgaagtggaacaggcttacgccaaacaactgcggagcctggtgaaaaaatatctgcccaagagacctgccaaggatgatcctgagtccaaattcagccagcaacagtccttcgtacagattctccaggaggtgaatgactttgcaggccagcgggagctggtggctgagaacctcagtgtccgtgtatgtcttgagctgaccaagtactcacaagagatgaaacaggagaggaagatgcacttccaagaagggcggcgggcccagcagcagctggaaaatggctttaaacagctggagaatagtaagcgtanatttgagcgggactgccgggaggcagagaaggcagcccagactgctgaacggctagaccaggatatcaacgccaccaaggctgatgtggagaaggccaaggcagcaagcccaccttcggagtcacatggccgaagaaagcaaaaacgaatatgcggctcaactgcagcgcttcaaccgagaccaagccccanttctatttttcacagatgccccagatattcgataagctccagacatgatgaacgcagggcacccgc

SEQ ID NO: 402479 - DNA, 494 bp, Homo sapiens
  misc_feature (17)..(17): n is a, c, g, or t
  misc_feature (42)..(42): n is a, c, g, or t
caaagaattcggcacgngggcggggaccgggtgcggtggtgnctgcggcggcggcggcgggagcagcatggattggggcactgagctgtgggatcagttcgaggtgctcgagcgccacacgcagtgggggctggacctgttggacagatatgtaaagttcgtgaaagaacgcaccgaagtggaacaggcttacgccaaacaactgcggagcctggtgaaaaaatatctgcccaagagacctgccaaggatgatcctgagtccaaattcagccagcaacagtccttcgtacagattctccaggaggtgaatgactttgcaggccagcgggagctggtggctgagaacctcagtgtccgtgtatgtcttgagctgaccaagtactcacaagagctgtgccttctaccatcgttccaccattgatgtacatactcatgttttacatcttttcttctgccgctcggctccggccattttgttttatacaaaaatggga

SEQ ID NO: 402480 - DNA, 423 bp, Homo sapiens
aggtgtacagtttagtggcattaagtacattcacattgttgcacaactatcaccaccatccatctccagaaccgttgcatcttctcaaacagaaactctgtacgcattaagcaataactccccattcccttcttccccagcccctggcaaccatcattctactttctgtctctatgcatttgactgctctcagttcttatatgagtggaatcatacagaatgtgtccttttgtgtccggcttatttcacttagcataatatcctcaaggttcatccttctagttcattcttacaataaaggaagtacaacttgtgaattgggaaaaagcagattggatattttttagtcacaaaacatatttattgtcagaagtgaagcaaacaaagttgttcaaagacaaagctaaatatttgtcgaacttc

SEQ ID NO: 402481 - DNA, 409 bp, Homo sapiens
aaggtagaggttggctgttgacgactccagatatgtttggtctcatcacattggttctagataactaatatttttaaaggatgactaatagactcataggagtctctagaatgaaagcatctgtctgtccttatcatgtttgttttatcatccaaataagccctggacgcagtggccaaggccccagttgaagtctcaaccctgctcttgactagcagtgtgaatgtggccaagccatgaactccctagcctcaggatccctgtggtaaagtggggttaacagtatctgcccatttcacaaaattgtcattgaaggcaaatgagatcattttaaaaaggactttgaaaaactatgaagtgctgtatagataaataaaatagcagttttatttattatgccgtgttcaaa

SEQ ID NO: 402482 - DNA, 1527 bp, Homo sapiens
ctgggtaaatactatggaaccttcagagcccattctgttttagtgaaatcatgtttatattgaagtcgaatctgagttctggagtgtcatttccaacaacatgaacctctgtccatggtgaaaatattctgaacaaaactgaaattgttacataactcatgccttttgtctttaacccaaatttcttattcccactatatagaaaatcaatatgaatttgtttcagaagagtgattatatcttttcatgagtatacctgtatttctagattaaagagattgtgtggctttgttctacagaaggtttgattttgtctcacctttcagtgaggaaagagaaaagaaagacacttcagattttaccctaaggaaatatactgttggcgctccatcatctaatacctttatgaggggcatactgtgggttaggaactctctctctgcagggcttaggaggaaagttgttgccacctgccaccgctggccgcctgaggtttctgatagtcatgtgtaagttttgaatggcagaacaaagcatgaatcagacacacatcttgcctagccatcccctgtgtgcaaatgtgtatgatgtggttaaccatgtaaaaatgcaccccaaaaggagcattgaatcaatttgtattttcttggcttttaccttaaacttgtatataaggattatttatatattgacagaaaggaacatgttgatctgaatatcactcatatatccaagaaaagagtcagaaatgtattgttgtgttatagattgatctaaatacgtattaattatcttcaagtgtagacacctagatttaaactgactctgtggcagattaattaatagcaataagccaatgaatagggaagatttttaatatataatgactaccagcttgttcttggcttacattcttgagattattgtattcaaaagtgtcagttggcttcacattttggcaaagagccttctgcattcttattctccttgaagcataatgcagataatgacaacttatctttctagattagtcttttattattcaacaagacaaaggccacaacaaaggactagtagaaatagtgacctctaccctgagaaatttgttataactatagatgtttgtgctctgcccaagagattctgatatactgtgatttgatgtgagcccacgatgtgaattattataaagttctctagttgattctgatacacataaaagttgaaaaattggccatgtgtggtgtctcacgcctgtaatcccagcactttgggagtccaagatggacagatcactggagcctaggagttccagaccagtctaggcaacatggtgaaaccccatctatctttataaaaaatataaaagttagccaagtgtggtggtgcacacctgtagtctcagctacttgggaggctgaaatgtgagggtcacttgagcccaagagatcgaggctgcagtgagccatgatcacaccactgcactccagcctgggtgacagagcaaaaccctgtttaaaaaaaaaa

SEQ ID NO: 402483 - DNA, 920 bp, Homo sapiens
taacctttcaagagagaacttctgattccatattcctcaatttttatctcattacatggagccaccgtctactttattgcttaaatcaagaacctaaacaacattgttcaatttctccttttcccttaccctctgtgtccaactgatcatcatgccttgtcaggttaacataactcttttcatctctgttacaacctctaccccagtccagttcatcctctctgttgcctggacaatgttaaagctcatgacctatctcagtaatcacgctggcgcccccagcagtccatccacaaaatagcacagtgaggctttaaagacaaatccttttttgtcacttccctctcataaacccctttgtttaagtcaatcaaattatctgtcatcttctgtctgccaaagctgtcggagcagatcaaggtggtaattggcatcaaaattcttcataaaatgtggtcactcatcattttttcttttctctgatatttgttattcttcaattaaattagtcatgtatttttttgtttggaaaaccttttctacccattatttcaaatttatagaaaactaattcattttttaaaatatgttgagcacattcatttttgcaaggctttgggggttacaaggaacatgggtttattggttattggttagtttatggatacaattcatgataaatttctttaaaaatcaaaaaatagaaaaactgagatagcacatggctatatatgattgatcaccccaaaaataagcagcatgaatttataaaagcaagaccagtatgcgtgagagttcttagaaaagcctgcactcaggagaatcgcttgaaccagggagttggaggttgcagtgagccaagatcacgccacagcactgaagcctagcgacagagcgaaactccagctcaaaaaaaaaaa

SEQ ID NO: 402484 - DNA, 695 bp, Homo sapiens
gagatttttataccattatttatggctttgctttcctttcaaggtaagtcttattttcttgttttcattcttacatttataagactctcctgcctccagttgtgagcagctttataccagtcatggttttcccttaagaaacctgccagccatttcacatgaaagatttttgcttgaaaagtgcatatataaattatttttattattactctaaaaaggtgacaaatgttaactgatatgtacagctaaggcggtgtggagatggagatgaacaatgcacttaatgacattgcaaaatcatgatgttaaaaacattttgctatttcaaaaatttctttttaaagagaaactagcaaacctttcagacagcactagcaaataacgtactattttaaattatgtattatttcctaagaaatttaaaaagaagcttgagatccataaatgcaagcactgacttacttataagtacacgtttgggaaaatgctgctgtaaaactaacgagttatcttggcttcatttaacaaatttaagtgaacacttttaccagtccacattataattctattgtgatcttaaaaaattagcccctagaactattttaatgtgtcggctgggctgactagcccactgtatgcatcctgttaacttctctactgcacgccggcatactttcctcagttctcggccgccc

SEQ ID NO: 402485 - DNA, 208 bp, Homo sapiens
aattctacagacatttattttaatttattttccctcgttctggagaccaagcagtccaaaccaaggtgctgactgatttcgttgctgttgaaggccgtcttcctgccttgcagatgggcttttttttttttcttctgtgtcctcacgtggaagagagagagagagatcgagagagtgcactctggtatctcttcctttttggggggag

SEQ ID NO: 402486 - DNA, 410 bp, Homo sapiens
aatgcacattcacaccacgagacagggcaaaggctaggtcccttcccggcagggggatgcgccagcctcgggcttcctggaattctcatctgcctgaccagctgatggcagagtcatggtgactcaggactgaatattcagctgcgatgttcgatgctaggtgtggtgcacgtcacaggtgagcaaaaccaaaggaactggaaaagcttcacatttgagtttaccattgacactgagttgttttacagggaggagcctgaggtgcagacggtatcagctacaggccaggttgtgtctctaagccagatgagtgtcctcatccttaaggagtcatcttcctctaatcctctggttctcatccccatctcagctgcttttgaaaattaaatattatgccaaggcacctcctg

SEQ ID NO: 402487 - DNA, 261 bp, Homo sapiens
tttctgtccagtatagattccctgatgtctaatgcggtgtgaatgtaaagtaaagacattgccacactgggcgtggtggctcatgcctgtaataccagcactttgggaggccgaggcaggcggatcacaagatcaagagttgagagcaaccaggccaacatggtgaaaccctgtctctactaaaaacataaaaattagccaggcttggtggagcatgcttgtagtcccagctactcaggaggctaggaaggagaatcgtat

SEQ ID NO: 402488 - DNA, 438 bp, Homo sapiens
atatagggatgtgtttatagctactgtgcaattgtgtgcatgagtatgtgatgacctagaggttaatcagaagctgttggatgatctcagatctgttcttaatgaactccaaggggtattctaattctgatttagcagtctgcagttattcaaagtggactgtcaggaagctaagaattgcaggctaaagtaatgcccatttctccctgagccaccctcatacctaagaatctttcagcttctaacagtgttctttccaagccatcatggtacattagattgtacagaatttctctagtttgtctaatatttaaagtagaccagttatggctttgatagcttgattttgcagatggtccacgtttgaactttttgtacagaggtttttcagttgagtccgctgaaaataggtaaacaaaaggaacagtatatttaaaa

SEQ ID NO: 402489 - DNA, 490 bp, Homo sapiens
tgctaatattttattatttcaactctagaagatcatgtactcaaccactgatttattcatgaatctatctatttatcctttcaacattccttcactatcgactaggatgatactgtagttcatcaataagaatatataggttttggagagagattgacacctaaatttcaaactcagcttcaccacttactaactgtgttgagctaggtaaacacagcctctctgccccttagtcagatgtaagcatgataataatgtttacagttaaggattattgtgaaaattagtgataatgtacatcaaacacttggtgtgctgtaaccattcaacagatgataatggagactctggttgttatttgccagaaatcaggatgcgaagatggaaaacacataactcctccctctaaataactgaagtggaagcaaatgactacagtgtagattagagttaccaataagctatggatcagagagaagagaatgattta

SEQ ID NO: 402490 - DNA, 198 bp, Homo sapiens
tacagttgacccagagtagtgtgtattcagcactgacttcagatctcactatgggcgtgtgtactatcctcagacaggcctctggcagtagggcaggagcactgtacccagatgtgattggccgatgtcatgtgtgtttcctgagctcccctaggctgtctctatgaatacgggagcctctgtgggtctgaaggggcc

SEQ ID NO: 402491 - DNA, 479 bp, Homo sapiens
catataaccgggttcaaaaatgactgaaaaggggcaaaggagagacttgtgtggggagaaaaattatttgagggtaaaagataaaaattattttgaccatcattaatttgatggtaattgttttaaatttctggttttagttgtctctccctttaatgctgtattaaccacactgccttccattgtcctgtgagaatatgtttatttgctgggattttaaatagtcgattctattgtggattagtttatcttttagttacttcattgtgacagtgttttatccagttctgtgtcacttcttgttaatcttttaatagatttgctcctttttatgcctgtttttcatgctcctttgatgagtggattggggtgagaaggtcaaacccactattttttattcattactgttgtgaaggctcttcaagagagaaagatgaagctgaaacctttattaaattttgctaatgtggacttgtttt

SEQ ID NO: 402492 - DNA, 322 bp, Homo sapiens
tgcatttggcaggatctctctttttcatcttttgttttgtggaaagatgcaaaccccaagtaactgcccagtttgcatcgttctaggcaccgtgcatggaggaaaaactctggaaatcactacagaggacccttacatgcaaactgcaaaattaaggtggccttcaagtgtcaacaggctctacaggtgatgacagaactaataatcaccactgctccaacacaagagcctatgcagccaggtactagacttgcactctttctaatcttcgtaccaaccatgtgcaaatggtgttcattatgcctgtttacagatgagaaaa

SEQ ID NO: 402493 - DNA, 344 bp, Homo sapiens
ggaattatattaaaaatcatgtagttaattaagaatgattgtgagcttagacactgaaaaatatgtcactgaaagaataccaaaaatgtcagccttttcctcttaagttatagaaaggtatataatataagtacttagtacataagagaagagttagaatgagattgtaccaggttcagaattcctcatccgagaagaccagacaaaattcaagatttttagagagggactccctgaatgatgtcaccagtaagtgggtttataaacaaagacagagcttggcaggttgcactggatacttcaaaccagtttctctggaaaaatttgagttactcaataaaccc

SEQ ID NO: 402494 - DNA, 167 bp, Homo sapiens
ttaaggaaaaatttgaaaagaatttttttcatcttttaagacacaataaaaaaactaactgcaaaaaagcaaaaccaaaagaggcatcatttctcttaatgaaaattgactaaaaacatcatcctttgctagtttttaattaacctataagtcactttttttttttt

SEQ ID NO: 402495 - DNA, 312 bp, Homo sapiens
cccctgccacccagggcagcccgggctcaccatgccacagggcagcttccctcagctcccgtcccctcatgcccaaggtggtgctgtagctggaaggcagcatttaacccaagagccctgggacaggccacagggccccggacttttgagtaaaaagaatctgtggccagttgctggccgtgtgaccctgagcaaatctcaatcactctgcaccatattttgttcatctattacaatcccagacatttactgtgaatatggggtgagataatggatgtgatgaagctttgtaaactgccaggtggtggtttt

SEQ ID NO: 402496 - DNA, 338 bp, Homo sapiens
attgttgcaaaaattaacctttgccgattaaaatagtgttaagtatcgggttctggatgctatgctagaacaaaggcctggttttataggatcagaaatgactaagtaaaggggattccttccagagtgacttgggaaataaagaaattcttctttaagtatttaatcaataaatagagaagtgaaagcctatatgtgtcttagaaagatgaggtttcttcttattatttctacttctcctgcctccctgtttgaatgtgttacagtgatcgtgattggattaattcaaaataatgcttatttaaatgataagatgttgcttgctaatgttacataaa

SEQ ID NO: 402497 - DNA, 558 bp, Homo sapiens
attgtttttattttattttattcagatgcctgtgagaattttaacacatatcattccaaagttcattaccttaaaagtgatatctagtgacatctaacttttatctttcacaaatgtatttgacagtgtttgttcaagttagaaataaaagtttgttttaaatgaataaattgaaacatggggagatttttcaataaataattctgactcaaatctctcttttacctctttgttttggcccaccataccttcattgaaaggtattactttccaccatttagtaagactgttttaaattcttttactgcagccaaaagtcaattaaaatgtcaagtttaaaaccatttttgcaaagagagagatggggctcaagtctttagagctgtactgtctactaccttagtcactagtaacgttgtggctgctgagcacttgtaatatggctagtctgtttgatatgtgctgtaagtgtgaaaataatattgcatatcttactaatgattttcatactgattacatgttgagatgataatacttgaattaaaatgaaatattaaa

SEQ ID NO: 402498 - DNA, 718 bp, Homo sapiens
ctggtcttgaactcctgacctccagtgatccacctgcctcagcctcccgaagtgctgggatacaggcatgagccactgtgcctggccctagatatgtttagatacacaaatacttaccattgtgttacaactgcctacagcattcagtatagtgacatgtttgtagcctaggagccataggctataccatatagcctaggtatataggtatataggtataataggctgtaccatctaggtttatgtaagcacactgcatgatgttcacacaatgatgaaatcgcctgatgacacaatgtcagaacatattcctgtctttaaagtgacgtgcgaccgtaagtaaatctgtatacaaagtatatttgtatattacgttcttgtgactgtactaaactcttatgatttctagtacttttataggttctacagtattttctacactcaagatcatgtgtacaaataaacactgtcttgctctttactctcctacatacgtctttttccctgcttaccttattcactgactagtacctccagtgcaatgtcgaacacaagtgaggagagaatatctatgccttggttctcaatcttaagaggaaagtatttagtccatcactattatgtatgatattagctgtaggatttttgtattatagcagaacttcataaggccaagcaaagttcccttgtttgctgacagtttttatcataaatgagt

SEQ ID NO: 402499 - DNA, 412 bp, Homo sapiens
cagccatgtgtccagccacccctacaagctgggcccccaatggaggggcgtggccggcccacagagaccagagccacacaaactgacccacccccccccaggcctacccctgcctgtgccccctgctgatgggcttttgggggacccaggggcacggagccctcagtactgcccaaggagtgagagaggcagatggatgcaccagcaacatcagggaattggacttaccccaaaaacattgccaactcctgcaccaaacccaaaccagaagatagcgcctaagaaagggatgtcttcccagaagtgatcttgtttatataagactctcccagagccatcaaaactaaatcatgttcacttaaatgtttaataatttcccttcaccaaaaattaaaaaattatgtgaaaccct

SEQ ID NO: 402500 - DNA, 1003 bp, Homo sapiens
gtttttactcatgaattggatgtaagaattgaggagaaacgaagaaccaagtaaaaattttgagctttggcttgggaaactaggtatatggtaacgccaaaaagagagatgtagagaattgatgtaggagcaaagctgggctgggaaattgagaaaattatacctgccttgttaaagttgaaacacccacatgacactcacctggaaggatattcacacttggattgttggggaataataagaactagagatacagtttgagggtcactggcatagagatagtaattaaaaccaggatgtcagttatatcacctagggataatgcaaagagagagaaaagcaggagataagacagatcgagcagtgggagaagccggcattgaagaatgaagaggaaaaccaggcgtgtctagtgccatgatgccaagagaaaaacccagctccgagaagacaggagtttgtttgctaatgttattgagggataaagtaaaatacgaagagagaagtaacttggactggcggcaaagcgatcaccagtgctccttctaactgtggtgtcgataaagtaatgtggactggatgaaggagcctcgttggaataaactcatataggaatgatgataccgtgtttacctactaatgggaatgaccctattgaagagggaacatcacgtatgttggggagcggaaaagtcaaagtcctcgaaaagatggaattctgctcctggaaccagccaccatgctatgcagagctgaatccatgtagaaagctagcaagaggattcaaggagccctggctgacagctgagctgagctctgtcctgtagccagcactgacagccagctatgtaattgagccatcacagacattaccgtctcattgtgccttcggaagatgacagccccagtcaataccacacagagcggaagaactacccagctgagaccagtcctacaccgaattgtgaaagatgataaatggtcattgttctcagctattaca

SEQ ID NO: 402501 - DNA, 345 bp, Homo sapiens
atgagtcttgaagggacagataagaatacctctcaccagggtttatcattattggttcacatctgtcatattcagtagaatatgtattttttaaagaaattaggtttgttttgtataaagattagatgtatacaataaaaatattaagtaataataaaaatcacgaaataaaaaggaagagaatccctctacctctacactatgaatcttgcttcccagaggtaaccaccattaatattttttgggtagggattcttctgtgtgcatgtaggcataggaaaatgatcactcttgtaatatcgatttttaaggctaaaaaccagataaatacataatactgtgata

SEQ ID NO: 402502 - DNA, 381 bp, Homo sapiens
gaacttagtttgtcttgcaggctgtgatttagtacagttcatctattttgtgaaccatagtactcttttgtaagtaatggcttttattttaagtatcaatttccccattttgaccagctgcaaacaggaatatttatttatttttaaaacaacttcattgaggtgaaattgatatataacaactgcacatatttattatatacaatttgataggtttcaatgtatgcatatacttataaaatcatcaccacaatcaatgcaatagatatatccacccctccagaagtttccttgtacctctttgtttattttgtagcaacatataacatgagatctagcctcttaacaaatttttaagtgtatgatactgaaactttatac

SEQ ID NO: 402503 - DNA, 328 bp, Homo sapiens
ctcatacgaagggaggggacccaaaggcagttgcctggaaatggattttaaatatgaggtctgtgggtgaatagtgcaatattgaacaaaggaattttttttttcagatataagaggtttattaaggaaaggctcacagacacacccataaataatgggaggaggatggggaaagggatgaagcccagcaagagtgtgatttcatgtaagtcccagcattggcctgactgccaggggagggacctatggagtataaattatgcctcagagtgtgtgcctccttgtgaagggagctgggcttttgactcctaaccctgtcagtccatgg

SEQ ID NO: 402504 - DNA, 363 bp, Homo sapiens
atttacaacttgatcattcacttgtatgtaaccagtctcctgacataatggctgtcacctcacctcagcattctgtcagggaatttctggatatagtttttcagtgtacataaatgtctgaaaaattgattccaaggagaaagatcaacttccttttagtagcaacacttgtttttcatgttaccatatgagattaattttaattaagcattcgttttctgttaaatttgagatctcattccttaaaagaatggattgattgagagaaacaagtaattttggaatgggtaaattttttgggcaagggctatgtgggtttattcttctaggtagatgtttacagagggattatctaagggtaca

SEQ ID NO: 402505 - DNA, 518 bp, Homo sapiens
ctgcttggagattcttgacactgcctgcccctctgacatcgctgccctgagatggctctatagagccagaggactggacaggacctgcctcccgctcgtttggttccggcctcaggcttaggacaatggggtgttcctagcacccgagcgggcctcctggtcacagtgcgccttttaggtggctctcccagcgtcttcactgactttcgtgaaatagtgtcctgcgccctagtgaaactaccctgccttcacttaggcccgttttcttgaggagtgaagctgtcggccgctgtggcccctcctgtgccgcaggcgcatgcgaaacagggaccgaacgagccccgcctcgacgcctccaatcccactgatccccctgcctcggccctcgttccgagaacgaccgttccattcattcagtcttggcagtagttatttgattcgtcttctcttgtagtatactttaaagtgtgggcgatgcagttggctgtggtgctttaataaagatctgatcgatgcgg

SEQ ID NO: 402506 - DNA, 254 bp, Homo sapiens
aactgtaagactactcaggaaagtctatagcctttatttttaatccaagtgtctgccctgaatttattccttttctatcctagtgaactcaactggaagaactagacaaaaacatgaatgtcggcttgaagaagccttgtcaaacatagagaacattctgcctgttccttgcactccctcttttgagtcctaccctggcccctcttatctctccaaaatcaaaaacaccccttgggcagaacaacttcaatact

SEQ ID NO: 402507 - DNA, 441 bp, Homo sapiens
ctcggtgaggtgaactttaaggtgtatatctcactgtctactcagcctgggaggagagagagcctgaggcaaggatatatatcctaatttattggcagtgggaaaaaaatggttcggctgaattattagggccttggaaaaaagtagaggatggctaacgagatttggaaaagaggtatgtgaaaaacttccaaaattactgtttggactatagagtttgactacagttggcctaatgttaatgttcacccaaagagtcccatggtcaaggaggctcttggtcaagtggggaagacacctgctctgtgaaggtcagctagcctttctctgtagccgctccatgacttggtcaagggacttatgaatagagtggccacagcgacaaagatggagttaatgtattagtcaacacagataccctcctcactggcgcatgccata

SEQ ID NO: 402508 - DNA, 381 bp, Homo sapiens
cagcaggcaggggggcacccgcgccctcgcctccccagccgaccctgccattgtctccctgcgagcttcagagaggacggaggcctacgcccgggctggccggcctgctggagggaacagggaatggggcccaagcccctgttctgtgtggacccaaagggaaagcatttgggtgaggctagtccaaggggaggcagtgaggtcagtgcataaggggcagggatcccgaggacacaaaagcctggggctgaggccttacggggcctcaggcaagccacccattcggagtctcggtgctctcatctgaaaaagggatcacaaagagtccctgtgaggagtaaattagggggtgcatgtaatgcacctggcaggtgcaaagtg

SEQ ID NO: 402509 - DNA, 178 bp, Homo sapiens
gtatcgtacgtgcggccagccgagccggcgtttctggcccgcttcaaggaacgggtcggctacagggagggacccaccgtagagactaagagaattcagcctcagcccccagatgaagatggggatcacagtgacaaagaagatgaacagcctcaagtggtggttttaaaaaagggag

SEQ ID NO: 402510 - DNA, 2618 bp, Homo sapiens
ggcggggcgaggcggggcgccggggggagcaacactgagacgccattttcggcggcgggagcggcgcaggcggccgagcgggactggctgggtcggctgggctgctggtgcgaggagccgcggggctgtgctcggcggccaaggggacagcgcgtgggtggccgaggatgctgcggggcggtagctccggcgcccctcgctggtgactgctgcgccgtgcctcacacagccgaggcgggctcggcgcacagtcgctgctccgcgctcgcgcccggcggcgctccaggtgctgacagcgcgagagagcgcggccctcaggagcaaggcgaatgtatgacaacatgtccacaatggtgtacataaaggaagacaagttggagaagcttacacaggatgaaattatttctaagacaaagcaagtaattcaggggctggaagctttgaagaatgagcacaattccattttacaaagtttgctggagacactgaagtgtttgaagaaagatgatgaaagtaatttggtggaggagaaatcaaacatgatccggaagtcactggagatgttggagctcggcctgagtgaggcacaggttatgatggctttgtcaaatcacctgaatgctgtggagtccgagaagcagaaactgcgtgcgcaggttcgtcgtctgtgccaggagaatcagtggctacgggatgaactggccaacacgcagcagaaactgcagaagagtgagcagtctgtggctcaactggaggaggagaagaagcatctggagtttatgaatcagctaaaaaaatatgatgacgacatttccccatccgaggacaaagacactgattctaccaaagagcctctggatgaccttttccccaatgatgaagacgacccagggcaaggaatccagcagcagcacagcagtgcagccgcggctgcccagcagggcggctacgagatccccgcgcggctgcggacgctccacaacctggtgatccagtacgcctcgcaggggcgctacgaggtagctgtgcccctctgcaagcaggccctggaggacctggagaagacttcaggacacgaccacccggacgtggccaccatgctcaacatcctggccttggtgtacagggatcagaataaatacaaagatgcagctaacctactgaatgatgccttggctattcgtgagaaaactttgggcaaagatcatcctgcggtggcggcgactttgaataaccttgcagtcctttatggtaaaagagggaagtacaaagaagcagagccgttgtgtaaaagagctctggaaatccgagaaaaggttttggggaaggatcaccccgatgttgccaagcagttaaataacttggccttactgtgccagaaccagggcaagtatgaagaagtagaatattattatcaaagagccctcgagatctaccagacaaaactgggacctgatgaccccaacgtggctaagacgaaaaataacctggcatcctgctatttgaaacaaggaaagttcaagcaagcagaaacactgtacaaagagattctcactcgtgcacatgaaagggagtttggttctgtagatgatgaaaataaacccatctggatgcatgctgaagaaagagaagaatgcaaaggaaagcaaaaggatgggacatcttttggagagtatggcggctggtacaaagcctgcaaagttgatagtccaactgttacaaccactctaaaaaaccttggggcactttacagacgtcaaggcaaatttgaagctgcagaaacgttagaagaagctgctatgaggtctcgtaaacagggtcttgacaatgttcacaaacagagggtggcagaagtgctcaatgaccctgagaacatggagaagcgcaggagccgtgagagcctcaacgtggacgtggtcaagtacgagagtggccctgacggaggggaggaagtgagtatgagcgtagagtggaacgggatgaggaaaatgaagctcgggctggttaactgacttgctcagcgtcccatggcctagccgcccgtgactctcacactgtctcctgcatgacgggtggcgcctcccgcagcttcccttctctctccagtgctgcccgctgtgtctagcagcctctaggatcttgtcagagctgcacctctctgtgaactggccattcctttcggtgctgctgtcctttttgggggggttcctgatttctgtatacatgtagctttgccagatatgtacttagtaatataaactgtattaataaaatccatttactgtgtaatacacgagtttaaaaattaagagcgattagctgttcactttggtaacaggtagttaagtgtcacacaaggtgttgttgcaatggcatgacggtgacctgttgacgtaactaagccttagagcaaggcatgtgccgcacgtgctccgtggtacttagagccctgggggccccgctcggactccgggtctccctaggatatgccccagtagcatttgctgtgtagtctgtgtgtgaaatttgggcattctgcttttctctactaatcttgaagtgctcagtgatttgtgtatttgtgtctttctaacttctaataaactcactccgactga

SEQ ID NO: 402511 - DNA, 1172 bp, Homo sapiens
ggtttcaccctctccccctcacaggtcagcagcaaccagccccctccttcagtggccccgcaccaggtactcagaccacccaaacctggccacagtgccaccaaagccagcccgtggtggccatgacctcttcagacgctcagcaaggcaggggcctgatgcccttcaggcgttactcaggcgagtcaggcctggcctgcctctgccaaggcgtggggcactctgggagaccacctgggggtcaggatgggctgtaggttgagacaccctcaaggccagtgcctcccgtgcatccaggccttagccctgtgctctgagctggcctggcctggccaaggggtggaaacagccctgtgcccaccagctcccaggagagcttccaggggaggacccccccagtgaaggcaggtgtcctcggcctccctctgggtgctgccgtggcctgtgggtgccagagccattggcatggctggtctggcctctgaccgcacagcttggtgagccatggtgatgggggagggtgacacagctgctcctggcaccaagcagtgtagttcaggccccacgggccttgccagcagctctggccagatggaggctgctaaggggcccctaggctgtccctcaagtccaaggtctgcagccacacgctggtgtcacgcccggagctctgaagacgcctgagggccgcctgcacgccctgagtgaaactcgtctgtgcttcatctccagggcgtctctggccgagcctctttttgtggaaaacgacagcagcagcagtggcctggaagacgccaccgctaactgaccccaacctggccccgctccaggatgggactgccgagtgtggcccggagctggcccgggacagccagggcggcagggagggcccctggccgggagccgcagcgctcactcatttctcctgcgtctgtgtgcataggacatgatactaataaccacacggctggcgtgaccttggggctggggctgggcctaagctggtgccctggtgcggcgtggtctctcccaggagacctggggcatgagctgggcccacggctcccttcccatgtgtaacttcctcacgttgtgtgcgataacgtattttattgtacatttttttaaattaaaagtttatatgccttaaatgctttacttgaaagttttta

SEQ ID NO: 402512 - DNA, 2092 bp, Homo sapiens
  misc_feature (1428)..(1428): n is a, c, g, or t
gagatggggtttccccatgttacccgggatggtcttgaactcctgggcttaagtgatcctcctgccttggccttccaaagcattgggattacagacttgagccactatacccagtctagatgagccactttttaaaagtgcaagtctaaggacattttgagtttgcatatggtactttaaaagaagcattttgctgtgaaagatgcagagaagctgtggtcttttctcctgggcactaaatagagtgagacataggactccccggttacccaagcaagatgaaggcaaggtccctagagcccccagtgtcacagaggcgttggagggggctttgcttgtgcttcctgttgctggttgaccgatgtgctgatcgtttgtccttgcatgtccgtgtccgggttgcagcatgaagcgtgccagctctctgaatgtccttaacgtgggtggcaaggctgctgaagatcgctttcaagtaaggagcctaccccgaattgtgtcctaggctgcccagaccacgctggcaggtctgctgcagacccgcactcggcccctgctcggcccctgctcctgcagagggctggggacgccgccacgtttgttcctagacagacagttgtgacagtagtatttttatattctgcttaaccactgattatgtgaattatgggcatgttcacactgtgaacattctcagaatattaattaatgatctcaaatggtctttaaaaatagtttaacctaattaatgtattctgttaaagtactgtcaaagctcgaccaattactagtttgtatgattgtttgattttagcctctactaagtttataactattaataattaattgtctacttaagctgttgttcagtgttcagaagtattcaaaactctgttaacatgatgactagcgtgctgtcagtttgacactaaaacctgaagcactcggtgcagttgctcgggcctcacacagacacatcaggtttacatctgaaagtactgcctcccttccccatcacggaggccgtttgagttttcatccactccgccctttggtgtggctgtcagtgggtggccgggtgcctgtggctgctctagaacctgtttctcaggtgcctggggcccacccggcagctcgagctgttgggacttggcagtccctgcccctgtgctggtgctgagagttcgcgacagtggccaggcactgccctcccagttgtccagatccactaatcctcacagacaggccagtgccccgacctgtcccccaacactcttgggaggcagccatctcgggaaagcttttccccagcccccttctcggtggctgttaaagaggcttgtagggtgctggacatgttgcttgaagcacccctaatgacaagaggaaagaaagtctcttcattttacagggtcctgtagctgacccagngtttgccctccagtttcttggagtttctacatgcacattgacccctgggcctctcgagtgccaacctagatttagctgtgcagctggtactgttaggcctgaggccatttgaagctggcatcatttgaagtcctggttaagtgtaatttttctatttgttttttcatgcaggaacgaaataattgtctggccgactcgcgagctctgagtgccagccacactgacctggcccactgagagccagcagggctaggtaacctgtcttgggagtgtgagaccgccccgccctgccacgcccctcaccgccctgcccggaggcgccagccgcactccttggcttcctttcctagatagtgacgtccaccaaccttggaggtgccttttcaaaacacccgggaggccgtgcctcagcattctgttactcggcctgcagccccagtgccaggagccaccccgaccgcgacccggccaggctggctcagggaggccgaggtggcgctgaggtggcttcagcacgctggggattggctcctgctcacggatgctgttgcatttcctgcctgccacctttttgccatgacaccagactctcttttaaattgtaatattgtaataaggctgtaaattaagaatctggaaacataaagtacccctttcagaacga

SEQ ID NO: 402513 - DNA, 1688 bp, Homo sapiens
gtggtcccatcctctgtaaagacacacagagccacatcacacatcctctatcctaggtggagcccggggtctgcctcccagctgcaccacctttgtctgtctgcaggtcgccagctctgctggggccttctgaagcagcctctctccgtcttgccattcttttcacactgctcccatgttaagatttctacacgtttcgaagacactaaattcttacctaggattattggggaatggaatatatggttagaaatagatgaatttttatttttaaaaaatgacaataagggctggacgaggtggctcatgcctgtaatcccaggactttgggaggccgaggcgggtggatcacttgaggccaggagttcgagaccagcctggccaacatggcgaaaactcgtctgtgcgaaaaaaacaaaaatcagccaggcatggtcgtgcgcgcctgtaatcccagttactcaggaggctgaggcagggaattgcttgaacccagtaggtggaggctgcattgagccaagatcatgccactgcactccagcctgggtgacagagccagaatctgtctcaaattacactagtaagacaactagaatatgccaaaaataaataaacttaagcactaaattatctgagatcctactgtatacagataataacgatgactgcatatttttaaactgtgaacacattatcctattaatcctgctcaggtaacccacctttgtaatgtgaatattctttcccagtaatataaagaggtagacagtttcttaagctgttagaatgcagtgaatcctcccaggccctgaagtccagttgaatggaaatctgcctgggccagggcagccgccggccttccccctggttctcacagccaaggtcctcaggtggcaagttcagggaagcaggcagactgacccagagtggggcagacccgctccactgccaaccccaggtgctggtctgggtctgcagaggctcagggaggaggaggcagctgggtcggaccccaattctgggactcctgggcccattgcccagctgtcagctgtcagcttgctactccagcagctgcagaggggagagagagcatgagtgagcgtgtgtgcacgcgtgtgtgtgtgtgtcacatgaaatacttttgaatctgagtgaaatgaatcttctgtgttctgccaagcatttagttgaggtgtattataaactactgtagtgtagcgctgagttttgaaatgaacagcaggggctgcactgttaatgacgatacgttagcattttagcatcctttttctcaagagcagcaaaaacttatgttttcttgtcctccccacatttttgaggtgttggtaacaagtgttatttttccattttaaagatgaggaaaatgaagctcgggctggttaactgacttgctcagcgtcccatggcctagccgcccgtgactctcacactgtctcctgcatgacgggtggcgcctcccgcagcttcccttctctctccagtgctgcccgctgtgtctagcagcctctaggatcttgtcagagctgcacctctctgtgaactggccattcctttcggtgctgctgtcctttttgggggggttcctgatttctgtatacatgtagctttgccagatatgtacttagtaatataaactgtattaataaaatccatttactgtgtaa

SEQ ID NO: 402514 - DNA, 945 bp, Homo sapiens
ggtttcaccctctccccctcacaggtcagcagcaaccagccccctccttcagtggccccgcaccaggtactcagaccacccaaacctggccacagtgccaccaaagccagcccgtggtggccatgacctcttcagacgctcagcaaggcaggggcctgatgcccttcaggcgttactcaggcgagtcaggcctggcctgcctctgccaaggcgtggggcactctgggagaccacctgggggtcaggatgggctgtaggttgagacaccctcaaggccagtgcctcccgtgcatccaggccttagccctgtgctctgagctggcctggcctggccaaggggtggaaacagccctgtgcccaccagctcccaggagagcttccaggggaggacccccccagtgaaggcaggtgtcctcggcctccctctgggtgctgccgtggcctgtgggtgccagagccattggcatggctggtctggcctctgaccgcacagcttggtgagccatggtgatgggggagggtgacacagctgctcctggcaccaagcagtgtagttcaggccccacgggccttgccagcagctctggccagatggaggctgctaaggggcccctaggctgtccctcaagtccaaggtctgcagccacacgctggtgtcacgcccggagctctgaagacgcctgagggccgcctgcacgccctgagtgaaactcgtctgtgcttcatctccagggcgtctctggccgagcctctttttgtggaaaacgacagcagcagcagtggcctggaagacgccaccgctaacgtgagtcccacggcctgcagccccaggaagcaggcagctgggccagggagggactttgcacatgcagggactggggggagctggggatgggcaagtggtgactgctgctagctgccaggctgggcctccaagaggggctt

SEQ ID NO: 402515 - DNA, 3220 bp, Homo sapiens
ggcggggcgaggcggggcgccggggggagcaacactgagacgccattttcggcggcgggagcggcgcaggcggccgagcgggactggctgggtcggctgggctgctggtgcgaggagccgcggggctgtgctcggcggccaaggggacagcgcgtgggtggccgaggatgctgcggggcggtagctccggcgcccctcgctggtgactgctgcgccgtgcctcacacagccgaggcgggctcggcgcacagtcgctgctccgcgctcgcgcccggcggcgctccaggtgctgacagcgcgagagagcgcggccctcaggagcaaggcgaatgtatgacaacatgtccacaatggtgtacataaaggaagacaagttggagaagcttacacaggatgaaattatttctaagacaaagcaagtaattcaggggctggaagctttgaagaatgagcacaattccattttacaaagtttgctggagacactgaagtgtttgaagaaagatgatgaaagtaatttggtggaggagaaatcaaacatgatccggaagtcactggagatgttggagctcggcctgagtgaggcacaggttatgatggctttgtcaaatcacctgaatgctgtggagtccgagaagcagaaactgcgtgcgcaggttcgtcgtctgtgccaggagaatcagtggctacgggatgaactggccaacacgcagcagaaactgcagaagagtgagcagtctgtggctcaactggaggaggagaagaagcatctggagtttatgaatcagctaaaaaaatatgatgacgacatttccccatccgaggacaaagacactgattctaccaaagagcctctggatgaccttttccccaatgatgaagacgacccagggcaaggaatccagcagcagcacagcagtgcagccgcggctgcccagcagggcggctacgagatccccgcgcggctgcggacgctccacaacctggtgatccagtacgcctcgcaggggcgctacgaggtagctgtgcccctctgcaagcaggccctggaggacctggagaagacttcaggacacgaccacccggacgtggccaccatgctcaacatcctggccttggtgtacagggatcagaataaatacaaagatgcagctaacctactgaatgatgccttggctattcgtgagaaaactttgggcaaagatcatcctgcggtggcggcgactttgaataaccttgcagtcctttatggtaaaagagggaagtacaaagaagcagagccgttgtgtaaaagagctctggaaatccgagaaaaggttttggggaaggatcaccccgatgttgccaagcagttaaataacttggccttactgtgccagaaccagggcaagtatgaagaagtagaatattattatcaaagagccctcgagatctaccagacaaaactgggacctgatgaccccaacgtggctaagacgaaaaataacctggcatcctgctatttgaaacaaggaaagttcaagcaagcagaaacactgtacaaagagattctcactcgtgcacatgaaagggagtttggttctgtagatgatgaaaataaacccatctggatgcatgctgaagaaagagaagaatgcaaaggaaagcaaaaggatgggacatcttttggagagtatggcggctggtacaaagcctgcaaagttgatagtccaactgttacaaccactctaaaaaaccttggggcactttacagacgtcaaggcaaatttgaagctgcagaaacgttagaagaagctgctatgaggtctcgtaaacagggtcttgacaatgttcacaaacagagggtggcagaagtgctcaatgaccctgagaacatggagaagcgcaggagccgtgagagcctcaacgtggacgtggtcaagtacgagagtggccctgacggaggggaggaagtgagtatgagcgtagagtggaacgggatgaggaaaatgaagctcgggctggttaactgacttgctcagcgtcccatggtgagtccgagcgggcggggcgcaggccctgccgtctggcgcttctgtcgagacgtcggctttccaacctggcaggacccaggacgcattgctgcctgtggaaattaattttcttttggattatcaactgcatgtttaaaatgggctgtagacttttaaagtccgtggtttcctaaagtttctgaaatgtctaaaatgtgtttttaagagaatgaaagtcatacctgtaggcctttattttggtccctatgtttttcattgcataatctccttatatacagttacttgtaaagccttttacaccaagtgtcaaggagatttctaatacgttgccaatctttacgcttaaagtgttgacatttactttgatgaccattgggaatggaccagtctggattctgtgaaatgcaccatgaggcccagcacctgctttatgctggactggtagaagcaggcagaaggtcatcccagtcctaaagccactcagaaggctgctgagacttgtgacctagaaatactgtaagccaggctgttatgcagagcctgttgcctttcctcgccgcggtttcacgtgggttttctctctcctttctgtctgacaggcctagccgcccgtgactctcacactgtctcctgcatgacgggtggcgcctcccgcagcttcccttctctctccagtgctgcccgctgtgtctagcagcctctaggatcttgtcagagctgcacctctctgtgaactggccattcctttcggtgctgctgtcctttttgggggggttcctgatttctgtatacatgtagctttgccagatatgtacttagtaatataaactgtattaataaaatccatttactgtgtaatacacgagtttaaaaattaagagcgattagctgttcactttggtaacaggtagttaagtgtcacacaaggtgttgttgcaatggcatgacggtgacctgttgacgtaactaagccttagagcaaggcatgtgccgcacgtgctccgtggtacttagagccctgggggccccgctcggactccgggtctccctaggatatgccccagtagcatttgctgtgtagtctgtgtgtgaaatttgggcattctgcttttctctactaatcttgaagtgctcagtgatttgtgtatttgtgtctttctaacttctaataaactcactccgactga

SEQ ID NO: 402516 - DNA, 2761 bp, Homo sapiens
ggcggggcgaggcggggcgccggggggagcaacactgagacgccattttcggcggcgggagcggcgcaggcggccgagcgggactggctgggtcggctgggctgctggtgcgaggagccgcggggctgtgctcggcggccaaggggacagcgcgtgggtggccgaggatgctgcggggcggtagctccggcgcccctcgctggtgactgctgcgccgtgcctcacacagccgaggcgggctcggcgcacagtcgctgctccgcgctcgcgcccggcggcgctccaggtgctgacagcgcgagagagcgcggccctcaggagcaaggcgaatgtatgacaacatgtccacaatggtgtacataaaggaagacaagttggagaagcttacacaggatgaaattatttctaagacaaagcaagtaattcaggggctggaagctttgaagaatgagcacaattccattttacaaagtttgctggagacactgaagtgtttgaagaaagatgatgaaagtaatttggtggaggagaaatcaaacatgatccggaagtcactggagatgttggagctcggcctgagtgaggcacaggttatgatggctttgtcaaatcacctgaatgctgtggagtccgagaagcagaaactgcgtgcgcaggttcgtcgtctgtgccaggagaatcagtggctacgggatgaactggccaacacgcagcagaaactgcagaagagtgagcagtctgtggctcaactggaggaggagaagaagcatctggagtttatgaatcagctaaaaaaatatgatgacgacatttccccatccgaggacaaagacactgattctaccaaagagcctctggatgaccttttccccaatgatgaagacgacccagggcaaggaatccagcagcagcacagcagtgcagccgcggctgcccagcagggcggctacgagatccccgcgcggctgcggacgctccacaacctggtgatccagtacgcctcgcaggggcgctacgaggtagctgtgcccctctgcaagcaggccctggaggacctggagaagacttcaggacacgaccacccggacgtggccaccatgctcaacatcctggccttggtgtacagggatcagaataaatacaaagatgcagctaacctactgaatgatgccttggctattcgtgagaaaactttgggcaaagatcatcctgcggtggcggcgactttgaataaccttgcagtcctttatggtaaaagagggaagtacaaagaagcagagccgttgtgtaaaagagctctggaaatccgagaaaaggttttggggaaggatcaccccgatgttgccaagcagttaaataacttggccttactgtgccagaaccagggcaagtatgaagaagtagaatattattatcaaagagccctcgagatctaccagacaaaactgggacctgatgaccccaacgtggctaagacgaaaaataacctggcatcctgctatttgaaacaaggaaagttcaagcaagcagaaacactgtacaaagagattctcactcgtgcacatgaaagggagtttggttctgtagatgatgaaaataaacccatctggatgcatgctgaagaaagagaagaatgcaaaggaaagcaaaaggatgggacatcttttggagagtatggcggctggtacaaagcctgcaaagttgatagtccaactgttacaaccactctaaaaaaccttggggcactttacagacgtcaaggcaaatttgaagctgcagaaacgttagaagaagctgctatgaggtctcgtaaacagggtcttgacaatgttcacaaacagagggtggcagaagtgctcaatgaccctgagaacatggagaagcgcaggagccgtgagagcctcaacgtggacgtggtcaagtacgagagtggccctgacggaggggaggaagtgagtatgagcgtagagtggaacgggatgaggaaaatgaagctcgggctggttaactgacttgctcagcgtcccatggcctagccgcccgtgactctcacactgtctcctgcatgacgggtggcgcctcccgcagcttcccttctctctccagtgctgcccgctgtgtctagcagcctctaggatcttgtcagagctgcacctctctgtgaactggccattcctttcggtgctgctgtcctttttgggggggttcctgatttctgtatacatgtagctttgccagatatgtacttagtaatataaactgtattaataaaatccatttactgtgtaatacacgagtttaaaaattaagagcgattagctgttcactttggtaacaggtagttaagtgtcacacaaggtgttgttgcaatggcatgacggtgacctgttgacgtaactaagccttagagcaaggcatgtgccgcacgtgctccgtggtacttagagccctgggggccccgctcggactccgggtctccctaggatatgccccagtagcatttgctgtgtagtctgtgtgtgaaatttgggcattctgcttttctctactaatcttgaagtgctcagtgatttgtgtatttgtgtctttctaacttctaataaactcactccgactgaaaaaaaaaaaacaaaaattttggggccccgccccaaaagtttaaccatttggggcgcgcccagtaggacctgccattccagaccggctcgatggggttcccaaaaaccgggcggtcaaaccggtgggccggcacacgaccgtt

SEQ ID NO: 402517 - DNA, 2540 bp, Homo sapiens
ggcggggcgaggcggggcgccggggggagcaacactgagacgccattttcggcggcgggagcggcgcaggcggccgagcgggactggctgggtcggctgggctgctggtgcgaggagccgcggggctgtgctcggcggccaaggggacagcgcgtgggtggccgaggatgctgcggggcggtagctccggcgcccctcgctggtgactgctgcgccgtgcctcacacagccgaggcgggctcggcgcacagtcgctgctccgcgctcgcgcccggcggcgctccaggtgctgacagcgcgagagagcgcggccctcaggagcaaggcgaatgtatgacaacatgtccacaatggtgtacataaaggaagacaagttggagaagcttacacaggatgaaattatttctaagacaaagcaagtaattcaggggctggaagctttgaagaatgagcacaattccattttacaaagtttgctggagacactgaagtgtttgaagaaagatgatgaaagtaatttggtggaggagaaatcaaacatgatccggaagtcactggagatgttggagctcggcctgagtgaggcacaggttatgatggctttgtcaaatcacctgaatgctgtggagtccgagaagcagaaactgcgtgcgcaggttcgtcgtctgtgccaggagaatcagtggctacgggatgaactggccaacacgcagcagaaactgcagaagagtgagcagtctgtggctcaactggaggaggagaagaagcatctggagtttatgaatcagctaaaaaaatatgatgacgacatttccccatccgaggacaaagacactgattctaccaaagagcctctggatgaccttttccccaatgatgaagacgacccagggcaaggaatccagcagcagcacagcagtgcagccgcggctgcccagcagggcggctacgagatccccgcgcggctgcggacgctccacaacctggtgatccagtacgcctcgcaggggcgctacgaggtagctgtgcccctctgcaagcaggccctggaggacctggagaagacttcaggacacgaccacccggacgtggccaccatgctcaacatcctggccttggtgtacagggatcagaataaatacaaagatgcagctaacctactgaatgatgccttggctattcgtgagaaaactttgggcaaagatcatcctgcggtggcggcgactttgaataaccttgcagtcctttatggtaaaagagggaagtacaaagaagcagagccgttgtgtaaaagagctctggaaatccgagaaaaggttttggggaaggatcaccccgatgttgccaagcagttaaataacttggccttactgtgccagaaccagggcaagtatgaagaagtagaatattattatcaaagagccctcgagatctaccagacaaaactgggacctgatgaccccaacgtggctaagacgaaaaataacctggcatcctgctatttgaaacaaggaaagttcaagcaagcagaaacactgtacaaagagattctcactcgtgcacatgaaagggagtttggttctgtagatgatgaaaataaacccatctggatgcatgctgaagaaagagaagaatgcaaaggaaagcaaaaggatgggacatcttttggagagtatggcggctggtacaaagcctgcaaagttgatagtccaactgttacaaccactctaaaaaaccttggggcactttacagacgtcaaggcaaatttgaagctgcagaaacgttagaagaagctgctatgaggtctcgtaaacagggtcttgacaatgttcacaaacagagggtggcagaagtgctcaatgaccctgagaacatggagaagcgcaggagccgtgagagcctcaacgtggacgtggtcaagtacgagagtggccctgacggaggggaggaagcctagccgcccgtgactctcacactgtctcctgcatgacgggtggcgcctcccgcagcttcccttctctctccagtgctgcccgctgtgtctagcagcctctaggatcttgtcagagctgcacctctctgtgaactggccattcctttcggtgctgctgtcctttttgggggggttcctgatttctgtatacatgtagctttgccagatatgtacttagtaatataaactgtattaataaaatccatttactgtgtaatacacgagtttaaaaattaagagcgattagctgttcactttggtaacaggtagttaagtgtcacacaaggtgttgttgcaatggcatgacggtgacctgttgacgtaactaagccttagagcaaggcatgtgccgcacgtgctccgtggtacttagagccctgggggccccgctcggactccgggtctccctaggatatgccccagtagcatttgctgtgtagtctgtgtgtgaaatttgggcattctgcttttctctactaatcttgaagtgctcagtgatttgtgtatttgtgtctttctaacttctaataaactcactccgactga

SEQ ID NO: 402518 - DNA, 2692 bp, Homo sapiens
ggcggggcgaggcggggcgccggggggagcaacactgagacgccattttcggcggcgggagcggcgcaggcggccgagcgggactggctgggtcggctgggctgctggtgcgaggagccgcggggctgtgctcggcggccaaggggacagcgcgtgggtggccgaggatgctgcggggcggtagctccggcgcccctcgctggtgactgctgcgccgtgcctcacacagccgaggcgggctcggcgcacagtcgctgctccgcgctcgcgcccggcggcgctccaggtgctgacagcgcgagagagcgcggccctcaggagcaaggcgaatgtatgacaacatgtccacaatggtgtacataaaggaagacaagttggagaagcttacacaggatgaaattatttctaagacaaagcaagtaattcaggggctggaagctttgaagaatgagcacaattccattttacaaagtttgctggagacactgaagtgtttgaagaaagatgatgaaagtaatttggtggaggagaaatcaaacatgatccggaagtcactggagatgttggagctcggcctgagtgaggcacaggttatgatggctttgtcaaatcacctgaatgctgtggagtccgagaagcagaaactgcgtgcgcaggttcgtcgtctgtgccaggagaatcagtggctacgggatgaactggccaacacgcagcagaaactgcagaagagtgagcagtctgtggctcaactggaggaggagaagaagcatctggagtttatgaatcagctaaaaaaatatgatgacgacatttccccatccgaggacaaagacactgattctaccaaagagcctctggatgaccttttccccaatgatgaagacgacccagggcaaggaatccagcagcagcacagcagtgcagccgcggctgcccagcagggcggctacgagatccccgcgcggctgcggacgctccacaacctggtgatccagtacgcctcgcaggggcgctacgaggtagctgtgcccctctgcaagcaggccctggaggacctggagaagacttcaggacacgaccacccggacgtggccaccatgctcaacatcctggccttggtgtacagggatcagaataaatacaaagatgcagctaacctactgaatgatgccttggctattcgtgagaaaactttgggcaaagatcatcctgcggtggcggcgactttgaataaccttgcagtcctttatggtaaaagagggaagtacaaagaagcagagccgttgtgtaaaagagctctggaaatccgagaaaaggttttggggaaggatcaccccgatgttgccaagcagttaaataacttggccttactgtgccagaaccagggcaagtatgaagaagtagaatattattatcaaagagccctcgagatctaccagacaaaactgggacctgatgaccccaacgtggctaagacgaaaaataacctggcatcctgctatttgaaacaaggaaagttcaagcaagcagaaacactgtacaaagagattctcactcgtgcacatgaaagggagtttggttctgtagatgatgaaaataaacccatctggatgcatgctgaagaaagagaagaatgcaaaggaaagcaaaaggatgggacatcttttggagagtatggcggctggtacaaagcctgcaaagttgatagtccaactgttacaaccactctaaaaaaccttggggcactttacagacgtcaaggcaaatttgaagctgcagaaacgttagaagaagctgctatgaggtctcgtaaacagcgaagtatctcagaaatacctaagaaaatcttaagtgctaatgggtcaaaccattttcccctgcctggctcacaggtcttgacaatgttcacaaacagagggtggcagaagtgctcaatgaccctgagaacatggagaagcgcaggagccgtgagagcctcaacgtggacgtggtcaagtacgagagtggccctgacggaggggaggaagtgagtatgagcgtagagtggaacgggatgaggaaaatgaagctcgggctggttaactgacttgctcagcgtcccatggcctagccgcccgtgactctcacactgtctcctgcatgacgggtggcgcctcccgcagcttcccttctctctccagtgctgcccgctgtgtctagcagcctctaggatcttgtcagagctgcacctctctgtgaactggccattcctttcggtgctgctgtcctttttgggggggttcctgatttctgtatacatgtagctttgccagatatgtacttagtaatataaactgtattaataaaatccatttactgtgtaatacacgagtttaaaaattaagagcgattagctgttcactttggtaacaggtagttaagtgtcacacaaggtgttgttgcaatggcatgacggtgacctgttgacgtaactaagccttagagcaaggcatgtgccgcacgtgctccgtggtacttagagccctgggggccccgctcggactccgggtctccctaggatatgccccagtagcatttgctgtgtagtctgtgtgtgaaatttgggcattctgcttttctctactaatcttgaagtgctcagtgatttgtgtatttgtgtctttctaacttctaataaactcactccgactga

SEQ ID NO: 402519 - DNA, 2617 bp, Homo sapiens
ggcggggcgaggcggggcgccggggggagcaacactgagacgccattttcggcggcgggagcggcgcaggcggccgagcgggactggctgggtcggctgggctgctggtgcgaggagccgcggggctgtgctcggcggccaaggggacagcgcgtgggtggccgaggatgctgcggggcggtagctccggcgcccctcgctggtgactgctgcgccgtgcctcacacagccgaggcgggctcggcgcacagtcgctgctccgcgctcgcgcccggcggcgctccaggtgctgacagcgcgagagagcgcggccctcaggagcaaggcgaatgtatgacaacatgtccacaatggtgtacataaaggaagacaagttggagaagcttacacaggatgaaattatttctaagacaaagcaagtaattcaggggctggaagctttgaagaatgagcacaattccattttacaaagtttgctggagacactgaagtgtttgaagaaagatgatgaaagtaatttggtggaggagaaatcaaacatgatccggaagtcactggagatgttggagctcggcctgagtgaggcacaggttatgatggctttgtcaaatcacctgaatgctgtggagtccgagaagcagaaactgcgtgcgcaggttcgtcgtctgtgccaggagaatcagtggctacgggatgaactggccaacacgcagcagaaactgcagaagagtgagcagtctgtggctcaactggaggaggagaagaagcatctggagtttatgaatcagctaaaaaaatatgatgacgacatttccccatccgaggacaaagacactgattctaccaaagagcctctggatgaccttttccccaatgatgaagacgacccagggcaaggaatccagcagcagcacagcagtgcagccgcggctgcccagcagggcggctacgagatccccgcgcggctgcggacgctccacaacctggtgatccagtacgcctcgcaggggcgctacgaggtagctgtgcccctctgcaagcaggccctggaggacctggagaagacttcaggacacgaccacccggacgtggccaccatgctcaacatcctggccttggtgtacagggatcagaataaatacaaagatgcagctaacctactgaatgatgccttggctattcgtgagaaaactttgggcaaagatcatcctgcggtggcggcgactttgaataaccttgcagtcctttatggtaaaagagggaagtacaaagaagcagagccgttgtgtaaaagagctctggaaatccgagaaaaggttttggggaaggatcaccccgatgttgccaagcagttaaataacttggccttactgtgccagaaccagggcaagtatgaagaagtagaatattattatcaaagagccctcgagatctaccagacaaaactgggacctgatgaccccaacgtggctaagacgaaaaataacctggcatcctgctatttgaaacaaggaaagttcaagcaagcagaaacactgtacaaagagattctcactcgtgcacatgaaagggagtttggttctgtagatgatgaaaataaacccatctggatgcatgctgaagaaagagaagaatgcaaaggaaagcaaaaggatgggacatcttttggagagtatggcggctggtacaaagcctgcaaagttgatagtccaactgttacaaccactctaaaaaaccttggggcactttacagacgtcaaggcaaatttgaagctgcagaaacgttagaagaagctgctatgaggtctcgtaaacagggtcttgacaatgttcacaaacagagggtggcagaagtgctcaatgaccctgagaacatggagaagcgcaggagccgtgagagcctcaacgtggacgtggtcaagtacgagagtggccctgacggaggggaggaagtgagtatgagcgtagagtggaacggggatggcactggatctttaaaacgcagtggttcctttagcaaactccgggcttccattagacgcagcagtgagaagctggttaggaagctgaagggaggaagttcacgagagagtgagccaaagaaccccggcatgaagcgtgccagctctctgaatgtccttaacgtgggtggcaaggctgctgaagatcgctttcaaggcgtctctggccgagcctctttttgtggaaaacgacagcagcagcagtggcctggaagacgccaccgctaactgaccccaacctggccccgctccaggatgggactgccgagtgtggcccggagctggcccgggacagccagggcggcagggagggcccctggccgggagccgcagcgctcactcatttctcctgcgtctgtgtgcataggacatgatactaataaccacacggctggcgtgaccttggggctggggctgggcctaagctggtgccctggtgcggcgtggtctctcccaggagacctggggcatgagctgggcccacggctcccttcccatgtgtaacttcctcacgttgtgtgcgataacgtattttattgtacatttttttaaattaaaagtttatatgccttaaatgctttacttgaaagttttta

SEQ ID NO: 402520 - DNA, 2392 bp, Homo sapiens
ggcggggcgaggcggggcgccggggggagcaacactgagacgccattttcggcggcgggagcggcgcaggcggccgagcgggactggctgggtcggctgggctgctggtgcgaggagccgcggggctgtgctcggcggccaaggggacagcgcgtgggtggccgaggatgctgcggggcggtagctccggcgcccctcgctggtgactgctgcgccgtgcctcacacagccgaggcgggctcggcgcacagtcgctgctccgcgctcgcgcccggcggcgctccaggtgctgacagcgcgagagagcgcggccctcaggagcaaggcgaatgtatgacaacatgtccacaatggtgtacataaaggaagacaagttggagaagcttacacaggatgaaattatttctaagacaaagcaagtaattcaggggctggaagctttgaagaatgagcacaattccattttacaaagtttgctggagacactgaagtgtttgaagaaagatgatgaaagtaatttggtggaggagaaatcaaacatgatccggaagtcactggagatgttggagctcggcctgagtgaggcacaggttatgatggctttgtcaaatcacctgaatgctgtggagtccgagaagcagaaactgcgtgcgcaggttcgtcgtctgtgccaggagaatcagtggctacgggatgaactggccaacacgcagcagaaactgcagaagagtgagcagtctgtggctcaactggaggaggagaagaagcatctggagtttatgaatcagctaaaaaaatatgatgacgacatttccccatccgaggacaaagacactgattctaccaaagagcctctggatgaccttttccccaatgatgaagacgacccagggcaaggaatccagcagcagcacagcagtgcagccgcggctgcccagcagggcggctacgagatccccgcgcggctgcggacgctccacaacctggtgatccagtacgcctcgcaggggcgctacgaggtagctgtgcccctctgcaagcaggccctggaggacctggagaagacttcaggacacgaccacccggacgtggccaccatgctcaacatcctggccttggtgtacagggatcagaataaatacaaagatgcagctaacctactgaatgatgccttggctattcgtgagaaaactttgggcaaagatcatcctgcggtggcggcgactttgaataaccttgcagtcctttatggtaaaagagggaagtacaaagaagcagagccgttgtgtaaaagagctctggaaatccgagaaaaggttttggggaaggatcaccccgatgttgccaagcagttaaataacttggccttactgtgccagaaccagggcaagtatgaagaagtagaatattattatcaaagagccctcgagatctaccagacaaaactgggacctgatgaccccaacgtggctaagacgaaaaataacctggcatcctgctatttgaaacaaggaaagttcaagcaagcagaaacactgtacaaagagattctcactcgtgcacatgaaagggagtttggttctgtagatgatgaaaataaacccatctggatgcatgctgaagaaagagaagaatgcaaaggaaagcaaaaggatgggacatcttttggagagtatggcggctggtacaaagcctgcaaagttgatagtccaactgttacaaccactctaaaaaaccttggggcactttacagacgtcaaggcaaatttgaagctgcagaaacgttagaagaagctgctatgaggtctcgtaaacagggtcttgacaatgttcacaaacagagggtggcagaagtgctcaatgaccctgagaacatggagaagcgcaggagccgtgagagcctcaacgtggacgtggtcaagtacgagagtggccctgacggaggggaggaaggcgtctctggccgagcctctttttgtggaaaacgacagcagcagcagtggcctggaagacgccaccgctaactgaccccaacctggccccgctccaggatgggactgccgagtgtggcccggagctggcccgggacagccagggcggcagggagggcccctggccgggagccgcagcgctcactcatttctcctgcgtctgtgtgcataggacatgatactaataaccacacggctggcgtgaccttggggctggggctgggcctaagctggtgccctggtgcggcgtggtctctcccaggagacctggggcatgagctgggcccacggctcccttcccatgtgtaacttcctcacgttgtgtgcgataacgtattttattgtacatttttttaaattaaaagtttatatgccttaaatgctttacttgaaagttttta

SEQ ID NO: 402521 - DNA, 2262 bp, Homo sapiens
ggcggggcgaggcggggcgccggggggagcaacactgagacgccattttcggcggcgggagcggcgcaggcggccgagcgggactggctgggtcggctgggctgctggtgcgaggagccgcggggctgtgctcggcggccaaggggacagcgcgtgggtggccgaggatgctgcggggcggtagctccggcgcccctcgctggtgactgctgcgccgtgcctcacacagccgaggcgggctcggcgcacagtcgctgctccgcgctcgcgcccggcggcgctccaggtgctgacagcgcgagagagcgcggccctcaggagcaaggcgaatgtatgacaacatgtccacaatggtgtacataaaggaagacaagttggagaagcttacacaggatgaaattatttctaagacaaagcaagtaattcaggggctggaagctttgaagaatgagcacaattccattttacaaagtttgctggagacactgaagtgtttgaagaaagatgatgaaagtaatttggtggaggagaaatcaaacatgatccggaagtcactggagatgttggagctcggcctgagtgaggcacaggttatgatggctttgtcaaatcacctgaatgctgtggagtccgagaagcagaaactgcgtgcgcaggttcgtcgtctgtgccaggagaatcagtggctacgggatgaactggccaacacgcagcagaaactgcagaagagtgagcagtctgtggctcaactggaggaggagaagaagcatctggagtttatgaatcagctaaaaaaatatgatgacgacatttccccatccgaggacaaagacactgattctaccaaagagcctctggatgaccttttccccaatgatgaagacgacccagggcaaggaatccagcagcagcacagcagtgcagccgcggctgcccagcagggcggctacgagatccccgcgcggctgcggacgctccacaacctggtgatccagtacgcctcgcaggggcgctacgaggtagctgtgcccctctgcaagcaggccctggaggacctggagaagacttcaggacacgaccacccggacgtggccaccatgctcaacatcctggccttggtgtacagggatcagaataaatacaaagatgcagctaacctactgaatgatgccttggctattcgtgagaaaactttgggcaaagatcatcctgcggtggcggcgactttgaataaccttgcagtcctttatggtaaaagagggaagtacaaagaagcagagccgttgtgtaaaagagctctggaaatccgagaaaaggttttggggaaggatcaccccgatgttgccaagcagttaaataacttggccttactgtgccagaaccagggcaagtatgaagaagtagaatattattatcaaagagccctcgagatctaccagacaaaactgggacctgatgaccccaacgtggctaagacgaaaaataacctggcatcctgctatttgaaacaaggaaagttcaagcaagcagaaacactgtacaaagagattctcactcgtgcacatgaaagggagtttggttctgtagatgatgaaaataaacccatctggatgcatgctgaagaaagagaagaatgcaaaggaaagcaaaaggatgggacatcttttggagagtatggcggctggtacaaagcctgcaaagttgatagtccaactgttacaaccactctaaaaaaccttggggcactttacagacgtcaaggcaaatttgaagctgcagaaacgttagaagaagctgctatgaggtctcgtaaacagggtcttgacaatgttcacaaacagagggtggcagaagtgctcaatgaccctgagaacatggagaagcgcaggagccgtgagagcctcaacgtggacgtggtcaagtacgagagtggccctgacggaggggaggaaatgaggaaaatgaagctcgggctggttaactgacttgctcagcgtcccatggcctagccgcccgtgactctcacactgtctcctgcatgacgggtggcgcctcccgcagcttcccttctctctccagtgctgcccgctgtgtctagcagcctctaggatcttgtcagagctgcacctctctgtgaactggccattcctttcggtgctgctgtcctttttgggggggttcctgatttctgtatacatgtagctttgccagatatgtacttagtaatataaactgtattaataaaatccatttactgtgtaa

SEQ ID NO: 402522 - DNA, 2289 bp, Homo sapiens
ggcggggcgaggcggggcgccggggggagcaacactgagacgccattttcggcggcgggagcggcgcaggcggccgagcgggactggctgggtcggctgggctgctggtgcgaggagccgcggggctgtgctcggcggccaaggggacagcgcgtgggtggccgaggatgctgcggggcggtagctccggcgcccctcgctggtgactgctgcgccgtgcctcacacagccgaggcgggctcggcgcacagtcgctgctccgcgctcgcgcccggcggcgctccaggtgctgacagcgcgagagagcgcggccctcaggagcaaggcgaatgtatgacaacatgtccacaatggtgtacataaaggaagacaagttggagaagcttacacaggatgaaattatttctaagacaaagcaagtaattcaggggctggaagctttgaagaatgagcacaattccattttacaaagtttgctggagacactgaagtgtttgaagaaagatgatgaaagtaatttggtggaggagaaatcaaacatgatccggaagtcactggagatgttggagctcggcctgagtgaggcacaggttatgatggctttgtcaaatcacctgaatgctgtggagtccgagaagcagaaactgcgtgcgcaggttcgtcgtctgtgccaggagaatcagtggctacgggatgaactggccaacacgcagcagaaactgcagaagagtgagcagtctgtggctcaactggaggaggagaagaagcatctggagtttatgaatcagctaaaaaaatatgatgacgacatttccccatccgaggacaaagacactgattctaccaaagagcctctggatgaccttttccccaatgatgaagacgacccagggcaaggaatccagcagcagcacagcagtgcagccgcggctgcccagcagggcggctacgagatccccgcgcggctgcggacgctccacaacctggtgatccagtacgcctcgcaggggcgctacgaggtagctgtgcccctctgcaagcaggccctggaggacctggagaagacttcaggacacgaccacccggacgtggccaccatgctcaacatcctggccttggtgtacagggatcagaataaatacaaagatgcagctaacctactgaatgatgccttggctattcgtgagaaaactttgggcaaagatcatcctgcggtggcggcgactttgaataaccttgcagtcctttatggtaaaagagggaagtacaaagaagcagagccgttgtgtaaaagagctctggaaatccgagaaaaggttttggggaaggatcaccccgatgttgccaagcagttaaataacttggccttactgtgccagaaccagggcaagtatgaagaagtagaatattattatcaaagagccctcgagatctaccagacaaaactgggacctgatgaccccaacgtggctaagacgaaaaataacctggcatcctgctatttgaaacaaggaaagttcaagcaagcagaaacactgtacaaagagattctcactcgtgcacatgaaagggagtttggttctgtagatgatgaaaataaacccatctggatgcatgctgaagaaagagaagaatgcaaaggaaagcaaaaggatgggacatcttttggagagtatggcggctggtacaaagcctgcaaagttgatagtccaactgttacaaccactctaaaaaaccttggggcactttacagacgtcaaggcaaatttgaagctgcagaaacgttagaagaagctgctatgaggtctcgtaaacagggtcttgacaatgttcacaaacagagggtggcagaagtgctcaatgaccctgagaacatggagaagcgcaggagccgtgagagcctcaacgtggacgtggtcaagtacgagagtggccctgacggaggggaggaagtgagtatgagcgtagagtggaacgggatgaggaaaatgaagctcgggctggttaactgacttgctcagcgtcccatggcctagccgcccgtgactctcacactgtctcctgcatgacgggtggcgcctcccgcagcttcccttctctctccagtgctgcccgctgtgtctagcagcctctaggatcttgtcagagctgcacctctctgtgaactggccattcctttcggtgctgctgtcctttttgggggggttcctgatttctgtatacatgtagctttgccagatatgtacttagtaatataaactgtattaataaaatccatttactgtgtaa

SEQ ID NO: 402523 - DNA, 3032 bp, Homo sapiens
ggcggggcgaggcggggcgccggggggagcaacactgagacgccattttcggcggcgggagcggcgcaggcggccgagcgggactggctgggtcggctgggctgctggtgcgaggagccgcggggctgtgctcggcggccaaggggacagcgcgtgggtggccgaggatgctgcggggcggtagctccggcgcccctcgctggtgactgctgcgccgtgcctcacacagccgaggcgggctcggcgcacagtcgctgctccgcgctcgcgcccggcggcgctccaggtgctgacagcgcgagagagcgcggccctcaggagcaaggcgaatgtatgacaacatgtccacaatggtgtacataaaggaagacaagttggagaagcttacacaggatgaaattatttctaagacaaagcaagtaattcaggggctggaagctttgaagaatgagcacaattccattttacaaagtttgctggagacactgaagtgtttgaagaaagatgatgaaagtaatttggtggaggagaaatcaaacatgatccggaagtcactggagatgttggagctcggcctgagtgaggcacaggttatgatggctttgtcaaatcacctgaatgctgtggagtccgagaagcagaaactgcgtgcgcaggttcgtcgtctgtgccaggagaatcagtggctacgggatgaactggccaacacgcagcagaaactgcagaagagtgagcagtctgtggctcaactggaggaggagaagaagcatctggagtttatgaatcagctaaaaaaatatgatgacgacatttccccatccgaggacaaagacactgattctaccaaagagcctctggatgaccttttccccaatgatgaagacgacccagggcaaggaatccagcagcagcacagcagtgcagccgcggctgcccagcagggcggctacgagatccccgcgcggctgcggacgctccacaacctggtgatccagtacgcctcgcaggggcgctacgaggtagctgtgcccctctgcaagcaggccctggaggacctggagaagacttcaggacacgaccacccggacgtggccaccatgctcaacatcctggccttggtgtacagggatcagaataaatacaaagatgcagctaacctactgaatgatgccttggctattcgtgagaaaactttgggcaaagatcatcctgcggtggcggcgactttgaataaccttgcagtcctttatggtaaaagagggaagtacaaagaagcagagccgttgtgtaaaagagctctggaaatccgagaaaaggttttggggaaggatcaccccgatgttgccaagcagttaaataacttggccttactgtgccagaaccagggcaagtatgaagaagtagaatattattatcaaagagccctcgagatctaccagacaaaactgggacctgatgaccccaacgtggctaagacgaaaaataacctggcatcctgctatttgaaacaaggaaagttcaagcaagcagaaacactgtacaaagagattctcactcgtgcacatgaaagggagtttggttctgtagatgatgaaaataaacccatctggatgcatgctgaagaaagagaagaatgcaaaggaaagcaaaaggatgggacatcttttggagagtatggcggctggtacaaagcctgcaaagttgatagtccaactgttacaaccactctaaaaaaccttggggcactttacagacgtcaaggcaaatttgaagctgcagaaacgttagaagaagctgctatgaggtctcgtaaacagggtcttgacaatgttcacaaacagagggtggcagaagtgctcaatgaccctgagaacatggagaagcgcaggagccgtgagagcctcaacgtggacgtggtcaagtacgagagtggccctgacggaggggaggaagtgagtatgagcgtagagtggaacggggatggcactggatctttaaaacgcagtggttcctttagcaaactccgggcttccattagacgcagcagtgagaagctggttaggaagctgaagggaggaagttcacgagagagtgagccaaagaaccccgggtaactatctcttccagctctcccgactccctgcacgccggctgctgggccgcttctcttcctagcgcagccttcctcacccacagacttgaggaaagacactccagttggttcccgtattctcacaaccgaagggtttcatagttgccacgtaggtttttcccaggataggttgagaagtaattgggtaacttcctgttagtggctaaagggcgaatacctttaaaagaaatttatggaattttttgattctgtcacatgttctaagaaagccttagcaacgaaatgtgggcatttatattaaaatgttgagcattttgaacttgtttactctagatatgcattattttttaaattagcattagtttaaattctttaaaaattttaatcttttaaataaatcagatgttagctatgactatattaaatctcatacagtattataatagggagaaaaatggtttcaaataggatcagaacttttaagactttattataaggagattttcaaaacctcaggcttttcatatgtttaaaaaaaggtttgagtcatgggtcttagaggcttttgaaaaataacatttaagttgtcaaaggaatttggttcttaagatatcctttgtttttaatatggtgcacaaagttgacagattgtccctgccgcagtgtccagggtcacctctgggcagctgctcctggcttggacgtatttctcatgaggcagacttttgccagccactctgtgtaactctgacttcctaaatggtgaccgactttttagagactgattcctagtaaaactattttacaagtgatcccactttaagttctgtgagtaagaagtctgatcacctcaggatggtgaaaccgagttcttctggagaacatattggaaataataaagttatgtgcctgaaaagtt

SEQ ID NO: 402524 - DNA, 3797 bp, Homo sapiens
  misc_feature (3133)..(3133): n is a, c, g, or t
ggcggggcgaggcggggcgccggggggagcaacactgagacgccattttcggcggcgggagcggcgcaggcggccgagcgggactggctgggtcggctgggctgctggtgcgaggagccgcggggctgtgctcggcggccaaggggacagcgcgtgggtggccgaggatgctgcggggcggtagctccggcgcccctcgctggtgactgctgcgccgtgcctcacacagccgaggcgggctcggcgcacagtcgctgctccgcgctcgcgcccggcggcgctccaggtgctgacagcgcgagagagcgcggccctcaggagcaaggcgaatgtatgacaacatgtccacaatggtgtacataaaggaagacaagttggagaagcttacacaggatgaaattatttctaagacaaagcaagtaattcaggggctggaagctttgaagaatgagcacaattccattttacaaagtttgctggagacactgaagtgtttgaagaaagatgatgaaagtaatttggtggaggagaaatcaaacatgatccggaagtcactggagatgttggagctcggcctgagtgaggcacaggttatgatggctttgtcaaatcacctgaatgctgtggagtccgagaagcagaaactgcgtgcgcaggttcgtcgtctgtgccaggagaatcagtggctacgggatgaactggccaacacgcagcagaaactgcagaagagtgagcagtctgtggctcaactggaggaggagaagaagcatctggagtttatgaatcagctaaaaaaatatgatgacgacatttccccatccgaggacaaagacactgattctaccaaagagcctctggatgaccttttccccaatgatgaagacgacccagggcaaggaatccagcagcagcacagcagtgcagccgcggctgcccagcagggcggctacgagatccccgcgcggctgcggacgctccacaacctggtgatccagtacgcctcgcaggggcgctacgaggtagctgtgcccctctgcaagcaggccctggaggacctggagaagacttcaggacacgaccacccggacgtggccaccatgctcaacatcctggccttggtgtacagggatcagaataaatacaaagatgcagctaacctactgaatgatgccttggctattcgtgagaaaactttgggcaaagatcatcctgcggtggcggcgactttgaataaccttgcagtcctttatggtaaaagagggaagtacaaagaagcagagccgttgtgtaaaagagctctggaaatccgagaaaaggttttggggaaggatcaccccgatgttgccaagcagttaaataacttggccttactgtgccagaaccagggcaagtatgaagaagtagaatattattatcaaagagccctcgagatctaccagacaaaactgggacctgatgaccccaacgtggctaagacgaaaaataacctggcatcctgctatttgaaacaaggaaagttcaagcaagcagaaacactgtacaaagagattctcactcgtgcacatgaaagggagtttggttctgtagatgatgaaaataaacccatctggatgcatgctgaagaaagagaagaatgcaaaggaaagcaaaaggatgggacatcttttggagagtatggcggctggtacaaagcctgcaaagttgatagtccaactgttacaaccactctaaaaaaccttggggcactttacagacgtcaaggcaaatttgaagctgcagaaacgttagaagaagctgctatgaggtctcgtaaacagggtcttgacaatgttcacaaacagagggtggcagaagtgctcaatgaccctgagaacatggagaagcgcaggagccgtgagagcctcaacgtggacgtggtcaagtacgagagtggccctgacggaggggaggaagtgagtatgagcgtagagtggaacggggatggcactggatctttaaaacgcagtggttcctttagcaaactccgggcttccattagacgcagcagtgagaagctggttaggaagctgaagggaggaagttcacgagagagtgagccaaagaaccccggcatgaagcgtgccagctctctgaatgtccttaacgtgggtggcaaggctgctgaagatcgctttcaagtaaggagcctaccccgaattgtgtcctaggctgcccagaccacgctggcaggtctgctgcagacccgcactcggcccctgctcggcccctgctcctgcagagggctggggacgccgccacgtttgttcctagacagacagttgtgacagtagtatttttatattctgcttaaccactgattatgtgaattatgggcatgttcacactgtgaacattctcagaatattaattaatgatctcaaatggtctttaaaaatagtttaacctaattaatgtattctgttaaagtactgtcaaagctcgaccaattactagtttgtatgattgtttgattttagcctctactaagtttataactattaataattaattgtctacttaagctgttgttcagtgttcagaagtattcaaaactctgttaacatgatgactagcgtgctgtcagtttgacactaaaacctgaagcactcggtgcagttgctcgggcctcacacagacacatcaggtttacatctgaaagtactgcctcccttccccatcacggaggccgtttgagttttcatccactccgccctttggtgtggctgtcagtgggtggccgggtgcctgtggctgctctagaacctgtttctcaggtgcctggggcccacccggcagctcgagctgttgggacttggcagtccctgcccctgtgctggtgctgagagttcgcgacagtggccaggcactgccctcccagttgtccagatccactaatcctcacagacaggccagtgccccgacctgtcccccaacactcttgggaggcagccatctcgggaaagcttttccccagcccccttctcggtggctgttaaagaggcttgtagggtgctggacatgttgcttgaagcacccctaatgacaagaggaaagaaagtctcttcattttacagggtcctgtagctgacccagngtttgccctccagtttcttggagtttctacatgcacattgacccctgggcctctcgagtgccaacctagatttagctgtgcagctggtactgttaggcctgaggccatttgaagctggcatcatttgaagtcctggttaagtgtaatttttctatttgttttttcatgcaggaacgaaataattgtctggccgactcgcgagctctgagtgccagccacactgacctggcccactgagagccagcagggctaggtaacctgtcttgggagtgtgagaccgccccgccctgccacgcccctcaccgccctgcccggaggcgccagccgcactccttggcttcctttcctagatagtgacgtccaccaaccttggaggtgccttttcaaaacacccgggaggccgtgcctcagcattctgttactcggcctgcagccccagtgccaggagccaccccgaccgcgacccggccaggctggctcagggaggccgaggtggcgctgaggtggcttcagcacgctggggattggctcctgctcacggatgctgttgcatttcctgcctgccacctttttgccatgacaccagactctcttttaaattgtaatattgtaataaggctgtaaattaagaatctggaaacataaagtacccctttcagaacga

SEQ ID NO: 402525 - DNA, 3845 bp, Homo sapiens
  misc_feature (3133)..(3133): n is a, c, g, or t
ggcggggcgaggcggggcgccggggggagcaacactgagacgccattttcggcggcgggagcggcgcaggcggccgagcgggactggctgggtcggctgggctgctggtgcgaggagccgcggggctgtgctcggcggccaaggggacagcgcgtgggtggccgaggatgctgcggggcggtagctccggcgcccctcgctggtgactgctgcgccgtgcctcacacagccgaggcgggctcggcgcacagtcgctgctccgcgctcgcgcccggcggcgctccaggtgctgacagcgcgagagagcgcggccctcaggagcaaggcgaatgtatgacaacatgtccacaatggtgtacataaaggaagacaagttggagaagcttacacaggatgaaattatttctaagacaaagcaagtaattcaggggctggaagctttgaagaatgagcacaattccattttacaaagtttgctggagacactgaagtgtttgaagaaagatgatgaaagtaatttggtggaggagaaatcaaacatgatccggaagtcactggagatgttggagctcggcctgagtgaggcacaggttatgatggctttgtcaaatcacctgaatgctgtggagtccgagaagcagaaactgcgtgcgcaggttcgtcgtctgtgccaggagaatcagtggctacgggatgaactggccaacacgcagcagaaactgcagaagagtgagcagtctgtggctcaactggaggaggagaagaagcatctggagtttatgaatcagctaaaaaaatatgatgacgacatttccccatccgaggacaaagacactgattctaccaaagagcctctggatgaccttttccccaatgatgaagacgacccagggcaaggaatccagcagcagcacagcagtgcagccgcggctgcccagcagggcggctacgagatccccgcgcggctgcggacgctccacaacctggtgatccagtacgcctcgcaggggcgctacgaggtagctgtgcccctctgcaagcaggccctggaggacctggagaagacttcaggacacgaccacccggacgtggccaccatgctcaacatcctggccttggtgtacagggatcagaataaatacaaagatgcagctaacctactgaatgatgccttggctattcgtgagaaaactttgggcaaagatcatcctgcggtggcggcgactttgaataaccttgcagtcctttatggtaaaagagggaagtacaaagaagcagagccgttgtgtaaaagagctctggaaatccgagaaaaggttttggggaaggatcaccccgatgttgccaagcagttaaataacttggccttactgtgccagaaccagggcaagtatgaagaagtagaatattattatcaaagagccctcgagatctaccagacaaaactgggacctgatgaccccaacgtggctaagacgaaaaataacctggcatcctgctatttgaaacaaggaaagttcaagcaagcagaaacactgtacaaagagattctcactcgtgcacatgaaagggagtttggttctgtagatgatgaaaataaacccatctggatgcatgctgaagaaagagaagaatgcaaaggaaagcaaaaggatgggacatcttttggagagtatggcggctggtacaaagcctgcaaagttgatagtccaactgttacaaccactctaaaaaaccttggggcactttacagacgtcaaggcaaatttgaagctgcagaaacgttagaagaagctgctatgaggtctcgtaaacagggtcttgacaatgttcacaaacagagggtggcagaagtgctcaatgaccctgagaacatggagaagcgcaggagccgtgagagcctcaacgtggacgtggtcaagtacgagagtggccctgacggaggggaggaagtgagtatgagcgtagagtggaacggggatggcactggatctttaaaacgcagtggttcctttagcaaactccgggcttccattagacgcagcagtgagaagctggttaggaagctgaagggaggaagttcacgagagagtgagccaaagaaccccggcatgaagcgtgccagctctctgaatgtccttaacgtgggtggcaaggctgctgaagatcgctttcaagtaaggagcctaccccgaattgtgtcctaggctgcccagaccacgctggcaggtctgctgcagacccgcactcggcccctgctcggcccctgctcctgcagagggctggggacgccgccacgtttgttcctagacagacagttgtgacagtagtatttttatattctgcttaaccactgattatgtgaattatgggcatgttcacactgtgaacattctcagaatattaattaatgatctcaaatggtctttaaaaatagtttaacctaattaatgtattctgttaaagtactgtcaaagctcgaccaattactagtttgtatgattgtttgattttagcctctactaagtttataactattaataattaattgtctacttaagctgttgttcagtgttcagaagtattcaaaactctgttaacatgatgactagcgtgctgtcagtttgacactaaaacctgaagcactcggtgcagttgctcgggcctcacacagacacatcaggtttacatctgaaagtactgcctcccttccccatcacggaggccgtttgagttttcatccactccgccctttggtgtggctgtcagtgggtggccgggtgcctgtggctgctctagaacctgtttctcaggtgcctggggcccacccggcagctcgagctgttgggacttggcagtccctgcccctgtgctggtgctgagagttcgcgacagtggccaggcactgccctcccagttgtccagatccactaatcctcacagacaggccagtgccccgacctgtcccccaacactcttgggaggcagccatctcgggaaagcttttccccagcccccttctcggtggctgttaaagaggcttgtagggtgctggacatgttgcttgaagcacccctaatgacaagaggaaagaaagtctcttcattttacagggtcctgtagctgacccagngtttgccctccagtttcttggagtttctacatgcacattgacccctgggcctctcgagtgccaacctagatttagctgtgcagctggtactgttaggcctgaggccatttgaagctggcatcatttgaagtcctggttaagtgtaatttttctatttgttttttcatgcaggaacgaaataattgtctggccgactcgcgagctctgagtgccagccacactgacctggcccactgagagccagcagggctaggtaacctgtcttgggagtgtgagaccgccccgccctgccacgcccctcaccgccctgcccggaggcgccagccgcactccttggcttcctttcctagatagtgacgtccaccaaccttggaggtgccttttcaaaacacccgggaggccgtgcctcagcattctgttactcggcctgcagccccagtgccaggagccaccccgaccgcgacccggccaggctggctcagggaggccgaggtggcgctgaggtggcttcagcacgctggggattggctcctgctcacggatgctgttgcatttcctgcctgccacctttttgccatgacaccagactctcttttaaattgtaatattgtaataaggctgtaaattaagaatctggaaacataaagtacccctttcagaacgataggcatttagtgatctatggcagtaaagcctgaagcttagcggacac

SEQ ID NO: 402526 - DNA, 2242 bp, Homo sapiens
  misc_feature (2049)..(2049): n is a, c, g, or t
  misc_feature (2142)..(2142): n is a, c, g, or t
  misc_feature (2144)..(2144): n is a, c, g, or t
ggcggggcgaggcggggcgccggggggagcaacactgagacgccattttcggcggcgggagcggcgcaggcggccgagcgggactggctgggtcggctgggctgctggtgcgaggagccgcggggctgtgctcggcggccaaggggacagcgcgtgggtggccgaggatgctgcggggcggtagctccggcgcccctcgctggtgactgctgcgccgtgcctcacacagccgaggcgggctcggcgcacagtcgctgctccgcgctcgcgcccggcggcgctccaggtgctgacagcgcgagagagcgcggccctcaggagcaaggcgaatgtatgacaacatgtccacaatggtgtacataaaggaagacaagttggagaagcttacacaggatgaaattatttctaagacaaagcaagtaattcaggggctggaagctttgaagaatgagcacaattccattttacaaagtttgctggagacactgaagtgtttgaagaaagatgatgaaagtaatttggtggaggagaaatcaaacatgatccggaagtcactggagatgttggagctcggcctgagtgaggcacaggttatgatggctttgtcaaatcacctgaatgctgtggagtccgagaagcagaaactgcgtgcgcaggttcgtcgtctgtgccaggagaatcagtggctacgggatgaactggccaacacgcagcagaaactgcagaagagtgagcagtctgtggctcaactggaggaggagaagaagcatctggagtttatgaatcagctaaaaaaatatgatgacgacatttccccatccgaggacaaagacactgattctaccaaagagcctctggatgaccttttccccaatgatgaagacgacccagggcaaggaatccagcagcagcacagcagtgcagccgcggctgcccagcagggcggctacgagatccccgcgcggctgcggacgctccacaacctggtgatccagtacgcctcgcaggggcgctacgaggtagctgtgcccctctgcaagcaggccctggaggacctggagaagacttcaggacacgaccacccggacgtggccaccatgctcaacatcctggccttggtgtacagggatcagaataaatacaaagatgcagctaacctactgaatgatgccttggctattcgtgagaaaactttgggcaaagatcatcctgcggtggcggcgactttgaataaccttgcagtcctttatggtaaaagagggaagtacaaagaagcagagccgttgtgtaaaagagctctggaaatccgagaaaaggttttggggaaggatcaccccgatgttgccaagcagttaaataacttggccttactgtgccagaaccagggcaagtatgaagaagtagaatattattatcaaagagccctcgagatctaccagacaaaactgggacctgatgaccccaacgtggctaagacgaaaaataacctggcatcctgctatttgaaacaaggaaagttcaagcaagcagaaacactgtacaaagagattctcactcgtgcacatgaaagggagtttggttctgtagatgatgaaaataaacccatctggatgcatgctgaagaaagagaagaatgcaaaggaaagcaaaaggatgggacatcttttggagagtatggcggctggtacaaagcctgcaaagttgatagtccaactgttacaaccactctaaaaaaccttggggcactttacagacgtcaaggcaaatttgaagctgcagaaacgttagaagaagctgctatgaggtctcgtaaacagggtcttgacaatgttcacaaacagagggtggcagaagtgctcaatgaccctgagaacatggagaagcgcaggagccgtgagagcctcaacgtggacgtggtcaagtacgagagtggccctgacggaggggaggaagtgagtatgagcgtagagtggaacgggggcggcgattgaatacctgcagtcctttatggtaaaagagggaagtacaaagaagcagagccgttgtgtnaaagagctctggaaatccgagaaaaggttttggggaaggatcaccccgatgttgccaagcagttaaataacttggccttactgtgccagaccngngcaagtatgaagaagtagaatattattatcaaagagccctcgagatctaccagacaaaactgggacctgatgaccccaacgtggcacgtggcgtctgt

SEQ ID NO: 402527 - DNA, 2772 bp, Homo sapiens
ggcggggcgaggcggggcgccggggggagcaacactgagacgccattttcggcggcgggagcggcgcaggcggccgagcgggactggctgggtcggctgggctgctggtgcgaggagccgcggggctgtgctcggcggccaaggggacagcgcgtgggtggccgaggatgctgcggggcggtagctccggcgcccctcgctggtgactgctgcgccgtgcctcacacagccgaggcgggctcggcgcacagtcgctgctccgcgctcgcgcccggcggcgctccaggtgctgacagcgcgagagagcgcggccctcaggagcaaggcgaatgtatgacaacatgtccacaatggtgtacataaaggaagacaagttggagaagcttacacaggatgaaattatttctaagacaaagcaagtaattcaggggctggaagctttgaagaatgagcacaattccattttacaaagtttgctggagacactgaagtgtttgaagaaagatgatgaaagtaatttggtggaggagaaatcaaacatgatccggaagtcactggagatgttggagctcggcctgagtgaggcacaggttatgatggctttgtcaaatcacctgaatgctgtggagtccgagaagcagaaactgcgtgcgcaggttcgtcgtctgtgccaggagaatcagtggctacgggatgaactggccaacacgcagcagaaactgcagaagagtgagcagtctgtggctcaactggaggaggagaagaagcatctggagtttatgaatcagctaaaaaaatatgatgacgacatttccccatccgaggacaaagacactgattctaccaaagagcctctggatgaccttttccccaatgatgaagacgacccagggcaaggaatccagcagcagcacagcagtgcagccgcggctgcccagcagggcggctacgagatccccgcgcggctgcggacgctccacaacctggtgatccagtacgcctcgcaggggcgctacgaggtagctgtgcccctctgcaagcaggccctggaggacctggagaagacttcaggacacgaccacccggacgtggccaccatgctcaacatcctggccttggtgtacagggatcagaataaatacaaagatgcagctaacctactgaatgatgccttggctattcgtgagaaaactttgggcaaagatcatcctgcggtggcggcgactttgaataaccttgcagtcctttatggtaaaagagggaagtacaaagaagcagagccgttgtgtaaaagagctctggaaatccgagaaaaggttttggggaaggatcaccccgatgttgccaagcagttaaataacttggccttactgtgccagaaccagggcaagtatgaagaagtagaatattattatcaaagagccctcgagatctaccagacaaaactgggacctgatgaccccaacgtggctaagacgaaaaataacctggcatcctgctatttgaaacaaggaaagttcaagcaagcagaaacactgtacaaagagattctcactcgtgcacatgaaagggagtttggttctgtagatgatgaaaataaacccatctggatgcatgctgaagaaagagaagaatgcaaaggaaagcaaaaggatgggacatcttttggagagtatggcggctggtacaaagcctgcaaagttgatagtccaactgttacaaccactctaaaaaaccttggggcactttacagacgtcaaggcaaatttgaagctgcagaaacgttagaagaagctgctatgaggtctcgtaaacagggtcttgacaatgttcacaaacagagggtggcagaagtgctcaatgaccctgagaacatggagaagcgcaggagccgtgagagcctcaacgtggacgtggtcaagtacgagagtggccctgacggaggggaggaagatggcactggatctttaaaacgcagtggttcctttagcaaactccgggcttccattagacgcagcagtgagaagctggttaggaagctgaagggaggaagttcacgagagagtgagccaaagaaccccggcatgaagcgtgccagctctctgaatgtccttaacgtgggtggcaaggctgctgaagatcgctttcaaggcgtctctggccgagcctctttttgtggaaaacgacagcagcagcagtggcctggaagacgccaccgctaacgacccgactgaccgtccaggatgggactgcgagtgtggccgagctggcccggaagcaaggcggaggaggcctggcggaacgaggctcacaatctcctgcgtcgttgctagatgttaatacacacgtgcggactgggcgggtgacagtgggcggggggcaccaaaacgggtaaggccagctccaggaacacactggcaagtagcttaaagttccaaaaaactcgtcgggaaaaaaaaatacttaagcgcaataaaagagaagagagagaaaaaagaaaaaaaggggggggggggggggtgaaaaggaatcacgagaagggaggacaagagactaagagccaccacaccaaatccacagggaggaagaggggcgcgcaaacagaggaggagcgcggaagaaaacaggaaaagagaggagcgggggaggcagagaagaaaaaagcgaagagcagggagagaaaagcgcccagacaacgaaagaatggaggggaagacacgcaaaacacgcgggggggaggacaaagtacgtagggcgcaagcgccaacgaca

SEQ ID NO: 402528 - DNA, 2395 bp, Homo sapiens
ggcggggcgaggcggggcgccggggggagcaacactgagacgccattttcggcggcgggagcggcgcaggcggccgagcgggactggctgggtcggctgggctgctggtgcgaggagccgcggggctgtgctcggcggccaaggggacagcgcgtgggtggccgaggatgctgcggggcggtagctccggcgcccctcgctggtgactgctgcgccgtgcctcacacagccgaggcgggctcggcgcacagtcgctgctccgcgctcgcgcccggcggcgctccaggtgctgacagcgcgagagagcgcggccctcaggagcaaggcgaatgtatgacaacatgtccacaatggtgtacataaaggaagacaagttggagaagcttacacaggatgaaattatttctaagacaaagcaagtaattcaggggctggaagctttgaagaatgagcacaattccattttacaaagtttgctggagacactgaagtgtttgaagaaagatgatgaaagtaatttggtggaggagaaatcaaacatgatccggaagtcactggagatgttggagctcggcctgagtgaggcacaggttatgatggctttgtcaaatcacctgaatgctgtggagtccgagaagcagaaactgcgtgcgcaggttcgtcgtctgtgccaggagaatcagtggctacgggatgaactggccaacacgcagcagaaactgcagaagagtgagcagtctgtggctcaactggaggaggagaagaagcatctggagtttatgaatcagctaaaaaaatatgatgacgacatttccccatccgaggacaaagacactgattctaccaaagagcctctggatgaccttttccccaatgatgaagacgacccagggcaaggaatccagcagcagcacagcagtgcagccgcggctgcccagcagggcggctacgagatccccgcgcggctgcggacgctccacaacctggtgatccagtacgcctcgcaggggcgctacgaggtagctgtgcccctctgcaagcaggccctggaggacctggagaagacttcaggacacgaccacccggacgtggccaccatgctcaacatcctggccttggtgtacagggatcagaataaatacaaagatgcagctaacctactgaatgatgccttggctattcgtgagaaaactttgggcaaagatcatcctgcggtggcggcgactttgaataaccttgcagtcctttatggtaaaagagggaagtacaaagaagcagagccgttgtgtaaaagagctctggaaatccgagaaaaggttttggggaaggatcaccccgatgttgccaagcagttaaataacttggccttactgtgccagaaccagggcaagtatgaagaagtagaatattattatcaaagagccctcgagatctaccagacaaaactgggacctgatgaccccaacgtggctaagacgaaaaataacctggcatcctgctatttgaaacaaggaaagttcaagcaagcagaaacactgtacaaagagattctcactcgtgcacatgaaagggagtttggttctgtagatgatgaaaataaacccatctggatgcatgctgaagaaagagaagaatgcaaaggaaagcaaaaggatgggacatcttttggagagtatggcggctggtacaaagcctgcaaagttgatagtccaactgttacaaccactctaaaaaaccttggggcactttacagacgtcaaggcaaatttgaagctgcagaaacgttagaagaagctgctatgaggtctcgtaaacagagggtggcagaagtgctcaatgaccctgagaacatggagaagcgcaggagccgtgagagcctcaacgtggacgtggtcaagtacgagagtggccctgacggaggggaggaagtgagtatgagcgtagagtggaacgggggcgtctctggccgagcctctttttgtggaaaacgacagcagcagcagtggcctggaagacgccaccgctaactgaccccaacctggccccgctccaggatgggactgccgagtgtggcccggagctggcccgggacagccagggcggcagggagggcccctggccgggagccgcagcgctcactcatttctcctgcgtctgtgtgcataggacatgatactaataaccacacggctggcgtgaccttggggctggggctgggcctaagctggtgccctggtgcggcgtggtctctcccaggagacctggggcatgagctgggcccacggctcccttcccatgtgtaacttcctcacgttgtgtgcgataacgtattttattgtacatttttttaaattaaaagtttatatgccttaaatgctttacttgaaagttttta

SEQ ID NO: 402529 - DNA, 1720 bp, Homo sapiens
ggcggggcgaggcggggcgccggggggagcaacactgagacgccattttcggcggcgggagcggcgcaggcggccgagcgggactggctgggtcggctgggctgctggtgcgaggagccgcggggctgtgctcggcggccaaggggacagcgcgtgggtggccgaggatgctgcggggcggtagctccggcgcccctcgctggtgactgctgcgccgtgcctcacacagccgaggcgggctcggcgcacagtcgctgctccgcgctcgcgcccggcggcgctccaggtgctgacagcgcgagagagcgcggccctcaggagcaaggcgaatgtatgacaacatgtccacaatggtgtacataaaggaagacaagttggagaagcttacacaggatgaaattatttctaagacaaagcaagtaattcaggggctggaagctttgaagaatgagcacaattccattttacaaagtttgctggagacactgaagtgtttgaagaaagatgatgaaagtaatttggtggaggagaaatcaaacatgatccggaagtcactggagatgttggagctcggcctgagtgaggcacaggttatgatggctttgtcaaatcacctgaatgctgtggagtccgagaagcagaaactgcgtgcgcaggttcgtcgtctgtgccaggagaatcagtggctacgggatgaactggccaacacgcagcagaaactgcagaagagtgagcagtctgtggctcaactggaggaggagaagaagcatctggagtttatgaatcagctaaaaaaatatgatgacgacatttccccatccgaggacaaagacactgattctaccaaagagcctctggatgaccttttccccaatgatgaagacgacccagggcaaggaatccagcagcagcacagcagtgcagccgcggctgcccagcagggcggctacgagatccccgcgcggctgcggacgctccacaacctggtgatccagtacgcctcgcaggggcgctacgaggtagctgtgcccctctgcaagcaggccctggaggacctggagaagacttcaggacacgaccacccggacgtggccaccatgctcaacatcctggccttggtgtacagggatcagaataaatacaaagatgcagctaacctactgaatgatgccttggctattcgtgagaaaactttgggcaaagatcatcctgcggtggcggcgactttgaataaccttgcagtcctttatggtaaaagagggaagtacaaagaagcagagccgttgtgtaaaagagctctggaaatccgagaaaaggttttggggaaggatcaccccgatgttgccaagcagttaaataacttggccttactgtgccagaaccagggcaagtatgaagaagtagaatattattatcaaagagccctcgagatctaccagacaaaactgggacctgatgaccccaacgtggctaagacgaaaaataacctggcatcctgctatttgaaacaaggaaagttcaagcaagcagaaacactgtacaaagagattctcactcgtgcacatgaaagggagtttggttctgtagatgatgaaaataaacccatctggatgcatgctgaagaaagagaagaatgcaaaggaaagcaaaaggatgggacatcttttttagagtggttgtaacagttggactatcaacttctagatcgcgagcggccgct

SEQ ID NO: 402530 - DNA, 2619 bp, Homo sapiens
gtggtcccatcctctgtaaagacacacagagccacatcacacatcctctatcctaggtggagcccggggtctgcctcccagctgcaccacctttgtctgtctgcaggtcgccagctctgctggggccttctgaagcagcctctctccgtcttgccattcttttcacactgctcccatgttaagatttctacacgtttcgaagacactaaattcttacctaggattattggggaatggaatatatggttagaaatagatgaatttttatttttaaaaaatgacaataagggctggacgaggtggctcatgcctgtaatcccaggactttgggaggccgaggcgggtggatcacttgaggccaggagttcgagaccagcctggccaacatggcgaaaactcgtctgtgcgaaaaaaacaaaaatcagccaggcatggtcgtgcgcgcctgtaatcccagttactcaggaggctgaggcagggaattgcttgaacccagtaggtggaggctgcattgagccaagatcatgccactgcactccagcctgggtgacagagccagaatctgtctcaaattacactagtaagacaactagaatatgccaaaaataaataaacttaagcactaaattatctgagatcctactgtatacagataataacgatgactgcatatttttaaactgtgaacacattatcctattaatcctgctcaggtaacccacctttgtaatgtgaatattctttcccagtaatataaagaggtagacagtttcttaagctgttagaatgcagtgaatcctcccaggccctgaagtccagttgaatggaaatctgcctgggccagggcagccgccggccttccccctggttctcacagccaaggtcctcaggtggcaagttcagggaagcaggcagactgacccagagtggggcagacccgctccactgccaaccccaggtgctggtctgggtctgcagaggctcagggaggaggaggcagctgggtcggaccccaattctgggactcctgggcccattgcccagctgtcagctgtcagcttgctactccagcagctgcagaggggagagagagcatgagtgagcgtgtgtgcacgcgtgtgtgtgtgtgtcacatgaaatacttttgaatctgagtgaaatgaatcttctgtgttctgccaagcatttagttgaggtgtattataaactactgtagtgtagcgctgagttttgaaatgaacagcaggggctgcactgttaatgacgatacgttagcattttagcatcctttttctcaagagcagcaaaaacttatgttttcttgtcctccccacatttttgaggtgttggtaacaagtgttatttttccattttaaagatgaggaaaatgaagctcgggctggttaactgacttgctcagcgtcccatggtgagtccgagcgggcggggcgcaggccctgccgtctggcgcttctgtcgagacgtcggctttccaacctggcaggacccaggacgcattgctgcctgtggaaattaattttcttttggattatcaactgcatgtttaaaatgggctgtagacttttaaagtccgtggtttcctaaagtttctgaaatgtctaaaatgtgtttttaagagaatgaaagtcatacctgtaggcctttattttggtccctatgtttttcattgcataatctccttatatacagttacttgtaaagccttttacaccaagtgtcaaggagatttctaatacgttgccaatctttacgcttaaagtgttgacatttactttgatgaccattgggaatggaccagtctggattctgtgaaatgcaccatgaggcccagcacctgctttatgctggactggtagaagcaggcagaaggtcatcccagtcctaaagccactcagaaggctgctgagacttgtgacctagaaatactgtaagccaggctgttatgcagagcctgttgcctttcctcgccgcggtttcacgtgggttttctctctcctttctgtctgacaggcctagccgcccgtgactctcacactgtctcctgcatgacgggtggcgcctcccgcagcttcccttctctctccagtgctgcccgctgtgtctagcagcctctaggatcttgtcagagctgcacctctctgtgaactggccattcctttcggtgctgctgtcctttttgggggggttcctgatttctgtatacatgtagctttgccagatatgtacttagtaatataaactgtattaataaaatccatttactgtgtaatacacgagtttaaaaattaagagcgattagctgttcactttggtaacaggtagttaagtgtcacacaaggtgttgttgcaatggcatgacggtgacctgttgacgtaactaagccttagagcaaggcatgtgccgcacgtgctccgtggtacttagagccctgggggccccgctcggactccgggtctccctaggatatgccccagtagcatttgctgtgtagtctgtgtgtgaaatttgggcattctgcttttctctactaatcttgaagtgctcagtgatttgtgtatttgtgtctttctaacttctaataaactcactccgactga

SEQ ID NO: 402531 - DNA, 839 bp, Homo sapiens
ggtgactctacaggatccttagtgtcatgtataccatgatcatccgacgtctactcagatgaaagtgggaacatggatttgacaacttcatcagctgcttggtcaggctggacgccatgttccgtgccttcaaatctcttgacaaagatggcactggacaaatccaggaggaagtgagtatgagcgtagagtggaacgggatgaggaaaatgaagctcgggctggttaactgacttgctcagcgtcccatggcctagccgcccgtgactctcacactgtctcctgcatgacgggtggcgcctcccgcagcttcccttctctctccagtgctgcccgctgtgtctagcagcctctaggatcttgtcagagctgcacctctctgtgaactggccattcctttcggtgctgctgtcctttttgggggggttcctgatttctgtatacatgtagctttgccagatatgtacttagtaatataaactgtattaataaaatccatttactgtgtaatacacgagtttaaaaattaagagcgattagctgttcactttggtaacaggtagttaagtgtcacacaaggtgttgttgcaatggcatgacggtgacctgttgacgtaactaagccttagagcaaggcatgtgccgcacgtgctccgtggtacttagagccctgggggccccgctcggactccgggtctccctaggatatgccccagtagcatttgctgtgtagtctgtgtgtgaaatttgggcattctgcttttctctactaatcttgaagtgctcagtgatttgtgtatttgtgtctttctaacttctaataaactcactccgactga

SEQ ID NO: 402532 - DNA, 749 bp, Homo sapiens
ggcggggcgaggcggggcgccggggggagcaacactgagacgccattttcggcggcgggagcggcgcaggcggccgagcgggactggctgggtcggctgggctgctggtgcgaggagccgcggggctgtgctcggcggccaaggggacagcgcgtgggtggccgaggatgctgcggggcggtagctccggcgcccctcgctggtgactgctgcgccgtgcctcacacagccgaggcgggctcggcgcacagtcgctgctccgcgctcgcgcccggcggcgctccaggtgctgacagcgcgagagagcgcggccctcaggagcaaggcgaatgtatgacaacatgtccacaatggtgtacataaaggaagacaagttggagaagcttacacaggatgaaattatttctaagacaaagcaagtaattcaggggctggaagctttgaagaatgagcacaattccattttacaaagtttgctggagacactgaatttttgtctggcttgacaagataacaaagccaggttgagtgggaagaaaattttgccaaaagaacacaagcagatttatgacagtgggaagatgctttattgaagtgaatcccatgctgtgatagaaattttctgtgaggatttaattcaaactcgatcctttttcaagtatataactatttaaaaagagaaattaagtgaattgtcagctgttggccatctgcctcaatgtgtgcttttgaagcccagcagattgcac

SEQ ID NO: 402533 - DNA, 231 bp, Homo sapiens
agcagttcagattttggagttttggattaaggatgctcaacctgtatgctgtgttttcttccctagatgaaaataaacccatctggatgcatgctgaagaaagagaagaatgcaaagtaagaatttattattttgagattttctaaattgtatatactgcattcaagataattattcatttgaaattatttcttataatttagggaaagcaaaaggatgggacatcttttg

SEQ ID NO: 402534 - DNA, 563 bp, Homo sapiens
catgggtcacaggcctttaaagctgggaggtttcaaactgctcccagggatcctgccccagagccgattgtggtggtgaggaatctagcccctccacttctctggggatcagagatgcaccattttcacctgttgctacatatttggttcccaaataagattttattttgagtcagggttttccctgctctcctagacctccctcaaagcgcgggagaaggatctgaggcatgaaatgcagccatggcccatttcgtcaaactgtggtctgcactcaagtatttgtattctagtctaaaaagcttttcattactcctgttcaactgatggataagccagattgtcggcgatcctacatttgatgttaaaaactgatcatcttttctaagattcttagttaaaatgtatttaatattaaaaattttcaggacaggatgtgtatagcacgtgtaagatgaagtgttgtcctgggtctgttttataggaggacaaagacactgattctaccaaagagcctctggatgaccttttccccaatgatgaagacgacccagggcaaggaa

SEQ ID NO: 402535 - DNA, 482 bp, Homo sapiens
ccgcacgtgctccgtggtacttagagccctgggggccccgctcggactccgggtctccctaggatatgccccagtagcatttgctgtgtagtctgtgtgtgaaatttgggcattctgcttttctctactaatcttgaagtgctcagtgatttgtgtatttgtgtctttctaacttctaataaactcactccgactgacctgtgtcttggtgtctgtctgcttggtagaacttctcactctttatccatgaaacgccgcatggcacagctgctaggggtcatggggtgacagttcatctcaccaaggagttccttccaagaagaaatgctgctgtatgcacatcttcttcactctgtgttttttattttcatgttcagatactgccaagtatttcacttattaatacctgaatcaattaagatgagagctgggcactctcacctccctacaaggttgtctgaggatttttagttatttgtata

SEQ ID NO: 402536 - DNA, 2419 bp, Homo sapiens
ggcggggcgaggcggggcgccggggggagcaacactgagacgccattttcggcggcgggagcggcgcaggcggccgagcgggactggctgggtcggctgggctgctggtgcgaggagccgcggggctgtgctcggcggccaaggggacagcgcgtgggtggccgaggatgctgcggggcggtagctccggcgcccctcgctggtgactgctgcgccgtgcctcacacagccgaggcgggctcggcgcacagtcgctgctccgcgctcgcgcccggcggcgctccaggtgctgacagcgcgagagagcgcggccctcaggagcaaggcgaatgtatgacaacatgtccacaatggtgtacataaaggaagacaagttggagaagcttacacaggatgaaattatttctaagacaaagcaagtaattcaggggctggaagctttgaagaatgagcacaattccattttacaaagtttgctggagacactgaagtgtttgaagaaagatgatgaaagtaatttggtggaggagaaatcaaacatgatccggaagtcactggagatgttggagctcggcctgagtgaggcacaggttatgatggctttgtcaaatcacctgaatgctgtggagtccgagaagcagaaactgcgtgcgcaggttcgtcgtctgtgccaggagaatcagtggctacgggatgaactggccaacacgcagcagaaactgcagaagagtgagcagtctgtggctcaactggaggaggagaagaagcatctggagtttatgaatcagctaaaaaaatatgatgacgacatttccccatccgaggacaaagacactgattctaccaaagagcctctggatgaccttttccccaatgatgaagacgacccagggcaaggaatccagcagcagcacagcagtgcagccgcggctgcccagcagggcggctacgagatccccgcgcggctgcggacgctccacaacctggtgatccagtacgcctcgcaggggcgctacgaggtagctgtgcccctctgcaagcaggccctggaggacctggagaagacttcaggacacgaccacccggacgtggccaccatgctcaacatcctggccttggtgtacagggatcagaataaatacaaagatgcagctaacctactgaatgatgccttggctattcgtgagaaaactttgggcaaagatcatcctgcggtggcggcgactttgaataaccttgcagtcctttatggtaaaagagggaagtacaaagaagcagagccgttgtgtaaaagagctctggaaatccgagaaaaggttttggggaaggatcaccccgatgttgccaagcagttaaataacttggccttactgtgccagaaccagggcaagtatgaagaagtagaatattattatcaaagagccctcgagatctaccagacaaaactgggacctgatgaccccaacgtggctaagacgaaaaataacctggcatcctgctatttgaaacaaggaaagttcaagcaagcagaaacactgtacaaagagattctcactcgtgcacatgaaagggagtttggttctgtagatgatgaaaataaacccatctggatgcatgctgaagaaagagaagaatgcaaaggaaagcaaaaggatgggacatcttttggagagtatggcggctggtacaaagcctgcaaagttgatagtccaactgttacaaccactctaaaaaaccttggggcactttacagacgtcaaggcaaatttgaagctgcagaaacgttagaagaagctgctatgaggtctcgtaaacagggtcttgacaatgttcacaaacagagggtggcagaagtgctcaatgaccctgagaacatggagaagcgcaggagccgtgagagcctcaacgtggacgtggtcaagtacgagagtggccctgacggaggggaggaagtgagtatgagcgtagagtggaacgggggcgtctctggccgagcctctttttgtggaaaacgacagcagcagcagtggcctggaagacgccaccgctaactgaccccaacctggccccgctccaggatgggactgccgagtgtggcccggagctggcccgggacagccagggcggcagggagggcccctggccgggagccgcagcgctcactcatttctcctgcgtctgtgtgcataggacatgatactaataaccacacggctggcgtgaccttggggctggggctgggcctaagctggtgccctggtgcggcgtggtctctcccaggagacctggggcatgagctgggcccacggctcccttcccatgtgtaacttcctcacgttgtgtgcgataacgtattttattgtacatttttttaaattaaaagtttatatgccttaaatgctttacttgaaagttttta

SEQ ID NO: 402537 - DNA, 469 bp, Homo sapiens
gacttggggtgggggttccccagagagctgtttccagaacagaacttagtaacactgtcaggttttggcggcccagccctgaccttctatcttctcttgcagtgaccccaacctggccccgctccaggatgggactgccgagtgtggcccggagctggcccgggacagccagggcggcagggagggcccctggccgggagccgcagcgctcactcatttctcctgcgtctgtgtgcataggacatgatactaataaccacacggctggcgtgaccttggggctggggctgggcctaagctggtgccctggtgcggcgtggtctctcccaggagacctggggcatgagctgggcccacggctcccttcccatgtgtaacttcctcacgttgtgtgcgataacgtattttattgtacatttttttaaattaaaagtttatatgccttaaatgctttacttgaaagttttta

SEQ ID NO: 402538 - DNA, 2591 bp, Homo sapiens
ggcggggcgaggcggggcgccggggggagcaacactgagacgccattttcggcggcgggagcggcgcaggcggccgagcgggactggctgggtcggctgggctgctggtgcgaggagccgcggggctgtgctcggcggccaaggggacagcgcgtgggtggccgaggatgctgcggggcggtagctccggcgcccctcgctggtgactgctgcgccgtgcctcacacagccgaggcgggctcggcgcacagtcgctgctccgcgctcgcgcccggcggcgctccaggtgctgacagcgcgagagagcgcggccctcaggagcaaggcgaatgtatgacaacatgtccacaatggtgtacataaaggaagacaagttggagaagcttacacaggatgaaattatttctaagacaaagcaagtaattcaggggctggaagctttgaagaatgagcacaattccattttacaaagtttgctggagacactgaagtgtttgaagaaagatgatgaaagtaatttggtggaggagaaatcaaacatgatccggaagtcactggagatgttggagctcggcctgagtgaggcacaggttatgatggctttgtcaaatcacctgaatgctgtggagtccgagaagcagaaactgcgtgcgcaggttcgtcgtctgtgccaggagaatcagtggctacgggatgaactggccaacacgcagcagaaactgcagaagagtgagcagtctgtggctcaactggaggaggagaagaagcatctggagtttatgaatcagctaaaaaaatatgatgacgacatttccccatccgaggacaaagacactgattctaccaaagagcctctggatgaccttttccccaatgatgaagacgacccagggcaaggaatccagcagcagcacagcagtgcagccgcggctgcccagcagggcggctacgagatccccgcgcggctgcggacgctccacaacctggtgatccagtacgcctcgcaggggcgctacgaggtagctgtgcccctctgcaagcaggccctggaggacctggagaagacttcaggacacgaccacccggacgtggccaccatgctcaacatcctggccttggtgtacagggatcagaataaatacaaagatgcagctaacctactgaatgatgccttggctattcgtgagaaaactttgggcaaagatcatcctgcggtggcggcgactttgaataaccttgcagtcctttatggtaaaagagggaagtacaaagaagcagagccgttgtgtaaaagagctctggaaatccgagaaaaggttttggggaaggatcaccccgatgttgccaagcagttaaataacttggccttactgtgccagaaccagggcaagtatgaagaagtagaatattattatcaaagagccctcgagatctaccagacaaaactgggacctgatgaccccaacgtggctaagacgaaaaataacctggcatcctgctatttgaaacaaggaaagttcaagcaagcagaaacactgtacaaagagattctcactcgtgcacatgaaagggagtttggttctgtagatgatgaaaataaacccatctggatgcatgctgaagaaagagaagaatgcaaaggaaagcaaaaggatgggacatcttttggagagtatggcggctggtacaaagcctgcaaagttgatagtccaactgttacaaccactctaaaaaaccttggggcactttacagacgtcaaggcaaatttgaagctgcagaaacgttagaagaagctgctatgaggtctcgtaaacagggtcttgacaatgttcacaaacagagggtggcagaagtgctcaatgaccctgagaacatggagaagcgcaggagccgtgagagcctcaacgtggacgtggtcaagtacgagagtggccctgacggaggggaggaaatgaggaaaatgaagctcgggctggttaactgacttgctcagcgtcccatggcctagccgcccgtgactctcacactgtctcctgcatgacgggtggcgcctcccgcagcttcccttctctctccagtgctgcccgctgtgtctagcagcctctaggatcttgtcagagctgcacctctctgtgaactggccattcctttcggtgctgctgtcctttttgggggggttcctgatttctgtatacatgtagctttgccagatatgtacttagtaatataaactgtattaataaaatccatttactgtgtaatacacgagtttaaaaattaagagcgattagctgttcactttggtaacaggtagttaagtgtcacacaaggtgttgttgcaatggcatgacggtgacctgttgacgtaactaagccttagagcaaggcatgtgccgcacgtgctccgtggtacttagagccctgggggccccgctcggactccgggtctccctaggatatgccccagtagcatttgctgtgtagtctgtgtgtgaaatttgggcattctgcttttctctactaatcttgaagtgctcagtgatttgtgtatttgtgtctttctaacttctaataaactcactccgactga

SEQ ID NO: 402539 - DNA, 2734 bp, Homo sapiens
ggcggggcgaggcggggcgccggggggagcaacactgagacgccattttcggcggcgggagcggcgcaggcggccgagcgggactggctgggtcggctgggctgctggtgcgaggagccgcggggctgtgctcggcggccaaggggacagcgcgtgggtggccgaggatgctgcggggcggtagctccggcgcccctcgctggtgactgctgcgccgtgcctcacacagccgaggcgggctcggcgcacagtcgctgctccgcgctcgcgcccggcggcgctccaggtgctgacagcgcgagagagcgcggccctcaggagcaaggcgaatgtatgacaacatgtccacaatggtgtacataaaggaagacaagttggagaagcttacacaggatgaaattatttctaagacaaagcaagtaattcaggggctggaagctttgaagaatgagcacaattccattttacaaagtttgctggagacactgaagtgtttgaagaaagatgatgaaagtaatttggtggaggagaaatcaaacatgatccggaagtcactggagatgttggagctcggcctgagtgaggcacaggttatgatggctttgtcaaatcacctgaatgctgtggagtccgagaagcagaaactgcgtgcgcaggttcgtcgtctgtgccaggagaatcagtggctacgggatgaactggccaacacgcagcagaaactgcagaagagtgagcagtctgtggctcaactggaggaggagaagaagcatctggagtttatgaatcagctaaaaaaatatgatgacgacatttccccatccgaggacaaagacactgattctaccaaagagcctctggatgaccttttccccaatgatgaagacgacccagggcaaggaatccagcagcagcacagcagtgcagccgcggctgcccagcagggcggctacgagatccccgcgcggctgcggacgctccacaacctggtgatccagtacgcctcgcaggggcgctacgaggtagctgtgcccctctgcaagcaggccctggaggacctggagaagacttcaggacacgaccacccggacgtggccaccatgctcaacatcctggccttggtgtacagggatcagaataaatacaaagatgcagctaacctactgaatgatgccttggctattcgtgagaaaactttgggcaaagatcatcctgcggtggcggcgactttgaataaccttgcagtcctttatggtaaaagagggaagtacaaagaagcagagccgttgtgtaaaagagctctggaaatccgagaaaaggttttggggaaggatcaccccgatgttgccaagcagttaaataacttggccttactgtgccagaaccagggcaagtatgaagaagtagaatattattatcaaagagccctcgagatctaccagacaaaactgggacctgatgaccccaacgtggctaagacgaaaaataacctggcatcctgctatttgaaacaaggaaagttcaagcaagcagaaacactgtacaaagagattctcactcgtgcacatgaaagggagtttggttctgtagatgatgaaaataaacccatctggatgcatgctgaagaaagagaagaatgcaaaggaaagcaaaaggatgggacatcttttggagagtatggcggctggtacaaagcctgcaaagttgatagtccaactgttacaaccactctaaaaaaccttggggcactttacagacgtcaaggcaaatttgaagctgcagaaacgttagaagaagctgctatgaggtctcgtaaacagggtcttgacaatgttcacaaacagagggtggcagaagtgctcaatgaccctgagaacatggagaagcgcaggagccgtgagagcctcaacgtggacgtggtcaagtacgagagtggccctgacggaggggaggaaatgaggaaaatgaagctcgggctggttaactgacttgctcagcgtcccatggcctagccgcccgtgactctcacactgtctcctgcatgacgggtggcgcctcccgcagcttcccttctctctccagtgctgcccgctgtgtctagcagcctctaggatcttgtcagagctgcacctctctgtgaactggccattcctttcggtgctgctgtcctttttgggggggttcctgatttctgtatacatgtagctttgccagatatgtacttagtaatataaactgtattaataaaatccatttactgtgtaatacacgagtttaaaaattaagagcgattagctgttcactttggtaacaggtagttaagtgtcacacaaggtgttgttgcaatggcatgacggtgacctgttgacgtaactaagccttagagcaaggcatgtgccgcacgtgctccgtggtacttagagccctgggggccccgctcggactccgggtctccctaggatatgccccagtagcatttgctgtgtagtctgtgtgtgaaatttgggcattctgcttttctctactaatcttgaagtgctcagtgatttgtgtatttgtgtctttctaacttctaataaactcactccgactgaaaaaaaaaaaacaaaaattttggggccccgccccaaaagtttaaccatttggggcgcgcccagtaggacctgccattccagaccggctcgatggggttcccaaaaaccgggcggtcaaaccggtgggccggcacacgaccgtt

SEQ ID NO: 402540 - DNA, 2594 bp, Homo sapiens
ggcggggcgaggcggggcgccggggggagcaacactgagacgccattttcggcggcgggagcggcgcaggcggccgagcgggactggctgggtcggctgggctgctggtgcgaggagccgcggggctgtgctcggcggccaaggggacagcgcgtgggtggccgaggatgctgcggggcggtagctccggcgcccctcgctggtgactgctgcgccgtgcctcacacagccgaggcgggctcggcgcacagtcgctgctccgcgctcgcgcccggcggcgctccaggtgctgacagcgcgagagagcgcggccctcaggagcaaggcgaatgtatgacaacatgtccacaatggtgtacataaaggaagacaagttggagaagcttacacaggatgaaattatttctaagacaaagcaagtaattcaggggctggaagctttgaagaatgagcacaattccattttacaaagtttgctggagacactgaagtgtttgaagaaagatgatgaaagtaatttggtggaggagaaatcaaacatgatccggaagtcactggagatgttggagctcggcctgagtgaggcacaggttatgatggctttgtcaaatcacctgaatgctgtggagtccgagaagcagaaactgcgtgcgcaggttcgtcgtctgtgccaggagaatcagtggctacgggatgaactggccaacacgcagcagaaactgcagaagagtgagcagtctgtggctcaactggaggaggagaagaagcatctggagtttatgaatcagctaaaaaaatatgatgacgacatttccccatccgaggacaaagacactgattctaccaaagagcctctggatgaccttttccccaatgatgaagacgacccagggcaaggaatccagcagcagcacagcagtgcagccgcggctgcccagcagggcggctacgagatccccgcgcggctgcggacgctccacaacctggtgatccagtacgcctcgcaggggcgctacgaggtagctgtgcccctctgcaagcaggccctggaggacctggagaagacttcaggacacgaccacccggacgtggccaccatgctcaacatcctggccttggtgtacagggatcagaataaatacaaagatgcagctaacctactgaatgatgccttggctattcgtgagaaaactttgggcaaagatcatcctgcggtggcggcgactttgaataaccttgcagtcctttatggtaaaagagggaagtacaaagaagcagagccgttgtgtaaaagagctctggaaatccgagaaaaggttttggggaaggatcaccccgatgttgccaagcagttaaataacttggccttactgtgccagaaccagggcaagtatgaagaagtagaatattattatcaaagagccctcgagatctaccagacaaaactgggacctgatgaccccaacgtggctaagacgaaaaataacctggcatcctgctatttgaaacaaggaaagttcaagcaagcagaaacactgtacaaagagattctcactcgtgcacatgaaagggagtttggttctgtagatgatgaaaataaacccatctggatgcatgctgaagaaagagaagaatgcaaaggaaagcaaaaggatgggacatcttttggagagtatggcggctggtacaaagcctgcaaagttgatagtccaactgttacaaccactctaaaaaaccttggggcactttacagacgtcaaggcaaatttgaagctgcagaaacgttagaagaagctgctatgaggtctcgtaaacagagggtggcagaagtgctcaatgaccctgagaacatggagaagcgcaggagccgtgagagcctcaacgtggacgtggtcaagtacgagagtggccctgacggaggggaggaagtgagtatgagcgtagagtggaacgggatgaggaaaatgaagctcgggctggttaactgacttgctcagcgtcccatggcctagccgcccgtgactctcacactgtctcctgcatgacgggtggcgcctcccgcagcttcccttctctctccagtgctgcccgctgtgtctagcagcctctaggatcttgtcagagctgcacctctctgtgaactggccattcctttcggtgctgctgtcctttttgggggggttcctgatttctgtatacatgtagctttgccagatatgtacttagtaatataaactgtattaataaaatccatttactgtgtaatacacgagtttaaaaattaagagcgattagctgttcactttggtaacaggtagttaagtgtcacacaaggtgttgttgcaatggcatgacggtgacctgttgacgtaactaagccttagagcaaggcatgtgccgcacgtgctccgtggtacttagagccctgggggccccgctcggactccgggtctccctaggatatgccccagtagcatttgctgtgtagtctgtgtgtgaaatttgggcattctgcttttctctactaatcttgaagtgctcagtgatttgtgtatttgtgtctttctaacttctaataaactcactccgactga

SEQ ID NO: 402541 - DNA, 2665 bp, Homo sapiens
ggcggggcgaggcggggcgccggggggagcaacactgagacgccattttcggcggcgggagcggcgcaggcggccgagcgggactggctgggtcggctgggctgctggtgcgaggagccgcggggctgtgctcggcggccaaggggacagcgcgtgggtggccgaggatgctgcggggcggtagctccggcgcccctcgctggtgactgctgcgccgtgcctcacacagccgaggcgggctcggcgcacagtcgctgctccgcgctcgcgcccggcggcgctccaggtgctgacagcgcgagagagcgcggccctcaggagcaaggcgaatgtatgacaacatgtccacaatggtgtacataaaggaagacaagttggagaagcttacacaggatgaaattatttctaagacaaagcaagtaattcaggggctggaagctttgaagaatgagcacaattccattttacaaagtttgctggagacactgaagtgtttgaagaaagatgatgaaagtaatttggtggaggagaaatcaaacatgatccggaagtcactggagatgttggagctcggcctgagtgaggcacaggttatgatggctttgtcaaatcacctgaatgctgtggagtccgagaagcagaaactgcgtgcgcaggttcgtcgtctgtgccaggagaatcagtggctacgggatgaactggccaacacgcagcagaaactgcagaagagtgagcagtctgtggctcaactggaggaggagaagaagcatctggagtttatgaatcagctaaaaaaatatgatgacgacatttccccatccgaggacaaagacactgattctaccaaagagcctctggatgaccttttccccaatgatgaagacgacccagggcaaggaatccagcagcagcacagcagtgcagccgcggctgcccagcagggcggctacgagatccccgcgcggctgcggacgctccacaacctggtgatccagtacgcctcgcaggggcgctacgaggtagctgtgcccctctgcaagcaggccctggaggacctggagaagacttcaggacacgaccacccggacgtggccaccatgctcaacatcctggccttggtgtacagggatcagaataaatacaaagatgcagctaacctactgaatgatgccttggctattcgtgagaaaactttgggcaaagatcatcctgcggtggcggcgactttgaataaccttgcagtcctttatggtaaaagagggaagtacaaagaagcagagccgttgtgtaaaagagctctggaaatccgagaaaaggttttggggaaggatcaccccgatgttgccaagcagttaaataacttggccttactgtgccagaaccagggcaagtatgaagaagtagaatattattatcaaagagccctcgagatctaccagacaaaactgggacctgatgaccccaacgtggctaagacgaaaaataacctggcatcctgctatttgaaacaaggaaagttcaagcaagcagaaacactgtacaaagagattctcactcgtgcacatgaaagggagtttggttctgtagatgatgaaaataaacccatctggatgcatgctgaagaaagagaagaatgcaaaggaaagcaaaaggatgggacatcttttggagagtatggcggctggtacaaagcctgcaaagttgatagtccaactgttacaaccactctaaaaaaccttggggcactttacagacgtcaaggcaaatttgaagctgcagaaacgttagaagaagctgctatgaggtctcgtaaacagcgaagtatctcagaaatacctaagaaaatcttaagtgctaatgggtcaaaccattttcccctgcctggctcacaggtcttgacaatgttcacaaacagagggtggcagaagtgctcaatgaccctgagaacatggagaagcgcaggagccgtgagagcctcaacgtggacgtggtcaagtacgagagtggccctgacggaggggaggaaatgaggaaaatgaagctcgggctggttaactgacttgctcagcgtcccatggcctagccgcccgtgactctcacactgtctcctgcatgacgggtggcgcctcccgcagcttcccttctctctccagtgctgcccgctgtgtctagcagcctctaggatcttgtcagagctgcacctctctgtgaactggccattcctttcggtgctgctgtcctttttgggggggttcctgatttctgtatacatgtagctttgccagatatgtacttagtaatataaactgtattaataaaatccatttactgtgtaatacacgagtttaaaaattaagagcgattagctgttcactttggtaacaggtagttaagtgtcacacaaggtgttgttgcaatggcatgacggtgacctgttgacgtaactaagccttagagcaaggcatgtgccgcacgtgctccgtggtacttagagccctgggggccccgctcggactccgggtctccctaggatatgccccagtagcatttgctgtgtagtctgtgtgtgaaatttgggcattctgcttttctctactaatcttgaagtgctcagtgatttgtgtatttgtgtctttctaacttctaataaactcactccgactga

SEQ ID NO: 402542 - DNA, 3169 bp, Homo sapiens
ggcggggcgaggcggggcgccggggggagcaacactgagacgccattttcggcggcgggagcggcgcaggcggccgagcgggactggctgggtcggctgggctgctggtgcgaggagccgcggggctgtgctcggcggccaaggggacagcgcgtgggtggccgaggatgctgcggggcggtagctccggcgcccctcgctggtgactgctgcgccgtgcctcacacagccgaggcgggctcggcgcacagtcgctgctccgcgctcgcgcccggcggcgctccaggtgctgacagcgcgagagagcgcggccctcaggagcaaggcgaatgtatgacaacatgtccacaatggtgtacataaaggaagacaagttggagaagcttacacaggatgaaattatttctaagacaaagcaagtaattcaggggctggaagctttgaagaatgagcacaattccattttacaaagtttgctggagacactgaagtgtttgaagaaagatgatgaaagtaatttggtggaggagaaatcaaacatgatccggaagtcactggagatgttggagctcggcctgagtgaggcacaggttatgatggctttgtcaaatcacctgaatgctgtggagtccgagaagcagaaactgcgtgcgcaggttcgtcgtctgtgccaggagaatcagtggctacgggatgaactggccaacacgcagcagaaactgcagaagagtgagcagtctgtggctcaactggaggaggagaagaagcatctggagtttatgaatcagctaaaaaaatatgatgacgacatttccccatccgaggacaaagacactgattctaccaaagagcctctggatgaccttttccccaatgatgaagacgacccagggcaaggaatccagcagcagcacagcagtgcagccgcggctgcccagcagggcggctacgagatccccgcgcggctgcggacgctccacaacctggtgatccagtacgcctcgcaggggcgctacgaggtagctgtgcccctctgcaagcaggccctggaggacctggagaagacttcaggacacgaccacccggacgtggccaccatgctcaacatcctggccttggtgtacagggatcagaataaatacaaagatgcagctaacctactgaatgatgccttggctattcgtgagaaaactttgggcaaagatcatcctgcggtggcggcgactttgaataaccttgcagtcctttatggtaaaagagggaagtacaaagaagcagagccgttgtgtaaaagagctctggaaatccgagaaaaggttttggggaaggatcaccccgatgttgccaagcagttaaataacttggccttactgtgccagaaccagggcaagtatgaagaagtagaatattattatcaaagagccctcgagatctaccagacaaaactgggacctgatgaccccaacgtggctaagacgaaaaataacctggcatcctgctatttgaaacaaggaaagttcaagcaagcagaaacactgtacaaagagattctcactcgtgcacatgaaagggagtttggttctgtagatgatgaaaataaacccatctggatgcatgctgaagaaagagaagaatgcaaaggaaagcaaaaggatgggacatcttttggagagtatggcggctggtacaaagcctgcaaagttgatagtccaactgttacaaccactctaaaaaaccttggggcactttacagacgtcaaggcaaatttgaagctgcagaaacgttagaagaagctgctatgaggtctcgtaaacagagggtggcagaagtgctcaatgaccctgagaacatggagaagcgcaggagccgtgagagcctcaacgtggacgtggtcaagtacgagagtggccctgacggaggggaggaaatgaggaaaatgaagctcgggctggttaactgacttgctcagcgtcccatggtgagtccgagcgggcggggcgcaggccctgccgtctggcgcttctgtcgagacgtcggctttccaacctggcaggacccaggacgcattgctgcctgtggaaattaattttcttttggattatcaactgcatgtttaaaatgggctgtagacttttaaagtccgtggtttcctaaagtttctgaaatgtctaaaatgtgtttttaagagaatgaaagtcatacctgtaggcctttattttggtccctatgtttttcattgcataatctccttatatacagttacttgtaaagccttttacaccaagtgtcaaggagatttctaatacgttgccaatctttacgcttaaagtgttgacatttactttgatgaccattgggaatggaccagtctggattctgtgaaatgcaccatgaggcccagcacctgctttatgctggactggtagaagcaggcagaaggtcatcccagtcctaaagccactcagaaggctgctgagacttgtgacctagaaatactgtaagccaggctgttatgcagagcctgttgcctttcctcgccgcggtttcacgtgggttttctctctcctttctgtctgacaggcctagccgcccgtgactctcacactgtctcctgcatgacgggtggcgcctcccgcagcttcccttctctctccagtgctgcccgctgtgtctagcagcctctaggatcttgtcagagctgcacctctctgtgaactggccattcctttcggtgctgctgtcctttttgggggggttcctgatttctgtatacatgtagctttgccagatatgtacttagtaatataaactgtattaataaaatccatttactgtgtaatacacgagtttaaaaattaagagcgattagctgttcactttggtaacaggtagttaagtgtcacacaaggtgttgttgcaatggcatgacggtgacctgttgacgtaactaagccttagagcaaggcatgtgccgcacgtgctccgtggtacttagagccctgggggccccgctcggactccgggtctccctaggatatgccccagtagcatttgctgtgtagtctgtgtgtgaaatttgggcattctgcttttctctactaatcttgaagtgctcagtgatttgtgtatttgtgtctttctaacttctaataaactcactccgactga

SEQ ID NO: 402543 - DNA, 2562 bp, Homo sapiens
ggcggggcgaggcggggcgccggggggagcaacactgagacgccattttcggcggcgggagcggcgcaggcggccgagcgggactggctgggtcggctgggctgctggtgcgaggagccgcggggctgtgctcggcggccaaggggacagcgcgtgggtggccgaggatgctgcggggcggtagctccggcgcccctcgctggtgactgctgcgccgtgcctcacacagccgaggcgggctcggcgcacagtcgctgctccgcgctcgcgcccggcggcgctccaggtgctgacagcgcgagagagcgcggccctcaggagcaaggcgaatgtatgacaacatgtccacaatggtgtacataaaggaagacaagttggagaagcttacacaggatgaaattatttctaagacaaagcaagtaattcaggggctggaagctttgaagaatgagcacaattccattttacaaagtttgctggagacactgaagtgtttgaagaaagatgatgaaagtaatttggtggaggagaaatcaaacatgatccggaagtcactggagatgttggagctcggcctgagtgaggcacaggttatgatggctttgtcaaatcacctgaatgctgtggagtccgagaagcagaaactgcgtgcgcaggttcgtcgtctgtgccaggagaatcagtggctacgggatgaactggccaacacgcagcagaaactgcagaagagtgagcagtctgtggctcaactggaggaggagaagaagcatctggagtttatgaatcagctaaaaaaatatgatgacgacatttccccatccgaggacaaagacactgattctaccaaagagcctctggatgaccttttccccaatgatgaagacgacccagggcaaggaatccagcagcagcacagcagtgcagccgcggctgcccagcagggcggctacgagatccccgcgcggctgcggacgctccacaacctggtgatccagtacgcctcgcaggggcgctacgaggtagctgtgcccctctgcaagcaggccctggaggacctggagaagacttcaggacacgaccacccggacgtggccaccatgctcaacatcctggccttggtgtacagggatcagaataaatacaaagatgcagctaacctactgaatgatgccttggctattcgtgagaaaactttgggcaaagatcatcctgcggtggcggcgactttgaataaccttgcagtcctttatggtaaaagagggaagtacaaagaagcagagccgttgtgtaaaagagctctggaaatccgagaaaaggttttggggaaggatcaccccgatgttgccaagcagttaaataacttggccttactgtgccagaaccagggcaagtatgaagaagtagaatattattatcaaagagccctcgagatctaccagacaaaactgggacctgatgaccccaacgtggctaagacgaaaaataacctggcatcctgctatttgaaacaaggaaagttcaagcaagcagaaacactgtacaaagagattctcactcgtgcacatgaaagggagtttggttctgtagatgatgaaaataaacccatctggatgcatgctgaagaaagagaagaatgcaaaggaaagcaaaaggatgggacatcttttggagagtatggcggctggtacaaagcctgcaaagttgatagtccaactgttacaaccactctaatagaagaagctgctatgaggtctcgtaaacggtcttgacaatgttcacaaacagagggtggcagaagtgctcaatgaccctgagaacatggagaagcgcaggagccgtgagagcctcaacgtggacgtggtcaagtacgagagtggccctgacggaggggaggaagtgagtatgagcgtagagtggaacgggatgaggaaaatgaagctcgggctggttaactgacttgctcagcgtcccatggcctagccgcccgtgactctcacactgtctcctgcatgacgggtggcgcctcccgcagcttcccttctctctccagtgctgcccgctgtgtctagcagcctctaggatcttgtcagagctgcacctctctgtgaactggccattcctttcggtgctgctgtcctttttgggggggttcctgatttctgtatacatgtagctttgccagatatgtacttagtaatataaactgtattaataaaatccatttactgtgtaatacacgagtttaaaaattaagagcgattagctgttcactttggtaacaggtagttaagtgtcacacaaggtgttgttgcaatggcatgacggtgacctgttgacgtaactaagccttagagcaaggcatgtgccgcacgtgctccgtggtacttagagccctgggggccccgctcggactccgggtctccctaggatatgccccagtagcatttgctgtgtagtctgtgtgtgaaatttgggcattctgcttttctctactaatcttgaagtgctcagtgatttgtgtatttgtgtctttctaacttctaataaactcactccgactga

SEQ ID NO: 402544 - DNA, 2626 bp, Homo sapiens
ggcggggcgaggcggggcgccggggggagcaacactgagacgccattttcggcggcgggagcggcgcaggcggccgagcgggactggctgggtcggctgggctgctggtgcgaggagccgcggggctgtgctcggcggccaaggggacagcgcgtgggtggccgaggatgctgcggggcggtagctccggcgcccctcgctggtgactgctgcgccgtgcctcacacagccgaggcgggctcggcgcacagtcgctgctccgcgctcgcgcccggcggcgctccaggtgctgacagcgcgagagagcgcggccctcaggagcaaggcgaatgtatgacaacatgtccacaatggtgtacataaaggaagacaagttggagaagcttacacaggatgaaattatttctaagacaaagcaagtaattcaggggctggaagctttgaagaatgagcacaattccattttacaaagtttgctggagacactgaagtgtttgaagaaagatgatgaaagtaatttggtggaggagaaatcaaacatgatccggaagtcactggagatgttggagctcggcctgagtgaggcacaggttatgatggctttgtcaaatcacctgaatgctgtggagtccgagaagcagaaactgcgtgcgcaggttcgtcgtctgtgccaggagaatcagtggctacgggatgaactggccaacacgcagcagaaactgcagaagagtgagcagtctgtggctcaactggaggaggagaagaagcatctggagtttatgaatcagctaaaaaaatatgatgacgacatttccccatccgaggacaaagacactgattctaccaaagagcctctggatgaccttttccccaatgatgaagacgacccagggcaaggaatccagcagcagcacagcagtgcagccgcggctgcccagcagggcggctacgagatccccgcgcggctgcggacgctccacaacctggtgatccagtacgcctcgcaggggcgctacgaggtagctgtgcccctctgcaagcaggccctggaggacctggagaagacttcaggacacgaccacccggacgtggccaccatgctcaacatcctggccttggtgtacagggatcagaataaatacaaagatgcagctaacctactgaatgatgccttggctattcgtgagaaaactttgggcaaagatcatcctgcggtggcggcgactttgaataaccttgcagtcctttatggtaaaagagggaagtacaaagaagcagagccgttgtgtaaaagagctctggaaatccgagaaaaggttttggggaaggatcaccccgatgttgccaagcagttaaataacttggccttactgtgccagaaccagggcaagtatgaagaagtagaatattattatcaaagagccctcgagatctaccagacaaaactgggacctgatgaccccaacgtggctaagacgaaaaataacctggcatcctgctatttgaaacaaggaaagttcaagcaagcagaaacactgtacaaagagattctcactcgtgcacatgaaagggagtttggttctgtagatgatgaaaataaacccatctggatgcatgctgaagaaagagaagaatgcaaaggaaagcaaaaggatgggacatcttttggagagtatggcggctggtacaaagcctgcaaagttgatagtccaactgttacaaccactctaaaaaaccttggggcactttacagacgtcaaggcaaatttgaagctgcagaaacgttagaagaagctgctatgaggtctcgtaaacagggtcttgacaatgttcacaaacagagggtggcagaagtgctcaatgaccctgagaacatggagaagcgcaggagccgtgagagcctcaacgtggacgtggtcaagtacgagagtggccctgacggaggggaggaaatgaggaaaatgaagctcgggctggttaactgacttgctcagcgtcccatggcctagccgcccgtgactctcacactgtctcctgcatgacgggtggcgcctcccgcagcttcccttctctctccagtgctgcccgctgtgtctagcagcctctaggatcttgtcagagctgcacctctctgtgaactggccattcctttcggtgctgctgtcctttttgggggggttcctgatttctgtatacatgtagctttgccagatatgtacttagtaatataaactgtattaataaaatccatttactgtgtaaaaagaaaaaaaaaagaaaaaaaacaaaagaaaaagaaaaaaaaaaaaagaagagaaagaagaaaaaaaaagagaagagagagaaaaaagaaaaaaaggggggggggggggggtgaaaaggaatcacgagaagggaggacaagagactaagagccaccacaccaaatccacagggaggaagaggggcgcgcaaacagaggaggagcgcggaagaaaacaggaaaagagaggagcgggggaggcagagaagaaaaaagcgaagagcagggagagaaaagcgcccagacaacgaaagaatggaggggaagacacgcaaaacacgcgggggggaggacaaagtacgtagggcgcaagcgccaacgaca

SEQ ID NO: 402545 - DNA, 3035 bp, Homo sapiens
ggcggggcgaggcggggcgccggggggagcaacactgagacgccattttcggcggcgggagcggcgcaggcggccgagcgggactggctgggtcggctgggctgctggtgcgaggagccgcggggctgtgctcggcggccaaggggacagcgcgtgggtggccgaggatgctgcggggcggtagctccggcgcccctcgctggtgactgctgcgccgtgcctcacacagccgaggcgggctcggcgcacagtcgctgctccgcgctcgcgcccggcggcgctccaggtgctgacagcgcgagagagcgcggccctcaggagcaaggcgaatgtatgacaacatgtccacaatggtgtacataaaggaagacaagttggagaagcttacacaggatgaaattatttctaagacaaagcaagtaattcaggggctggaagctttgaagaatgagcacaattccattttacaaagtttgctggagacactgaagtgtttgaagaaagatgatgaaagtaatttggtggaggagaaatcaaacatgatccggaagtcactggagatgttggagctcggcctgagtgaggcacaggttatgatggctttgtcaaatcacctgaatgctgtggagtccgagaagcagaaactgcgtgcgcaggttcgtcgtctgtgccaggagaatcagtggctacgggatgaactggccaacacgcagcagaaactgcagaagagtgagcagtctgtggctcaactggaggaggagaagaagcatctggagtttatgaatcagctaaaaaaatatgatgacgacatttccccatccgaggacaaagacactgattctaccaaagagcctctggatgaccttttccccaatgatgaagacgacccagggcaaggaatccagcagcagcacagcagtgcagccgcggctgcccagcagggcggctacgagatccccgcgcggctgcggacgctccacaacctggtgatccagtacgcctcgcaggggcgctacgaggtagctgtgcccctctgcaagcaggccctggaggacctggagaagacttcaggacacgaccacccggacgtggccaccatgctcaacatcctggccttggtgtacagggatcagaataaatacaaagatgcagctaacctactgaatgatgccttggctattcgtgagaaaactttgggcaaagatcatcctgcggtggcggcgactttgaataaccttgcagtcctttatggtaaaagagggaagtacaaagaagcagagccgttgtgtaaaagagctctggaaatccgagaaaaggttttggggaaggatcaccccgatgttgccaagcagttaaataacttggccttactgtgccagaaccagggcaagtatgaagaagtagaatattattatcaaagagccctcgagatctaccagacaaaactgggacctgatgaccccaacgtggctaagacgaaaaataacctggcatcctgctatttgaaacaaggaaagttcaagcaagcagaaacactgtacaaagagattctcactcgtgcacatgaaagggagtttggttctgtagatgatgaaaataaacccatctggatgcatgctgaagaaagagaagaatgcaaaggaaagcaaaaggatgggacatcttttggagagtatggcggctggtacaaagcctgcaaagttgatagtccaactgttacaaccactctaaaaaaccttggggcactttacagacgtcaaggcaaatttgaagctgcagaaacgttagaagaagctgctatgaggtctcgtaaacagggtcttgacaatgttcacaaacagagggtggcagaagtgctcaatgaccctgagaacatggagaagcgcaggagccgtgagagcctcaacgtggacgtggtcaagtacgagagtggccctgacggaggggaggaagtgagtatgagcgtagagtggaacggggatggcactggatctttaaaacgcagtggttcctttagcaaactccgggcttccattagacgcagcagtgagaagctggttaggaagctgaagggaggaagttcacgagagagtgagccaaagaaccccgggtaactatctcttccagctctcccgactccctgcacgccggctgctgggccgcttctcttcctagcgcagccttcctcacccacagacttgaggaaagacactccagttggttcccgtattctcacaaccgaagggtttcatagttgccacgtaggtttttcccaggataggttgagaagtaattgggtaacttcctgttagtggctaaagggcgaatacctttaaaagaaatttatggaattttttgattctgtcacatgttctaagaaagccttagcaacgaaatgtgggcatttatattaaaatgttgagcattttgaacttgtttactctagatatgcattattttttaaattagcattagtttaaattctttaaaaattttaatcttttaaataaatcagatgttagctatgactatattaaatctcatacagtattataatagggagaaaaatggtttcaaataggatcagaacttttaagactttattataaggagattttcaaaacctcaggcttttcatatgtttaaaaaaaggtttgagtcatgggtcttagaggcttttgaaaaataacatttaagttgtcaaaggaatttggttcttaagatatcctttgtttttaatatggtgcacaaagttgacagattgtccctgccgcagtgtccagggtcacctctgggcagctgctcctggcttggacgtatttctcatgaggcagacttttgccagccactctgtgtaactctgacttcctaaatggtgaccgactttttagagactgattcctagtaaaactattttacaagtgatcccactttaagttctgtgagtaagaagtctgatcacctcaggatggtgaaaccgagttcttctggagaatcactggaacccagtagggcagaggttgcagtgagccaag

SEQ ID NO: 402546 - DNA, 4056 bp, Homo sapiens
  misc_feature (3133)..(3133): n is a, c, g, or t
ggcggggcgaggcggggcgccggggggagcaacactgagacgccattttcggcggcgggagcggcgcaggcggccgagcgggactggctgggtcggctgggctgctggtgcgaggagccgcggggctgtgctcggcggccaaggggacagcgcgtgggtggccgaggatgctgcggggcggtagctccggcgcccctcgctggtgactgctgcgccgtgcctcacacagccgaggcgggctcggcgcacagtcgctgctccgcgctcgcgcccggcggcgctccaggtgctgacagcgcgagagagcgcggccctcaggagcaaggcgaatgtatgacaacatgtccacaatggtgtacataaaggaagacaagttggagaagcttacacaggatgaaattatttctaagacaaagcaagtaattcaggggctggaagctttgaagaatgagcacaattccattttacaaagtttgctggagacactgaagtgtttgaagaaagatgatgaaagtaatttggtggaggagaaatcaaacatgatccggaagtcactggagatgttggagctcggcctgagtgaggcacaggttatgatggctttgtcaaatcacctgaatgctgtggagtccgagaagcagaaactgcgtgcgcaggttcgtcgtctgtgccaggagaatcagtggctacgggatgaactggccaacacgcagcagaaactgcagaagagtgagcagtctgtggctcaactggaggaggagaagaagcatctggagtttatgaatcagctaaaaaaatatgatgacgacatttccccatccgaggacaaagacactgattctaccaaagagcctctggatgaccttttccccaatgatgaagacgacccagggcaaggaatccagcagcagcacagcagtgcagccgcggctgcccagcagggcggctacgagatccccgcgcggctgcggacgctccacaacctggtgatccagtacgcctcgcaggggcgctacgaggtagctgtgcccctctgcaagcaggccctggaggacctggagaagacttcaggacacgaccacccggacgtggccaccatgctcaacatcctggccttggtgtacagggatcagaataaatacaaagatgcagctaacctactgaatgatgccttggctattcgtgagaaaactttgggcaaagatcatcctgcggtggcggcgactttgaataaccttgcagtcctttatggtaaaagagggaagtacaaagaagcagagccgttgtgtaaaagagctctggaaatccgagaaaaggttttggggaaggatcaccccgatgttgccaagcagttaaataacttggccttactgtgccagaaccagggcaagtatgaagaagtagaatattattatcaaagagccctcgagatctaccagacaaaactgggacctgatgaccccaacgtggctaagacgaaaaataacctggcatcctgctatttgaaacaaggaaagttcaagcaagcagaaacactgtacaaagagattctcactcgtgcacatgaaagggagtttggttctgtagatgatgaaaataaacccatctggatgcatgctgaagaaagagaagaatgcaaaggaaagcaaaaggatgggacatcttttggagagtatggcggctggtacaaagcctgcaaagttgatagtccaactgttacaaccactctaaaaaaccttggggcactttacagacgtcaaggcaaatttgaagctgcagaaacgttagaagaagctgctatgaggtctcgtaaacagggtcttgacaatgttcacaaacagagggtggcagaagtgctcaatgaccctgagaacatggagaagcgcaggagccgtgagagcctcaacgtggacgtggtcaagtacgagagtggccctgacggaggggaggaagtgagtatgagcgtagagtggaacggggatggcactggatctttaaaacgcagtggttcctttagcaaactccgggcttccattagacgcagcagtgagaagctggttaggaagctgaagggaggaagttcacgagagagtgagccaaagaaccccggcatgaagcgtgccagctctctgaatgtccttaacgtgggtggcaaggctgctgaagatcgctttcaagtaaggagcctaccccgaattgtgtcctaggctgcccagaccacgctggcaggtctgctgcagacccgcactcggcccctgctcggcccctgctcctgcagagggctggggacgccgccacgtttgttcctagacagacagttgtgacagtagtatttttatattctgcttaaccactgattatgtgaattatgggcatgttcacactgtgaacattctcagaatattaattaatgatctcaaatggtctttaaaaatagtttaacctaattaatgtattctgttaaagtactgtcaaagctcgaccaattactagtttgtatgattgtttgattttagcctctactaagtttataactattaataattaattgtctacttaagctgttgttcagtgttcagaagtattcaaaactctgttaacatgatgactagcgtgctgtcagtttgacactaaaacctgaagcactcggtgcagttgctcgggcctcacacagacacatcaggtttacatctgaaagtactgcctcccttccccatcacggaggccgtttgagttttcatccactccgccctttggtgtggctgtcagtgggtggccgggtgcctgtggctgctctagaacctgtttctcaggtgcctggggcccacccggcagctcgagctgttgggacttggcagtccctgcccctgtgctggtgctgagagttcgcgacagtggccaggcactgccctcccagttgtccagatccactaatcctcacagacaggccagtgccccgacctgtcccccaacactcttgggaggcagccatctcgggaaagcttttccccagcccccttctcggtggctgttaaagaggcttgtagggtgctggacatgttgcttgaagcacccctaatgacaagaggaaagaaagtctcttcattttacagggtcctgtagctgacccagngtttgccctccagtttcttggagtttctacatgcacattgacccctgggcctctcgagtgccaacctagatttagctgtgcagctggtactgttaggcctgaggccatttgaagctggcatcatttgaagtcctggttaagtgtaatttttctatttgttttttcatgcaggaacgaaataattgtctggccgactcgcgagctctgagtgccagccacactgacctggcccactgagagccagcagggctaggtaacctgtcttgggagtgtgagaccgccccgccctgccacgcccctcaccgccctgcccggaggcgccagccgcactccttggcttcctttcctagatagtgacgtccaccaaccttggaggtgccttttcaaaacacccgggaggccgtgcctcagcattctgttactcggcctgcagccccagtgccaggagccaccccgaccgcgacccggccaggctggctcagggaggccgaggtggcgctgaggtggcttcagcacgctggggattggctcctgctcacggatgctgttgcatttcctgcctgccacctttttgccatgacaccagactctcttttaaattgtaatattgtaataaggctgtaaattaagaatctggaaacataaagtacccctttcagaacgaatttataccctccctctctcattttcaaagggaaatctcctactccactctatctccttccctacttttactcttctttcctccactccttcttcattatccttctcatttactctatcatttctccctatctcacttcttcctcctctttctctcttctctttttcttccctttcttcccttaactccgttggcatcctcttgcacaccttttcattccgtctgctcttatcaccgctgctctatcttgccccttccg

SEQ ID NO: 402547 - DNA, 3137 bp, Homo sapiens
ggcggggcgaggcggggcgccggggggagcaacactgagacgccattttcggcggcgggagcggcgcaggcggccgagcgggactggctgggtcggctgggctgctggtgcgaggagccgcggggctgtgctcggcggccaaggggacagcgcgtgggtggccgaggatgctgcggggcggtagctccggcgcccctcgctggtgactgctgcgccgtgcctcacacagccgaggcgggctcggcgcacagtcgctgctccgcgctcgcgcccggcggcgctccaggtgctgacagcgcgagagagcgcggccctcaggagcaaggcgaatgtatgacaacatgtccacaatggtgtacataaaggaagacaagttggagaagcttacacaggatgaaattatttctaagacaaagcaagtaattcaggggctggaagctttgaagaatgagcacaattccattttacaaagtttgctggagacactgaagtgtttgaagaaagatgatgaaagtaatttggtggaggagaaatcaaacatgatccggaagtcactggagatgttggagctcggcctgagtgaggcacaggttatgatggctttgtcaaatcacctgaatgctgtggagtccgagaagcagaaactgcgtgcgcaggttcgtcgtctgtgccaggagaatcagtggctacgggatgaactggccaacacgcagcagaaactgcagaagagtgagcagtctgtggctcaactggaggaggagaagaagcatctggagtttatgaatcagctaaaaaaatatgatgacgacatttccccatccgaggacaaagacactgattctaccaaagagcctctggatgaccttttccccaatgatgaagacgacccagggcaaggaatccagcagcagcacagcagtgcagccgcggctgcccagcagggcggctacgagatccccgcgcggctgcggacgctccacaacctggtgatccagtacgcctcgcaggggcgctacgaggtagctgtgcccctctgcaagcaggccctggaggacctggagaagacttcaggacacgaccacccggacgtggccaccatgctcaacatcctggccttggtgtacagggatcagaataaatacaaagatgcagctaacctactgaatgatgccttggctattcgtgagaaaactttgggcaaagatcatcctgcggtggcggcgactttgaataaccttgcagtcctttatggtaaaagagggaagtacaaagaagcagagccgttgtgtaaaagagctctggaaatccgagaaaaggttttggggaaggatcaccccgatgttgccaagcagttaaataacttggccttactgtgccagaaccagggcaagtatgaagaagtagaatattattatcaaagagccctcgagatctaccagacaaaactgggacctgatgaccccaacgtggctaagacgaaaaataacctggcatcctgctatttgaaacaaggaaagttcaagcaagcagaaacactgtacaaagagattctcactcgtgcacatgaaagggagtttggttctgtagatgatgaaaataaacccatctggatgcatgctgaagaaagagaagaatgcaaaggaaagcaaaaggatgggacatcttttggagagtatggcggctggtacaaagcctgcaaagttgatagtccaactgttacaaccactctaatagaagaagctgctatgaggtctcgtaaacggtcttgacaatgttcacaaacagagggtggcagaagtgctcaatgaccctgagaacatggagaagcgcaggagccgtgagagcctcaacgtggacgtggtcaagtacgagagtggccctgacggaggggaggaaatgaggaaaatgaagctcgggctggttaactgacttgctcagcgtcccatggtgagtccgagcgggcggggcgcaggccctgccgtctggcgcttctgtcgagacgtcggctttccaacctggcaggacccaggacgcattgctgcctgtggaaattaattttcttttggattatcaactgcatgtttaaaatgggctgtagacttttaaagtccgtggtttcctaaagtttctgaaatgtctaaaatgtgtttttaagagaatgaaagtcatacctgtaggcctttattttggtccctatgtttttcattgcataatctccttatatacagttacttgtaaagccttttacaccaagtgtcaaggagatttctaatacgttgccaatctttacgcttaaagtgttgacatttactttgatgaccattgggaatggaccagtctggattctgtgaaatgcaccatgaggcccagcacctgctttatgctggactggtagaagcaggcagaaggtcatcccagtcctaaagccactcagaaggctgctgagacttgtgacctagaaatactgtaagccaggctgttatgcagagcctgttgcctttcctcgccgcggtttcacgtgggttttctctctcctttctgtctgacaggcctagccgcccgtgactctcacactgtctcctgcatgacgggtggcgcctcccgcagcttcccttctctctccagtgctgcccgctgtgtctagcagcctctaggatcttgtcagagctgcacctctctgtgaactggccattcctttcggtgctgctgtcctttttgggggggttcctgatttctgtatacatgtagctttgccagatatgtacttagtaatataaactgtattaataaaatccatttactgtgtaatacacgagtttaaaaattaagagcgattagctgttcactttggtaacaggtagttaagtgtcacacaaggtgttgttgcaatggcatgacggtgacctgttgacgtaactaagccttagagcaaggcatgtgccgcacgtgctccgtggtacttagagccctgggggccccgctcggactccgggtctccctaggatatgccccagtagcatttgctgtgtagtctgtgtgtgaaatttgggcattctgcttttctctactaatcttgaagtgctcagtgatttgtgtatttgtgtctttctaacttctaataaactcactccgactga

SEQ ID NO: 402548 - DNA, 2211 bp, Homo sapiens
ggcggggcgaggcggggcgccggggggagcaacactgagacgccattttcggcggcgggagcggcgcaggcggccgagcgggactggctgggtcggctgggctgctggtgcgaggagccgcggggctgtgctcggcggccaaggggacagcgcgtgggtggccgaggatgctgcggggcggtagctccggcgcccctcgctggtgactgctgcgccgtgcctcacacagccgaggcgggctcggcgcacagtcgctgctccgcgctcgcgcccggcggcgctccaggtgctgacagcgcgagagagcgcggccctcaggagcaaggcgaatgtatgacaacatgtccacaatggtgtacataaaggaagacaagttggagaagcttacacaggatgaaattatttctaagacaaagcaagtaattcaggggctggaagctttgaagaatgagcacaattccattttacaaagtttgctggagacactgaagtgtttgaagaaagatgatgaaagtaatttggtggaggagaaatcaaacatgatccggaagtcactggagatgttggagctcggcctgagtgaggcacaggttatgatggctttgtcaaatcacctgaatgctgtggagtccgagaagcagaaactgcgtgcgcaggttcgtcgtctgtgccaggagaatcagtggctacgggatgaactggccaacacgcagcagaaactgcagaagagtgagcagtctgtggctcaactggaggaggagaagaagcatctggagtttatgaatcagctaaaaaaatatgatgacgacatttccccatccgaggacaaagacactgattctaccaaagagcctctggatgaccttttccccaatgatgaagacgacccagggcaaggaatccagcagcagcacagcagtgcagccgcggctgcccagcagggcggctacgagatccccgcgcggctgcggacgctccacaacctggtgatccagtacgcctcgcaggggcgctacgaggtagctgtgcccctctgcaagcaggccctggaggacctggagaagacttcaggacacgaccacccggacgtggccaccatgctcaacatcctggccttggtgtacagggatcagaataaatacaaagatgcagctaacctactgaatgatgccttggctattcgtgagaaaactttgggcaaagatcatcctgcggtggcggcgactttgaataaccttgcagtcctttatggtaaaagagggaagtacaaagaagcagagccgttgtgtaaaagagctctggaaatccgagaaaaggttttggggaaggatcaccccgatgttgccaagcagttaaataacttggccttactgtgccagaaccagggcaagtatgaagaagtagaatattattatcaaagagccctcgagatctaccagacaaaactgggacctgatgaccccaacgtggctaagacgaaaaataacctggcatcctgctatttgaaacaaggaaagttcaagcaagcagaaacactgtacaaagagattctcactcgtgcacatgaaagggagtttggttctgtagatgatgaaaataaacccatctggatgcatgctgaagaaagagaagaatgcaaaggaaagcaaaaggatgggacatcttttggagagtatggcggctggtacaaagcctgcaaagttgatagtccaactgttacaaccactctaaaaaaccttggggcactttacagacgtcaaggcaaatttgaagctgcagaaacgttagaagaagctgctatgaggtctcgtaaacagggtcttgacaatgttcacaaacagagggtggcagaagtgctcaatgaccctgagaacatggagaagcgcaggagccgtgagagcctcaacgtggacgtggtcaagtacgagagtggccctgacggaggggaggaagcctagccgcccgtgactctcacactgtctcctgcatgacgggtggcgcctcccgcagcttcccttctctctccagtgctgcccgctgtgtctagcagcctctaggatcttgtcagagctgcacctctctgtgaactggccattcctttcggtgctgctgtcctttttgggggggttcctgatttctgtatacatgtagctttgccagatatgtacttagtaatataaactgtattaataaaatccatttactgtgtaa

SEQ ID NO: 402549 - DNA, 1768 bp, Homo sapiens
ggcggggcgaggcggggcgccggggggagcaacactgagacgccattttcggcggcgggagcggcgcaggcggccgagcgggactggctgggtcggctgggctgctggtgcgaggagccgcggggctgtgctcggcggccaaggggacagcgcgtgggtggccgaggatgctgcggggcggtagctccggcgcccctcgctggtgactgctgcgccgtgcctcacacagccgaggcgggctcggcgcacagtcgctgctccgcgctcgcgcccggcggcgctccaggtgctgacagcgcgagagagcgcggccctcaggagcaaggcgaatgtatgacaacatgtccacaatggtgtacataaaggaagacaagttggagaagcttacacaggatgaaattatttctaagacaaagcaagtaattcaggggctggaagctttgaagaatgagcacaattccattttacaaagtttgctggagacactgaagtgtttgaagaaagatgatgaaagtaatttggtggaggagaaatcaaacatgatccggaagtcactggagatgttggagctcggcctgagtgaggcacaggttatgatggctttgtcaaatcacctgaatgctgtggagtccgagaagcagaaactgcgtgcgcaggttcgtcgtctgtgccaggagaatcagtggctacgggatgaactggccaacacgcagcagaaactgcagaagagtgagcagtctgtggctcaactggaggaggagaagaagcatctggagtttatgaatcagctaaaaaaatatgatgacgacatttccccatccgaggacaaagacactgattctaccaaagagcctctggatgaccttttccccaatgatgaagacgacccagggcaaggaatccagcagcagcacagcagtgcagccgcggctgcccagcagggcggctacgagatccccgcgcggctgcggacgctccacaacctggtgatccagtacgcctcgcaggggcgctacgaggtagctgtgcccctctgcaagcaggccctggaggacctggagaagacttcaggacacgaccacccggacgtggccaccatgctcaacatcctggccttggtgtacagggatcagaataaatacaaagatgcagctaacctactgaatgatgccttggctattcgtgagaaaactttgggcaaagatcatcctgcggtggcggcgactttgaataaccttgcagtcctttatggtaaaagagggaagtacaaagaagcagagccgttgtgtaaaagagctctggaaatccgagaaaaggttttggggaaggatcaccccgatgttgccaagcagttaaataacttggccttactgtgccagaaccagggcaagtatgaagaagtagaatattattatcaaagagccctcgagatctaccagacaaaactgggacctgatgaccccaacgtggctaagacgaaaaataacctggcatcctgctatttgaaacaaggaaagttcaagcaagcagaaacactgtacaaagagattctcactcgtgcacatgaaagggagtttggttctgtagatgatgaaaataaacccatctggatgcatgctgaagaaagagaagaatgcaaaggaaagcaaaaggatgggacatcttttggagagtatggcggctggtacaaagcctgcaaagttgatagtaaccctgataatacacaactattactggtcactcttaaaaagccatgggcaggtttccc

SEQ ID NO: 402550 - DNA, 932 bp, Homo sapiens
ggcggggcgaggcggggcgccggggggagcaacactgagacgccattttcggcggcgggagcggcgcaggcggccgagcgggactggctgggtcggctgggctgctggtgcgaggagccgcggggctgtgctcggcggccaaggggacagcgcgtgggtggccgaggatgctgcggggcggtagctccggcgcccctcgctggtgactgctgcgccgtgcctcacacagccgaggcgggctcggcgcacagtcgctgctccgcgctcgcgcccggcggcgctccaggtgctgacagcgcgagagagcgcggccctcaggagcaaggcgaatgtatgacaacatgtccacaatggtgtacataaaggaagacaagttggagaagcttacacaggatgaaattatttctaagacaaagcaagtaattcaggggctggaagctttgaagaatgagcacaattccattttacaaagtttgctggagacactgaagtgtttgaagaaagatgatgaaagtaatttggtggaggagaaatcaaacatgatccggaagtcactggagatgttggagctcggcctgagtgaggcacagcaaaattctgtggcatctctggaatactacctgagaatttttgtgtgccatgtcgaagaaacgcaaatgggatgatgactatgttcgctactggttcacctgtacaacggaagtagatggaactcagcgtccacagtgtgtgttgtgtaactcagtattttcaaatgctgacctcagaccatcaaaactgtcagaccattttaacagacagcatggtggtgtagctgggcatgatctcaatagcctgaagcatatgccagcaccatctgatcagagtgaaaccttgaaagcatttggagttgcatctcatgaggatactttattacaagcatcgtatcaatt

SEQ ID NO: 402551 - DNA, 359 bp, Homo sapiens
acatagtccacgagaggagaaggacaggccaaacatttagtaatgtacatgcacagaagacaagcatgctgtgcacattaataagcaagaagttctggtggtgtcacttagaatggagaatttcagagctggaaaggtcatctacaagaaacagaggccatgcgccagctgtgggaggcaccagggagccctaccagtcaatgtctccattgccttaagtctctcccgaggggtgggaaggtggcgctcaggtcagacagcgcagacatgacaacgcgggttctggctgttaattgtaggctgtgtcttcttcacagcaaataaccccaaacagagaaataaaaatccccaaacgcacc

SEQ ID NO: 402552 - DNA, 691 bp, Homo sapiens
aaggccaagaaggaggcgccgcccatggagaagcaggaagtggtgaagacgcacctgcgggacatgatcatcctacccgagatggtgggcagcatggtgggcgtctacaacggcaagaccttcaaccaggtggagatcaagcccgagatgatcggccactacctgggcgagttctccatcacctctccctccacacctccccgcaagctgagggagccggctccgccttggccagccgagaaaggggctcccacagtgcagcggcgggctgaagggctcctcaagtgccgccaaagtggaagcccaggcagaggaggtgctgagagtgagtgaggggtgtgagggctgccagtgcgctgtcacctctcactaatttccccttagtttattttttgtttaaaatggagtttcgctcttgttgcccaggctggagtgcaatggcgaaatcttggctcactgtaacctccacctcctaggttcaagcaattctcgtgcctcagcctcccaagtagctgggattacaggcacccacacctggctaatttttgtatttttagtagagaagggatttcaccaggtaggcccggttggtctcaaactcctgacctcaggtaatccacctgccttggcctcccaaagtgctgggattacaagcgtgagccaccgcccccagcctcccttcttagaattc

SEQ ID NO: 402553 - DNA, 544 bp, Homo sapiens
cactggaaatcattgcgggactgatagagggaggtgaaaatgaaagatgaaatcatcactgtatctctgtcaaaaatgtactcgggtgtgggttttgatcagctgtagcatgtcagcaatcctgagaaaaatcaggaaagcaagaagaggatgatttgcatatctcgaaatccacatacagtcgctactcccggcacaaggccagaagtgaaagcagtcaagatctcaatatttcagacccaaaagagaaagctcccacagtccagacattgatgctataatgccatcaagaaatgggggacagcactaacacttctgccatgaagttacgtttttaagtgctcagtagtagctgttattaacacttgattttattttgtacaaaatctccttacttttttctaatcttccttaagatataattcacccttttaaagtgcatgtccagtggtttttagcatatttgcaagactgtacaacaacaacaacaattctatgaagagatcattttcatcaccccaaaaagaaaacctatatccattag

SEQ ID NO: 402554 - DNA, 389 bp, Homo sapiens
ttagtattttgtctcttctactttagccattctagtaggtgtgtaatggtattgcattgaggtttttaatttctatttctcagataattattgaaatcaagcacttttcacctgtttattggaccactgattattctcctttataaaatgtccattaaaatatttgttcatttttctattgaatcgtctttttcttaatgatttgtatgagtgtgttctagatacccaaatgctttctcagatatatgtattgcaaatacttcttccactctaacaattaccttttgattctcttaatatgccttttgatgaataaaaaattttaattttaatatatcccaatttatcaattttataaaattcttttctttttttttttgagatggagt

SEQ ID NO: 402555 - DNA, 364 bp, Homo sapiens
taggagtagtggaaagctgtgttccactcagtaccacagtgagatggtgaacttcagagtttcatggtttgttgggtgctccagaggaaacctgcacctcaacactgagtcttccagaaaaggcaaagacctccaagcttggaaccccctcctacaagggccccctcagacttggcagtgaagataatagcaacgacccagatagactgaagagtagaggtctttacccatttttccaggtcattcatgagtgtcctaaatgcttgcaagaccctaagaaggggaaaggacaccccagggaccacagaattaatttctgcttgcagtgcagcagagtgaggccaaatggacttaatttgctttg

SEQ ID NO: 402556 - DNA, 153 bp, Homo sapiens
ggctatgaggaactgaataagagatcagatttgtatttttcctttggagtcttgagaattgtaatatttgaaacccttggcagaaaataaaatcataaccaagtgactcagaaaaaacatactaatgctaactgtgtgtagtaattacaaatt

SEQ ID NO: 402557 - DNA, 369 bp, Homo sapiens
gaatgactaaaggtaaaaggactgataatatcaagtgttgatgagaatgtggctcaatcggaacccccattcattgctggctggaatacaaaatgttaaagccactttgaaaaccagtatagcgttacccattaaattaaacacatataacacggccagtcaactctcaggtatttaacaaagaaaaatgaaaatatatgcccacacaaagacttctatgtgaatattcacagaaatattatttctaatagccccaaactggaaacaatgaacagttccgtcaatggatgagtggatgaacagagtagggtacatccacaccatagaacactactcagcagtacaacagaatgaaccatggaaacacac

SEQ ID NO: 402558 - DNA, 639 bp, Homo sapiens
tgagacggagtgtcgctctgtcacccaggctggagtgcagtggtgcgatcttggctcactgcaagctccgcctcccaggttcacgtcattctcctgcctcagcctcctgagtagctgggactacaagcgcccgcccccacgcctggatgatttttttgtatttttagtagagatgggtttcaccatgttagccaggatggtctcgagctcctgacctcgtgatctgcctgcctcggcctcccaaagtgctgggattacagtaacctcttcttttattgtcacgacagactgggatttaatactggaaagttgaccctggatgctgttggcagtgaaaggcggctgtggaaatgtccaggcacaataataacagcatggagaatgagatgcagaaaggccccacattcctgctgccccagtagacaaagctgctgaatgcaggggagtccctcatgctcccttcctctctgtgtgtcctaagggccattatccaagcccatcttctgcacagctggctccaattggaacacaattcaggtgttcaaaaaatgacactataattttttggttggaaagcagaggctgaaactggtaaggaggcttcctacagcttctgaaacctcagtcatagatagttgg

SEQ ID NO: 402559 - DNA, 441 bp, Homo sapiens
agtagagatggggtttcaccatgttggccaggctggtcttgaattcctgacctcaggtaatctgcctgcctcagcctcccaaagtgctaggattataggcgtgagccaccacgccggcattttagtaattttaacggagacggggtttcaccatgttggccaggctggggtcacaaactcctgacctcaagtgatccacctgcctcagccccaagtaatatattttgcggtagctttttgatgcaaatatcagattattgtactgagacaggaatattttggactgatccttaaaaacccataaaattttaagctgcttttaaaaaaactacccaaaaatgacatccatcagacaacaacccttatcctatacccagtgggtcagggctaggctaaaccacagaaagttatggaaatgagtacatcgcttgctaaataaaa

SEQ ID NO: 402560 - DNA, 630 bp, Homo sapiens
tcaagcctctgcagacaagagccctccactaccaaagacagaggctgtgatgccaaggaaaaactcaggcctgacagtggaaagtagtaggcaatgaccccaatttggccataaaccaaccatgcagctttgggcatgcctctcacctttatgtcttccatgatgagtatgatgatattgcccatctctcagcaatacttaactactcattcttcaagacctgacttacacattgtgttctacacaaagccttccctcacatccccaagatgtagtataatcctcacctgttttccaatggtgcattggcatgctgctttgacaattacattttaattaatgctataagcctcccccagtgagtacgcactcttctacaacacgtttctattaccaatgcattgactgtttctagcatgtaacagtgctcaaggaatgtttgtttggaaggcggaaaatgggctgggcacagtggctcatgcctgtaatcccagcactttgggaggccgaggtaggtggattacctgaggtcaggagttcaagaccagcctggctaacatggtgaaaccccatctctactaaaaaaatacaaaaattagccaggcatggtggtgcatgcctgtaatccca

SEQ ID NO: 402561 - DNA, 1362 bp, Homo sapiens
gcctggacttttttttttaaataagaagagttgttagggaaagaaagttgaagaaagattatgggaaatcaattatcttcaggaagctctgggctcctgtagaacacatgtctaaaaacccctagtctagcaaaaagaagccatgcgatagagggttaaaaaaaagtgggtttttggctgggcgcagtggctcacgtctataatcccaccactttgggaggcagaggcgggcagatcacaagtcaggagttcaagaccagcctggccaagatggtgaaaccccgtctttactaaaaatacaaaaattagccgggtgtggtgacgggcgcctgtagtcccagttgctcaggaggctgaggcacagaactgcttgaacctcggtggtggaggttgcagtgagccaagatcacaccactgcactcagcctgagcgacagagactgtctttaaaaaaaataaaaaataaaaaataaatgggtgtttggacactcaatgcataatgaatgaacttgacaccaagattaaactagttaggaagagtgaatctactacttattaactgtgtgaccttggacaattaaattctctaactcatttctttttttcttttttctgagatggagtctcactctgtcgcccaggatttccttatcagtaaaacagagatactctctcccaagtttgatctataattaaatgagatgattgatgtacataaaaaatgcccagcagaaaatctagccaagactttttcttaaaagaattcaactagacttaaagtcatactcggctgacgtatctgcttattgactcatttcaaaagttcaagttatggtaccccaactcctaaaatttcagatagcctcaaggggccagagacagaaaccagagacagaggcaaaaagctacttaaccagccttaataaaatccagaaacaaggtctgtcacatgtacaaacactagctcatgtcgcacatgtaaactattactacagcattatgagatcccttccttggtaatcttactaaagcctaaacaataaccagagtgattcttcttcattagcctccaagctttcagggatttgaagtaaatctttacaaaagaatggtcactttctatgagattcaaaacaatactctaaggaatgagaacaaaattggcaggtgagaaatcttacttccccacctcttcctcctattttcattaccctgaacttagtgaattaactcattttgatcccagggctgcaatcattcattaagcactatcatttaaaccattcttcctgcctaaaactctggattcacataacctatacaacatttaacacttgagaacaagcttaaactcaatctctct

SEQ ID NO: 402562 - DNA, 1034 bp, Homo sapiens
gcctggacttttttttttaaataagaagagttgttagggaaagaaagttgaagaaagattatgggaaatcaattatcttcaggaagctctgggctcctgtagaacacatgtctaaaaacccctagtctagcaaaaagaagccatgcgatagagggttaaaaaaaagtgggtttttggctgggcgcagtggctcacgtctataatcccaccactttgggaggcagaggcgggcagatcacaagtcaggagttcaagaccagcctggccaagatggtgaaaccccgtctttactaaaaatacaaaaattagccgggtgtggtgacgggcgcctgtagtcccagttgctcaggaggctgaggcacagaactgcttgaacctcggtggtggaggttgcagtgagccaagatcacaccactgcactcagcctgagcgacagagactgtctttaaaaaaaataaaaaataaaaaataaatgggtgtttggacactcaatgcataatgaatgaacttgacaccaagattaaactagttaggaagagtgaatctactacttattaactgtgtgaccttggacaattaaattctctaactcatttctttttttcttttttctgagatggagtctcacacacgaaaaaaaagaaaacacaattgaagagcagaaactaagcctacaacaccttttggggtgtcaaaaaaagcagttaaaaactgtgggactgtgtcaaaatgacacaaaagccagcttgaaggggatctccctggccaaatctggaacaagtgtgaacacaacaaataatgacagtaacagagtattaaaataagaatccataaattccatattagtatatatacacaaaagataagaaaatgctctggcagaagaatattaactaatacgcaggaggactgacggaacaacaacaaaatttagctgaagcttgtctataatccggtagtggcaataggtggttggccgtatcccagtcttcggaactgaggggggaatacttggcccgagttggaatcgcggc

SEQ ID NO: 402563 - DNA, 496 bp, Homo sapiens
gcctctctactcactcttaatcaaagtgtggaggaggtggcccccacagcagggtttggaacctacagaccctggcccctgagacatgcagctgtcagacaagccatcatgtcaaacacaggttagagagactgagcttccagattgcatagccatttccttgactactgagtaaaggccaaggctaagatttagtaagcctagccctgaagcaagcaaagaatatggcagtgtaatgcaggtcatttagaaaaaaacaatgttgggcacaaagaaaatttagatctgacaagtataattttctaaagacattatttcaggattaacatcaatttcttagcagaggaaatgaatactattgtcagaaccatatctatatagtcaatcatttcctcttttaacgtctgtcttgttctctttttacccaccacatatgtataactatgtgaaaaattatatttgtgcataataaaatgtgataactttttacaacaaa

SEQ ID NO: 402564 - DNA, 339 bp, Homo sapiens
atggtttacagaggcctgcatgtgaagcagccccacataggctccctggccttgctgtttcacaggcagaccaagcatgcagccagcttaaggcctatgtacttcttcccctcaacctagaacttctcaaggaggcccaccctggccacctaactcagaatttcagccctccccgctctcctctgcctcttgctcgcaatacctagctctattttcacacaatctgacctactacataatttacctaattattatgtttattgcttattgactgtgtcctttcactagagtgtgaactcaaggacaagacattttgtctgctttgtttactgatgtatc

SEQ ID NO: 402565 - DNA, 408 bp, Homo sapiens
actccttccttcctttctctttcttcctttctttccttttccccttccttccttccttgcttccttccttccttctttccttcctccctccctcccttagtccgtccgtccgtccttccttccttccttccttccttccttccttccttccttccttcctctttcaacagggtcttactctgtcacccaggctggagttcagtggcacaatcttggctcaccacaacctccacctcctgggctcaagcgtggaatcacctattcttagccctatgtcaggaccatgacaatgggagaggccaccagatttccacttcctaaccaacccttgaagtcaatgttccatgtatatttttgttttgtgagtaaagaccgtaattcattacaataaaactatgtttttaaaaa

SEQ ID NO: 402566 - DNA, 215 bp, Homo sapiens
gaggaccccaggaatgatcagatgtggggactggaaacaaccagggagagcactgaacacagtgttttccaccatgtgctttgcagcctcttagagagctggaaaatccatttaagtgggtcacagccagcattccaaaaactgaaacagaacagaaatgatctgagcacactgtaagtattgttttgtaaaacctctgccttaattgcattata

SEQ ID NO: 402567 - DNA, 575 bp, Homo sapiens
aagacccagaaacacgctctcaccttacccttaagaattctttcccaacattaagtgtaagctctccctggacttaggccaagtaagtactaacctgggtttattagcagtctgaatttttaggcaatattgaatgtgtccatttgttttctcggggaagggttcccagtgttcattagactctcaaagaggcagtggctccaaaaatattaagaattactgtccaggccaaagagctgagacttggagacacctccttaatccagtcttgtttgaatcctagctggacacacacagaggagactagcactcaggggacagtgatgactacattgctgtggcttcttactggtgtttgctggaaggtttgattttatcaacaccccttcttagcctgagggtttctacgtgctggcaatgcctgaatgccctgtggttgaaaaagtgcctctgacatgaggcctgggttctgtattaaggggaaaaaggctcaagaaataaggacacaggccctaatggaagagattggggaacggacgtcatggtatccatggaggttggctttattttctctg

SEQ ID NO: 402568 - DNA, 172 bp, Homo sapiens
ttttgtatgccgcttccagcccccggcctgggtttggggagaaaactcagaagtaggcagatgatcccagccaggtttggtttatcttgcaagaataacgaattgttccccaccccaaccacccaagttttcttgttcgagaagattgagtagactaaggtggctcagtgac

SEQ ID NO: 402569 - DNA, 145 bp, Homo sapiens
tgggaggctgtgatgggaggatcactggagcgtgggaggtcaaggctgcagtaagtcatggttgtgccactgcacttcagcctgggtgacagagtaagaccctgtctaaaaagcaaaataagatgcagtttggagtgtaaaatag

SEQ ID NO: 402570 - DNA, 155 bp, Homo sapiens
tgaatgtataagcattattagaaataatctgcatatgttctaggaaagttgtcaactatatatattttgacaattatatatacatatatctgtgtgtataagaaggctacaaaatagtaattctaggttatgactgaattctttttttttttttt

SEQ ID NO: 402571 - DNA, 523 bp, Homo sapiens
agtgcaagtagcataagcaatcttctataataatccttcctcgtgcataggaaatgcgtactatgcaatccagtaatgtattgtaatgtgagagagggtggtagcactaatggttgaatacagagaggttaaagtaatccacaccagctcaaaggacctgtggagatccagttggcacattgctgcctgggggtttcaaatctctgttggctggagaatactggtgggggtagctggaggacccagttgggaggtcctgtccagtgaggaggaacagcatcaggggcctgcttacagaagcaatctggccatgatttggtaaagcagctgtgctgtgctgcgggatctcttctgcccctggtcagtttgtactctccaaagccagcaggctggaatggctaagttgcccaaacaggaaagatggtagcctgccccatcttttctctcagagtttatcttgtgtgatggggcttaatttttagggtgttaattttactgtcagcattagagagttgttcagaaa

SEQ ID NO: 402572 - DNA, 392 bp, Homo sapiens
tttttttttttttttgagaactaagttgaaggaaaaacaatgtctggcaggagcaagagccctgatgacctcttgtttcccacagttctgctgttgcctgtttgggggagaggaatgtggcactcctctctccaggatggtggccttaaagtgtatgaaaagtcattcctagtctccactttggtttcttctgtttgatttggaatttgggttacatcatctttgccaaccccttcttcttccacaccctttgtaaaatgggtcagaagcaggacttcttttcttcttaaactgagcaagtaggggaagtggcatacaaatcgaactattctgttttgtttacctattctctttaaaactgcccttctgtcgtcttcttgttttcttttgaa

SEQ ID NO: 402573 - DNA, 385 bp, Homo sapiens
tttgcatagaatctgatgtaattgcttaataaatgttagctgtcattattatataaagttctagcaatgtcatgaaggggacgtggctatttaaaatgtactcttctctggaaagggaaagtggaaaattattaatgtaatgattgttattagcaaaacaaacattgttacacttcaggccctcccagccctcatgttgttatcattcaggttcttttttcttcatgtgttacatgaacacaacctgatttatatttagggtaacaggaaggaaactgtgcctatatcgtaggatggaaaaagggattccctgggctccctgtcccacgtgtgtggttactcatccaataaatttatattcttagtattttaaaaatcccttaaa

SEQ ID NO: 402574 - DNA, 251 bp, Homo sapiens
tgcattctcctatttttgtccagaaaacattgatttgtgctgagtgcctcttccagctttccctttacagccctgatcccaggagaagccaggtactggtcttttaaaagtcttgaggcctgagaatttgaaaatgaaactcagaagaacaatgggaataatcagagggcagggccccgtggcttgttcagctctgccccggaagagcctggcatgcaggaggtgttggggaatcaagtccccaggaatag

SEQ ID NO: 402575 - DNA, 1041 bp, Homo sapiens
tattttttcagttgacatgacctttaaggttcctccaaactaaggttctaatttttttttttaacttgcagtcttactcccaacaagaaatttgatatattagagctaacagttctaagaagttttaagaaatagtatgcaatcccaatactggacatcacactgtaaattaaattcattaaaatgtaaaatgtgtttagttcaaatatttaaagacaggagactgctgctatgtaataataacagagaggctatttctgcagcttctgttgtctcctttaggaaaggaaggagttgggcaaaatgaattttaagaacgcttagaactctacaaatatgtaattctttatctacaaagaacatatttctggaaattcttaaaagagaaaaataatcaaaataatggccttcattcccacctgtttggtcatggacaagtccaatattttggaaatgtagacaaggacacctagtaaagggtcttttgaaagaataaacttagtttagtcttctcctttaatgtaaagaaactaaggccccaactgacaaactgagaccaaagtcaaaatcatgcggttagtattctaatgttctattcactttatcacactgtataacaaaagtctgtcagttaccatatacttctattcatacattatgtgttttatatagcaacattttccagaatccaggcagcgagtgattaaactgaaaggcattatctaatgcccagcctgattttgtgattttaacaggtcagattacgcatctcactctttgatttgaacactgattgcttaaagatacttaaaaagtttcatatcccagagctgagccatttaatacctcaaagtaaaggtattcctttctcataaagatttaacctcagagccagctttgcacttctgcaatcacctcttctgaagagccagtttcaacgaatccattatttaagatacctgacttactagcctcttctcggtcttatctgtaaattagaagtttttagaatgaatatctaatttgtgcactgtgtacctg

SEQ ID NO: 402576 - DNA, 5751 bp, Homo sapiens
  misc_feature (4924)..(4924): n is a, c, g, or t
  misc_feature (5480)..(5481): n is a, c, g, or t
  misc_feature (5484)..(5484): n is a, c, g, or t
  misc_feature (5494)..(5494): n is a, c, g, or t
  misc_feature (5502)..(5503): n is a, c, g, or t
  misc_feature (5524)..(5524): n is a, c, g, or t
  misc_feature (5573)..(5573): n is a, c, g, or t
  misc_feature (5577)..(5577): n is a, c, g, or t
  misc_feature (5580)..(5581): n is a, c, g, or t
  misc_feature (5595)..(5595): n is a, c, g, or t
  misc_feature (5635)..(5636): n is a, c, g, or t
  misc_feature (5641)..(5641): n is a, c, g, or t
  misc_feature (5649)..(5649): n is a, c, g, or t
  misc_feature (5668)..(5668): n is a, c, g, or t
  misc_feature (5671)..(5671): n is a, c, g, or t
  misc_feature (5676)..(5677): n is a, c, g, or t
  misc_feature (5697)..(5697): n is a, c, g, or t
  misc_feature (5701)..(5701): n is a, c, g, or t
  misc_feature (5740)..(5742): n is a, c, g, or t
  misc_feature (5747)..(5747): n is a, c, g, or t
gagaggttgtaatggaaaaacctagagcaaacgaaaccaatattccttccgagcaatcactaccaggaaaagaggctaccttactagattttggctggagaagtgcatttaaagaagtgtctcttcccatggcgcactgcgtagtaactgcaattgaaggtttttccacaaaaattctccaacaggaacagaatgaaaggtcttcagctgtgagctatgctatgaaccttgtaaatgtccagcaagtttggcaagacagccatatgtttcctgaggaggaacaaccaaagaaaattggaaaattttgttctgacatcatggaaaaacttgacacaatgcttccactggctctggcatgcagagatgattcttttcaggaaattagagcaaacttggtggaggcctgttgtaaagtggcaacagctgtcctgcagagactgcaagagagagccaaggaggttccttccaaagcacccctgaaaaacttgcacacatacctctccacagcggtgtatgtcttccagcatttcaagcgatatgataatttgatgaaggaaatgactaaaaaacccatattcctggtgcttgtccaacgatatcaggaattcatcaacactctacagtttcaggttacgaactactgcgtcagagtttgtgctacaagcattttacaggatgctgagagccaccactgggatgactacaaagctttttatgagggggaaagatgttccttctcgatccagatgtggcattatttctgctggtctcttcattacgatctctggaccattctgcctcctaagttagcccaggagattctagtggaagtgctggagaaatctttgagtctactggcctccagatacgctcgggcccaccccagccgtaaaagaactccacagttaagacttgatgtcacaacaattttgatatgcactgagaacatgttatggtcagtttgtacatctgtacagaaacttttgaatcctcatcagcatacagatgataaaatttttaaaattcacactcattgtaataatctgtttacaacattagtcattttgacttcaccattaacagaattatataagacttttcagcatggcctggatgagtctgcttcagattccttaaaatcattttttaagcaaccattatattgggtttcttgcatatcacatttctacccttctttactcaggactccatcagctggaggactgaaagccgagggtcagttgaaactgctcttatcccagccacgttgtaactggaacttgcttctggaaaccctactgcatcatgatggacttttactgagaatcttgctgaagagctcaaaacgtacctttcaagaacaagtttccgacacagaaaataacctgaaccaaggacccagcttgatggaaaccatctttagaatattgtaccattgcagtttttctccacaaacatttgcaaacgtttttgtgagctacatggaagaagagcaattatgggactttttatataacatcccaggtatgagacatttactgtttgtaaaagaaatgttctatagatacttatatgtacctttaaagatgtttagaagttgtattgatactggttttgctgaatctgttgttggtgaaagtttaccttacattttttcagtataaagccttctgttgggaatcattaattattggttcctgtaaaatttcatatactttgggacaagatgcaagggaggtggaagggaaaagattttctttttttattaattagggaatgttctatcataaaaatttattttaatatttatcacagattatgttttgctattgagcatataagatattagtaagatgtgaaaagtattttgtgattcttgggtgcatttattcagcaaattaatggacaatactattggtcgattttcttcagatgtataaggcatttattattatgaccatagtgtgtctctctacaaggcaagcatatcctgtgattcctttggagagaatatatttttcccatctgtattgttcttcttccttcagctagagagaataataaaggcagtgcaggttgtatatttgaacaggaagttttgatgggttgccccaccctctggcaggcgtaaaaattctcacattgtcttatccttaatattctgcctttaaattttcatatttaatatcttgtgaaaacaaaggatgaaaacttagacaatgatttttattattatcctgctattcaaatagtgatttttatcatttacatttagttttcaacctgtaagctttcttttatcctgctttggaacctgaattttcataaaatatttcctaggctccatataaaagatctaactagttcataatcatggtttcactcctcccagactttttgactatcctccagatattacttgaatatcattctagctgttttacagtcattatgtttcattttctcttggccattatccctataaactagcaatagataactttatgttatgatttccaaagtccaaatctgtcatttaaagtttctgtaataatgatctctttttaaaatgttatctcctagttgccatgcattcccttactgcttcttgcttcccaaaggaagggcatattcctaggtaaaaaggctgaattagaagcttgttgtgtttctgatgtagtctttattgaattgaaagaaaaacgaacttgaaagttctgccaccctctgctgattttagttgtttctggggaagtaagagctggattttctcacaagattataaagaatcagtgaccctcatgcttcaatcactatttatctttcaactattaggttcttgaaccatctttgacactcagcacaaaactatacttaaaataacctagaagatataaatggatttcaggtgctgctagggaaaataaaactgtttcttgctcctaatttgacatctctccatgtatgtagtgagcaaaccctcccctacatggtcagacaagtctctggaaacagacgttatacatattcacagagcctgaattatatgtgaaagctcaaaggggcagaacttcaaatgggtgaaactcccttctcctttatacaagttgttgctccataaacattaaatattctctggaacctgatacctgcagtggttatgagggtctgaagttttctcttttctctcccatttaagtctttgaaaatatctttttttttttctgttagcaatcatggttattttaaaaaccctaataagataatacaaggtactaattcataacgaaattaagccttttactatgacttttgtttaatttggaaacataacattgttacaagtaatacagctgagacatgtaatcataatcccgcaatatttacattttattactaatagatctatgcttcagtatctataattaacctacccagattaactaaagtacattattttaaaacttcactgctgtagtttcctcctgctaaatcactgtctatgatttctgcacagtttacccataaaacatcacagtcttatcattttagggtaaaaggacaaagatgaagtggtatcttcatcttattgttgagtaaacaaaaagcagaaatattaagagagttgcctaagactgtccaccaattaagttggacaagacttagcacaagaaaccagatctcctctctcctaaggcagcagtccccaacatttttggcaccagggaccagttttgtggaagacagtttttccaccaggagggggatggatgaaaccgttccacctcagatcatcaggtattggttagattctcataaggagcaaacaaccaagatcccttgcatgtgcagttcacaataggatttgtgctcctatgagaatctaacatgcttctgatttgacaggaggggaagctcaagcagtaatgctcacccacctgctgctcacctcctgctgtgcggcccagttcctaacaggtcacgaacctgtactggtctgcagtctaggggttggggaccctgtcctaggccatgttatttctcatttttttctattagactaaattttttgagacactacttttatgaacatacgaattcagtaatgaattatacaatctgattttatacttagaattctatctaacacataactctttagactggacataagctagggagggatgacaagaaggaaaatacccacttaagattactacaaaagctataagtacaacaaataattaagtcagtgacctaatgtgggtgtttctaaggccaatgcactctgtaagaaataaatttgctaacaatcattggacacctatgttttcaaagtagatcaagcattattcagttagacaaatgaaaatatcaaagcatacattacctcagctggtttttaagacaatgtcagaacaggcttgtaaatgaggcaaatactgtcaaaaatgcccatctaatatgatagtaatatactcaaaaagtattgtttacttggctcctcgataatggcattgggcttacttttgttttctgaatcagttttcttaactttctcccaacctttgggaaaaaagttttccataacctagcaaaattaagggttgagattcaaagtttccactttggttttctactcctcctcagcctcataaagacctttaagaagtgttgtctagagagcatatatatgctatattgtctgcctgttgccaaaattaatttacagtgccttaccttcctatcagacacagtgattgtctctattacctacataaatacctgcgccatagtataggtagattttaaatgtaagctttcacatattgaaaggctgtctttgttctatgttgtaactaatcatgtattctgagccttttgtcaccagtttgtttgcaatccaccttaaaaatgttttaanatatatttattgattgaatacaataaaattcactcatttcaagtgaagagttcagtaagtttgaccaatgtataaatctgtgtgacaaccacaacgataaagatatggaacattttatgtcatctccaaaggttctttcattccccctttgccgtccattctcctttcaactctcagccccaggaagacactgacctgctttttgtcgtgatagtttacttttgatattctagaatttcatataaatagaaatctatatattcttttgtgtctagcttcttttgctcagcttaatgtttttgataattttatattatgctttatcattagtttatttctgctcattgctgagcagtatttcactgagtagtactttttttatccacttaccagttgggtggacattttgattatttctagtttttggctacgatgaataaagctgctatgaatactagtgtataagtctttgtgggactacagtcatccctcagtatatgtgaggaattcattccaggaaccattccccttcttaaaaaatccatatactcggccnngcntggtggctcncgcctgtnntcccagcactttgggaggccnaagtgggagatcatctgcggtcgagagtttgagaccagcttgaccaacntggnganncctcgtttctactnaaaatacaaaattagctgggcatggtggcatgtgcctgcnntcccngctactcnggaggctgaggcaggagantcncttgnncccgggaggtggaggttgcngtgngccaagacgccattgcaccccagcctgggcaatgagtgnnncttcntctc

SEQ ID NO: 402577 - DNA, 1926 bp, Homo sapiens
gagaggttgtaatggaaaaacctagagcaaacgaaaccaatattccttccgagcaatcactaccaggaaaagaggctaccttactagattttggctggagaagtgcatttaaagaagtgtctcttcccatggcgcactgcgtagtaactgcaattgaaggtttttccacaaaaattctccaacaggaacagaatgaaaggtcttcagctgtgagctatgctatgaaccttgtaaatgtccagcaagtttggcaagacagccatatgtttcctgaggaggaacaaccaaagaaaattggaaaattttgttctgacatcatggaaaaacttgacacaatgcttccactggctctggcatgcagagatgattcttttcaggaaattagagcaaacttggtggaggcctgttgtaaagtggcaacagctgtcctgcagagactgcaagagagagccaaggaggttccttccaaagcacccctgaaaaacttgcacacatacctctccacagcggtgtatgtcttccagcatttcaagcgatatgataatttgatgaaggaaatgactaaaaaacccatattcctggtgcttgtccaacgatatcaggaattcatcaacactctacagtttcaggttacgaactactgcgtcagagtttgtgctacaagcattttacaggatgctgagagccaccactgggatgactacaaagctttttatgagggggaaagatgttccttctcgatccagatgtggcattatttctgctggtctcttcattacgatctctggaccattctgcctcctaagttagcccaggagattctagtggaagtgctggagaaatctttgagtctactggcctccagatacgctcgggcccaccccagccgtaaaagaactccacagttaagacttgatgtcacaacaattttgatatgcactgagaacatgttatggtcagtttgtacatctgtacagaaacttttgaatcctcatcagcatacagatgataaaatttttaaaattcacactcattgtaataatctgtttacaacattagtcattttgacttcaccattaacagaattatataagacttttcagcatggcctggatgagtctgcttcagattccttaaaatcattttttaagcaaccattatattgggtttcttgcatatcacatttctacccttctttactcaggactccatcagctggaggactgaaagccgagggtcagttgaaactgctcttatcccagccacgttgtaactggaacttgcttctggaaaccctactgcatcatgatggacttttactgagaatcttgctgaagagctcaaaacgtacctttcaagaacaagtttccgacacagaaaataacctgaaccaaggacccagcttgatggaaaccatctttagaatattgtaccattgcagtttttctccacaaacatttgcaaacgtttttgtgagctacatggaagaagagcaattatgggactttttatataacatcccagtctcaacgtgcgtggagtacgagctagaggtcatccgatgcttgagactggcactgaccgatgccatcaaggacgctgtacagcagatagtatctgtaatgagttctaggagaaactgtgagacaaacctaaacaagcacgttgttcctgattgtttgcttgagagcatgccaaaggaatggaattatggtccaaaagaaactaacaggaaagaatcatgcaaaagcttcacaaggcttactgctcaggcagtatctattgtaatcagcaagttacctacggtgattgcatgtttgcctcccccagttaaatacttcttttttctgtctgagagaaaaatgtcaaaaaaatttgttgaattgaagaaagctggcctgcttgtctggaacttgattgtaatta

SEQ ID NO: 402578 - DNA, 555 bp, Homo sapiens
tgagcagactgcgccattgcactccagcctgggtgacggagcgagactccatctcagacaaaaaacaaaaaaaagaacttctggctcatagcaacaccagatgtttttcaagaggagctgtgacactcccctgcacggaatgctgtgaaatttcgtgggggctggtcacgtaattgggttgggggtgtggttgaaatgtgggcaggagccatgcatgctgccaagatggtgaggaacagaactgcccccagtggaccacatcaacagatgtggaataagcagttttcagggtatgaactgagaacctaactggacttcacacataagcacaaactaattgctgcatgcttggaatttacccagaatttcccagaaatgcaatagcatattatgttgttaaaaacttttccaagagttagtcactactttggaaggtcacgttccacatgggaaggcccctcacagtattgccatggtcaacatcataccctctaccagtccacaagcaacaggctattgccctaggtctcctggcaaaattgggcccacagtgac

SEQ ID NO: 402579 - DNA, 3851 bp, Homo sapiens
  misc_feature (3845)..(3845): n is a, c, g, or t
cccacagcgggcgaggcgctagaggcgggggcgccgggaggcgcgggctttgctcctggggtctcggccttggccggctggacctgaccctagggcggcttgcgcagctgtcgggacgtgactgcgttcagccgcgtcgggcgtgcttcccagacttgcccaagttcgggtgccctagctgcccctttgcagccgctggcctacccggcccgcgggtgagaaggttgcgacgggaggtgggtggaactcgccagcgccgggaccgcggattggctgcctcggctttctcttttccccgtgggctccggcgtgaggcgctgaagcggccggcagccggcgaccggccctcaccgtccgccgggttgcgctctgcttttgcggtgaggcgttgaccacgcccatatgaattggagctctccgccagtaggagtttccggaaggagtttgaatttttgtgatttttatgcttgtttggtcggtggaatatgttgggatttatgtttgcctctgaacaagtgtcttgctcacatcgtaaatgactttctctccgaaacgctaaatattctttcccgcaggagctcatatccttattttccatgacagatcttaacgacaatatatgcaaaagatatataaagatgataactaatatagttatactgagcctgatcatttgcatttcgttagctttctggattatatcaatgactgcaagcacctattatggtaacttacgacctatttctccgtggcgttggctgttttctgttgttgttcctgttctgatcgtctctaatggccttaaaaagaaaagtctagatcacagtggggctctaggagggctagtcgttggatttatcctaaccattgcaaatttcagcttttttacctctttgctgatgtttttcttgtcttcttcgaaactcactaaatggaagggagaagtgaagaagcgtctagattcagaatataaggaaggtgggcaaaggaattgggttcaggtgttctgtaatggagctgtacccacagaactggccctgctgtacatgatagaaaatggccccggggaaatcccagtcgatttttccaagcagtactccgcttcctggatgtgtttgtctctcttggctgcactggcctgctctgctggagacacatgggcttcagaagttggcccagttctgagtaaaagttctccaagactgataacaacctgggagaaagttccagttggtaccaatggaggagttacagtggtgggccttgtctccagtctccttggtggtacctttgtgggcattgcatacttcctcacacagctgatttttgtgaatgatttagacatttctgccccgcagtggccaattattgcatttggtggtttagctggattactaggatcaattgtggactcatacttaggggctacaatgcagtatactgggttggatgaaagcactggcatggtggtcaacagcccaacaaataaggcaaggcacatagcagggaaacccattcttgataacaacgcagtgaatctgttttcttctgttcttattgccctcttgctcccaactgctgcttggggtttttggcccagggggtgaactttatttcatttccacaggttgaaactggtgagtccagctaaatttgcaattccaactttcatcctaagaataataactgtaatggcaaagcggaaatgccagttcctcctgtattccattgagatgggatttcacattttcctctcatcaactcccctgtaatagctagcgtctttctagtgaaagagaagaattcctagaacttatgcatttttttcctgctgaatggaagtcttgagcaatgaagctatattgtccctacatattactatatattgaactgaaagttcttacataatcaatgtcaagttttgtcttattttgttttgtttgtttaaaccagtgtaggaaataaaagtgatgatatttaaaatagttctcagttgaagcagagaaatgccactgtgctagttgcccaaatgttgtatctattttaaatagtttaagctgatgtgtatgggagcctaaacaagtgtagtatcctgaacttctcccattaattgctattcacaattgggaaaagtgtggagattggttcctagtgagttttgtggcctactccacatttgttcttccttcctcagggttagtgatgaaaaaaagtaaatatctttttcatatgtccattagaatgtatgaaaaaaatcattttaactaaaagcaaaagaattttatcttatatctaaaaaatatataacttactatatgtttcagttgctctctgaacaaaaattatcttcaatttaatatgtggaatgtgttttctagctttctttgaattatgtatggcaacctggtttagcactggcatcctgaacagttaagagtcactgggaaattattgtatttctttataaatttactgtcatatcaattgctggaaaatgctatgatttttctattattaccttctaagttgtattctctcttacactgtagcctcaactaaggcaattctgctatgtttgttcttcactatgatttactgtgtgccaaaggagttttgacagggtacagagtattttactaaaagtatttttaaatgtttctcatgtgatttctgtaccttcttcctcctgccccttttgcttttttaaagaaactggggaaggatttatgaatacaccaccaccagagtggataatgcttagaattctttattggtggccctactatggtgatgatctagaactgacttacttcaggacagaagaaaaaacaatcacacccttaacctttaagccagttagatcagggggttgcaacaattgggttaaactttgggtatacattggaagcaccagggcatgtttgctttttttgtttatgtgtttgttttttgagacagagtctcacactgtggcccaggctggactccagcacagtggcatgatctcagctccgcctcctgggttcacgtgattctcatgcctcagcctcccgggtggctgggatcacaggcgtgcaccatcacgcccggctaatttttgtattttcattcgagaccagcctggccaacgtggtgaaacaccgtctctactaaaaatacaaaaaattaggtgtggtggtgcgtgcctgtattcccagccactcgggaggctgaggcaggagaatcgctggaacctgggatgtggaggttgcagtgagccaagattgcaccactgtactccagcctgggcaacagagggagactccatctagactccatctcaaaaaaaaaaaaaaaaaaaaaaaaaaaaaaaaaaaaaaggattattctaagcactagaactacataagaatgtcctaaagcactgtatctaagcacttgaaaagaatgggacttttcggttttagggagataactattagcaaccacacaatatgttatctttatggatgaataacttctggtaatgacacagtgtcttacagctacatcatttataaaatcatgtgtcagttttcacacagcctgcacatcgttctgacatgccctttttttccctggagatttatcctcatgacatacaaggggacaaaaatatttattgggactgtctttgaatttagtagaatcactgtatcattaacagtttggggaagtactgctttgcagtcctttatttgaaaacttaggtctagctgtgttttgcatcaaaatttttgagctattcaaaaactaataggatctgtgtaaaatatttcactcaaaactactaaaaaaaagtctggtccttcggcgtgtgcagaggntcctct

SEQ ID NO: 402580 - DNA, 4148 bp, Homo sapiens
  misc_feature (2631)..(2632): n is a, c, g, or t
  misc_feature (2649)..(2649): n is a, c, g, or t
tttcctttggatcctaaaagaagaaaagaatgggttcgcctggttaggcgcaaaaattttgtgccaggaaaacacacttttctttgttcaaagcactttgaagcctcctgttttgacctaacaggacaaactcgacgacttaaaatggatgctgttccaaccatttttgatttttgtacccatataaagtctatggtaacttacgacctatttctccgtggcgttggctgttttctgttgttgttcctgttctgatcgtctctaatggccttaaaaagaaaagtctagatcacagtggggctctaggagggctagtcgttggatttatcctaaccattgcaaatttcagcttttttacctctttgctgatgtttttcttgtcttcttcgaaactcactaaatggaagggagaagtgaagaagcgtctagattcagaatataaggaaggtgggcaaaggaattgggttcaggtgttctgtaatggagctgtacccacagaactggccctgctgtacatgatagaaaatggccccggggaaatcccagtcgatttttccaagcagtactccgcttcctggatgtgtttgtctctcttggctgcactggcctgctctgctggagacacatgggcttcagaagttggcccagttctgagtaaaagttctccaagactgataacaacctgggagaaagttccagttggtaccaatggaggagttacagtggtgggccttgtctccagtctccttggtggtacctttgtgggcattgcatacttcctcacacagctgatttttgtgaatgatttagacatttctgccccgcagtggccaattattgcatttggtggtttagctggattactaggatcaattgtggactcatacttaggggctacaatgcagtatactgggttggatgaaagcactggcatggtggtcaacagcccaacaaataaggcaaggcacatagcagggaaacccattcttgataacaacgcagtgaatctgttttcttctgttcttattgccctcttgctcccaactgctgcttggggtttttggcccagggggtgaactttatttcatttccacaggttgaaactggtgagtccagctaaatttgcaattccaactttcatcctaagaataataactgtaatggcaaagcggaaatgccagttcctcctgtattccattgagatgggatttcacattttcctctcatcaactcccctgtaatagctagcgtctttctagtgaaagagaagaattcctagaacttatgcatttttttcctgctgaatggaagtcttgagcaatgaagctatattgtccctacatattactatatattgaactgaaagttcttacataatcaatgtcaagttttgtcttattttgttttgtttgtttaaaccagtgtaggaaataaaagtgatgatatttaaaatagttctcagttgaagcagagaaatgccactgtgctagttgcccaaatgttgtatctattttaaatagtttaagctgatgtgtatgggagcctaaacaagtgtagtatcctgaacttctcccattaattgctattcacaattgggaaaagtgtggagattggttcctagtgagttttgtggcctactccacatttgttcttccttcctcagggttagtgatgaaaaaaagtaaatatctttttcatatgtccattagaatgtatgaaaaaaatcattttaactaaaagcaaaagaattttatcttatatctaaaaaatatataacttactatatgtttcagttgctctctgaacaaaaattatcttcaatttaatatgtggaatgtgttttctagctttctttgaattatgtatggcaacctggtttagcactggcatcctgaacagttaagagtcactgggaaattattgtatttctttataaatttactgtcatatcaattgctggaaaatgctatgatttttctattattaccttctaagttgtattctctcttacactgtagcctcaactaaggcaattctgctatgtttgttcttcactatgatttactgtgtgccaaaggagttttgacagggtacagagtattttactaaaagtatttttaaatgtttctcatgtgatttctgtaccttcttcctcctgccccttttgcttttttaaagaaactggggaaggatttatgaatacaccaccaccagagtggataatgcttagaattctttattggtggccctactatggtgatgatctagaactgacttacttcaggacagaagaaaaaacaatcacacccttaacctttaagccagttagatcagggggttgcaacaattgggttaaactttgggtatacattggaagcaccagggcatgtttgctttttttgtttatgtgtttgttttttgagacagagtctcacactgtggcccaggctggactccagcacagtggcatgatctcagctccgcctcctgggttcacgtgattctcatgcctcagcctcccgggtggctgggatcacaggcgtgcaccatcacgcccggctaatttttgtattttcagtagagacagggtttcgccacgttggctaggctggtctcgaactcctgacctcnngtgatctgcccatctcngcctcccaaagatctattacaagatgtgagccactgtgcccagccaccagggcatgtttttaaaaaagtactgatgtctgggtttcacactgcaaaattctgatttatctgatctaaggtacagcctggatattgagactttttaaagctctgactgtacattgaatcatcatgtaaggagtttttaaaacattgttgccagggcccctttctagaccaagttagtcagaatgttggacaatgaggcccatgcatgggtatttttacaaagctctctgggagattctaatgcttaaccaaattgagaagcactgaataagaatatcctgggccgggcgcactggctcatgcctgtaatcccagcattttggaaggccgaggcgggtggatcacttgaggtcaggagttcgagaccagcctggccaacgtggtgaaacaccgtctctactaaaaatacaaaaaattaggtgtggtggtgcgtgcctgtattcccagccactcgggaggctgaggcaggagaatcgctggaacctgggatgtggaggttgcagtgagccaagattgcaccactgtactccagcctgggcaacagagggagactccatctagactccatctcaaaaaaaaaaaaaaaaaaaaaaaaaaaaaaaaaaaaaaggattattctaagcactagaactacataagaatgtcctaaagcactgtatctaagcacttgaaaagaatgggacttttcggttttagggagataactattagcaaccacacaatatgttatctttatggatgaataacttctggtaatgacacagtgtcttacagctacatcatttataaaatcatgtgtcagttttcacacagcctgcacatcgttctgacatgccctttttttccctggagatttatcctcatgacatacaaggggacaaaaatatttattgggactgtctttgaatttagtagaatcactgtatcattaacagtttggggaagtactgctttgcagtcctttatttgaaaacttaggtctagctgtgttttgcatcaaaatttttgagctattcaaaaactaataggatctgtgtaaaatatttcactcaaaactactaaaaaaaagtctgggatggcagctcattatcaaatatactcctatttttgtggtgatttatgaacatccccactaagtataactaaagatcataaagagcctcagatcaagtttggtcaggttttgtcaccaagctttgtaaataaactggttttcatagctttttggagatgagaattgaggataagaaattgtgtctctgtcctttttttttttttttgttaagtcttacatgtattttactgtaacatcttttgaattggatatttaactaattcaacatatttttcctctttgcagaatgggcagttcatgttaaaatcacttttcatggaaagagctctatgtaacagcataataaaactgcctacctagcagcaaaaaaaaaaaa

SEQ ID NO: 402581 - DNA, 4340 bp, Homo sapiens
  misc_feature (2823)..(2824): n is a, c, g, or t
  misc_feature (2841)..(2841): n is a, c, g, or t
cccacagcgggcgaggcgctagaggcgggggcgccgggaggcgcgggctttgctcctggggtctcggccttggccggctggacctgaccctagggcggcttgcgcagctgtcgggacgtgactgcgttcagccgcgtcgggcgtgcttcccagacttgcccaagttcgggtgccctagctgcccctttgcagccgctggcctacccggcccgcgggtgagaaggttgcgacgggaggagctcatatccttattttccatgacagatcttaacgacaatatatgcaaaagatatataaagatgataactaatatagttatactgagcctgatcatttgcatttcgttagctttctggattatatcaatgactgcaagcacctattatggtaacttacgacctatttctccgtggcgttggctgttttctgttgttgttcctgttctgatcgtctctaatggccttaaaaagaaaagtctagatcacagtggggctctaggagggctagtcgttggatttatcctaaccattgcaaatttcagcttttttacctctttgctgatgtttttcttgtcttcttcgaaactcactaaatggaagggagaagtgaagaagcgtctagattcagaatataaggaaggtgggcaaaggaattgggttcaggtgttctgtaatggagctgtacccacagaactggccctgctgtacatgatagaaaatggccccggggaaatcccagtcgatttttccaagcagtactccgcttcctggatgtgtttgtctctcttggctgcactggcctgctctgctggagacacatgggcttcagaagttggcccagttctgagtaaaagttctccaagactgataacaacctgggagaaagttccagttggtaccaatggaggagttacagtggtgggccttgtctccagtctccttggtggtacctttgtgggcattgcatacttcctcacacagctgatttttgtgaatgatttagacatttctgccccgcagtggccaattattgcatttggtggtttagctggattactaggatcaattgtggactcatacttaggggctacaatgcagtatactgggttggatgaaagcactggcatggtggtcaacagcccaacaaataaggcaaggcacatagcagggaaacccattcttgataacaacgcagtgaatctgttttcttctgttcttattgccctcttgctcccaactgctgcttggggtttttggcccagggggtgaactttatttcatttccacaggttgaaactggtgagtccagctaaatttgcaattccaactttcatcctaagaataataactgtaatggcaaagcggaaatgccagttcctcctgtattccattgagatgggatttcacattttcctctcatcaactcccctgtaatagctagcgtctttctagtgaaagagaagaattcctagaacttatgcatttttttcctgctgaatggaagtcttgagcaatgaagctatattgtccctacatattactatatattgaactgaaagttcttacataatcaatgtcaagttttgtcttattttgttttgtttgtttaaaccagtgtaggaaataaaagtgatgatatttaaaatagttctcagttgaagcagagaaatgccactgtgctagttgcccaaatgttgtatctattttaaatagtttaagctgatgtgtatgggagcctaaacaagtgtagtatcctgaacttctcccattaattgctattcacaattgggaaaagtgtggagattggttcctagtgagttttgtggcctactccacatttgttcttccttcctcagggttagtgatgaaaaaaagtaaatatctttttcatatgtccattagaatgtatgaaaaaaatcattttaactaaaagcaaaagaattttatcttatatctaaaaaatatataacttactatatgtttcagttgctctctgaacaaaaattatcttcaatttaatatgtggaatgtgttttctagctttctttgaattatgtatggcaacctggtttagcactggcatcctgaacagttaagagtcactgggaaattattgtatttctttataaatttactgtcatatcaattgctggaaaatgctatgatttttctattattaccttctaagttgtattctctcttacactgtagcctcaactaaggcaattctgctatgtttgttcttcactatgatttactgtgtgccaaaggagttttgacagggtacagagtattttactaaaagtatttttaaatgtttctcatgtgatttctgtaccttcttcctcctgccccttttgcttttttaaagaaactggggaaggatttatgaatacaccaccaccagagtggataatgcttagaattctttattggtggccctactatggtgatgatctagaactgacttacttcaggacagaagaaaaaacaatcacacccttaacctttaagccagttagatcagggggttgcaacaattgggttaaactttgggtatacattggaagcaccagggcatgtttgctttttttgtttatgtgtttgttttttgagacagagtctcacactgtggcccaggctggactccagcacagtggcatgatctcagctccgcctcctgggttcacgtgattctcatgcctcagcctcccgggtggctgggatcacaggcgtgcaccatcacgcccggctaatttttgtattttcagtagagacagggtttcgccacgttggctaggctggtctcgaactcctgacctcnngtgatctgcccatctcngcctcccaaagatctattacaagatgtgagccactgtgcccagccaccagggcatgtttttaaaaaagtactgatgtctgggtttcacactgcaaaattctgatttatctgatctaaggtacagcctggatattgagactttttaaagctctgactgtacattgaatcatcatgtaaggagtttttaaaacattgttgccagggcccctttctagaccaagttagtcagaatgttggacaatgaggcccatgcatgggtatttttacaaagctctctgggagattctaatgcttaaccaaattgagaagcactgaataagaatatcctgggccgggcgcactggctcatgcctgtaatcccagcattttggaaggccgaggcgggtggatcacttgaggtcaggagttcgagaccagcctggccaacgtggtgaaacaccgtctctactaaaaatacaaaaaattaggtgtggtggtgcgtgcctgtattcccagccactcgggaggctgaggcaggagaatcgctggaacctgggatgtggaggttgcagtgagccaagattgcaccactgtactccagcctgggcaacagagggagactccatctagactccatctcaaaaaaaaaaaaaaaaaaaaaaaaaaaaaaaaaaaaaaggattattctaagcactagaactacataagaatgtcctaaagcactgtatctaagcacttgaaaagaatgggacttttcggttttagggagataactattagcaaccacacaatatgttatctttatggatgaataacttctggtaatgacacagtgtcttacagctacatcatttataaaatcatgtgtcagttttcacacagcctgcacatcgttctgacatgccctttttttccctggagatttatcctcatgacatacaaggggacaaaaatatttattgggactgtctttgaatttagtagaatcactgtatcattaacagtttggggaagtactgctttgcagtcctttatttgaaaacttaggtctagctgtgttttgcatcaaaatttttgagctattcaaaaactaataggatctgtgtaaaatatttcactcaaaactactaaaaaaaagtctgggatggcagctcattatcaaatatactcctatttttgtggtgatttatgaacatccccactaagtataactaaagatcataaagagcctcagatcaagtttggtcaggttttgtcaccaagctttgtaaataaactggttttcatagctttttggagatgagaattgaggataagaaattgtgtctctgtcctttttttttttttttgttaagtcttacatgtattttactgtaacatcttttgaattggatatttaactaattcaacatatttttcctctttgcagaatgggcagttcatgttaaaatcacttttcatggaaagagctctatgtaacagcataataaaactgcctacctagcagcaaaaaaaaaaaa

SEQ ID NO: 402582 - DNA, 3971 bp, Homo sapiens
cccacagcgggcgaggcgctagaggcgggggcgccgggaggcgcgggctttgctcctggggtctcggccttggccggctggacctgaccctagggcggcttgcgcagctgtcgggacgtgactgcgttcagccgcgtcgggcgtgcttcccagacttgcccaagttcgggtgccctagctgcccctttgcagccgctggcctacccggcccgcgggtgagaaggttgcgacgggaggtgggtggaactcgccagcgccgggaccgcggattggctgcctcggctttctcttttccccgtgggctccggcgtgaggcgctgaagcggccggcagccggcgaccggccctcaccgtccgccgggttgcgctctgcttttgcggtgaggcgttgaccacgcccatatgaattggagctctccgccagtaggagtttccggaaggagtttgaatttttgtgatttttatgcttgtttggtcggtggaatatgttgggatttatgtttgcctctgaacaagtgtcttgctcacatcgtaaatgactttctctccgaaacgctaaatattctttcccgcaggagctcatatccttattttccatgacagatcttaacgacaatatatgcaaaagatatataaagatgataactaatatagttatactgagcctgatcatttgcatttcgttagctttctggattatatcaatgactgcaagcacctattatggtaacttacgacctatttctccgtggcgttggctgttttctgttgttgttcctgttctgatcgtctctaatggccttaaaaagaaaagtctagatcacagtggggctctaggagggctagtcgttggatttatcctaaccattgcaaatttcagcttttttacctctttgctgatgtttttcttgtcttcttcgaaactcactaaatggaagggagaagtgaagaagcgtctagattcagaatataaggaaggtgggcaaaggaattgggttcaggtgttctgtaatggagctgtacccacagaactggccctgctgtacatgatagaaaatggccccggggaaatcccagtcgatttttccaagcagtactccgcttcctggatgtgtttgtctctcttggctgcactggcctgctctgctggagacacatgggcttcagaagttggcccagttctgagtaaaagttctccaagactgataacaacctgggagaaagttccagttggtaccaatggaggagttacagtggtgggccttgtctccagtctccttggtggtacctttgtgggcattgcatacttcctcacacagctgatttttgtgaatgatttagacatttctgccccgcagtggccaattattgcatttggtggtttagctggattactaggatcaattgtggactcatacttaggggctacaatgcagtatactgggttggatgaaagcactggcatggtggtcaacagcccaacaaataaggcaaggcacatagcagggaaacccattcttgataacaacgcagtgaatctgttttcttctgttcttattgccctcttgctcccaactgctgcttggggtttttggcccagggggtgaactttatttcatttccacaggttgaaactggtgagtccagctaaatttgcaattccaactttcatcctaagaataataactgtaatggcaaagcggaaatgccagttcctcctgtattccattgagatgggatttcacattttcctctcatcaactcccctgtaatagctagcgtctttctagtgaaagagaagaattcctagaacttatgcatttttttcctgctgaatggaagtcttgagcaatgaagctatattgtccctacatattactatatattgaactgaaagttcttacataatcaatgtcaagttttgtcttattttgttttgtttgtttaaaccagtgtaggaaataaaagtgatgatatttaaaatagttctcagttgaagcagagaaatgccactgtgctagttgcccaaatgttgtatctattttaaatagtttaagctgatgtgtatgggagcctaaacaagtgtagtatcctgaacttctcccattaattgctattcacaattgggaaaagtgtggagattggttcctagtgagttttgtggcctactccacatttgttcttccttcctcagggttagtgatgaaaaaaagtaaatatctttttcatatgtccattagaatgtatgaaaaaaatcattttaactaaaagcaaaagaattttatcttatatctaaaaaatatataacttactatatgtttcagttgctctctgaacaaaaattatcttcaatttaatatgtggaatgtgttttctagctttctttgaattatgtatggcaacctggtttagcactggcatcctgaacagttaagagtcactgggaaattattgtatttctttataaatttactgtcatatcaattgctggaaaatgctatgatttttctattattaccttctaagttgtattctctcttacactgtagcctcaactaaggcaattctgctatgtttgttcttcactatgatttactgtgtgccaaaggagttttgacagggtacagagtattttactaaaagtatttttaaatgtttctcatgtgatttctgtaccttcttcctcctgccccttttgcttttttaaagaaactggggaaggatttatgaatacaccaccaccagagtggataatgcttagaattctttattggtggccctactatggtgatgatctagaactgacttacttcaggacagaagaaaaaacaatcacacccttaacctttaagccagttagatcagggggttgcaacaattgggttaaactttgggtatacattggaagcaccgtctctactaaaaatacaaaaaattaggtgtggtggtgcgtgcctgtattcccagccactcgggaggctgaggcaggagaatcgctggaacctgggatgtggaggttgcagtgagccaagattgcaccactgtactccagcctgggcaacagagggagactccatctagactccatctcaaaaaaaaaaaaaaaaaaaaaaaaaaaaaaaaaaaaaaggattattctaagcactagaactacataagaatgtcctaaagcactgtatctaagcacttgaaaagaatgggacttttcggttttagggagataactattagcaaccacacaatatgttatctttatggatgaataacttctggtaatgacacagtgtcttacagctacatcatttataaaatcatgtgtcagttttcacacagcctgcacatcgttctgacatgccctttttttccctggagatttatcctcatgacatacaaggggacaaaaatatttattgggactgtctttgaatttagtagaatcactgtatcattaacagtttggggaagtactgctttgcagtcctttatttgaaaacttaggtctagctgtgttttgcatcaaaatttttgagctattcaaaaactaataggatctgtgtaaaatatttcactcaaaactactaaaaaaaagtctgggatggcagctcattatcaaatatactcctatttttgtggtgatttatgaacatccccactaagtataactaaagatcataaagagcctcagatcaagtttggtcaggttttgtcaccaagctttgtaaataaactggttttcatagctttttggagatgagaattgaggataagaaattgtgtctctgtcctttttttttttttttgttaagtcttacatgtattttactgtaacatcttttgaattggatatttaactaattcaacatatttttcctctttgcagaatgggcagttcatgttaaaatcacttttcatggaaagagctctatgtaacagcataataaaactgcctacctagcagcaaaaaaaaaaaa

SEQ ID NO: 402583 - DNA, 1581 bp, Homo sapiens
cccacagcgggcgaggcgctagaggcgggggcgccgggaggcgcgggctttgctcctggggtctcggccttggccggctggacctgaccctagggcggcttgcgcagctgtcgggacgtgactgcgttcagccgcgtcgggcgtgcttcccagacttgcccaagttcgggtgccctagctgcccctttgcagccgctggcctacccggcccgcgggtgagaaggttgcgacgggaggtgggtggaactcgccagcgccgggaccgcggattggctgcctcggctttctcttttccccgtgggctccggcgtgaggcgctgaagcggccggcagccggcgaccggccctcaccgtccgccgggttgcgctctgcttttgcggtgaggcgttgaccacgcccatatgaattggagctctccgccagtaggagtttccggaaggagtttgaatttttgtgatttttatgcttgtttggtcggtggaatatgttgggatttatgtttgcctctgaacaagtgtcttgctcacatcgtaaatgactttctctccgaaacgctaaatattctttcccgcaggagctcatatccttattttccatgacagatcttaacgacaatatatgcaaaagatatataaagatgataactaatatagttatactgagcctgatcatttgcatttcgttagctttctggattatatcaatgactgcaagcacctattatggtaacttacgacctatttctccgtggcgttggctgttttctgttgttgttcctgttctgatcgtctctaatggccttaaaaagaaaagtctagatcacagtggggctctaggagggctagtcgttggatttatcctaaccattgcaaatttcagcttttttacctctttgctgatgtttttcttgtcttcttcgaaactcactaaatggaagggagaagtgaagaagcgtctagattcagaatataaggaaggtgggcaaaggaattgggttcaggtgttctgtaatggagctgtacccacagaactggccctgctgtacatgatagaaaatggccccggggaaatcccagtcgatttttccaagcagtactccgcttcctggatgtgtttgtctctcttggctgcactggcctgctctgctggagacacatgggcttcagaagttggcccagttctgagtaaaagttctccaagactgataacaacctgggagaaagttccagttggtaccaatggaggagttacagtggtgggccttgtctccagtctccttggtggtacctttgtgggcattgcatacttcctcacacagctgatttttgtgaatgatttagacatttctgccccgcagtggccaattattgcatttggtggtttagctggattactaggatcaattgtggactcatacttaggggctacaatgcagtatactgggttggatgaaagcactggcatggtggtcaacagcccaacaaataagaatgggcagttcatgttaaaatcacttttcatggaaagagctctatgtaacagcataataaaactgcctacctagcagcaaaaaaaaaaaa

SEQ ID NO: 402584 - DNA, 4201 bp, Homo sapiens
cccacagcgggcgaggcgctagaggcgggggcgccgggaggcgcgggctttgctcctggggtctcggccttggccggctggacctgaccctagggcggcttgcgcagctgtcgggacgtgactgcgttcagccgcgtcgggcgtgcttcccagacttgcccaagttcgggtgccctagctgcccctttgcagccgctggcctacccggcccgcgggtgagaaggttgcgacgggaggtgggtggaactcgccagcgccgggaccgcggattggctgcctcggctttctcttttccccgtgggctccggcgtgaggcgctgaagcggccggcagccggcgaccggccctcaccgtccgccgggttgcgctctgcttttgcggtgaggcgttgaccacgcccatatgaattggagctctccgccagtaggagtttccggaaggagtttgaatttttgtgatttttatgcttgtttggtcggtggaatatgttgggatttatgtttgcctctgaacaagtgtcttgctcacatcgtaaatgactttctctccgaaacgctaaatattctttcccgcaggagctcatatccttattttccatgacagatcttaacgacaatatatgcaaaagatatataaagatgataactaatatagttatactgagcctgatcatttgcatttcgttagctttctggattatatcaatgactgcaagcacctattatggtaacttacgacctatttctccgtggcgttggctgttttctgttgttgttcctgttctgatcgtctctaatggccttaaaaagaaaagtctagatcacagtggggctctaggagggctagtcgttggatttatcctaaccattgcaaatttcagcttttttacctctttgctgatgtttttcttgtcttcttcgaaactcactaaatggaagggagaagtgaagaagcgtctagattcagaatataaggaaggtgggcaaaggaattgggttcaggtgttctgtaatggagctgtacccacagaactggccctgctgtacatgatagaaaatggccccggggaaatcccagtcgatttttccaagcagtactccgcttcctggatgtgtttgtctctcttggctgcactggcctgctctgctggagacacatgggcttcagaagttggcccagttctgagtaaaagttctccaagactgataacaacctgggagaaagttccagttggtaccaatggaggagttacagtggtgggccttgtctccagtctccttggtggtacctttgtgggcattgcatacttcctcacacagctgatttttgtgaatgatttagacatttctgccccgcagtggccaattattgcatttggtggtttagctggattactaggatcaattgtggactcatacttaggggctacaatgcagtatactgggttggatgaaagcactggcatggtggtcaacagcccaacaaataaggcaaggcacatagcagggaaacccattcttgataacaacgcagtgaatctgttttcttctgttcttattgccctcttgctcccaactgctgcttggggtttttggcccagggggtgaactttatttcatttccacaggttgaaactggtgagtccagctaaatttgcaattccaactttcatcctaagaataataactgtaatggcaaagcggaaatgccagttcctcctgtattccattgagatgggatttcacattttcctctcatcaactcccctgtaatagctagcgtctttctagtgaaagagaagaattcctagaacttatgcatttttttcctgctgaatggaagtcttgagcaatgaagctatattgtccctacatattactatatattgaactgaaagttcttacataatcaatgtcaagttttgtcttattttgttttgtttgtttaaaccagtgtaggaaataaaagtgatgatatttaaaatagttctcagttgaagcagagaaatgccactgtgctagttgcccaaatgttgtatctattttaaatagtttaagctgatgtgtatgggagcctaaacaagtgtagtatcctgaacttctcccattaattgctattcacaattgggaaaagtgtggagattggttcctagtgagttttgtggcctactccacatttgttcttccttcctcagggttagtgatgaaaaaaagtaaatatctttttcatatgtccattagaatgtatgaaaaaaatcattttaactaaaagcaaaagaattttatcttatatctaaaaaatatataacttactatatgtttcagttgctctctgaacaaaaattatcttcaatttaatatgtggaatgtgttttctagctttctttgaattatgtatggcaacctggtttagcactggcatcctgaacagttaagagtcactgggaaattattgtatttctttataaatttactgtcatatcaattgctggaaaatgctatgatttttctattattaccttctaagttgtattctctcttacactgtagcctcaactaaggcaattctgctatgtttgttcttcactatgatttactgtgtgccaaaggagttttgacagggtacagagtattttactaaaagtatttttaaatgtttctcatgtgatttctgtaccttcttcctcctgccccttttgcttttttaaagaaactggggaaggatttatgaatacaccaccaccagagtggataatgcttagaattctttattggtggccctactatggtgatgatctagaactgacttacttcaggacagaagaaaaaacaatcacacccttaacctttaagccagttagatcagggggttgcaacaattgggttaaactttgggtatacattggaagcaccagggcatgtttgctttttttgtttatgtgtttgttttttgagacagagtctcacactgtggcccaggctggactccagcacagtggcatgatctcagctccgcctcctgggttcacgtgattctcatgcctcagcctcccgggtggctgggatcacaggcgtgcaccatcacgcccggctaatttttgtattttcattcgagaccagcctggccaacgtggtgaaacaccgtctctactaaaaatacaaaaaattaggtgtggtggtgcgtgcctgtattcccagccactcgggaggctgaggcaggagaatcgctggaacctgggatgtggaggttgcagtgagccaagattgcaccactgtactccagcctgggcaacagagggagactccatctagactccatctcaaaaaaaaaaaaaaaaaaaaaaaaaaaaaaaaaaaaaaggattattctaagcactagaactacataagaatgtcctaaagcactgtatctaagcacttgaaaagaatgggacttttcggttttagggagataactattagcaaccacacaatatgttatctttatggatgaataacttctggtaatgacacagtgtcttacagctacatcatttataaaatcatgtgtcagttttcacacagcctgcacatcgttctgacatgccctttttttccctggagatttatcctcatgacatacaaggggacaaaaatatttattgggactgtctttgaatttagtagaatcactgtatcattaacagtttggggaagtactgctttgcagtcctttatttgaaaacttaggtctagctgtgttttgcatcaaaatttttgagctattcaaaaactaataggatctgtgtaaaatatttcactcaaaactactaaaaaaaagtctgggatggcagctcattatcaaatatactcctatttttgtggtgatttatgaacatccccactaagtataactaaagatcataaagagcctcagatcaagtttggtcaggttttgtcaccaagctttgtaaataaactggttttcatagctttttggagatgagaattgaggataagaaattgtgtctctgtcctttttttttttttttgttaagtcttacatgtattttactgtaacatcttttgaattggatatttaactaattcaacatatttttcctctttgcagaatgggcagttcatgttaaaatcacttttcatggaaagagctctatgtaacagcataataaaactgcctacctagcagcaaaaaaaaaaaa

SEQ ID NO: 402585 - DNA, 4679 bp, Homo sapiens
  misc_feature (3162)..(3163): n is a, c, g, or t
  misc_feature (3180)..(3180): n is a, c, g, or t
cccacagcgggcgaggcgctagaggcgggggcgccgggaggcgcgggctttgctcctggggtctcggccttggccggctggacctgaccctagggcggcttgcgcagctgtcgggacgtgactgcgttcagccgcgtcgggcgtgcttcccagacttgcccaagttcgggtgccctagctgcccctttgcagccgctggcctacccggcccgcgggtgagaaggttgcgacgggaggtgggtggaactcgccagcgccgggaccgcggattggctgcctcggctttctcttttccccgtgggctccggcgtgaggcgctgaagcggccggcagccggcgaccggccctcaccgtccgccgggttgcgctctgcttttgcggtgaggcgttgaccacgcccatatgaattggagctctccgccagtaggagtttccggaaggagtttgaatttttgtgatttttatgcttgtttggtcggtggaatatgttgggatttatgtttgcctctgaacaagtgtcttgctcacatcgtaaatgactttctctccgaaacgctaaatattctttcccgcaggagctcatatccttattttccatgacagatcttaacgacaatatatgcaaaagatatataaagatgataactaatatagttatactgagcctgatcatttgcatttcgttagctttctggattatatcaatgactgcaagcacctattatggtaacttacgacctatttctccgtggcgttggctgttttctgttgttgttcctgttctgatcgtctctaatggccttaaaaagaaaagtctagatcacagtggggctctaggagggctagtcgttggatttatcctaaccattgcaaatttcagcttttttacctctttgctgatgtttttcttgtcttcttcgaaactcactaaatggaagggagaagtgaagaagcgtctagattcagaatataaggaaggtgggcaaaggaattgggttcaggtgttctgtaatggagctgtacccacagaactggccctgctgtacatgatagaaaatggccccggggaaatcccagtcgatttttccaagcagtactccgcttcctggatgtgtttgtctctcttggctgcactggcctgctctgctggagacacatgggcttcagaagttggcccagttctgagtaaaagttctccaagactgataacaacctgggagaaagttccagttggtaccaatggaggagttacagtggtgggccttgtctccagtctccttggtggtacctttgtgggcattgcatacttcctcacacagctgatttttgtgaatgatttagacatttctgccccgcagtggccaattattgcatttggtggtttagctggattactaggatcaattgtggactcatacttaggggctacaatgcagtatactgggttggatgaaagcactggcatggtggtcaacagcccaacaaataaggcaaggcacatagcagggaaacccattcttgataacaacgcagtgaatctgttttcttctgttcttattgccctcttgctcccaactgctgcttggggtttttggcccagggggtgaactttatttcatttccacaggttgaaactggtgagtccagctaaatttgcaattccaactttcatcctaagaataataactgtaatggcaaagcggaaatgccagttcctcctgtattccattgagatgggatttcacattttcctctcatcaactcccctgtaatagctagcgtctttctagtgaaagagaagaattcctagaacttatgcatttttttcctgctgaatggaagtcttgagcaatgaagctatattgtccctacatattactatatattgaactgaaagttcttacataatcaatgtcaagttttgtcttattttgttttgtttgtttaaaccagtgtaggaaataaaagtgatgatatttaaaatagttctcagttgaagcagagaaatgccactgtgctagttgcccaaatgttgtatctattttaaatagtttaagctgatgtgtatgggagcctaaacaagtgtagtatcctgaacttctcccattaattgctattcacaattgggaaaagtgtggagattggttcctagtgagttttgtggcctactccacatttgttcttccttcctcagggttagtgatgaaaaaaagtaaatatctttttcatatgtccattagaatgtatgaaaaaaatcattttaactaaaagcaaaagaattttatcttatatctaaaaaatatataacttactatatgtttcagttgctctctgaacaaaaattatcttcaatttaatatgtggaatgtgttttctagctttctttgaattatgtatggcaacctggtttagcactggcatcctgaacagttaagagtcactgggaaattattgtatttctttataaatttactgtcatatcaattgctggaaaatgctatgatttttctattattaccttctaagttgtattctctcttacactgtagcctcaactaaggcaattctgctatgtttgttcttcactatgatttactgtgtgccaaaggagttttgacagggtacagagtattttactaaaagtatttttaaatgtttctcatgtgatttctgtaccttcttcctcctgccccttttgcttttttaaagaaactggggaaggatttatgaatacaccaccaccagagtggataatgcttagaattctttattggtggccctactatggtgatgatctagaactgacttacttcaggacagaagaaaaaacaatcacacccttaacctttaagccagttagatcagggggttgcaacaattgggttaaactttgggtatacattggaagcaccagggcatgtttgctttttttgtttatgtgtttgttttttgagacagagtctcacactgtggcccaggctggactccagcacagtggcatgatctcagctccgcctcctgggttcacgtgattctcatgcctcagcctcccgggtggctgggatcacaggcgtgcaccatcacgcccggctaatttttgtattttcagtagagacagggtttcgccacgttggctaggctggtctcgaactcctgacctcnngtgatctgcccatctcngcctcccaaagatctattacaagatgtgagccactgtgcccagccaccagggcatgtttttaaaaaagtactgatgtctgggtttcacactgcaaaattctgatttatctgatctaaggtacagcctggatattgagactttttaaagctctgactgtacattgaatcatcatgtaaggagtttttaaaacattgttgccagggcccctttctagaccaagttagtcagaatgttggacaatgaggcccatgcatgggtatttttacaaagctctctgggagattctaatgcttaaccaaattgagaagcactgaataagaatatcctgggccgggcgcactggctcatgcctgtaatcccagcattttggaaggccgaggcgggtggatcacttgaggtcaggagttcgagaccagcctggccaacgtggtgaaacaccgtctctactaaaaatacaaaaaattaggtgtggtggtgcgtgcctgtattcccagccactcgggaggctgaggcaggagaatcgctggaacctgggatgtggaggttgcagtgagccaagattgcaccactgtactccagcctgggcaacagagggagactccatctagactccatctcaaaaaaaaaaaaaaaaaaaaaaaaaaaaaaaaaaaaaaggattattctaagcactagaactacataagaatgtcctaaagcactgtatctaagcacttgaaaagaatgggacttttcggttttagggagataactattagcaaccacacaatatgttatctttatggatgaataacttctggtaatgacacagtgtcttacagctacatcatttataaaatcatgtgtcagttttcacacagcctgcacatcgttctgacatgccctttttttccctggagatttatcctcatgacatacaaggggacaaaaatatttattgggactgtctttgaatttagtagaatcactgtatcattaacagtttggggaagtactgctttgcagtcctttatttgaaaacttaggtctagctgtgttttgcatcaaaatttttgagctattcaaaaactaataggatctgtgtaaaatatttcactcaaaactactaaaaaaaagtctgggatggcagctcattatcaaatatactcctatttttgtggtgatttatgaacatccccactaagtataactaaagatcataaagagcctcagatcaagtttggtcaggttttgtcaccaagctttgtaaataaactggttttcatagctttttggagatgagaattgaggataagaaattgtgtctctgtcctttttttttttttttgttaagtcttacatgtattttactgtaacatcttttgaattggatatttaactaattcaacatatttttcctctttgcagaatgggcagttcatgttaaaatcacttttcatggaaagagctctatgtaacagcataataaaactgcctacctagcagcaaaaaaaaaaaa

SEQ ID NO: 402586 - DNA, 2183 bp, Homo sapiens
cccacagcgggcgaggcgctagaggcgggggcgccgggaggcgcgggctttgctcctggggtctcggccttggccggctggacctgaccctagggcggcttgcgcagctgtcgggacgtgactgcgttcagccgcgtcgggcgtgcttcccagacttgcccaagttcgggtgccctagctgcccctttgcagccgctggcctacccggcccgcgggtgagaaggttgcgacgggaggtgggtggaactcgccagcgccgggaccgcggattggctgcctcggctttctcttttccccgtgggctccggcgtgaggcgctgaagcggccggcagccggcgaccggccctcaccgtccgccgggttgcgctctgcttttgcggtgaggcgttgaccacgcccatatgaattggagctctccgccagtaggagtttccggaaggagtttgaatttttgtgatttttatgcttgtttggtcggtggaatatgttgggatttatgtttgcctctgaacaagtgtcttgctcacatcgtaaatgactttctctccgaaacgctaaatattctttcccgcaggagctcatatccttattttccatgacagatcttaacgacaatatatgcaaaagatatataaagatgataactaatatagttatactgagcctgatcatttgcatttcgttagctttctggattatatcaatgactgcaagcacctattatggtaacttacgacctatttctccgtggcgttggctgttttctgttgttgttcctgttctgatcgtctctaatggccttaaaaagaaaagtctagatcacagtggggctctaggagggctagtcgttggatttatcctaaccattgcaaatttcagcttttttacctctttgctgatgtttttcttgtcttcttcgaaactcactaaatggaagggagaagtgaagaagcgtctagattcagaatataaggaaggtgggcaaaggaattgggttcaggtgttctgtaatggagctgtacccacagaactggccctgctgtacatgatagaaaatggccccggggaaatcccagtcgatttttccaagcagtactccgcttcctggatgtgtttgtctctcttggctgcactggcctgctctgctggagacacatgggcttcagaagttggcccagttctgagtaaaagttctccaagactgataacaacctgggagaaagttccagttggtaccaatggaggagttacagtggtgggccttgtctccagtctccttggtggtacctttgtgggcattgcatacttcctcacacagctgatttttgtgaatgatttagacatttctgccccgcagtggccaattattgcatttggtggtttagctggattactaggatcaattgtggactcatacttaggggctacaatgcagtatactggtaagaacattccttcattcttgcaacttattggtatgttaaagaaatagggaaaagaaagaaaaaaatgttaacaatgaaaacaaatccaaagacacagggtgttgagggactagaaatgatagggcaaagtctctttcacaattttggttttcttattcttttgtattaaattaattgaaagagaattagtcccgcgcagcaatgattagaagccatgtggggaagatacaatagtgcagagaacagacgtttttgtgtgagccattacctaatcccagaaaagcaagacgtttgggatcagatcattttaatacaattccttccattcattttcctattccatttgaggagtaattgtacaaatctgactatacacacgacctactttcttactgtggtatcatgcttgctattcttgcccctgagttttttgcttcattaagatatatggtcgatgtctgggcacggtggctcacatctataatcccagcactttgggaggccaaggggggcagatcactggaggtcaggagttcgagactagcctggccaacatggtgaaaccccatctctactaaaaatacaaaaattatctggtgtagtggcgcctgcctataatcccagctacttgggaggctgaggcaggagaattgcatgaacctgggaggcggagattgcagtgagccgagatcatgccactgcactatagcctgggcaacagagcaagactccatctc

SEQ ID NO: 402587 - DNA, 2657 bp, Homo sapiens
cccacagcgggcgaggcgctagaggcgggggcgccgggaggcgcgggctttgctcctggggtctcggccttggccggctggacctgaccctagggcggcttgcgcagctgtcgggacgtgactgcgttcagccgcgtcgggcgtgcttcccagacttgcccaagttcgggtgccctagctgcccctttgcagccgctggcctacccggcccgcgggtgagaaggttgcgacgggaggtgggtggaactcgccagcgccgggaccgcggattggctgcctcggctttctcttttccccgtgggctccggcgtgaggcgctgaagcggccggcagccggcgaccggccctcaccgtccgccgggttgcgctctgcttttgcggtgaggcgttgaccacgcccatatgaattggagctctccgccagtaggagtttccggaaggagtttgaatttttgtgatttttatgcttgtttggtcggtggaatatgttgggatttatgtttgcctctgaacaagtgtcttgctcacatcgtaaatgactttctctccgaaacgctaaatattctttcccgcaggagctcatatccttattttccatgacagatcttaacgacaatatatgcaaaagatatataaagatgataactaatatagttatactgagcctgatcatttgcatttcgttagctttctggattatatcaatgactgcaagcacctattatggtaacttacgacctatttctccgtggcgttggctgttttctgttgttgttcctgttctgatcgtctctaatggccttaaaaagaaaagtctagatcacagtggggctctaggagggctagtcgttggatttatcctaaccattgcaaatttcagcttttttacctctttgctgatgtttttcttgtcttcttcgaaactcactaaatggaagggagaagtgaagaagcgtctagattcagaatataaggaaggtgggcaaaggaattgggttcaggtgttctgtaatggagctgtacccacagaactggccctgctgtacatgatagaaaatggccccggggaaatcccagtcgatttttccaagcagtactccgcttcctggatgtgtttgtctctcttggctgcactggcctgctctgctggagacacatgggcttcagaagttggcccagttctgagtaaaagttctccaagactgataacaacctgggagaaagttccagttggtaccaatggaggagttacagtggtgggccttgtctccagtctccttggtggtacctttgtgggcattgcatacttcctcacacagctgatttttgtgaatgatttagacatttctgccccgcagtggccaattattgcatttggtggtttagctggattactaggatcaattgtggactcatacttaggggctacaatgcagtatactgggttggatgaaagcactggcatggtggtcaacagcccaacaaataaggcaaggcacatagcagggaaacccattcttgataacaacgcagtgaatctgttttcttctgttcttattgccctcttgctcccaactgctgcttggggtttttggcccagggggtgaactttatttcatttccacaggttgaaactggtgagtccagctaaatttgcaattccaactttcatcctaagaataataactgtaatggcaaagcggaaatgccagttcctcctgtattccattgagatgggatttcacattttcctctcatcaactcccctgtaatagctagcgtctttctagtgaaagagaagaattcctagaacttatgcatttttttcctgctgaatggaagtcttgagcaatgaagctatattgtccctacatattactatatattgaactgaaagttcttacataatcaatgtcaagttttgtcttattttgttttgtttgtttaaaccagtgtaggaaataaaagtgatgatatttaaaatagttctcagttgaagcagagaaatgccactgtgctagttgcccaaatgttgtatctattttaaatagtttaagctgatgtgtatgggagcctaaacaagtgtagtatcctgaacttctcccattaattgctattcacaattgggaaaagtgtggagattggttcctagtgagttttgtggcctactccacatttgttcttccttcctcagggttagtgatgaaaaaaagtaaatatctttttcatatgtccattagaatgtatgaaaaaaatcattttaactaaaagcaaaagaattttatcttatatctaaaaaatatataacttactatatgtttcagttgctctctgaacaaaaattatcttcaatttaatatgtggaatgtgttttctagctttctttgaattatgtatggcaacctggtttagcactggcatcctgaacagttaagagtcactgggaaattattgtatttctttataaatttactgtcatatcaattgctggaaaatgctatgatttttctattattaccttctaagttgtattctctcttacactgtagcctcaactaaggcaattctgctatgtttgttcttcactatgatttactgtgtgccaaaggagttttgacagggtacagagtattttactaaaagtatttttaaatgtt

SEQ ID NO: 402588 - DNA, 1728 bp, Homo sapiens
cccacagcgggcgaggcgctagaggcgggggcgccgggaggcgcgggctttgctcctggggtctcggccttggccggctggacctgaccctagggcggcttgcgcagctgtcgggacgtgactgcgttcagccgcgtcgggcgtgcttcccagacttgcccaagttcgggtgccctagctgcccctttgcagccgctggcctacccggcccgcgggtgagaaggttgcgacgggaggtgggtggaactcgccagcgccgggaccgcggattggctgcctcggctttctcttttccccgtgggctccggcgtgaggcgctgaagcggccggcagccggcgaccggccctcaccgtccgccgggttgcgctctgcttttgcggtgaggcgttgaccacgcccatatgaattggagctctccgccagtaggagtttccggaaggagtttgaatttttgtgatttttatgcttgtttggtcggtggaatatgttgggatttatgtttgcctctgaacaagtgtcttgctcacatcgtaaatgactttctctccgaaacgctaaatattctttcccgcaggagctcatatccttattttccatgacagatcttaacgacaatatatgcaaaagatatataaagatgataactaatatagttatactgagcctgatcatttgcatttcgttagctttctggattatatcaatgactgcaagcacctattatggtaacttacgacctatttctccgtggcgttggctgttttctgttgttgttcctgttctgatcgtctctaatggccttaaaaagaaaagtctagatcacagtggggctctaggagggctagtcgttggatttatcctaaccattgcaaatttcagcttttttacctctttgctgatgtttttcttgtcttcttcgaaactcactaaatggaagggagaagtgaagaagcgtctagattcagaatataaggaaggtgggcaaaggaattgggttcaggtgttctgtaatggagctgtacccacagaactggccctgctgtacatgatagaaaatggccccggggaaatcccagtcgatttttccaagcagtactccgcttcctggatgtgtttgtctctcttggctgcactggcctgctctgctggagacacatgggcttcagaagttggcccagttctgagtaaaagttctccaagactgataacaacctgggagaaagttccagttggtaccaatggaggagttacagtggtgggccttgtctccagtctccttggtggtacctttgtgggcattgcatacttcctcacacagctgatttttgtgaatgatttagacatttctgccccgcagtggccaattattgcatttggtggtttagctggattactaggatcaattgtggactcatacttaggggctacaatgcagtatactgggttggatgaaagcactggcatggtggtcaacagcccaacaaataaggcaaggcacatagcagggaaacccattcttgataacaacgcagtgaatctgttttcttctgttcttattgccctcttgctcccaactgctgcttggggtttttggcccagggggtgaactttatttcatttccacaggttgaaactgaatgggcagttcatgttaaaatcacttttcatggaaagagctctatgtaacagcataataaaactgcctacctagcagcaaaaaaaaaaaa

SEQ ID NO: 402589 - DNA, 399 bp, Homo sapiens
gcaaggccaagattccctgagtgacgtctcatagctcattggatttttcttcaaggcctttatccacccatataagtgtgggatatgggtgaaagaacaagtttgcagaaaagatacagtgaattatggaccatgagttcgggaaagaagggtaggactgcgtcgctggctgcagtattctggaggctggtctttgggctgtgatcactcttcattctaaaggagacattttcagaacatcagggatatatcctgccctgggatgctgatgaatggccgctttaagactcactgagacactttggtgcacggctcagagtgctctgaaggagtagttttaattcagcagttttgatgtggaagcaaaaatatataaaatggcattatattgctgggtaa

SEQ ID NO: 402590 - DNA, 869 bp, Homo sapiens
gcacgagctcgtgccgattcggcacgatcccagacaaggagagcggaggaggaagtcatgggaacgcagcctccagttgtagcaggtttcactattcctatgctggggtacacagtgagagtactcacttttcacttgtcttgctcttagattgggccatggctttcatcctgtgtcccctgacctgtccaggtgagtgtgagggcagcactgggaagctggagtgctgcttgtgcctcccttcccagtgggctgtgttgactgctgctccccacccctaccgatggtcccaggaagcagggagagttggggaaggcaagattggaaagacaggaagaccaaggcctcggcagaactctctgtcttctctccacttctggtcccctgtggtgatgtgcctgtaatctttttctccacccaaaccccttcccacgacaaaaacaagactgcctccctctcttccgggagctggtgacagccttgggcctttcagtcccaaagcggccgatgggagtctccctccgactccagatatgaacagggcccaggcctggagcgtttgctgtgccaggaggcggcagctcttctgggcagagcctgtccccgccttccctcactcttcctcatcctgcttctcttttcctcgcagatgataaaaggaatctggcattctacacctggaccatttgattgttttattttggaattggtgtatatcatgaagccttgctgaactaagttttgtgtgtatatatttaaaaaaaaaatcagtgtttaaataaagacctatgtacttaatcctttaactctgcggatagcatttggtaggtagtgattaactgtgaataataaatacacaatgaattctt

SEQ ID NO: 402591 - DNA, 249 bp, Homo sapiens
gcctactcattcaaccaatagccctggcagtgataaaaggaatctggcattctacacctggaccatttgattgttttattttggaattggtgtatatcatgaagccttgctgaactaagttttgtgtgtatatatttaaaaaaaaaatcagtgtttaaataaagacctatgtacttaatcctttaactctgcggatagcatttggtaggtagtgattaactgtgaataataaatacacaatgaattctt

SEQ ID NO: 402592 - DNA, 356 bp, Homo sapiens
tcaattctttgaatgagctggtggattatcacagatctacatctgtctccagaaaccagcagatattcctgcgggacatagaacaggtgccacagattgggccatggctttcatcctgtgtcccctgacctgtccagtgataaaaggaatctggcattctacacctggaccatttgattgttttattttggaattggtgtatatcatgaagccttgctgaactaagttttgtgtgtatatatttaaaaaaaaaatcagtgtttaaataaagacctatgtacttaatcctttaactctgcggatagcatttggtaggtagtgattaactgtgaataataaatacacaatgaattctt

SEQ ID NO: 402593 - DNA, 1481 bp, Homo sapiens
caggagaatcgcttgaacctgggaagtggaggttgagtgagccgggaccgtgccattgtactccagcctgggtgacagagcgagattccgtctcaaaaaaaaaaaaaaaaaagcccacctgaaagcctgtctctttccactttgttggcccttccagtgggattatcgagcatgttgttttttcatagtgcctttttccttatttcaagggttgcttctgagtggtgttttttttttttttttaatttgttttgttttaaaataagttaaagacagtccagagcttttcagccaatttgtctcctactctgtgtaaatatttttccctccgggcaggggagccagggtagagcaaaggagacaagcaggagtggaaggtgaggcgttctcctgcttgtactaagccaggaggctttaagctccagctttaagggttgtgagccccttgggggttcagggaactgcttgcccagggtgcagtgtgagtgtgatgggccaccggggcaagagggaaggtgaccgcccagctctcccacatcccactggatctggcttacaggggggtcggaagcctgtcctcaccgtctcgggggttgtggcccccgccccctccctatatgcacccctggaaccagcaagtcccagacaaggagagcggaggaggaagtcatgggaacgcagcctccagttgtagcaggtttcactattcctatgctggggtacacagtgagagtactcacttttcacttgtcttgctcttagattgggccatggctttcatcctgtgtcccctgacctgtccaggtgagtgtgagggcagcactgggaagctggagtgctgcttgtgcctcccttcccagtgggctgtgttgactgctgctccccacccctaccgatggtcccaggaagcagggagagttggggaaggcaagattggaaagacaggaagaccaaggcctcggcagaactctctgtcttctctccacttctggtcccctgtggtgatgtgcctgtaatctttttctccacccaaaccccttcccacgacaaaaacaagactgcctccctctcttccgggagctggtgacagccttgggcctttcagtcccaaagcggccgatgggagtctccctccgactccagatatgaacagggcccaggcctggagcgtttgctgtgccaggaggcggcagctcttctgggcagagcctgtccccgccttccctcactcttcctcatcctgcttctcttttcctcgcagatgataaaaggaatctggcattctacacctggaccatttgattgttttattttggaattggtgtatatcatgaagccttgctgaactaagttttgtgtgtatatatttaaaaaaaaaatcagtgtttaaataaagacctatgtacttaatcctttaactctgcggatagcatttggtaggtagtgattaactgtgaataataaatacacaatgaattctt

SEQ ID NO: 402594 - DNA, 1506 bp, Homo sapiens
caggagaatcgcttgaacctgggaagtggaggttgagtgagccgggaccgtgccattgtactccagcctgggtgacagagcgagattccgtctcaaaaaaaaaaaaaaaaaagcccacctgaaagcctgtctctttccactttgttggcccttccagtgggattatcgagcatgttgttttttcatagtgcctttttccttatttcaagggttgcttctgagtggtgttttttttttttttttaatttgttttgttttaaaataagttaaagacagtccagagcttttcagccaatttgtctcctactctgtgtaaatatttttccctccgggcaggggagccagggtagagcaaaggagacaagcaggagtggaaggtgaggcgttctcctgcttgtactaagccaggaggctttaagctccagctttaagggttgtgagccccttgggggttcagggaactgcttgcccagggtgcagtgtgagtgtgatgggccaccggggcaagagggaaggtgaccgcccagctctcccacatcccactggatctggcttacaggggggtcggaagcctgtcctcaccgtctcgggggttgtggcccccgccccctccctatatgcacccctggaaccagcaagtcccagacaaggagagcggaggaggaagtcatgggaacgcagcctccagttgtagcaggtttcactattcctatgctggggtacacagtgagagtactcacttttcacttgtcttgctcttagattgggccatggctttcatcctgtgtcccctgacctgtccaggtgagtgtgagggcagcactgggaagctggagtgctgcttgtgcctcccttcccagtgggctgtgttgactgctgctccccacccctaccgatggtcccaggaagcagggagagttggggaaggcaagattggaaagacaggaagaccaaggcctcggcagaactctctgtcttctctccacttctggtcccctgtggtgatgtgcctgtaatctttttctccacccaaaccccttcccacgacaaaaacaagactgcctccctctcttccgggagctggtgacagccttgggcctttcagtcccaaagcggccgatgggagtctccctccgactccagatatgaacagggcccaggcctggagcgtttgctgtgccaggaggcggcagctcttctgggcagagcctgtccccgccttccctcactcttcctcatcctgcttctcttttcctcgcagatgataaaaggaatctggcattctacacctggaccatttgattgttttattttggaattggtgtatatcatgaagccttgctgaactaagttttgtgtgtatatatttaaaaaaaaaatcagtgtttaaataaagacctatgtacttaatcctttaactctgcggatagcatttggtaggtagtgattaactgtgaataataaatacacaatgaattcttaaaaaaaaaaaacacaacaacaacc

SEQ ID NO: 402595 - DNA, 1185 bp, Homo sapiens
caggagaatcgcttgaacctgggaagtggaggttgagtgagccgggaccgtgccattgtactccagcctgggtgacagagcgagattccgtctcaaaaaaaaaaaaaaaaaagcccacctgaaagcctgtctctttccactttgttggcccttccagtgggattatcgagcatgttgttttttcatagtgcctttttccttatttcaagggttgcttctgagtggtgttttttttttttttttaatttgttttgttttaaaataagttaaagacagtccagagcttttcagccaatttgtctcctactctgtgtaaatatttttccctccgggcaggggagccagggtagagcaaaggagacaagcaggagtggaaggtgaggcgttctcctgcttgtactaagccaggaggctttaagctccagctttaagggttgtgagccccttgggggttcagggaactgcttgcccagggtgcagtgtgagtgtgatgggccaccggggcaagagggaaggtgaccgcccagctctcccacatcccactggatctggcttacaggggggtcggaagcctgtcctcaccgtctcgggggttgtggcccccgccccctccctatatgcacccctggaaccagcaagtcccagacaaggagagcggaggaggaagtcatgggaacgcagcctccagttgtagcaggtttcactattcctatgctggggtacacagtgagagtactcacttttcacttgtcttgctcttagattgggccatggctttcatcctgtgtcccctgacctgtccaggtgagtgtgagggcagcactgggaagctggagtgctgcttgtgcctcccttcccagtgggctgtgttgactgctgctccccacccctaccgatggtcccaggaagcagggagagttggggaaggcaagattggaaagacaggaagaccaaggcctcggcagaactctctgtcttctctccacttctggtcccctgtggtgatgtgcctgtaatctttttctccaaccttccgaaaaaaaatggtcctctcggacggaacctggcttaaccaaggccggggttcctggcattaaggcgggagtgtgcgggggctggaggcgccacatcgttcaaaaggaccgcctttgggtgaccggtgaacctcctgggtaaagattagtt

SEQ ID NO: 402596 - DNA, 499 bp, Homo sapiens
gggacatcctcaaggttttgaacgaagactgtaatctttttctccacccaaaccccttcccacgacaaaaacaagactgcctccctctcttccgggagctggtgacagccttgggcctttcagtcccaaagcggccgatgggagtctccctccgactccagatatgaacagggcccaggcctggagcgtttgctgtgccaggaggcggcagctcttctgggcagagcctgtccccgccttccctcactcttcctcatcctgcttctcttttcctcgcagatgataaaaggaatctggcattctacacctggaccatttgattgttttattttggaattggtgtatatcatgaagccttgctgaactaagttttgtgtgtatatatttaaaaaaaaaatcagtgtttaaataaagacctatgtacttaatcctttaactctgcggatagcatttggtaggtagtgattaactgtgaataataaatacacaatgaattctt

SEQ ID NO: 402597 - DNA, 1291 bp, Homo sapiens
cccggctgcaggaattcggcacgaggagagaactagtctcggtttttttttttaatttgttttgttttaaaataagttaaagacagtccagagcttttcagccaatttgtctcctactctgtgtaaatatttttccctccgggcaggggagccagggtagagcaaaggagacaagcaggagtggaaggtgaggcgttctcctgcttgtactaagccaggaggctttaagctccagctttaagggttgtgagccccttgggggttcagggaactgcttgcccagggtgcagtgtgagtgtgatgggccaccggggcaagagggaaggtgaccgcccagctctcccacatcccactggatctggcttacaggggggtcggaagcctgtcctcaccgtctcgggggttgtggcccccgccccctccctatatgcacccctggaaccagcaagtcccagacaaggagagcggaggaggaagtcatgggaacgcagcctccagttgtagcaggtttcactattcctatgctggggtacacagtgagagtactcacttttcacttgtcttgctcttagattgggccatggctttcatcctgtgtcccctgacctgtccaggtgagtgtgagggcagcactgggaagctggagtgctgcttgtgcctcccttcccagtgggctgtgttgactgctgctccccacccctaccgatggtcccaggaagcagggagagttggggaaggcaagattggaaagacaggaagaccaaggcctcggcagaactctctgtcttctctccacttctggtcccctgtggtgatgtgcctgtaatctttttctccacccaaaccccttcccacgacaaaaacaagactgcctccctctcttccgggagctggtgacagccttgggcctttcagtcccaaagcggccgatgggagtctccctccgactccagatatgaacagggcccaggcctggagcgtttgctgtgccaggaggcggcagctcttctgggcagagcctgtccccgccttccctcactcttcctcatcctgcttctcttttcctcgcagatgataaaaggaatctggcattctacacctggaccatttgattgttttattttggaattggtgtatatcatgaagccttgctgaactaagttttgtgtgtatatatttaaaaaaaaaatcagtgtttaaataaagacctatgtacttaatcctttaactctgcggatagcatttggtaggtagtgattaactgtgaataataaatacacaatgaattctt

SEQ ID NO: 402598 - DNA, 1424 bp, Homo sapiens
caggagaatcgcttgaacctgggaagtggaggttgagtgagccgggaccgtgccattgtactccagcctgggtgacagagcgagattccgtctcaaaaaaaaaaaaaaaaaagcccacctgaaagcctgtctctttccactttgttggcccttccagtgggattatcgagcatgttgttttttcatagtgcctttttccttatttcaagggttgcttctgagtggtgttttttttttttttttaatttgttttgttttaaaataagttaaagacagtccagagcttttcagccaatttgtctcctactctgtgtaaatatttttccctccgggcaggggagccagggtagagcaaaggagacaagcaggagtggaaggtgaggcgttctcctgcttgtactaagccaggaggctttaagctccagctttaagggttgtgagccccttgggggttcagggaactgcttgcccagggtgcagtgtgagtgtgatgggccaccggggcaagagggaaggtgaccgcccagctctcccacatcccactggatctggcttacaggggggtcggaagcctgtcctcaccgtctcgggggttgtggcccccgccccctccctatatgcacccctggaaccagcaagtcccagacaaggagagcggaggaggaagtcatgggaacgcagcctccagttgtagcaggtttcactattcctatgctggggtacacagtgagagtactcacttttcacttgtcttgctcttagattgggccatggctttcatcctgtgtcccctgacctgtccaggtgagtgtgagggcagcactgggaagctggagtgctgcttgtgcctcccttcccagtgggctgtgttgactgctgctccccacccctaccgatggtcccaggaagcagggagagttggggaaggcaagattggaaagacaggaagaccaaggcctcggcagaactctctgtcttctctccacttctggtcccctgtggtgatgtgcctgtaatctttttctccacccaaaccccttcccacgacaaaaacaagactgcctccctctcttccgggagctggtgacagccttgggcctttcagtcccaaagcggccgatgggagtctccctccgactccagatatgaacagggcccaggcctggagcgtttgctgtgccaggaggcggcagctcttctgggcagagcctgtccccgccttccctcactcttcctcatcctgcttctcttttcctcgcagatggtgtatatcatgaagccttgctgaactaagttttgtgtgtatatatttaaaaaaaaaatcagtgtttaaataaagacctatgtacttaatcctttaactctgcggatagcatttggtaggtagtgattaactgtgaataataaatacacaatgaattctt

SEQ ID NO: 402599 - DNA, 338 bp, Homo sapiens
ttttccttctttcctgctttcctgtcttccttttagcgaagatggttttctctggtggtatgctttagtttctttcttttaattttttgtatatcaatggtatgcttttcaatttgaggttatcatgagacttttaaatactatcttataatctattatttcaaactgctgacaacctaacacagattgcataaacaagaaaacacacaaaaataaaactaataaaatctctatgctttaacttcattcctccattttttaaacttttgattgtttctcattatgtcttattgtactatgtcatgaaaattttttatagtttttatttttgattggtt

SEQ ID NO: 402600 - DNA, 388 bp, Homo sapiens
atgtataattatgtgctacctggatatttttctcaaataacaatggccttatcaataacccaaggatatatcaagtttaaaaattttttaataactgaatttattttgtttcagttcagaaaaaccctattttcattgacagcataaactgaaatatattcttacatgaaatcatttattttgcatccttttagacatttgtccatgtatctaaaaatgaacttgtttttttcttttatggaaaacagtaaggagatctgattgtatgtataatgtattgaaatatggagctacataccaatattatacactagtatataaagagtttatttagtatttacttttcttgtcttgaatggtagtggaataataaatccctgaagaaagc

SEQ ID NO: 402601 - DNA, 297 bp, Homo sapiens
taagagatagggtctcactatgttaccgagtttggactcaaactcctgggctcaagtgatcctcccacctcagcctcccatgtagttaggactacaggcatgtgccaccgtacctggcaatttttaaaaactctaggtgacctttctaatcaatctttttccattgacaatcacctttttataaacgactgcagcactgattgtagtattcattttaaactgtacattctggtcatatgtgtgtatctatttctcactttttgtttagtttttttgagagagggtctggctgtgttc

SEQ ID NO: 402602 - DNA, 3212 bp, Homo sapiens
atccctgtttccccagcgctcggccagctgatgctctttgtggatggaatgctgggggtggtggcccacagtgacactattcagtggctgtacacattgtgtgccagcctgtcccgcttggtggtgaagacagccctgaagctgctgttggtgtttgtagaatactccgaaaacaacgcaccgctgttcatccgtgcagtgaactctgtggccagcaccaccggtgctcctccctgggccaatctggtgtccatcctggaggagaagaatggcgctgaccctgagttgttggtgtacacggtcaccctcatcaacaagacgctggcggcgctcccggaccaggactccttctacgatgtgacggatgcactggagcagcagggcatggaagcgctggtccagcgccacctgggcactgcgggcactgacgtcgacctgcgcacgcagcttgtgctctacgagaacgccctgaaattggaggatggagacatcgaagaagccccaggcgctggtgggcggcgggaacgacgaaagccttcttctgaggagggcaagaggagccgccgttctctggaaggcgggggctgccccgcgcgtgccccggaacctggccccacaggccccgcctcaccggtaggccccacctcttccaccggccccgccctgctgacaggccccgcctccagccctgtgggccctccctccggtctccaagcttcagtgaacctttttcctaccatctctgtggcaccctcagctgacacctccagcgagaggagcatctacaaagcccggttcctggagaatgtggcggcagcagaaacagagaagcaggttgcgctggcccagggccgggcagagacacttgccggggccatgcccaatgaggcgggtggacacccagatgcccggcaactctgggactccccagagacagcccctgcagccagaacaccccagagccctgccccctgtgtcctgctccgggcccagcgaagccttgcaccagagcccaaggagccactgataccagcaagccccaaggctgagcccatctgggagctccctacccgtgcacccaggctctctattggggacctggacttttcagatctaggggaggatgaagaccaggacatgctgaatgtagagtctgtggaggctgggaaagacatcccagctccctcacccccactgcccctgctctcgggagtacccccccctcccccacttccacctcccccacccatcaaaggccccttcccaccacctccacctctacctctggctgcccctcttccccattcagtgcctgacagctcagccctccccactaagaggaagacagtaaaacttttctggcgtgacgctgaagctggctgggggccatggagtctctgcaagccgctttgggccctgcgccaccctctgggcttcactggaccctgtctcagtggacacggcccgactggaacacctctttgagtctcgtgccaaagaggtgctgccctccaagaaagctggagagggccgccggacaatgaccacagtgctggaccccaagcgcagcaacgccatcaacatcggcctaaccacactgccacctgtgcatgtcattaaggctgctctgctcaactttgatgagtttgctgtcagcaaggatggcattgagaagctactgaccatgatgcccacggaggaagagcggcagaagattgaggaagcccagctggccaaccctgacatacccctgggcccagccgagaacttcctgatgactcttgcctccattggcggcctcgctgctcgtctacaactctgggccttcaagctggactatgacagcatggagcgggaaattgctgagccactgtttgacctgaaagtgggtatggaacagctggtacagaatgccaccttccgctgcatcctggctaccctcctagcggtgggcaacttcctcaatggctcccagagcagcggctttgagctgagctacctggagaaggtgtcagaggtgaaggacacggtgcgtcgacagtcactgctacaccatctctgctccctagtgctccagacccggcctgagtcctctgacctctattcagaaatccctgccctgacccgctgtgccaaggtggactttgaacagctgactgagaacctggggcagctggagcgccggagccgggcagccgaggagagcctgcggagcttggccaagcatgagctggccccagccctgcgtgcccgcctcacccacttcctggaccagtgtgcccgccgtgttgccatgctaaggatagtgcaccgccgtgtctgcaataggttccatgccttcctgctctacctgggctacaccccgcaggcggcccgtgaagtgcgcatcatgcagttctgccacacgctgcgggaatttgcgcttgagtatcggacttgccgggaacgagtgctacagcagcagcagaagcaggccacataccgtgagcgcaacaagacccggggacgcatgatcaccgagacagagaagttctcaggtgtggctggggaagcccccagcaacccctctgtcccagtagcagtgagcagcgggccaggccggggagatgctgacagtcatgctagtatgaagagtctgctgaccagcaggcctgaggacaccacacacaatcgccgcagcagaggcatggtccagagcagctccccaatcatgcccacagtggggccctccactgcatccccagaagaacccccaggctccagtttacccagtgatacatcagatgagatcatggaccttctggtgcagtcagtgaccaagagcagtcctcgtgccttagctgctagggaacgcaagcgttcccgcggcaaccgcaagtctttgagaaggacgttgaagagtgggctcggagatgacctggtgcaggcactgggactaagcaagggtcctggcctggaggtgtgaaggtgctgtatcccggaaatctatctggaccctggactgcagtgcaggagatgacagagtgaggagggcccagagcagaattctggccccagaactctgtgcccaggagccatgccttgagcagtattagccgtgtgtgtatgcatgtgagtgtgtgtgtatgtgtgtgtgtgcatgcatatgcatgtgcatgtgtgtgagctccttgaacgcacggagcaaaataaaattttcttagctaatccaa

SEQ ID NO: 402603 - DNA, 3780 bp, Homo sapiens
tgagccggccgcagagccatggcgggcggggaagaccgcggggacggagagccggtatcagtggtgaccgtgagggtgcagtacctggaagacaccgaccccttcgcatgtgccaactttccggagccgcgccgggcccccacctgcagcctggacggggcgctgcccttgggcgcgcagatacccgcggtgcaccgcctgctgggagcgccgctcaagttggaggattgtgctctgcaagtgtctccctccggatactacctggacaccgagctgtccctggaagagcagcgggagatgctggagggcttctatgaagagatcagcaaagggcggaagcccacgctgatccttcggacccagctctctgtgagggtcaacgctatcttggaaaagctgtatagctccagtggtcctgagctccgccgctccctcttctcactgaagcagatcttccaggaggacaaagacctggtgcctgaatttgtgcattcagaggggctgagctgcctgatccgtgtgggtgctgctgccgaccacaactaccagagctacatccttagagcgctcggccagctgatgctctttgtggatggaatgctgggggtggtggcccacagtgacactattcagtggctgtacacattgtgtgccagcctgtcccgcttggtggtgaagacagccctgaagctgctgttggtgtttgtagaatactccgaaaacaacgcaccgctgttcatccgtgcagtgaactctgtggccagcaccaccggtgctcctccctgggccaatctggtgtccatcctggaggagaagaatggcgctgaccctgagttgttggtgtacacggtcaccctcatcaacaagacgctggcggcgctcccggaccaggactccttctacgatgtgacggatgcactggagcagcagggcatggaagcgctggtccagcgccacctgggcactgcgggcactgacgtcgacctgcgcacgcagcttgtgctctacgagaacgccctgaaattggaggatggagacatcgaagaagccccaggcgctggtgggcggcgggaacgacgaaagccttcttctgaggagggcaagaggagccgccgttctctggaaggcgggggctgccccgcgcgtgccccggaacctggccccacaggccccgcctcaccggtaggccccacctcttccaccggccccgccctgctgacaggccccgcctccagccctgtgggccctccctccggtctccaagcttcagtgaacctttttcctaccatctctgtggcaccctcagctgacacctccagcgagaggagcatctacaaagcccggttcctggagaatgtggcggcagcagaaacagagaagcaggttgcgctggcccagggccgggcagagacacttgccggggccatgcccaatgaggcgggtggacacccagatgcccggcaactctgggactccccagagacagcccctgcagccagaacaccccagagccctgccccctgtgtcctgctccgggcccagcgaagccttgcaccagagcccaaggagccactgataccagcaagccccaaggctgagcccatctgggagctccctacccgtgcacccaggctctctattggggacctggacttttcagatctaggggaggatgaagaccaggacatgctgaatgtagagtctgtggaggctgggaaagacatcccagctccctcacccccactgcccctgctctcgggagtacccccccctcccccacttccacctcccccacccatcaaaggccccttcccaccacctccacctctacctctggctgcccctcttccccattcagtgcctgacagctcagccctccccactaagaggaagacagtaaaacttttctggcgtgacgctgaagctggctgggggccatggagtctctgcaagccgctttgggccctgcgccaccctctgggcttcactggaccctgtctcagtggacacggcccgactggaacacctctttgagtctcgtgccaaagaggtgctgccctccaagaaagctggagagggccgccggacaatgaccacagtgctggaccccaagcgcagcaacgccatcaacatcggcctaaccacactgccacctgtgcatgtcattaaggctgctctgctcaactttgatgagtttgctgtcagcaaggatggcattgaggctctggctacatcctcagaagctactgaccatgatgcccacggaggaagagcggcagaagattgaggaagcccagctggccaaccctgacatacccctgggcccagccgagaacttcctgatgactcttgcctccattggcggcctcgctgctcgtctacaactctgggccttcaagctggactatgacagcatggagcgggaaattgctgagccactgtttgacctgaaagtgggtatggaacagctggtacagaatgccaccttccgctgcatcctggctaccctcctagcggtgggcaacttcctcaatggctcccagagcagcggctttgagctgagctacctggagaaggtgtcagaggtgaaggacacggtgcgtcgacagtcactgctacaccatctctgctccctagtgctccagacccggcctgagtcctctgacctctattcagaaatccctgccctgacccgctgtgccaaggtggactttgaacagctgactgagaacctggggcagctggagcgccggagccgggcagccgaggagagcctgcggagcttggccaagcatgagctggccccagccctgcgtgcccgcctcacccacttcctggaccagtgtgcccgccgtgttgccatgctaaggatagtgcaccgccgtgtctgcaataggttccatgccttcctgctctacctgggctacaccccgcaggcggcccgtgaagtgcgcatcatgcagttctgccacacgctgcgggaatttgcgcttgagtatcggacttgccgggaacgagtgctacagcagcagcagaagcaggccacataccgtgagcgcaacaagacccggggacgcatgatcaccgagacagagaagttctcaggtgtggctggggaagcccccagcaacccctctgtcccagtagcagtgagcagcgggccaggccggggagatgctgacagtcatgctagtatgaagagtctgctgaccagcaggcctgaggacaccacacacaatcgccgcagcagaggcatggtccagagcagctccccaatcatgcccacagtggggccctccactgcatccccagaagaacccccaggctccagtttacccagtgatacatcagatgagatcatggaccttctggtgcagtcagtgaccaagagcagtcctcgtgccttagctgctagggaacgcaagcgttcccgcggcaaccgcaagtctttgagaaggacgttgaagagtgggctcggagatgacctggtgcaggcactgggactaagcaagggtcctggcctggaggtgtgaaggtgctgtatcccggaaatctatctggaccctggactgcagtgcaggagatgacagagtgaggagggcccagagcagaattctggccccagaactctgtgcccaggagccatgccttgagcagtattagccgtgtgtgtatgcatgtgagtgtgtgtgtatgtgtgtgtgtgcatgcatatgcatgtgcatgtgtgtgagctccttgaacgcacggagcaaaataaaattttcttagctaatccaa

SEQ ID NO: 402604 - DNA, 3835 bp, Homo sapiens
tgagccggccgcagagccatggcgggcggggaagaccgcggggacggagagccggtatcagtggtgaccgtgagggtgcagtacctggaagacaccgaccccttcgcatgtgccaactttccggagccgcgccgggcccccacctgcagcctggacggggcgctgcccttgggcgcgcagatacccgcggtgcaccgcctgctgggagcgccgctcaagttggaggattgtgctctgcaagtgtctccctccggatactacctggacaccgagctgtccctggaagagcagcgggagatgctggagggcttctatgaagagatcagcaaagggcggaagcccacgctgatccttcggacccagctctctgtgagggtcaacgctatcttggaaaagctgtatagctccagtggtcctgagctccgccgctccctcttctcactgaagcagatcttccaggaggacaaagacctggtgcctgaatttgtgcattcagaggggctgagctgcctgatccgtgtgggtgctgctgccgaccacaactaccagagctacatccttagagcgctcggccagctgatgctctttgtggatggaatgctgggggtggtggcccacagtgacactattcagtggctgtacacattgtgtgccagcctgtcccgcttggtggtgaagacagccctgaagctgctgttggtgtttgtagaatactccgaaaacaacgcaccgctgttcatccgtgcagtgaactctgtggccagcaccaccggtgctcctccctgggccaatctggtgtccatcctggaggagaagaatggcgctgaccctgagttgttggtgtacacggtcaccctcatcaacaagacgctggcggcgctcccggaccaggactccttctacgatgtgacggatgcactggagcagcagggcatggaagcgctggtccagcgccacctgggcactgcgggcactgacgtcgacctgcgcacgcagcttgtgctctacgagaacgccctgaaattggaggatggagacatcgaagaagccccaggcgctggtgggcggcgggaacgacgaaagccttcttctgaggagggcaagaggagccgccgttctctggaaggcgggggctgccccgcgcgtgccccggaacctggccccacaggccccgcctcaccggtaggccccacctcttccaccggccccgccctgctgacaggccccgcctccagccctgtgggccctccctccggtctccaagcttcagtgaacctttttcctaccatctctgtggcaccctcagctgacacctccagcgagaggagcatctacaaagcccggttcctggagaatgtggcggcagcagaaacagagaagcaggttgcgctggcccagggccgggcagagacacttgccggggccatgcccaatgaggcgggtggacacccagatgcccggcaactctgggactccccagagacagcccctgcagccagaacaccccagagccctgccccctgtgtcctgctccgggcccagcgaagccttgcaccagagcccaaggagccactgataccagcaagccccaaggctgagcccatctgggagctccctacccgtgcacccaggctctctattggggacctggacttttcagatctaggggaggatgaagaccaggacatgctgaatgtagagtctgtggaggctgggaaagacatcccagctccctcacccccactgcccctgctctcgggagtacccccccctcccccacttccacctcccccacccatcaaaggccccttcccaccacctccacctctacctctggctgcccctcttccccattcagtgcctgacagctcagccctccccactaagaggaagacagtaaaacttttctggcgtgacgctgaagctggctgggggccatggagtctctgcaagccgctttgggccctgcgccaccctctgggcttcactggaccctgtctcagtggacacggcccgactggaacacctctttgagtctcgtgccaaagaggtgctgccctccaagaaagctggagagggccgccggacaatgaccacagtgctggaccccaagcgcagcaacgccatcaacatcggcctaaccacactgccacctgtgcatgtcattaaggctgctctgctcaactttgatgagtttgctgtcagcaaggatggcattgagaagctactgaccatgatgcccacggaggaagagcggcagaagattgaggaagcccagctggccaaccctgacatacccctgggcccagccgagaacttcctgatgactcttgcctccattggcggcctcgctgctcgtctacaactctgggccttcaagctggactatgacagcatggagcgggaaattgctgagccactgtttgacctgaaagtgggtatggaacagctggtacagaatgccaccttccgctgcatcctggctaccctcctagcggtgggcaacttcctcaatggctcccagagcagcggctttgagctgagctacctggagaaggtgtcagaggtgaaggacacggtgcgtcgacagtcactgctacaccatctctgctccctagtgctccagacccggcctgagtcctctgacctctattcagaaatccctgccctgacccgctgtgccaaggtggactttgaacagctgactgagaacctggggcagctggagcgccggagccgggcagccgaggagagcctgcggagcttggccaagcatgagctggccccagccctgcgtgcccgcctcacccacttcctggaccagtgtgcccgccgtgttgccatgctaaggatagtgcaccgccgtgtctgcaataggttccatgccttcctgctctacctgggctacaccccgcaggcggcccgtgaagtgcgcatcatgcagttctgccacacgctgcgggaatttgcgcttgagtatcggacttgccgggaacgagtgctacagcagcagcagaagcaggccacataccgtgagcgcaacaagacccggggacgcatgatcaccgagacagagaagttctcaggtgtggctggggaagcccccagcaacccctctgtcccagtagcagtgagcagcgggccaggccggggagatgctgacagtcatgctagtatgaagagtctgctgaccagcaggcctgaggacaccacacacaatcgccgcagcagaggcatggtccagagcagctccccaatcatgcccacagtggggccctccactgcatccccagaagaacccccaggctccagtttacccagtgatacatcagatgagatcatggaccttctggtgcagtcagtgaccaagagcagtcctcgtgccttagctgctagggaacgcaagcgttcccgcggcaaccgcaagtcttgtaagtaaccccccacaatcccactgcccacctgaaccccatcaaccccctccaaccctgctctgtccctgcagtgagaaggacgttgaagagtgggctcggagatgacctggtgcaggcactgggactaagcaagggtcctggcctggaggtgtgaaggtgctgtatcccggaaatctatctggaccctggactgcagtgcaggagatgacagagtgaggagggcccagagcagaattctggccccagaactctgtgcccaggagccatgccttgagcagtattagccgtgtgtgtatgcatgtgagtgtgtgtgtatgtgtgtgtgtgcatgcatatgcatgtgcatgtgtgtgagctccttgaacgcacggagcaaaataaaattttcttagctaatccaa

SEQ ID NO: 402605 - DNA, 3867 bp, Homo sapiens
tgagccggccgcagagccatggcgggcggggaagaccgcggggacggagagccggtatcagtggtgaccgtgagggtgcagtacctggaagacaccgaccccttcgcatgtgccaactttccggagccgcgccgggcccccacctgcagcctggacggggcgctgcccttgggcgcgcagatacccgcggtgcaccgcctgctgggagcgccgctcaagttggaggattgtgctctgcaagtgtctccctccggatactacctggacaccgagctgtccctggaagagcagcgggagatgctggagggcttctatgaagagatcagcaaagggcggaagcccacgctgatccttcggacccagctctctgtgagggtcaacgctatcttggaaaagctgtatagctccagtggtcctgagctccgccgctccctcttctcactgaagcagatcttccaggaggacaaagacctggtgcctgaatttgtgcattcagaggggctgagctgcctgatccgtgtgggtgctgctgccgaccacaactaccagagctacatccttagagcgctcggccagctgatgctctttgtggatggaatgctgggggtggtggcccacagtgacactattcagtggctgtacacattgtgtgccagcctgtcccgcttggtggtgaagacagccctgaagctgctgttggtgtttgtagaatactccgaaaacaacgcaccgctgttcatccgtgcagtgaactctgtggccagcaccaccggtgctcctccctgggccaatctggtgtccatcctggaggagaagaatggcgctgaccctgagttgttggtgtacacggtcaccctcatcaacaagacgctggcggcgctcccggaccaggactccttctacgatgtgacggatgcactggagcagcagggcatggaagcgctggtccagcgccacctgggcactgcgggcactgacgtcgacctgcgcacgcagcttgtgctctacgagaacgccctgaaattggaggatggagacatcgaagaagccccaggcgctggtgggcggcgggaacgacgaaagccttcttctgaggagggcaagaggagccgccgttctctggaaggcgggggctgccccgcgcgtgccccggaacctggccccacaggccccgcctcaccggtaggccccacctcttccaccggccccgccctgctgacaggccccgcctccagccctgtgggccctccctccggtctccaagcttcagtgaacctttttcctaccatctctgtggcaccctcagctgacacctccagcgagaggagcatctacaaagcccggttcctggagaatgtggcggcagcagaaacagagaagcaggttgcgctggcccagggccgggcagagacacttgccggggccatgcccaatgaggcgggtggacacccagatgcccggcaactctgggactccccagagacagcccctgcagccagaacaccccagagccctgccccctgtgtcctgctccgggcccagcgaagccttgcaccagagcccaaggagccactgataccagcaagccccaaggctgagcccatctgggagctccctacccgtgcacccaggctctctattggggacctggacttttcagatctaggggaggatgaagaccaggacatgctgaatgtagagtctgtggaggctgggaaagacatcccagctccctcacccccactgcccctgctctcgggagtacccccccctcccccacttccacctcccccacccatcaaaggccccttcccaccacctccacctctacctctggctgcccctcttccccattcagtgcctgacagctcagccctccccactaagaggaagacagtaaaacttttctggcgtgacgctgaagctggctgggggccatggagtctctgcaagccgctttgggccctgcgccaccctctgggcttcactggaccctgtctcagtggacacggcccgactggaacacctctttgagtctcgtgccaaagaggtgctgccctccaagaaagctggagagggccgccggacaatgaccacagtgctggaccccaagcgcagcaacgccatcaacatcggcctaaccacactgccacctgtgcatgtcattaaggctgctctgctcaactttgatgagtttgctgtcagcaaggatggcattgagaagctactgaccatgatgcccacggaggaagagcggcagaagattgaggaagcccagctggccaaccctgacatacccctgggcccagccgagaacttcctgatgactcttgcctccattggcggcctcgctgctcgtctacaactctgggccttcaagctggactatgacagcatggagcgggaaattgctgagccactgtttgacctgaaagtgggtatggaacagctggtacagaatgccaccttccgctgcatcctggctaccctcctagcggtgggcaacttcctcaatggctcccagagcagcggctttgagctgagctacctggagaaggtgtcagaggtgaaggacacggtgcgtcgacagtcactgctacaccatctctgctccctagtgctccagacccggcctgagtcctctgacctctattcagaaatccctgccctgacccgctgtgccaaggtggactttgaacagctgactgagaacctggggcagctggagcgccggagccgggcagccgaggagagcctgcggagcttggccaagcatgagctggccccagccctgcgtgcccgcctcacccacttcctggaccagtgtgcccgccgtgttgccatgctaaggatagtgcaccgccgtgtctgcaataggttccatgccttcctgctctacctgggctacaccccgcaggcggcccgtgaagtgcgcatcatgcagttctgccacacgctgcgggaatttgcgcttgagtatcggacttgccgggaacgagtgctacagcagcagcagaagcaggccacataccgtgagcgcaacaagacccggggacgcatgatcaccgagacagagaagttctcaggtgtggctggggaagcccccagcaacccctctgtcccagtagcagtgagcagcgggccaggccggggagatgctgacagtcatgctagtatgaagagtctgctgaccagcaggcctgaggacaccacacacaatcgccgcagcagaggcatggtccagagcagctccccaatcatgcccacagtggggccctccactgcatccccagaagaacccccaggctccagtttacccagtgatacatcagatgagatcatggaccttctggtgcagtcagtgaccaagagcagtcctcgtgccttagctgctagggaacgcaagcgttcccgcggcaaccgcaagtctttgagaaggacgttgaagagtgggctcggagatgacctggtgcaggcactgggactaagcaagggtcctggcctggaggtgtgaaggtgctgtatcccggaaatctatctggaccctggactgcagtgcaggagatgacagagtgaggagggcccagagcagaattctggccccagaactctgtgcccaggagccatgccttgagcagtattagccgtgtgtgtatgcatgtgagtgtgtgtgtatgtgtgtgtgtgcatgcatatgcatgtgcatgtgtgtgagctccttgaacgcacggagcaaaataaaattttcttagctaatccaatttttctaggttacacaaacatgatcatcgtccgccacaaacaacatgtgggccgtcttgggccaagtcgactttggcatggggcgcttttcctgcggcccctccc

SEQ ID NO: 402606 - DNA, 3830 bp, Homo sapiens
  misc_feature (3773)..(3773): n is a, c, g, or t
  misc_feature (3819)..(3819): n is a, c, g, or t
tgagccggccgcagagccatggcgggcggggaagaccgcggggacggagagccggtatcagtggtgaccgtgagggtgcagtacctggaagacaccgaccccttcgcatgtgccaactttccggagccgcgccgggcccccacctgcagcctggacggggcgctgcccttgggcgcgcagatacccgcggtgcaccgcctgctgggagcgccgctcaagttggaggattgtgctctgcaagtgtctccctccggatactacctggacaccgagctgtccctggaagagcagcgggagatgctggagggcttctatgaagagatcagcaaagggcggaagcccacgctgatccttcggacccagctctctgtgagggtcaacgctatcttggaaaagctgtatagctccagtggtcctgagctccgccgctccctcttctcactgaagcagatcttccaggaggacaaagacctggtgcctgaatttgtgcattcagaggggctgagctgcctgatccgtgtgggtgctgctgccgaccacaactaccagagctacatccttagagcgctcggccagctgatgctctttgtggatggaatgctgggggtggtggcccacagtgacactattcagtggctgtacacattgtgtgccagcctgtcccgcttggtggtgaagacagccctgaagctgctgttggtgtttgtagaatactccgaaaacaacgcaccgctgttcatccgtgcagtgaactctgtggccagcaccaccggtgctcctccctgggccaatctggtgtccatcctggaggagaagaatggcgctgaccctgagttgttggtgtacacggtcaccctcatcaacaagacgctggcggcgctcccggaccaggactccttctacgatgtgacggatgcactggagcagcagggcatggaagcgctggtccagcgccacctgggcactgcgggcactgacgtcgacctgcgcacgcagcttgtgctctacgagaacgccctgaaattggaggatggagacatcgaagaagccccaggcgctggtgggcggcgggaacgacgaaagccttcttctgaggagggcaagaggagccgccgttctctggaaggcgggggctgccccgcgcgtgccccggaacctggccccacaggccccgcctcaccggtaggccccacctcttccaccggccccgccctgctgacaggccccgcctccagccctgtgggccctccctccggtctccaagcttcagtgaacctttttcctaccatctctgtggcaccctcagctgacacctccagcgagaggagcatctacaaagcccggttcctggagaatgtggcggcagcagaaacagagaagcaggttgcgctggcccagggccgggcagagacacttgccggggccatgcccaatgaggcgggtggacacccagatgcccggcaactctgggactccccagagacagcccctgcagccagaacaccccagagccctgccccctgtgtcctgctccgggcccagcgaagccttgcaccagagcccaaggagccactgataccagcaagccccaaggctgagcccatctgggagctccctacccgtgcacccaggctctctattggggacctggacttttcagatctaggggaggatgaagaccaggacatgctgaatgtagagtctgtggaggctgggaaagacatcccagctccctcacccccactgcccctgctctcgggagtacccccccctcccccacttccacctcccccacccatcaaaggccccttcccaccacctccacctctacctctggctgcccctcttccccattcagtgcctgacagctcagccctccccactaagaggaagacagtaaaacttttctggcgtgacgctgaagctggctgggggccatggagtctctgcaagccgctttgggccctgcgccaccctctgggcttcactggaccctgtctcagtggacacggcccgactggaacacctctttgagtctcgtgccaaagaggtgctgccctccaagaaagctggagagggccgccggacaatgaccacagtgctggaccccaagcgcagcaacgccatcaacatcggcctaaccacactgccacctgtgcatgtcattaaggctgctctgctcaactttgatgagtttgctgtcagcaaggatggcattgagaagctactgaccatgatgcccacggaggaagagcggcagaagattgaggaagcccagctggccaaccctgacatacccctgggcccagccgagaacttcctgatgactcttgcctccattggcggcctcgctgctcgtctacaactctgggccttcaagctggactatgacagcatggagcgggaaattgctgagccactgtttgacctgaaagtgggtatggaacagctggtacagaatgccaccttccgctgcatcctggctaccctcctagcggtgggcaacttcctcaatggctcccagagcagcggctttgagctgagctacctggagaaggtgtcagaggtgaaggacacggtgcgtcgacagtcactgctacaccatctctgctccctagtgctccagacccggcctgagtcctctgacctctattcagaaatccctgccctgacccgctgtgccaaggtggactttgaacagctgactgagaacctggggcagctggagcgccggagccgggcagccgaggagagcctgcggagcttggccaagcatgagctggccccagccctgcgtgcccgcctcacccacttcctggaccagtgtgcccgccgtgttgccatgctaaggatagtgcaccgccgtgtctgcaataggttccatgccttcctgctctacctgggctacaccccgcaggcggcccgtgaagtgcgcatcatgcagttctgccacacgctgcgggaatttgcgcttgagtatcggacttgccgggaacgagtgctacagcagcagcagaagcaggccacataccgtgagcgcaacaagacccggggacgcatgatcaccgagacagagaagttctcaggtgtggctggggaagcccccagcaacccctctgtcccagtagcagtgagcagcgggccaggccggggagatgctgacagtcatgctagtatgaagagtctgctgaccagcaggcctgaggacaccacacacaatcgccgcagcagaggcatggtccagagcagctccccaatcatgcccacagtggggccctccactgcatccccagaagaacccccaggctccagtttacccagtgatacatcagatgagatcatggaccttctggtgcagtcagtgaccaagagcagtcctcgtgccttagctgctagggaacgcaagcgttcccgcggcaaccgcaagtctttgagaaggacgttgaagagtgggctcggagatgacctggtgcaggcactgggactaagcaagggtcctggcctggaggtgtgaaggtgctgtatcccggaaatctatctggaccctggactgcagtgcaggagatgacagagtgaggagggcccagagcagaattctggccccagaactctgtgcccaggagccatgccttgagcagtattagccgtgtgtgtatgcatgtgagtgtgtgtgtatgtgtgtgtgtgcatgcatatgcatgtgcatgtgtgtgagctccttgaacgcacggagcaaaataaaattttcttagctaatccaagaaaaaaaaaanacatgccggccgaattcgagctcacttggcccaatcgccctatagnggagcggattc

SEQ ID NO: 402607 - DNA, 246 bp, Homo sapiens
ctgctgaaggaatgcacagctgtagtgcagaccctgtgtctctctgccacccttcaagtggtaggtaagaggtcaggggtcttcatacattcgcctgccacctcttcctcagtctcacagctgttccctttgcccccagttggaggattgtgctctgcaagtgtctccctccggatactacctggacaccgagctgtccctggaagagcagcgggagatgctggagggcttctatgaagagatcag

SEQ ID NO: 402608 - DNA, 3761 bp, Homo sapiens
tgagccggccgcagagccatggcgggcggggaagaccgcggggacggagagccggtatcagtggtgaccgtgagggtgcagtacctggaagacaccgaccccttcgcatgtgccaactttccggagccgcgccgggcccccacctgcagcctggacggggcgctgcccttgggcgcgcagatacccgcggtgcaccgcctgctgggagcgccgctcaagttggaggattgtgctctgcaagtgtctccctccggatactacctggacaccgagctgtccctggaagagcagcgggagatgctggagggcttctatgaagagatcagcaaagggcggaagcccacgctgatccttcggacccagctctctgtgagggtcaacgctatcttggaaaagctgtatagctccagtggtcctgagctccgccgctccctcttctcactgaagcagatcttccaggaggacaaagacctggtgcctgaatttgtgcattcagaggggctgagctgcctgatccgtgtgggtgctgctgccgaccacaactaccagagctacatccttagagcgctcggccagctgatgctctttgtggatggaatgctgggggtggtggcccacagtgacactattcagtggctgtacacattgtgtgccagcctgtcccgcttggtggtgaagacagccctgaagctgctgttggtgtttgtagaatactccgaaaacaacgcaccgctgttcatccgtgcagtgaactctgtggccagcaccaccggtgctcctccctgggccaatctggtgtccatcctggaggagaagaatggcgctgaccctgagttgttggtgtacacggtcaccctcatcaacaagacgctggcggcgctcccggaccaggactccttctacgatgtgacggatgcactggagcagcagggcatggaagcgctggtccagcgccacctgggcactgcgggcactgacgtcgacctgcgcacgcagcttgtgctctacgagaacgccctgaaattggaggatggagacatcgaagaagccccaggcgctggtgggcggcgggaacgacgaaagccttcttctgaggagggcaagaggagccgccgttctctggaaggcgggggctgccccgcgcgtgccccggaacctggccccacaggccccgcctcaccggtaggccccacctcttccaccggccccgccctgctgacaggccccgcctccagccctgtgggccctccctccggtctccaagcttcagtgaacctttttcctaccatctctgtggcaccctcagctgacacctccagcgagaggagcatctacaaagcccggttcctggagaatgtggcggcagcagaaacagagaagcaggttgcgctggcccagggccgggcagagacacttgccggggccatgcccaatgaggcgggtggacacccagatgcccggcaactctgggactccccagagacagcccctgcagccagaacaccccagagccctgccccctgtgtcctgctccgggcccagcgaagccttgcaccagagcccaaggagccactgataccagcaagccccaaggctgagcccatctgggagctccctacccgtgcacccaggctctctattggggacctggacttttcagatctaggggaggatgaagaccaggacatgctgaatgtagagtctgtggaggctgggaaagacatcccagctccctcacccccactgcccctgctctcgggagtacccccccctcccccacttccacctcccccacccatcaaaggccccttcccaccacctccacctctacctctggctgcccctcttccccattcagtgcctgacagctcagccctccccactaagaggaagacagtaaaacttttctggcgtgacgctgaagctggctgggggccatggagtctctgcaagccgctttgggccctgcgccaccctctgggcttcactggaccctgtctcagtggacacggcccgactggaacacctctttgagtctcgtgccaaagaggtgctgccctccaagaaagctggagagggccgccggacaatgaccacagtgctggaccccaagcgcagcaacgccatcaacatcggcctaaccacactgccacctgtgcatgtcattaaggctgctctgctcaactttgatgagtttgctgtcagcaaggatggcattgagaagctactgaccatgatgcccacggaggaagagcggcagaagattgaggaagcccagctggccaaccctgacatacccctgggcccagccgagaacttcctgatgactcttgcctccattggcggcctcgctgctcgtctacaactctgggccttcaagctggactatgacagcatggagcgggaaattgctgagccactgtttgacctgaaagtgggtatggaacagctggtacagaatgccaccttccgctgcatcctggctaccctcctagcggtgggcaacttcctcaatggctcccagagcagcggctttgagctgagctacctggagaaggtgtcagaggtgaaggacacggtgcgtcgacagtcactgctacaccatctctgctccctagtgctccagacccggcctgagtcctctgacctctattcagaaatccctgccctgacccgctgtgccaaggtggactttgaacagctgactgagaacctggggcagctggagcgccggagccgggcagccgaggagagcctgcggagcttggccaagcatgagctggccccagccctgcgtgcccgcctcacccacttcctggaccagtgtgcccgccgtgttgccatgctaaggatagtgcaccgccgtgtctgcaataggttccatgccttcctgctctacctgggctacaccccgcaggcggcccgtgaagtgcgcatcatgcagttctgccacacgctgcgggaatttgcgcttgagtatcggacttgccgggaacgagtgctacagcagcagcagaagcaggccacataccgtgagcgcaacaagacccggggacgcatgatcaccgagacagagaagttctcaggtgtggctggggaagcccccagcaacccctctgtcccagtagcagtgagcagcgggccaggccggggagatgctgacagtcatgctagtatgaagagtctgctgaccagcaggcctgaggacaccacacacaatcgccgcagcagaggcatggtccagagcagctccccaatcatgcccacagtggggccctccactgcatccccagaagaacccccaggctccagtttacccagtgatacatcagatgagatcatggaccttctggtgcagtcagtgaccaagagcagtcctcgtgccttagctgctagggaacgcaagcgttcccgcggcaaccgcaagtctttgagaaggacgttgaagagtgggctcggagatgacctggtgcaggcactgggactaagcaagggtcctggcctggaggtgtgaaggtgctgtatcccggaaatctatctggaccctggactgcagtgcaggagatgacagagtgaggagggcccagagcagaattctggccccagaactctgtgcccaggagccatgccttgagcagtattagccgtgtgtgtatgcatgtgagtgtgtgtgtatgtgtgtgtgtgcatgcatatgcatgtgcatgtgtgtgagctccttgaacgcacggagcaaaataaaattttcttagctaatccaa

SEQ ID NO: 402609 - DNA, 4028 bp, Homo sapiens
tgagccggccgcagagccatggcgggcggggaagaccgcggggacggagagccggtatcagtggtgaccgtgagggtgcagtacctggaagacaccgaccccttcgcatgtgccaactttccggagccgcgccgggcccccacctgcagcctggacggggcgctgcccttgggcgcgcagatacccgcggtgcaccgcctgctgggagcgccgctcaagttggaggattgtgctctgcaagtgtctccctccggatactacctggacaccgagctgtccctggaagagcagcgggagatgctggagggcttctatgaagagatcagcaaagggcggaagcccacgctgatccttcggacccagctctctgtgagggtcaacgctatcttggaaaagctgtatagctccagtggtcctgagctccgccgctccctcttctcactgaagcagatcttccaggaggacaaagacctggtgcctgaatttgtgcattcagaggggctgagctgcctgatccgtgtgggtgctgctgccgaccacaactaccagagctacatccttagagcgctcggccagctgatgctctttgtggatggaatgctgggggtggtggcccacagtgacactattcagtggctgtacacattgtgtgccagcctggataagtggctctccactcagccttataccctttgccatgttgcttctctgtgggcctcagcttcctgttctgcaaagtgagctggaagggagtgagtctgaggcctctgtaagcctataaggcacttcagtgcctgggcctggggccagggtcattctgcctagattctctctgggtccagccccagcagcccttccccttccccagcaacagctggcacaggtctggcctaagccccactcatatgtactgacctctctcctcagtcccgcttggtggtgaagacagccctgaagctgctgttggtgtttgtagaatactccgaaaacaacgcaccgctgttcatccgtgcagtgaactctgtggccagcaccaccggtgctcctccctgggccaatctggtgtccatcctggaggagaagaatggcgctgaccctgagttgttggtgtacacggtcaccctcatcaacaagacgctggcggcgctcccggaccaggactccttctacgatgtgacggatgcactggagcagcagggcatggaagcgctggtccagcgccacctgggcactgcgggcactgacgtcgacctgcgcacgcagcttgtgctctacgagaacgccctgaaattggaggatggagacatcgaagaagccccaggcgctggtgggcggcgggaacgacgaaagccttcttctgaggagggcaagaggagccgccgttctctggaaggcgggggctgccccgcgcgtgccccggaacctggccccacaggccccgcctcaccggtaggccccacctcttccaccggccccgccctgctgacaggccccgcctccagccctgtgggccctccctccggtctccaagcttcagtgaacctttttcctaccatctctgtggcaccctcagctgacacctccagcgagaggagcatctacaaagcccggttcctggagaatgtggcggcagcagaaacagagaagcaggttgcgctggcccagggccgggcagagacacttgccggggccatgcccaatgaggcgggtggacacccagatgcccggcaactctgggactccccagagacagcccctgcagccagaacaccccagagccctgccccctgtgtcctgctccgggcccagcgaagccttgcaccagagcccaaggagccactgataccagcaagccccaaggctgagcccatctgggagctccctacccgtgcacccaggctctctattggggacctggacttttcagatctaggggaggatgaagaccaggacatgctgaatgtagagtctgtggaggctgggaaagacatcccagctccctcacccccactgcccctgctctcgggagtacccccccctcccccacttccacctcccccacccatcaaaggccccttcccaccacctccacctctacctctggctgcccctcttccccattcagtgcctgacagctcagccctccccactaagaggaagacagtaaaacttttctggcgtgacgctgaagctggctgggggccatggagtctctgcaagccgctttgggccctgcgccaccctctgggcttcactggaccctgtctcagtggacacggcccgactggaacacctctttgagtctcgtgccaaagaggtgctgccctccaagaaagctggagagggccgccggacaatgaccacagtgctggaccccaagcgcagcaacgccatcaacatcggcctaaccacactgccacctgtgcatgtcattaaggctgctctgctcaactttgatgagtttgctgtcagcaaggatggcattgagaagctactgaccatgatgcccacggaggaagagcggcagaagattgaggaagcccagctggccaaccctgacatacccctgggcccagccgagaacttcctgatgactcttgcctccattggcggcctcgctgctcgtctacaactctgggccttcaagctggactatgacagcatggagcgggaaattgctgagccactgtttgacctgaaagtgggtatggaacagctggtacagaatgccaccttccgctgcatcctggctaccctcctagcggtgggcaacttcctcaatggctcccagagcagcggctttgagctgagctacctggagaaggtgtcagaggtgaaggacacggtgcgtcgacagtcactgctacaccatctctgctccctagtgctccagacccggcctgagtcctctgacctctattcagaaatccctgccctgacccgctgtgccaaggtggactttgaacagctgactgagaacctggggcagctggagcgccggagccgggcagccgaggagagcctgcggagcttggccaagcatgagctggccccagccctgcgtgcccgcctcacccacttcctggaccagtgtgcccgccgtgttgccatgctaaggatagtgcaccgccgtgtctgcaataggttccatgccttcctgctctacctgggctacaccccgcaggcggcccgtgaagtgcgcatcatgcagttctgccacacgctgcgggaatttgcgcttgagtatcggacttgccgggaacgagtgctacagcagcagcagaagcaggccacataccgtgagcgcaacaagacccggggacgcatgatcaccgagacagagaagttctcaggtgtggctggggaagcccccagcaacccctctgtcccagtagcagtgagcagcgggccaggccggggagatgctgacagtcatgctagtatgaagagtctgctgaccagcaggcctgaggacaccacacacaatcgccgcagcagaggcatggtccagagcagctccccaatcatgcccacagtggggccctccactgcatccccagaagaacccccaggctccagtttacccagtgatacatcagatgagatcatggaccttctggtgcagtcagtgaccaagagcagtcctcgtgccttagctgctagggaacgcaagcgttcccgcggcaaccgcaagtctttgagaaggacgttgaagagtgggctcggagatgacctggtgcaggcactgggactaagcaagggtcctggcctggaggtgtgaaggtgctgtatcccggaaatctatctggaccctggactgcagtgcaggagatgacagagtgaggagggcccagagcagaattctggccccagaactctgtgcccaggagccatgccttgagcagtattagccgtgtgtgtatgcatgtgagtgtgtgtgtatgtgtgtgtgtgcatgcatatgcatgtgcatgtgtgtgagctccttgaacgcacggagcaaaataaaattttcttagctaatccaa

SEQ ID NO: 402610 - DNA, 1364 bp, Homo sapiens
gctccagccacctgggtgtgagctatgccctctgccagaaatgctctttcctctattggcctggccacacctactcagtctttgggtctgtttaactgccacttcccccagtaaaccttctgctccccattcacatcagatggacttgtgtctcttgcactagtctatgagatttggatgtctgtgtccttagggcccaagctggccactctggcccagaagcagcctcgggccatgtcttgtctacagggtgtggggggacagtatgtgcacccccttgctttctcaggtggactttgaacagctgactgagaacctggggcagctggagcgccggagccgggcagccgaggagagcctgcggagcttggccaagcatgagctggccccagccctgcgtgcccgcctcacccacttcctggaccagtgtgcccgccgtgttgccatgctaaggatagtgcaccgccgtgtctgcaataggttccatgccttcctgctctacctgggctacaccccgcaggcggcccgtgaagtgcgcatcatgcagttctgccacacgctgcgggaatttgcgcttgagtatcggacttgccgggaacgagtgctacagcagcagcagaagcaggccacataccgtgagcgcaacaagacccggggacgcatgatcaccgagacagagaagttctcaggtgtggctggggaagcccccagcaacccctctgtcccagtagcagtgagcagcgggccaggccggggagatgctgacagtcatgctagtatgaagagtctgctgaccagcaggcctgaggacaccacacacaatcgccgcagcagaggcatggtccagagcagctccccaatcatgcccacagtggggccctccactgcatccccagaagaacccccaggctccagtttacccagtgatacatcagatgagatcatggaccttctggtgcagtcagtgaccaagagcagtcctcgtgccttagctgctagggaacgcaagcgttcccgcggcaaccgcaagtctttgagaaggacgttgaagagtgggctcggagatgacctggtgcaggcactgggactaagcaagggtcctggcctggaggtgtgaaggtgctgtatcccggaaatctatctggaccctggactgcagtgcaggagatgacagagtgaggagggcccagagcagaattctggccccagaactctgtgcccaggagccatgccttgagcagtattagccgtgtgtgtatgcatgtgagtgtgtgtgtatgtgtgtgtgtgcatgcatatgcatgtgcatgtgtgtgagctccttgaacgcacggagcaaaataaaattttcttagctaatccaa

SEQ ID NO: 402611 - DNA, 3908 bp, Homo sapiens
tgagccggccgcagagccatggcgggcggggaagaccgcggggacggagagccggtatcagtggtgaccgtgagggtgcagtacctggaagacaccgaccccttcgcatgtgccaactttccggagccgcgccgggcccccacctgcagcctggacggggcgctgcccttgggcgcgcagatacccgcggtgcaccgcctgctgggagcgccgctcaagttggaggattgtgctctgcaagtgtctccctccggatactacctggacaccgagctgtccctggaagagcagcgggagatgctggagggcttctatgaagagatcagcaaagggcggaagcccacgctgatccttcggacccagctctctgtgagggtcaacgctatcttggaaaagctgtatagctccagtggtcctgagctccgccgctccctcttctcactgaagcagatcttccaggaggacaaagacctggtgcctgaatttgtgcattcagaggggctgagctgcctgatccgtgtgggtgctgctgccgaccacaactaccagagctacatccttagagcgctcggccagctgatgctctttgtggatggaatgctgggggtggtggcccacagtgacactattcagtggctgtacacattgtgtgccagcctgtcccgcttggtggtgaagacagccctgaagctgctgttggtgtttgtagaatactccgaaaacaacgcaccgctgttcatccgtgcagtgaactctgtggccagcaccaccggtgctcctccctgggccaatctggtgtccatcctggaggagaagaatggcgctgaccctgagttgttggtgtacacggtcaccctcatcaacaagacgctggcggcgctcccggaccaggactccttctacgatgtgacggatgcactggagcagcagggcatggaagcgctggtccagcgccacctgggcactgcgggcactgacgtcgacctgcgcacgcagcttgtgctctacgagaacgccctgaaattggaggatggagacatcgaagaagccccaggcgctggtgggcggcgggaacgacgaaagccttcttctgaggagggcaagaggagccgccgttctctggaaggcgggggctgccccgcgcgtgccccggaacctggccccacaggccccgcctcaccggtaggccccacctcttccaccggccccgccctgctgacaggccccgcctccagccctgtgggccctccctccggtctccaagcttcagtgaacctttttcctaccatctctgtggcaccctcagctgacacctccagcgagaggagcatctacaaagcccggttcctggagaatgtggcggcagcagaaacagagaagcaggttgcgctggcccagggccgggcagagacacttgccggggccatgcccaatgaggcgggtggacacccagatgcccggcaactctgggactccccagagacagcccctgcagccagaacaccccagagccctgccccctgtgtcctgctccgggcccagcgaagccttgcaccagagcccaaggagccactgataccagcaagccccaaggctgagcccatctgggagctccctacccgtgcacccaggctctctattggggacctggacttttcagatctaggggaggatgaagaccaggacatgctgaatgtagagtctgtggaggctgggaaagacatcccagctccctcacccccactgcccctgctctcgggagtacccccccctcccccacttccacctcccccacccatcaaaggccccttcccaccacctccacctctacctctggctgcccctcttccccattcagtgcctgacagctcagccctccccactaagaggaagacagtaaaacttttctggcgtgacgctgaagctggctgggggccatggagtctctgcaagccgctttgggccctgcgccaccctctgggcttcactggaccctgtctcagtggacacggcccgactggaacacctctttgagtctcgtgccaaagaggtgctgccctccaagaaagctggagagggccgccggacaatgaccacagtgctggaccccaagcgcagcaacgccatcaacatcggcctaaccacactgccacctgtgcatgtcattaaggctgctctgctcaactttgatgagtttgctgtcagcaaggatggcattgagaagctactgaccatgatgcccacggaggaagagcggcagaagattgaggaagcccagctggccaaccctgacatacccctgggcccagccgagaacttcctgatgactcttgcctccattggcggcctcgctgctcgtctacaactctgggccttcaagctggactatgacagcatggagcgggaaattgctgagccactgtttgacctgaaagtgggtatggaacagctggtacagaatgccaccttccgctgcatcctggctaccctcctagcggtgggcaacttcctcaatggctcccagagcagcggctttgagctgagctacctggagaaggtgtcagaggtgaaggacacggtgcgtcgacagtcactgctacaccatctctgctccctagtgctccagacccggcctgagtcctctgacctctattcagaaatccctgccctgacccgctgtgccaaggtggactttgaacagctgactgagaacctggggcagctggagcgccggagccgggcagccgaggagagcctgcggagcttggccaagcatgagctggccccagccctgcgtgcccgcctcacccacttcctggaccagtgtgcccgccgtgttgccatgctaaggatagtgcaccgccgtgtctgcaataggttccatgccttcctgctctacctgggctacaccccgcaggcggcccgtgaagtgcgcatcatgcagttctgccacacgctgcgggaatttgcgcttgagtatcggacttgccgggaacgagtgctacagcagcagcagaagcaggccacataccgtgagcgcaacaagacccggggacgcatgatcaccgagacagagaagttctcaggtgtggctggggaagcccccagcaacccctctgtcccagtagcagtgagcagcgggccaggccggggagatgctgacagtcatgctagtatgaagagtctgctgaccagcaggcctgaggacaccacacacaatcgccgcagcagaggcatggtccagagcagctccccaatcatgcccacagtggggccctccactgcatccccagaagaacccccaggctccagtttacccagtgatacatcagatgagatcatggaccttctggtgcagtcagtgaccaagagcagtcctcgtgccttagctgctagggaacgcaagcgttcccgcggcaaccgcaagtctttgagaaggacgttgaagagtgggctcggagatgacctggtgcaggcactgggactaagcaagggtcctggcctggaggtgtgaaggtgctgtatcccggaaatctatctggaccctggactgcagtgcaggagatgacagagtgaggagggcccagagcagaattctggccccagaactctgtgcccaggagccatgccttgagcagtattagccgtgtgtgtatgcatgtgagtgtgtgtgtatgtgtgtgtgtgcatgcatatgcatgtgcatgtgtgtgagctccttgaacgcacggagcaaaataaaattttcttagctaatccaatagccccacactacacctctcatccctccctacaggcggccccctttggcccaggccactatcaacttcggcacgcttatgcatcgcggccgacttcacgccttttggccacattgcccttactggggggcgcctctacactccccg

SEQ ID NO: 402612 - DNA, 450 bp, Homo sapiens
aacctcagccttgccttcttatccccgccctccagacgctggcggcgctcccggaccaggactccttctacgatgtgacggatgcactggagcagcagggcatggaagcgctggtccagcgccacctgggcactgcgggcactgacgtcgacctgcgcacgcagcttgtgctctacgaggtgggccgggccttacgctctgaggcggattggaaagagggaagagagaagcgcagtccccagcgccccaccccacctgcatacacgttaaccactttcttacatcctggtccgcctctgctagaacgccctgaaattggaggatggagacatcgaagaagccccaggcgctggtgggcggcgggaacgacgaaagccttcttctgaggagggcaagaggagccgccgttctctggaaggcgggggctgccccgcgcgtgccccggaacct

SEQ ID NO: 402613 - DNA, 2350 bp, Homo sapiens
  misc_feature (67)..(67): n is a, c, g, or t
cgcccaaaccagcttctccacttcttcggaccagtgctcagagccagagaccaagtggtcctccatntccagcttcgaagccggggacggggacagctcccacgaggaccgagcacccccctggccaggcggtgtctctgttcgcacaggtccggagaagcgcagcagcaccaggccccctgctgagatggagccggggaagggtgagcaggcctcctcgtcggagagtgaccccgagggacccattgctgcacaaatgctgtccttcgtcatggatgaccccgactttgagagcgagggatcagacacacagcgcagggcggatgactttcccgtgcgagatgacccctccgatgtgactgacgaggatgagggccctgccgagccgcccccaccccccaagctccctctccccgccttcagactgaagaatgactcggacctcttcgggctggagctggaggaggccgtgctcaagttccgccagaagcctagctccatcaggtgccccgggcttccggggctgcgggccacccaccccagtctcacaaaggccccgggctgcagccaggctgggagctgggagtatacccactgccaacaagcctgtgtgtcccacagaggggccaggggactccacttgcacacacctgagcttctgagtccctgattctggcacagcacccaactcaggactgggctcctgggtggcccaccatggctctcgggcctgtgcccctcactgctgtgtccctattgccttctgcagcttcaagtccgttgagaagaaaatgacagacatgctaaaagaggaagaagagaggctccagctggcgcacagcaacatgaccaagggccaggagctgctgctgaccatccagatgggcatcgacaacctctatgtccggctgatgggcattaacttgcctgcgacccaggtaccgggagtgaggctgagctgccacacaccaggtccctgggcagggccagaggggagatgagaccctcctcccggcctacagagagaagtggtgctctccaacaccctcgatttgaacagcaagctggcgtactgcgaggggaagctcacgtacctggctgacagagtgcagatggtgtccaggaccgaggagggcgacacaaaggtgagggacaccctggagtcctcgactctgatggagaagtacaacaccaggatcagctttgagaaccgggaggaggatatgatcggactgctgcggacgctggggcgaccggggtctcggagaggagcacgggacacgcaggatcgggggaggttctgcgtaaggaggcagcccgggcccggaactgcgcgccagaaccgcgtgcgcatgcgccgaccgcgcgcgccgcgcccccgcggccctcgcggcgccccgtagccgcgcacccctcccgtcccgccgagccggcgccaagatggcggcgctgactcctggagagcggtcgcgccggaggccgcgggggccggagcggagcagccgcggctgaggttcccgagtcgccgctcggggctgcgctccgccgccgggaccccggcctctggccgcgccggctccggcctccgggggggccggggccgccgggacatggtgccagtcgcaccccttccccgccgccgctgagctcgccggccgcgcccgggctgggacgtccgagcgggaagatgttttccgccctgaagaagctggtggggtcggaccaggccccgggccgggacaagaacatccccgccgggctgcagtccatgaaccaggcgttgcagaggcgcttcgccaagggggtgcagtacaacagtttaaaagcaagttcatgaattcgcgtgccgtgtgcacggagagaggccgtagttcctggggctggagctagtccaggaggacagtgaagatgtcgccttccttagtcccccggcctgtgagcaagaggaagctgcagaccactcgggccaccctcacccagacacctttagcaaacatacgacgacaaagaagattttgatgaagttcaaattagagtcagcgtgctcatcagaaagaaagcgcagccaacacgtttaggaacagaaacggattatgttgaagacaaacaatccattgcgtttgtgttcagtaacccaagcatcaaaggaacttgtggctggggagaaggcttgactatttgaaatctcaggactcctctgtccaggagctcccagactcccgtggagtggaagcctgggggctcgctgaagaagtcacgtgactggaacgtgcttaatgcttggctgtctggtaaggaaaataaagtggtgcattttgaataaaaataaaagctgattttaaatgtgtta

SEQ ID NO: 402614 - DNA, 426 bp, Homo sapiens
cgaaaaaaaaatttaaaagaaagttgatgtccgaaccaagggccgtattggcttttcttatactctagaacatacgacgacaaagaagattttgatgaagttcaaattagagtcagcgtgctcatcagaaagaaagcgcagccaacacgtttaggaacagaaacggattatgttgaagacaaacaatccattgcgtttgtgttcagtaacccaagcatcaaaggaacttgtggctggggagaaggcttgactatttgaaatctcaggactcctctgtccaggagctcccagactcccgtggagtggaagcctgggggctcgctgaagaagtcacgtgactggaacgtgcttaatgcttggctgtctggtaaggaaaataaagtggtgcattttgaataaaaataaaagctgattttaaatgtgtta

SEQ ID NO: 402615 - DNA, 5283 bp, Homo sapiens
gttgtacggtgttctagaggatcccgaacggtgctgcggttggagttggattaatcttggtgtcctgtgacagggattcggaggccatgggggagggctgagcagggagacaggagaaggcaagagggctgtgagaagcgtgggctgagtgacctgctccttggtgagggtgcgtgagcaggggttagcagatgacggttttagctgcccaagggcacgctggaagaggccaggttttggggaagaggatgaatctgtcttcaggcaggctgaatgcacttccgtgagttctaggtggacctggccaggaggcagctgggggccagcggctggagggcagcagagcgtctgggctggcacatgctctgaggcatgggcaaggagggccgtgagctgaggggccacgggcacaagtggtttaggaaaagggtgtggccattggccggggatgcagttccaaagtctagtaaggtgagcatggccaaccgcccgctggctttactgccattaggggccttgttgagacagctccccaaccctgtgcccacccgcatgtccccagaggaacatgaggcaaagggaggcgtccttcatcgaggagcgccgggcaagggagaaccggctcaaccagcagaagaagctgatcgacaagatccacacgaaggagaccagcgagaagtaccgccggggccagatggacttggacttcccctcgaacctgatgagcacggagaccctgaaattgaggagaaaagagacctccacagcagaaatggaataccagtcgggcgtgactgctgtggtggagaaggtcaagagtgctgtacggtgctctcacgtctgggacatcactagccgcttcctggcccagaggaacacggaggagaacctggagctgcagatggaggactgtgaggagtggcgggtgcagctgaaggccctggtgaagcagctggagctggaggaggccgtgctcaagttccgccagaagcctagctccatcaggtgccccgggcttccggggctgcgggccacccaccccagtctcacaaaggccccgggctgcagccaggctgggagctgggagtatacccactgccaacaagcctgtgtgtcccacagaggggccaggggactccacttgcacacacctgagcttctgagtccctgattctggcacagcacccaactcaggactgggctcctgggtggcccaccatggctctcgggcctgtgcccctcactgctgtgtccctattgccttctgcagcttcaagtccgttgagaagaaaatgacagacatgctaaaagaggaagaagagaggctccagctggcgcacagcaacatgaccaagggccaggagctgctgctgaccatccagatgggcatcgacaacctctatgtccggctgatgggcattaacttgcctgcgacccaggtaccgggagtgaggctgagctgccacacaccaggtccctgggcagggccagaggggagatgagaccctcctcccggcctacagagagaagtggtgctctccaacaccctcgatttgaacagcaagctggcgtactgcgaggggaagctcacgtacctggctgacagagtgcagatggtgtccaggaccgaggagggcgacacaaaggtgagggacaccctggagtcctcgactctgatggagaagtacaacaccaggatcagctttgagaaccgggaggaggatatgatcggaggaggcatgccatgccagacgggcccggaggagaggcaccagggctggagcagggaggagcgcggtgaagacaccttccagttccccgacatggaccacagctacgtcccttcgcgcgccgagatcaagaggcaggcgcagcggctaatcgaggggaagctcaaggcggccaagaaaaagaagaagtagccccgccgccccgctccctgctttgctacacaaataaacatttttccaggactgctgcggacgctggggcgaccggggtctcggagaggagcacgggacacgcaggatcgggggaggttctgcgtaaggaggcagcccgggcccggaactgcgcgccagaaccgcgtgcgcatgcgccgaccgcgcgcgccgcgcccccgcggccctcgcggcgccccgtagccgcgcacccctcccgtcccgccgagccggcgccaagatggcggcgctgactcctggagagcggtcgcgccggaggccgcgggggccggagcggagcagccgcggctgaggttcccgagtcgccgctcggggctgcgctccgccgccgggaccccggcctctggccgcgccggctccggcctccgggggggccggggccgccgggacatggtgccagtcgcaccccttccccgccgccgctgagctcgccggccgcgcccgggctgggacgtccgagcgggaagatgttttccgccctgaagaagctggtggggtcggaccaggccccgggccgggacaagaacatccccgccgggctgcagtccatgaaccaggcgttgcagaggcgcttcgccaagggggtgcagtacaacatgaagatagtgatccggggagacaggaacacgggcaagacagcgctgtggcaccgcctgcagggccggccgttcgtggaggagtacatccccacacaggagatccaggtcaccagcatccactggagctacaagaccacggatgacatcgtgaaggttgaagtctgggatgtagtagacaaaggaaaatgcaaaaagcgaggcgacggcttaaagatggagaacgacccccaggaggcggagtctgaaatggccctggatgctgagttcctggacgtgtacaagaactgcaacggggtggtcatgatgttcgacattaccaagcagtggaccttcaattacattctccgggagcttccaaaagtgcccacccacgtgccagtgtgcgtgctggggaactaccgggacatgggcgagcaccgagtcatcctgccggacgacgtgcgtgacttcatcgacaacctggacagacctccaggttcctcctacttccgctatgctgagtcttccatgaagaacagcttcggcctaaagtaccttcataagttcttcaatatcccatttttgcagcttcagagggagacgctgttgcggcagctggagacgaaccagctggacatggacgccacgctggaggagctgtcggtgcagcaggagacggaggaccagaactacggcatcttcctggagatgatggaggctcgcagccgtggccatgcgtccccactggcggccaacgggcagagcccatccccgggctcccagtcaccagtggtgcctgcaggcgctgtgtccacggggagctccagccccggcacaccccagcccgccccacagctgcccctcaatgccgccccaccatcctctgtgccccctgtaccaccctcagaggccctgcccccacctgcgtgcccctcagcccccgccccacggcgcagcatcatctctaggctgtttgggacgtcacctgccaccgaggcagcccctccacctccagagccagtcccggccgcacagggcccagcaacggtccagagtgtggaggactttgttcctgacgaccgcctggaccgcagcttcctggaagacacaacccccgccagggacgagaagaaggtgggggccaaggctgcccagcaggacagcgacagtgatggggaggccctgggcggcaacccgatggtggcagggttccaggacgatgtggacctcgaagaccagccacgtgggagtcccccgctgcctgcaggccccgtccccagtcaagacatcactctttcgagtgaggaggaagcagaagtggcagctcccacaaaaggccctgccccagctccccagcagtgctcagagccagagaccaagtggtcctccataccagcttcgaagccacggagggggacagctcccacgaggaccgcagcacccccctggccaggcggtgtctctgttcgcacaggtccggagaagcgcagcagcaccaggccccctgctgagatggagccggggaagggtgagcaggcctcctcgtcggagagtgaccccgagggacccattgctgcacaaatgctgtccttcgtcatggatgaccccgactttgagagcgagggatcagacacacagcgcagggcggatgactttcccgtgcgagatgacccctccgatgtgactgacgaggatgagggccctgccgagccgcccccaccccccaagctccctctccccgccttcagactgaagaatgactcggacctcttcgggctggggctggaggaggccggacccaaggagagcagtgaggaaggtaaggagggcaaaaccccctctaaggagaagaagaagaagaagaaaaaaggcaaagaggaagaagaaaaagctgccaagaagaagagcaaacacaagaagagcaaggacaaggaggagggcaaggaggagcggcgacggcggcagcagcggcccccgcgcagcagggagaggacggctgccgatgagctggaggctttcctggggggcggggccccgggcggccgccaccctgggggtggcgactacgaggagctctaggccggcgtgggcagtggccgccctggggcggggggcgtgcctgtcactgcctggggaggcatttgcctctgtaccatcgcctttgccgctgccccgtggctgccgtgtgcgcttctgagctggaagaggccgggcattggtggtccccaggctgggccctgcaggtgctgggccttcaggcccagtgtgagcctgctctgcaagaagggaggggacagctggcttcagccaggctcggtggacaccctggccctctcggggcagagccgccagtgtttctcagggatgtgactgaggcccaggagggacctgtgagggtctgtttacagaggctgggcaggggccgcttggctgtggggtgtgcgctgccccggcacctgcttgccctccgcgctcatctggggccgcagcatgcctatggttccgcttccggccgggagccctgaacacgggtgtgcagactcaccctaaagggcggcccaggccccacgctagaaggctggcgagaccgaaggcagcatgtgaggcctctcctgggagtgggggttgtgtttcccacagtggcctcagctgcgcccccgctcaggtgagcccgaaggcaggagccgggaggcactcctcccaaacactccactcagaccataaagcactcctgtttcactctg

SEQ ID NO: 402616 - DNA, 5322 bp, Homo sapiens
  misc_feature (67)..(67): n is a, c, g, or t
cgcccaaaccagcttctccacttcttcggaccagtgctcagagccagagaccaagtggtcctccatntccagcttcgaagccggggacggggacagctcccacgaggaccgagcacccccctggccaggcggtgtctctgttcgcacaggtccggagaagcgcagcagcaccaggccccctgctgagatggagccggggaagggtgagcaggcctcctcgtcggagagtgaccccgagggacccattgctgcacaaatgctgtccttcgtcatggatgaccccgactttgagagcgagggatcagacacacagcgcagggcggatgactttcccgtgcgagatgacccctccgatgtgactgacgaggatgagggccctgccgagccgcccccaccccccaagctccctctccccgccttcagactgaagaatgactcggacctcttcgggctggagctggaggaggccgtgctcaagttccgccagaagcctagctccatcaggtgccccgggcttccggggctgcgggccacccaccccagtctcacaaaggccccgggctgcagccaggctgggagctgggagtatacccactgccaacaagcctgtgtgtcccacagaggggccaggggactccacttgcacacacctgagcttctgagtccctgattctggcacagcacccaactcaggactgggctcctgggtggcccaccatggctctcgggcctgtgcccctcactgctgtgtccctattgccttctgcagcttcaagtccgttgagaagaaaatgacagacatgctaaaagaggaagaagagaggctccagctggcgcacagcaacatgaccaagggccaggagctgctgctgaccatccagatgggcatcgacaacctctatgtccggctgatgggcattaacttgcctgcgacccaggtaccgggagtgaggctgagctgccacacaccaggtccctgggcagggccagaggggagatgagaccctcctcccggcctacagagagaagtggtgctctccaacaccctcgatttgaacagcaagctggcgtactgcgaggggaagctcacgtacctggctgacagagtgcagatggtgtccaggaccgaggagggcgacacaaaggtgagggacaccctggagtcctcgactctgatggagaagtacaacaccaggatcagctttgagaaccgggaggaggatatgatcggaggaggcatgccatgccagacgggcccggaggagaggcaccagggctggagcagggaggagcgcggtgaagacaccttccagttccccgacatggaccacagctacgtcccttcgcgcgccgagatcaagaggcaggcgcagcggctaatcgaggggaagctcaaggcggccaagaaaaagaagaagtagccccgccgccccgctccctgctttgctacacaaataaacatttttccaggactgctgcggacgctggggcgaccggggtctcggagaggagcacgggacacgcaggatcgggggaggttctgcgtaaggaggcagcccgggcccggaactgcgcgccagaaccgcgtgcgcatgcgccgaccgcgcgcgccgcgcccccgcggccctcgcggcgccccgtagccgcgcacccctcccgtcccgccgagccggcgccaagatggcggcgctgactcctggagagcggtcgcgccggaggccgcgggggccggagcggagcagccgcggctgaggttcccgagtcgccgctcggggctgcgctccgccgccgggaccccggcctctggccgcgccggctccggcctccgggggggccggggccgccgggacatggtgccagtcgcaccccttccccgccgccgctgagctcgccggccgcgcccgggctgggacgtccgagcgggaagatgttttccgccctgaagaagctggtggggtcggaccaggccccgggccgggacaagaacatccccgccgggctgcagtccatgaaccaggcgttgcagaggcgcttcgccaagggggtgcagtacaacatgaagatagtgatccggggagacaggaacacgggcaagacagcgctgtggcaccgcctgcagggccggccgttcgtggaggagtacatccccacacaggagatccaggtcaccagcatccactggagctacaagaccacggatgacatcgtgaaggttgaagtctgggatgtagtagacaaaggaaaatgcaaaaagcgaggcgacggcttaaagatggagaacgacccccaggaggcggagtctgaaatggccctggatgctgagttcctggacgtgtacaagaactgcaacggggtggtcatgatgttcgacattaccaagcagtggaccttcaattacattctccgggagcttccaaaagtgcccacccacgtgccagtgtgcgtgctggggaactaccgggacatgggcgagcaccgagtcatcctgccggacgacgtgcgtgacttcatcgacaacctggacagacctccaggttcctcctacttccgctatgctgagtcttccatgaagaacagcttcggcctaaagtaccttcataagttcttcaatatcccatttttgcagcttcagagggagacgctgttgcggcagctggagacgaaccagctggacatggacgccacgctggaggagctgtcggtgcagcaggagacggaggaccagaactacggcatcttcctggagatgatggaggctcgcagccgtggccatgcgtccccactggcggccaacgggcagagcccatccccgggctcccagtcaccagtggtgcctgcaggcgctgtgtccacggggagctccagccccggcacaccccagcccgccccacagctgcccctcaatgccgccccaccatcctctgtgccccctgtaccaccctcagaggccctgcccccacctgcgtgcccctcagcccccgccccacggcgcagcatcatctctaggctgtttgggacgtcacctgccaccgaggcagcccctccacctccagagccagtcccggccgcacagggcccagcaacggtccagagtgtggaggactttgttcctgacgaccgcctggaccgcagcttcctggaagacacaacccccgccagggacgagaagaaggtgggggccaaggctgcccagcaggacagcgacagtgatggggaggccctgggcggcaacccgatggtggcagggttccaggacgatgtggacctcgaagaccagccacgtgggagtcccccgctgcctgcaggccccgtccccagtcaagacatcactctttcgagtgaggaggaagcagaagtggcagctcccacaaaaggccctgccccagctccccagcagtgctcagagccagagaccaagtggtcctccataccagcttcgaagccacggagggggacagctcccacgaggaccgcagcacccccctggccaggcggtgtctctgttcgcacaggtccggagaagcgcagcagcaccaggccccctgctgagatggagccggggaagggtgagcaggcctcctcgtcggagagtgaccccgagggacccattgctgcacaaatgctgtccttcgtcatggatgaccccgactttgagagcgagggatcagacacacagcgcagggcggatgactttcccgtgcgagatgacccctccgatgtgactgacgaggatgagggccctgccgagccgcccccaccccccaagctccctctccccgccttcagactgaagaatgactcggacctcttcgggctggggctggaggaggccggacccaaggagagcagtgaggaaggtaaggagggcaaaaccccctctaaggagaagaagaagaagaagaaaaaaggcaaagaggaagaagaaaaagctgccaagaagaagagcaaacacaagaagagcaaggacaaggaggagggcaaggaggagcggcgacggcggcagcagcggcccccgcgcagcagggagaggacggctgccgatgagctggaggctttcctggggggcggggccccgggcggccgccaccctgggggtggcgactacgaggagctctaggccggcgtgggcagtggccgccctggggcggggggcgtgcctgtcactgcctggggaggcatttgcctctgtaccatcgcctttgccgctgccccgtggctgccgtgtgcgcttctgagctggaagaggccgggcattggtggtccccaggctgggccctgcaggtgctgggccttcaggcccagtgtgagcctgctctgcaagaagggaggggacagctggcttcagccaggctcggtggacaccctggccctctcggggcagagccgccagtgtttctcagggatgtgactgaggcccaggagggacctgtgagggtctgtttacagaggctgggcaggggccgcttggctgtggggtgtgcgctgccccggcacctgcttgccctccgcgctcatctggggccgcagcatgcctatggttccgcttccggccgggagccctgaacacgggtgtgcagactcaccctaaagggcggcccaggccccacgctagaaggctggcgagaccgaaggcagcatgtgaggcctctcctgggagtgggggttgtgtttcccacagtggcctcagctgcgcccccgctcaggtgagcccgaaggcaggagccgggaggcactcctcccaaacactccactcagaccataaagcactcctgtttcactctgaaaaaaaaaaaaaacaaaaaaaaaaaaaaaaaaaataaaagaaagggggagcgcagccgccgccgtcaataatatttctctctgactgagagggacgccaaagtaaggtgaggcccgacccccagcatttttttcttcaagaagggcggcgccgccaattatgatgcaggcgcctcttattattagcgaagggacgggccgcccgttctgttaacatcatgttcgtcatgtagcgtgaggaaaactagcgcgccaccttcgcgggaatactactcgtgcgagaggaagagaacccccatcacacctgcgtcgagctgggggtgaccacctaattctttgggagacaacaccctccccgacgacgggatattacgacagccgcctctggggctaaacctatactaaacctgttacgagtgtgtcgatcagcgcggcttgaaacaccagccaccgccactacttgctgccggctcggtcaataaaacagtttgtgacacagctgcgatattcattctagcgaaacaactattacacgcaggg

SEQ ID NO: 402617 - DNA, 4696 bp, Homo sapiens
  misc_feature (67)..(67): n is a, c, g, or t
cgcccaaaccagcttctccacttcttcggaccagtgctcagagccagagaccaagtggtcctccatntccagcttcgaagccggggacggggacagctcccacgaggaccgagcacccccctggccaggcggtgtctctgttcgcacaggtccggagaagcgcagcagcaccaggccccctgctgagatggagccggggaagggtgagcaggcctcctcgtcggagagtgaccccgagggacccattgctgcacaaatgctgtccttcgtcatggatgaccccgactttgagagcgagggatcagacacacagcgcagggcggatgactttcccgtgcgagatgacccctccgatgtgactgacgaggatgagggccctgccgagccgcccccaccccccaagctccctctccccgccttcagactgaagaatgactcggacctcttcgggctggagctggaggaggccgtgctcaagttccgccagaagcctagctccatcaggtgccccgggcttccggggctgcgggccacccaccccagtctcacaaaggccccgggctgcagccaggctgggagctgggagtatacccactgccaacaagcctgtgtgtcccacagaggggccaggggactccacttgcacacacctgagcttctgagtccctgattctggcacagcacccaactcaggactgggctcctgggtggcccaccatggctctcgggcctgtgcccctcactgctgtgtccctattgccttctgcagcttcaagtccgttgagaagaaaatgacagacatgctaaaagaggaagaagagaggctccagctggcgcacagcaacatgaccaagggccaggagctgctgctgaccatccagatgggcatcgacaacctctatgtccggctgatgggcattaacttgcctgcgacccaggtaccgggagtgaggctgagctgccacacaccaggtccctgggcagggccagaggggagatgagaccctcctcccggcctacagagagaagtggtgctctccaacaccctcgatttgaacagcaagctggcgtactgcgaggggaagctcacgtacctggctgacagagtgcagatggtgtccaggaccgaggagggcgacacaaaggtgagggacaccctggagtcctcgactctgatggagaagtacaacaccaggatcagctttgagaaccgggaggaggatatgatcggaggaggcatgccatgccagacgggcccggaggagaggcaccagggctggagcagggaggagcgcggtgaagacaccttccagttccccgacatggaccacagctacgtcccttcgcgcgccgagatcaagaggcaggcgcagcggctaatcgaggggaagctcaaggcggccaagaaaaagaagaagtagccccgccgccccgctccctgctttgctacacaaataaacatttttccaggactgctgcggacgctggggcgaccggggtctcggagaggagcacgggacacgcaggatcgggggaggttctgcgtaaggaggcagcccgggcccggaactgcgcgccagaaccgcgtgcgcatgcgccgaccgcgcgcgccgcgcccccgcggccctcgcggcgccccgtagccgcgcacccctcccgtcccgccgagccggcgccaagatggcggcgctgactcctggagagcggtcgcgccggaggccgcgggggccggagcggagcagccgcggctgaggttcccgagtcgccgctcggggctgcgctccgccgccgggaccccggcctctggccgcgccggctccggcctccgggggggccggggccgccgggacatggtgccagtcgcaccccttccccgccgccgctgagctcgccggccgcgcccgggctgggacgtccgagcgggaagatgttttccgccctgaagaagctggtggggtcggaccaggccccgggccgggacaagaacatccccgccgggctgcagtccatgaaccaggcgttgcagaggcgcttcgccaagggggtgcagtacaacaatccccacacaggagatccaggtcaccagcatccactggagctacaagaccacggatgacatcgtgaaggttgaagtctgggatgtagtagacaaaggaaaatgcaaaaagcgaggcgacggcttaaagatggagaacgacccccaggaggcggagtctgaaatggccctggatgctgagttcctggacgtgtacaagaactgcaacggggtggtcatgatgttcgacattaccaagcagtggaccttcaattacattctccgggagcttccaaaagtgcccacccacgtgccagtgtgcgtgctggggaactaccgggacatgggcgagcaccgagtcatcctgccggacgacgtgcgtgacttcatcgacaacctggacagacctccaggttcctcctacttccgctatgctgagtcttccatgaagaacagcttcggcctaaagtaccttcataagttcttcaatatcccatttttgcagcttcagagggagacgctgttgcggcagctggagacgaaccagctggacatggacgccacgctggaggagctgtcggtgcagcaggagacggaggaccagaactacggcatcttcctggagatgatggaggctcgcagccgtggccatgcgtccccactggcggccaacgggcagagcccatccccgggctcccagtcaccagtggtgcctgcaggcgctgtgtccacggggagctccagccccggcacaccccagcccgccccacagctgcccctcaatgccgccccaccatcctctgtgccccctgtaccaccctcagaggccctgcccccacctgcgtgcccctcagcccccgccccacggcgcagcatcatctctaggctgtttgggacgtcacctgccaccgaggcagcccctccacctccagagccagtcccggccgcacagggcccagcaacggtccagagtgtggaggactttgttcctgacgaccgcctggaccgcagcttcctggaagacacaacccccgccagggacgagaagaaggtgggggccaaggctgcccagcaggacagcgacagtgatggggaggccctgggcggcaacccgatggtggcagggttccaggacgatgtggacctcgaagaccagccacgtgggagtcccccgctgcctgcaggccccgtccccagtcaagacatcactctttcgagtgaggaggaagcagaagtggcagctcccacaaaaggccctgccccagctccccagcagtgctcagagccagagaccaagtggtcctccataccagcttcgaagccacggagggggacagctcccacgaggaccgcagcacccccctggccaggcggtgtctctgttcgcacaggtccggagaagcgcagcagcaccaggccccctgctgagatggagccggggaagggtgagcaggcctcctcgtcggagagtgaccccgagggacccattgctgcacaaatgctgtccttcgtcatggatgaccccgactttgagagcgagggatcagacacacagcgcagggcggatgactttcccgtgcgagatgacccctccgatgtgactgacgaggatgagggccctgccgagccgcccccaccccccaagctccctctccccgccttcagactgaagaatgactcggacctcttcgggctggggctggaggaggccggacccaaggagagcagtgaggaaggtaaggagggcaaaaccccctctaaggagaagaagaagaagaagaaaaaaggcaaagaggaagaagaaaaagctgccaagaagaagagcaaacacaagaagagcaaggacaaggaggagggcaaggaggagcggcgacggcggcagcagcggcccccgcgcagcagggagaggacggctgccgatgagctggaggctttcctggggggcggggccccgggcggccgccaccctgggggtggcgactacgaggagctctaggccggcgtgggcagtggccgccctggggcggggggcgtgcctgtcactgcctggggaggcatttgcctctgtaccatcgcctttgccgctgccccgtggctgccgtgtgcgcttctgagctggaagaggccgggcattggtggtccccaggctgggccctgcaggtgctgggccttcaggcccagtgtgagcctgctctgcaagaagggaggggacagctggcttcagccaggctcggtggacaccctggccctctcggggcagagccgccagtgtttctcagggatgtgactgaggcccaggagggacctgtgagggtctgtttacagaggctgggcaggggccgcttggctgtggggtgtgcgctgccccggcacctgcttgccctccgcgctcatctggggccgcagcatgcctatggttccgcttccggccgggagccctgaacacgggtgtgcagactcaccctaaagggcggcccaggccccacgctagaaggctggcgagaccgaaggcagcatgtgaggcctctcctgggagtgggggttgtgtttcccacagtggcctcagctgcgcccccgctcaggtgagcccgaaggcaggagccgggaggcactcctcccaaacactccactcagaccataaagcactcctgtttcactctg

SEQ ID NO: 402618 - DNA, 4891 bp, Homo sapiens
  misc_feature (67)..(67): n is a, c, g, or t
cgcccaaaccagcttctccacttcttcggaccagtgctcagagccagagaccaagtggtcctccatntccagcttcgaagccggggacggggacagctcccacgaggaccgagcacccccctggccaggcggtgtctctgttcgcacaggtccggagaagcgcagcagcaccaggccccctgctgagatggagccggggaagggtgagcaggcctcctcgtcggagagtgaccccgagggacccattgctgcacaaatgctgtccttcgtcatggatgaccccgactttgagagcgagggatcagacacacagcgcagggcggatgactttcccgtgcgagatgacccctccgatgtgactgacgaggatgagggccctgccgagccgcccccaccccccaagctccctctccccgccttcagactgaagaatgactcggacctcttcgggctggagctggaggaggccgtgctcaagttccgccagaagcctagctccatcaggtgccccgggcttccggggctgcgggccacccaccccagtctcacaaaggccccgggctgcagccaggctgggagctgggagtatacccactgccaacaagcctgtgtgtcccacagaggggccaggggactccacttgcacacacctgagcttctgagtccctgattctggcacagcacccaactcaggactgggctcctgggtggcccaccatggctctcgggcctgtgcccctcactgctgtgtccctattgccttctgcagcttcaagtccgttgagaagaaaatgacagacatgctaaaagaggaagaagagaggctccagctggcgcacagcaacatgaccaagggccaggagctgctgctgaccatccagatgggcatcgacaacctctatgtccggctgatgggcattaacttgcctgcgacccaggtaccgggagtgaggctgagctgccacacaccaggtccctgggcagggccagaggggagatgagaccctcctcccggcctacagagagaagtggtgctctccaacaccctcgatttgaacagcaagctggcgtactgcgaggggaagctcacgtacctggctgacagagtgcagatggtgtccaggaccgaggagggcgacacaaaggtgagggacaccctggagtcctcgactctgatggagaagtacaacaccaggatcagctttgagaaccgggaggaggatatgatcggaggaggcatgccatgccagacgggcccggaggagaggcaccagggctggagcagggaggagcgcggtgaagacaccttccagttccccgacatggaccacagctacgtcccttcgcgcgccgagatcaagaggcaggcgcagcggctaatcgaggggaagctcaaggcggccaagaaaaagaagaagtagccccgccgccccgctccctgctttgctacacaaataaacatttttccaggactgctgcggacgctggggcgaccggggtctcggagaggagcacgggacacgcaggatcgggggaggttctgcgtaaggaggcagcccgggcccggaactgcgcgccagaaccgcgtgcgcatgcgccgaccgcgcgcgccgcgcccccgcggccctcgcggcgccccgtagccgcgcacccctcccgtcccgccgagccggcgccaagatggcggcgctgactcctggagagcggtcgcgccggaggccgcgggggccggagcggagcagccgcggctgaggttcccgagtcgccgctcggggctgcgctccgccgccgggaccccggcctctggccgcgccggctccggcctccgggggggccggggccgccgggacatggtgccagtcgcaccccttccccgccgccgctgagctcgccggccgcgcccgggctgggacgtccgagcgggaagatgttttccgccctgaagaagctggtggggtcggaccaggccccgggccgggacaagaacatccccgccgggctgcagtccatgaaccaggcgttgcagaggcgcttcgccaagggggtgcagtacaacatgaagatagtgatccggggagacaggaacacgggcaagacagcgctgtggcaccgcctgcagggccggccgttcgtggaggagtacatccccacacaggagatccaggtcaccagcatccactggagctacaagaccacggatgacatcgtgaaggttgaagtctgggatgtagtagacaaaggaaaatgcaaaaagcgaggcgacggcttaaagatggagaacgacccccaggaggcggagtctgaaatggccctggatgctgagttcctggacgtgtacaagaactgcaacggggtggtcatgatgttcgacattaccaagcagtggaccttcaattacattctccgggagcttccaaaagtgcccacccacgtgccagtgtgcgtgctggggaactaccgggacatgggcgagcaccgagtcatcctgccggacgacgtgcgtgacttcatcgacaacctggacagacctccaggttcctcctacttccgctatgctgagtcttccatgaagaacagcttcggcctaaagtaccttcataagttcttcaatatcccatttttgcagcttcagagggagacgctgttgcggcagctggagacgaaccagctggacatggacgccacgctggaggagctgtcggtgcagcaggagacggaggaccagaactacggcatcttcctggagatgatggaggctcgcagccgtggccatgcgtccccactggcggccaacgggcagagcccatccccgggctcccagtcaccagtggtgcctgcaggcgctgtgtccacggggagctccagccccggcacaccccagcccgccccacagctgcccctcaatgccgccccaccatcctctgtgccccctgtaccaccctcagaggccctgcccccacctgcgtgcccctcagcccccgccccacggcgcagcatcatctctaggctgtttgggacgtcacctgccaccgaggcagcccctccacctccagagccagtcccggccgcacagggcccagcaacggtccagagtgtggaggactttgttcctgacgaccgcctggaccgcagcttcctggaagacacaacccccgccagggacgagaagaaggtgggggccaaggctgcccagcaggacagcgacagtgatggggaggccctgggcggcaacccgatggtggcagggttccaggacgatgtggacctcgaagaccagccacgtgggagtcccccgctgcctgcaggccccgtccccagtcaagacatcactctttcgagtgaggaggaagcagaagtggcagctcccacaaaaggccctgccccagctccccagcagtgctcagagccagagaccaagtggtcctccataccagcttcgaagccacggagggggacagctcccacgaggaccgcagcacccccctggccaggcggtgtctctgttcgcacaggtccggagaagcgcagcagcaccaggccccctgctgagatggagccggggaagggtgagcaggcctcctcgtcggagagtgaccccgagggacccattgctgcacaaatgctgtccttcgtcatggatgaccccgactttgagagcgagggatcagacacacagcgcagggcggatgactttcccgtgcgagatgacccctccgatgtgactgacgaggatgagggccctgccgagccgcccccaccccccaagctccctctccccgccttcagactgaagaatgactcggacctcttcgggctggggctggaggaggccggacccaaggagagcagtgaggaaggtaaggagggcaaaaccccctctaaggagaagaagaagaagaagaaaaaaggcaaagaggtactggctactccccttcctggcaggccaggactgggtggcatgcggtcctgggaccagggctgtggcttcctgtgactccatggcgccccatccttgtgctcctcaggaagaagaaaaagctgccaagaagaagagcaaacacaagaagagcaaggacaaggaggagggcaaggaggagcggcgacggcggcagcagcggcccccgcgcagcagggagaggacggctgccgatgagctggaggctttcctggggggcggggccccgggcggccgccaccctgggggtggcgactacgaggagctctaggccggcgtgggcagtggccgccctggggcggggggcgtgcctgtcactgcctggggaggcatttgcctctgtaccatcgcctttgccgctgccccgtggctgccgtgtgcgcttctgagctggaagaggccgggcattggtggtccccaggctgggccctgcaggtgctgggccttcaggcccagtgtgagcctgctctgcaagaagggaggggacagctggcttcagccaggctcggtggacaccctggccctctcggggcagagccgccagtgtttctcagggatgtgactgaggcccaggagggacctgtgagggtctgtttacagaggctgggcaggggccgcttggctgtggggtgtgcgctgccccggcacctgcttgccctccgcgctcatctggggccgcagcatgcctatggttccgcttccggccgggagccctgaacacgggtgtgcagactcaccctaaagggcggcccaggccccacgctagaaggctggcgagaccgaaggcagcatgtgaggcctctcctgggagtgggggttgtgtttcccacagtggcctcagctgcgcccccgctcaggtgagcccgaaggcaggagccgggaggcactcctcccaaacactccactcagaccataaagcactcctgtttcactctg

SEQ ID NO: 402619 - DNA, 4572 bp, Homo sapiens
  misc_feature (67)..(67): n is a, c, g, or t
cgcccaaaccagcttctccacttcttcggaccagtgctcagagccagagaccaagtggtcctccatntccagcttcgaagccggggacggggacagctcccacgaggaccgagcacccccctggccaggcggtgtctctgttcgcacaggtccggagaagcgcagcagcaccaggccccctgctgagatggagccggggaagggtgagcaggcctcctcgtcggagagtgaccccgagggacccattgctgcacaaatgctgtccttcgtcatggatgaccccgactttgagagcgagggatcagacacacagcgcagggcggatgactttcccgtgcgagatgacccctccgatgtgactgacgaggatgagggccctgccgagccgcccccaccccccaagctccctctccccgccttcagactgaagaatgactcggacctcttcgggctggagctggaggaggccgtgctcaagttccgccagaagcctagctccatcaggtgccccgggcttccggggctgcgggccacccaccccagtctcacaaaggccccgggctgcagccaggctgggagctgggagtatacccactgccaacaagcctgtgtgtcccacagaggggccaggggactccacttgcacacacctgagcttctgagtccctgattctggcacagcacccaactcaggactgggctcctgggtggcccaccatggctctcgggcctgtgcccctcactgctgtgtccctattgccttctgcagcttcaagtccgttgagaagaaaatgacagacatgctaaaagaggaagaagagaggctccagctggcgcacagcaacatgaccaagggccaggagctgctgctgaccatccagatgggcatcgacaacctctatgtccggctgatgggcattaacttgcctgcgacccaggtaccgggagtgaggctgagctgccacacaccaggtccctgggcagggccagaggggagatgagaccctcctcccggcctacagagagaagtggtgctctccaacaccctcgatttgaacagcaagctggcgtactgcgaggggaagctcacgtacctggctgacagagtgcagatggtgtccaggaccgaggagggcgacacaaaggtgagggacaccctggagtcctcgactctgatggagaagtacaacaccaggatcagctttgagaaccgggaggaggatatgatcggaggaggcatgccatgccagacgggcccggaggagaggcaccagggctggagcagggaggagcgcggtgaagacaccttccagttccccgacatggaccacagctacgtcccttcgcgcgccgagatcaagaggcaggcgcagcggctaatcgaggggaagctcaaggcggccaagaaaaagaagaagtagccccgccgccccgctccctgctttgctacacaaataaacatttttccaggactgctgcggacgctggggcgaccggggtctcggagaggagcacgggacacgcaggatcgggggaggttctgcgtaaggaggcagcccgggcccggaactgcgcgccagaaccgcgtgcgcatgcgccgaccgcgcgcgccgcgcccccgcggccctcgcggcgccccgtagccgcgcacccctcccgtcccgccgagccggcgccaagatggcggcgctgactcctggagagcggtcgcgccggaggccgcgggggccggagcggagcagccgcggctgaggttcccgagtcgccgctcggggctgcgctccgccgccgggaccccggcctctggccgcgccggctccggcctccgggggggccggggccgccgggacatggtgccagtcgcaccccttccccgccgccgctgagctcgccggccgcgcccgggctgggacgtccgagcgggaagatgttttccgccctgaagaagctggtggggtcggaccaggccccgggccgggacaagaacatccccgccgggctgcagtccatgaaccaggcgttgcagaggcgcttcgccaagggggtgcagtacaacatgaagatagtgatccggggagacaggaacacgggcaagacagcgctgtggcaccgcctgcagggccggccgttcgtggaggagtacatccccacacaggagatccaggtcaccagcatccactggagctacaagaccacggatgacatcgtgaaggttgaagtctgggatgtagtagacaaaggaaaatgcaaaaagcgaggcgacggcttaaagatggagaacgacccccaggaggcggagtctgaaatggccctggatgctgagttcctggacgtgtacaagaactgcaacggggtggtcatgatgttcgacattaccaagcagtggaccttcaattacattctccgggagcttccaaaagtgcccacccacgtgccagtgtgcgtgctggggaactaccgggacatgggcgagcaccgagtcatcctgccggacgacgtgcgtgacttcatcgacaacctggacagacctccaggttcctcctacttccgctatgctgagtcttccatgaagaacagcttcggcctaaagtaccttcataagttcttcaatatcccatttttgcagcttcagagggagacgctgttgcggcagctggagacgaaccagctggacatggacgccacgctggaggagctgtcggtgcagcaggagacggaggaccagaactacggcatcttcctggagatgatggaggctcgcagccgtggccatgcgtccccactggcggccaacgggcagagcccatccccgggctcccagtcaccagtggtgcctgcaggcgctgtgtccacggggagctccagccccggcacaccccagcccgccccacagctgcccctcaatgccgccccaccatcctctgtgccccctgtaccaccctcagaggccctgcccccacctgcgtgcccctcagcccccgccccacggcgcagcatcatctctaggctgtttgggacgtcacctgccaccgaggcagcccctccacctccagagccagtcccggccgcacagggcccagcaacggtccagagtgtggaggactttgttcctgacgaccgcctggaccgcagcttcctggaagacacaacccccgccagggacgagaagaaggtgggggccaaggctgcccagcaggacagcgacagtgatggggaggccctgggcggcaacccgatggtggcagggttccaggacgatgtggacctcgaagaccagccacgtgggagtcccccgctgcctgcaggccccgtccccagtcaagacatcactctttcgagtgaggaggaagcagaagtggcagctcccacaaaaggccctgccccagctccccagcagtgctcagagccagagaccaagtggtcctccataccagcttcgaagccacggagggggacagctcccacgaggaccgcagcacccccctggccaggcggtgtctctgttcgcacaggtccggagaagcgcagcagcaccaggccccctgctgagatggagccggggaagggtgagcaggcctcctcgtcggagagtgaccccgagggacccattgctgcacaaatgctgtccttcgtcatggatgaccccgactttgagagcgagggatcagacacacagcgcagggcggatgactttcccgtgcgagatgacccctccgatgtgactgacgaggatgagggccctgccgagccgcccccaccccccaagctccctctccccgccttcagactgaagaatgactcggacctcttcgggctggggctggaggaggccggacccaaggagagcagtgaggaaggtaaggagggcaaaaccccctctaaggagaagaagaagaagaagaaaaaaggcaaagaggaagaagaaaaagctgccaagaagaagagcaaacacaagaagagcaaggacaaggaggagggcaaggaggagcggcgacggcggcagcagcggcccccgcgcagcagggagaggacggctgccgatgagctggaggctttcctggggggcggggccccgggcggccgccaccctgggggtggcgactacgaggagctctaggccggcgtgggcagtggccgccctggggcggggggcgtgcctgtcactgcctggggaggcatttgcctctgtaccatcgcctttgccgctgccccgtggctgccgtgtgcgcttctgagctggaagaggccgggcattggtggtccccaggctgggccctgcaggtgctgggccttcaggcccagtgtgagcctgctctgcaagaagggaggggacagctggcttcagccaggctcggtggacaccctggccctctcggggcagagccgccagtgtttctcagggatgtgaggtctgtttacagaggctgggcaggggccgcttggctgtggggtgtgcgctgccccggcacctgcttgcctgcgcccccgctcaggtgagcccgaaggcaggagccgggaggcactcctcccaaacactccactcagaccataaagcactcctgtttcactctg

SEQ ID NO: 402620 - DNA, 3708 bp, Homo sapiens
  misc_feature (67)..(67): n is a, c, g, or t
cgcccaaaccagcttctccacttcttcggaccagtgctcagagccagagaccaagtggtcctccatntccagcttcgaagccggggacggggacagctcccacgaggaccgagcacccccctggccaggcggtgtctctgttcgcacaggtccggagaagcgcagcagcaccaggccccctgctgagatggagccggggaagggtgagcaggcctcctcgtcggagagtgaccccgagggacccattgctgcacaaatgctgtccttcgtcatggatgaccccgactttgagagcgagggatcagacacacagcgcagggcggatgactttcccgtgcgagatgacccctccgatgtgactgacgaggatgagggccctgccgagccgcccccaccccccaagctccctctccccgccttcagactgaagaatgactcggacctcttcgggctggagctggaggaggccgtgctcaagttccgccagaagcctagctccatcaggtgccccgggcttccggggctgcgggccacccaccccagtctcacaaaggccccgggctgcagccaggctgggagctgggagtatacccactgccaacaagcctgtgtgtcccacagaggggccaggggactccacttgcacacacctgagcttctgagtccctgattctggcacagcacccaactcaggactgggctcctgggtggcccaccatggctctcgggcctgtgcccctcactgctgtgtccctattgccttctgcagcttcaagtccgttgagaagaaaatgacagacatgctaaaagaggaagaagagaggctccagctggcgcacagcaacatgaccaagggccaggagctgctgctgaccatccagatgggcatcgacaacctctatgtccggctgatgggcattaacttgcctgcgacccaggtaccgggagtgaggctgagctgccacacaccaggtccctgggcagggccagaggggagatgagaccctcctcccggcctacagagagaagtggtgctctccaacaccctcgatttgaacagcaagctggcgtactgcgaggggaagctcacgtacctggctgacagagtgcagatggtgtccaggaccgaggagggcgacacaaaggtgagggacaccctggagtcctcgactctgatggagaagtacaacaccaggatcagctttgagaaccgggaggaggatatgatcggaggaggcatgccatgccagacgggcccggaggagaggcaccagggctggagcagggaggagcgcggtgaagacaccttccagttccccgacatggaccacagctacgtcccttcgcgcgccgagatcaagaggcaggcgcagcggctaatcgaggggaagctcaaggcggccaagaaaaagaagaagtagccccgccgccccgctccctgctttgctacacaaataaacatttttccaggactgctgcggacgctggggcgaccggggtctcggagaggagcacgggacacgcaggatcgggggaggttctgcgtaaggaggcagcccgggcccggaactgcgcgccagaaccgcgtgcgcatgcgccgaccgcgcgcgccgcgcccccgcggccctcgcggcgccccgtagccgcgcacccctcccgtcccgccgagccggcgccaagatggcggcgctgactcctggagagcggtcgcgccggaggccgcgggggccggagcggagcagccgcggctgaggttcccgagtcgccgctcggggctgcgctccgccgccgggaccccggcctctggccgcgccggctccggcctccgggggggccggggccgccgggacatggtgccagtcgcaccccttccccgccgccgctgagctcgccggccgcgcccgggctgggacgtccgagcgggaagatgttttccgccctgaagaagctggtggggtcggaccaggccccgggccgggacaagaacatccccgccgggctgcagtccatgaaccaggcgttgcagaggcgcttcgccaagggggtgcagtacaacatgaagatagtgatccggggagacaggaacacgggcaagacagcgctgtggcaccgcctgcagggccggccgttcgtggaggagtacatccccacacaggagatccaggtcaccagcatccactggagctacaagaccacggatgacatcgtgaaggttgaagtctgggatgtagtagacaaaggaaaatgcaaaaagcgaggcgacggcttaaagatggagaacgacccccaggaggcggagtctgaaatggccctggatgctgagttcctggacgtgtacaagaactgcaacggggtggtcatgatgttcgacattaccaagcagtggaccttcaattacattctccgggagcttccaaaagtgcccacccacgtgccagtgtgcgtgctggggaactaccgggacatgggcgagcaccgagtcatcctgccggacgacgtgcgtgacttcatcgacaacctggacagacctccaggttcctcctacttccgctatgctgagtcttccatgaagaacagcttcggcctaaagtaccttcataagttcttcaatatcccatttttgcagcttcagagggagacgctgttgcggcagctggagacgaaccagctggacatggacgccacgctggaggagctgtcggtgcagcaggagacggaggaccagaactacggcatcttcctggagatgatggaggctcgcagccgtggccatgcgtccccactggcggccaacgggcagagcccatccccgggctcccagtcaccagtggtgcctgcaggcgctgtgtccacggggagctccagccccggcacaccccagcccgccccacagctgcccctcaatgccgccccaccatcctctgtgccccctgtaccaccctcagaggccctgcccccacctgcgtgcccctcagcccccgccccacggcgcagcatcatctctaggcgccaccctgggggtggcgactacgaggagctctaggccggcgtgggcagtggccgccctggggcggggggcgtgcctgtcactgcctggggaggcatttgcctctgtaccatcgcctttgccgctgccccgtggctgccgtgtgcgcttctgagctggaagaggccgggcattggtggtccccaggctgggccctgcaggtgctgggccttcaggcccagtgtgagcctgctctgcaagaagggaggggacagctggcttcagccaggctcggtggacaccctggccctctcggggcagagccgccagtgtttctcagggatgtgactgaggcccaggagggacctgtgagggtctgtttacagaggctgggcaggggccgcttggctgtggggtgtgcgctgccccggcacctgcttgccctccgcgctcatctggggccgcagcatgcctatggttccgcttccggccgggagccctgaacacgggtgtgcagactcaccctaaagggcggcccaggccccacgctagaaggctggcgagaccgaaggcagcatgtgaggcctctcctgggagtgggggttgtgtttcccacagtggcctcagctgcgcccccgctcaggtgagcccgaaggcaggagccgggaggcactcctcccaaacactccactcagaccataaagcactcctgtttcactctg

SEQ ID NO: 402621 - DNA, 2455 bp, Homo sapiens
  misc_feature (44)..(44): n is a, c, g, or t
ctagaggatcccgcatcacccgggtatggtggtcatatgtcganattaccaagcagtggaccttcaattacattctccgggagcttccaaaagtgcccacccacgtgccagtgtgcgtgctggggaactaccgggacatgggcgagcaccgagtcatcctgccggacgacgtgcgtgacttcatcgacaacctggacagacctccaggttcctcctacttccgctatgctgagtcttccatgaagaacagcttcggcctaaagtaccttcataagttcttcaatatcccatttttgcagcttcagagggagacgctgttgcggcagctggagacgaaccagctggacatggacgccacgctggaggagctgtcggtgcagcaggagacggaggaccagaactacggcatcttcctggagatgatggaggctcgcagccgtggccatgcgtccccactggcggccaacgggcagagcccatccccgggctcccagtcaccagtggtgcctgcaggcgctgtgtccacggggagctccagccccggcacaccccagcccgccccacagctgcccctcaatgccgccccaccatcctctgtgccccctgtaccaccctcagaggccctgcccccacctgcgtgcccctcagcccccgccccacggcgcagcatcatctctaggctgtttgggacgtcacctgccaccgaggcagcccctccacctccagagccagtcccggccgcacagggcccagcaacggtccagagtgtggaggactttgttcctgacgaccgcctggaccgcagcttcctggaagacacaacccccgccagggacgagaagaaggtgggggccaaggctgcccagcaggacagcgacagtgatggggaggccctgggcggcaacccgatggtggcagggttccaggacgatgtggacctcgaagaccagccacgtgggagtcccccgctgcctgcaggccccgtccccagtcaagacatcactctttcgagtgaggaggaagcagaagtggcagctcccacaaaaggccctgccccagctccccagcagtgctcagagccagagaccaagtggtcctccataccagcttcgaagccacggagggggacagctcccacgaggaccgcagcacccccctggccaggcggtgtctctgttcgcacaggtccggagaagcgcagcagcaccaggccccctgctgagatggagccggggaagggtgagcaggcctcctcgtcggagagtgaccccgagggacccattgctgcacaaatgctgtccttcgtcatggatgaccccgactttgagagcgagggatcagacacacagcgcagggcggatgactttcccgtgcgagatgacccctccgatgtgactgacgaggatgagggccctgccgagccgcccccaccccccaagctccctctccccgccttcagactgaagaatgactcggacctcttcgggctggggctggaggaggccggacccaaggagagcagtgaggaaggtaaggagggcaaaaccccctctaaggagaagaagaagaagaagaaaaaaggcaaagaggaagaagaaaaagctgccaagaagaagagcaaacacaagaagagcaaggacaaggaggagggcaaggaggagcggcgacggcggcagcagcggcccccgcgcagcagggagaggacggctgccgatgagctggaggctttcctggggggcggggccccgggcggccgccaccctgggggtggcgactacgaggagctctaggccggcgtgggcagtggccgccctggggcggggggcgtgcctgtcactgcctggggaggcatttgcctctgtaccatcgcctttgccgctgccccgtggctgccgtgtgcgcttctgagctggaagaggccgggcattggtggtccccaggctgggccctgcaggtgctgggccttcaggcccagtgtgagcctgctctgcaagaagggaggggacagctggcttcagccaggctcggtggacaccctggccctctcggggcagagccgccagtgtttctcagggatgtgactgaggcccaggagggacctgtgagggtctgtttacagaggctgggcaggggccgcttggctgtggggtgtgcgctgccccggcacctgcttgccctccgcgctcatctggggccgcagcatgcctatggttccgcttccggccgggagccctgaacacgggtgtgcagactcaccctaaagggcggcccaggccccacgctagaaggctggcgagaccgaaggcagcatgtgaggcctctcctgggagtgggggttgtgtttcccacagtggcctcagctgcgcccccgctcaggtgagcccgaaggcaggagccgggaggcactcctcccaaacactccactcagaccataaagcactcctgtttcactctg

SEQ ID NO: 402622 - DNA, 3821 bp, Homo sapiens
  misc_feature (67)..(67): n is a, c, g, or t
cgcccaaaccagcttctccacttcttcggaccagtgctcagagccagagaccaagtggtcctccatntccagcttcgaagccggggacggggacagctcccacgaggaccgagcacccccctggccaggcggtgtctctgttcgcacaggtccggagaagcgcagcagcaccaggccccctgctgagatggagccggggaagggtgagcaggcctcctcgtcggagagtgaccccgagggacccattgctgcacaaatgctgtccttcgtcatggatgaccccgactttgagagcgagggatcagacacacagcgcagggcggatgactttcccgtgcgagatgacccctccgatgtgactgacgaggatgagggccctgccgagccgcccccaccccccaagctccctctccccgccttcagactgaagaatgactcggacctcttcgggctggagctggaggaggccgtgctcaagttccgccagaagcctagctccatcaggtgccccgggcttccggggctgcgggccacccaccccagtctcacaaaggccccgggctgcagccaggctgggagctgggagtatacccactgccaacaagcctgtgtgtcccacagaggggccaggggactccacttgcacacacctgagcttctgagtccctgattctggcacagcacccaactcaggactgggctcctgggtggcccaccatggctctcgggcctgtgcccctcactgctgtgtccctattgccttctgcagcttcaagtccgttgagaagaaaatgacagacatgctaaaagaggaagaagagaggctccagctggcgcacagcaacatgaccaagggccaggagctgctgctgaccatccagatgggcatcgacaacctctatgtccggctgatgggcattaacttgcctgcgacccaggtaccgggagtgaggctgagctgccacacaccaggtccctgggcagggccagaggggagatgagaccctcctcccggcctacagagagaagtggtgctctccaacaccctcgatttgaacagcaagctggcgtactgcgaggggaagctcacgtacctggctgacagagtgcagatggtgtccaggaccgaggagggcgacacaaaggtgagggacaccctggagtcctcgactctgatggagaagtacaacaccaggatcagctttgagaaccgggaggaggatatgatcggaggaggcatgccatgccagacgggcccggaggagaggcaccagggctggagcagggaggagcgcggtgaagacaccttccagttccccgacatggaccacagctacgtcccttcgcgcgccgagatcaagaggcaggcgcagcggctaatcgaggggaagctcaaggcggccaagaaaaagaagaagtagccccgccgccccgctccctgctttgctacacaaataaacatttttccaggactgctgcggacgctggggcgaccggggtctcggagaggagcacgggacacgcaggatcgggggaggttctgcgtaaggaggcagcccgggcccggaactgcgcgccagaaccgcgtgcgcatgcgccgaccgcgcgcgccgcgcccccgcggccctcgcggcgccccgtagccgcgcacccctcccgtcccgccgagccggcgccaagatggcggcgctgactcctggagagcggtcgcgccggaggccgcgggggccggagcggagcagccgcggctgaggttcccgagtcgccgctcggggctgcgctccgccgccgggaccccggcctctggccgcgccggctccggcctccgggggggccggggccgccgggacatggtgccagtcgcaccccttccccgccgccgctgagctcgccggccgcgcccgggctgggacgtccgagcgggaagatgttttccgccctgaagaagctggtggggtcggaccaggccccgggccgggacaagaacatccccgccgggctgcagtccatgaaccaggcgttgcagaggcgcttcgccaagggggtgcagtacaacatgaagatagtgatccggggagacaggaacacgggcaagacagcgctgtggcaccgcctgcagggccggccgttcgtggaggagtacatccccacacaggagatccaggtcaccagcatccactggagctacaagaccacggatgacatcgtgaaggttgaagtctgggatgtagtagacaaaggaaaatgcaaaaagcgaggcgacggcttaaagatggagaacgacccccaggaggcggagtctgaaatggccctggatgctgagttcctggacgtgtacaagaactgcaacggggtggtcatgatgttcgacattaccaagcagtggaccttcaattacattctccgggagcttccaaaagtgcccacccacgtgccagtgtgcgtgctggggaactaccgggacatgggcgagcaccgagtcatcctgccggacgacgtgcgtgacttcatcgacaacctggacagacctccaggttcctcctacttccgctatgctgagtcttccatgaagaacagcttcggcctaaagtaccttcataagttcttcaatatcccatttttgcagcttcagagggagacgctgttgcggcagctggagacgaaccagctggacatggacgccacgctggaggagctgtcggtgcagcaggagacggaggaccagaactacggcatcttcctggagatgatggaggctcgcagccgtggccatgcgtccccactggcggccaacgggcagagcccatccccgggctcccagtcaccagtggtgcctgcaggcgctgtgtccacggggagctccagccccggcacaccccagcccgccccacagctgcccctcaatgccgccccaccatcctctgtgccccctgtaccaccctcagaggccctgcccccacctgcgtgcccctcagcccccgccccacggcgcagcatcatctctaggctgtttgggacgtcacctgccaccgaggcagcccctccacctccagagccagtcccggccgcacagggcccagcaacggtccagagtgtggaggactttgttcctgacgaccgcctggaccgcagcttcctggaagacacaacccccgccagggacgagaagaaggtgggggccaaggctgcccagcaggacagcgacagtgatggggaggccctgggcggcaacccgatggtggcagggttccaggacgatgtggacctcgaagaccagccacgtgggagtcccccgctgcctgcaggccccgtccccagtcaagacatcactctttcgagtgaggaggaagcagaagtggcagctcccacaaaaggccctgccccagctccccagcagtgctcagagccagagaccaagtgagccgccagtgtttctcagggatgtgactgaggcccaggagggacctgtgagggtctgtttacagaggctgggcaggggccgcttggctgtggggtgtgcgctgccccggcacctgcttgccctccgcgctcatctggggccgcagcatgcctatggttccgcttccggccgggagccctgaacacgggtgtgcagactcaccctaaagggcggcccaggccccacgctagaaggctggcgagaccgaaggcagcatgtgaggcctctcctgggagtgggggttgtgtttcccacagtggcctcagctgcgcccccgctcaggtgagcccgaaggcaggagccgggaggcactcctcccaaacactccactcagaccataaagcactcctgtttcactctg

SEQ ID NO: 402623 - DNA, 4602 bp, Homo sapiens
  misc_feature (67)..(67): n is a, c, g, or t
cgcccaaaccagcttctccacttcttcggaccagtgctcagagccagagaccaagtggtcctccatntccagcttcgaagccggggacggggacagctcccacgaggaccgagcacccccctggccaggcggtgtctctgttcgcacaggtccggagaagcgcagcagcaccaggccccctgctgagatggagccggggaagggtgagcaggcctcctcgtcggagagtgaccccgagggacccattgctgcacaaatgctgtccttcgtcatggatgaccccgactttgagagcgagggatcagacacacagcgcagggcggatgactttcccgtgcgagatgacccctccgatgtgactgacgaggatgagggccctgccgagccgcccccaccccccaagctccctctccccgccttcagactgaagaatgactcggacctcttcgggctggagctggaggaggccgtgctcaagttccgccagaagcctagctccatcaggtgccccgggcttccggggctgcgggccacccaccccagtctcacaaaggccccgggctgcagccaggctgggagctgggagtatacccactgccaacaagcctgtgtgtcccacagaggggccaggggactccacttgcacacacctgagcttctgagtccctgattctggcacagcacccaactcaggactgggctcctgggtggcccaccatggctctcgggcctgtgcccctcactgctgtgtccctattgccttctgcagcttcaagtccgttgagaagaaaatgacagacatgctaaaagaggaagaagagaggctccagctggcgcacagcaacatgaccaagggccaggagctgctgctgaccatccagatgggcatcgacaacctctatgtccggctgatgggcattaacttgcctgcgacccaggtaccgggagtgaggctgagctgccacacaccaggtccctgggcagggccagaggggagatgagaccctcctcccggcctacagagagaagtggtgctctccaacaccctcgatttgaacagcaagctggcgtactgcgaggggaagctcacgtacctggctgacagagtgcagatggtgtccaggaccgaggagggcgacacaaaggtgagggacaccctggagtcctcgactctgatggagaagtacaacaccaggatcagctttgagaaccgggaggaggatatgatcggaggaggcatgccatgccagacgggcccggaggagaggcaccagggctggagcagggaggagcgcggtgaagacaccttccagttccccgacatggaccacagctacgtcccttcgcgcgccgagatcaagaggcaggcgcagcggctaatcgaggggaagctcaaggcggccaagaaaaagaagaagtagccccgccgccccgctccctgctttgctacacaaataaacatttttccaggactgctgcggacgctggggcgaccggggtctcggagaggagcacgggacacgcaggatcgggggaggttctgcgtaaggaggcagcccgggcccggaactgcgcgccagaaccgcgtgcgcatgcgccgaccgcgcgcgccgcgcccccgcggccctcgcggcgccccgtagccgcgcacccctcccgtcccgccgagccggcgccaagatggcggcgctgactcctggagagcggtcgcgccggaggccgcgggggccggagcggagcagccgcggctgaggttcccgagtcgccgctcggggctgcgctccgccgccgggaccccggcctctggccgcgccggctccggcctccgggggggccggggccgccgggacatggtgccagtcgcaccccttccccgccgccgctgagctcgccggccgcgcccgggctgggacgtccgagcgggaagatgttttccgccctgaagaagctggtggggtcggaccaggccccgggccgggacaagaacatccccgccgggctgcagtccatgaaccaggcgttgcagaggcgcttcgccaagggggtgcagtacaacatgaagatagtgatccggggagacaggaacacgggcaagacagcgctgtggcaccgcctgcagggccggccgttcgtggaggagtacatccccacacaggagatccaggtcaccagcatccactggagctacaagaccacggatgacatcgtgaaggttgaagtctgggatgtagtagacaaaggaaaatgcaaaaagcgaggcgacggcttaaagatggagaacgacccccaggaggcggagtctgaaatggccctggatgctgagttcctggacgtgtacaagaactgcaacggggtggtcatgatgttcgacattaccaagcagtggaccttcaattacattctccgggagcttccaaaagtgcccacccacgtgccagtgtgcgtgctggggaactaccgggacatgggcgagcaccgagtcatcctgccggacgacgtgcgtgacttcatcgacaacctggacagacctccaggttcctcctacttccgctatgctgagtcttccatgaagaacagcttcggcctaaagtaccttcataagttcttcaatatcccatttttgcagcttcaggtaagcactcaccacgtggggtggagtggctgctggtctctcacctccttccaggtgtctcctgtgtagcaacgggtctccctcctaacccctgagaaagctgtggacctgctcggagattggctgctggcaagggcccagcgttctactgcacctgcctgctctgggtggcagagggtacagggtcctgagggctagacccagtcccaggagcccctccacctctgcggggaccccttgctcagtttcccccagtgtttttggttgtttttgtttgttgagataaggtcttgctgtgtggcccaggctggagtgcagtggcgcaatcatggctcactgcggcctcaaactccggggctcaggcagtcctcccacctgtctcccaaagtgctgggatgccaggcgtgagtcaccgaggtactcgctgttcacatctcacatttccctggtgcttgtgtcaaaaccaaggaaccaactttggcctacggactaaactcactttcctttgtagaaacaagggccaggccagctgtggctgcaaagtagcccagcaaatgatgaggcttgaacctcctcgccctgggctgccctgattgggtctgggggacctgaacctcctcgccctgggctgccctgactgggtctgggggacctgaacctcctcgccctgggctgccccagctgggtctggggacctgaacctcctcgccctgggctgccccgcctgggtctggggacctgaacctcctcgccctgggctgccccgcctgggtctggggacctgaacctcctcgccctgggctgccccgcctgggtctggggacctgaacctcctcgccctgggctgccccagctgggtctgggggacctgaacctcctcgccctgggctgccccagctgggtctgggggacctgaacctcctcgccctgggctgccccagctggatctgggggacctgaacctcctcgccctgggctgccccgcctgggtctgggggacctgaacctccttgcctgggctgccccgcctgggtctgggggacctgaacctcctcgccctgggctgccccagctgggtctgggggacctgtacctcctcgccctgggctgccccgcctgggtctgggggacctgaacctcctcgccctgggctgccccgactgggtctgggggacctgaatctcctcaccctgggctgccccagctgggtctggggacctgaacctcctcgccctgggctgccccagctgggtctgggggacctgaacctcctcgccctgggctgccccgactgggtctgggggacctggggcccagctgcagctgcagcagccttggtctttctccagaaggatgtcaggcttgcccaggaaaggggctgtgctgtcgtcctggtgtcagaagaagtgaggatgcctgcaggctgggactgctgctggggacgtttgggttggaaggaaggcggcagtcagacttgtcctgtgccggcactgctggggaggcccctccttcctgcagagccgtcccctcatcactgggttgattactccttagagagctccccactgctcagctgctccattccctaatggtttgccctccaaacccttccaaagcctcccagggagagaacgggaccctggacagagtcttgagctggaagcgtagggctgagctgtgtgtgactatccttttgctatggatgtgttcaagcagatctgatgtcctcgcctgtctcagcagcgggacccctgtttcctctttgtcttgcccctggattgcctggaagcaaatttcaggccttctttatgtcacctaaaaatatttcaaacacatctctaaaaaaatcagttgtttttttaacctgaccgtagtacctaatgtaataccgcatgttaaactcacagaaggtttttcttggagaaataagccacaataacaaattgaaaaaataaaattcccaaagagtt

SEQ ID NO: 402624 - DNA, 3474 bp, Homo sapiens
  misc_feature (67)..(67): n is a, c, g, or t
cgcccaaaccagcttctccacttcttcggaccagtgctcagagccagagaccaagtggtcctccatntccagcttcgaagccggggacggggacagctcccacgaggaccgagcacccccctggccaggcggtgtctctgttcgcacaggtccggagaagcgcagcagcaccaggccccctgctgagatggagccggggaagggtgagcaggcctcctcgtcggagagtgaccccgagggacccattgctgcacaaatgctgtccttcgtcatggatgaccccgactttgagagcgagggatcagacacacagcgcagggcggatgactttcccgtgcgagatgacccctccgatgtgactgacgaggatgagggccctgccgagccgcccccaccccccaagctccctctccccgccttcagactgaagaatgactcggacctcttcgggctggagctggaggaggccgtgctcaagttccgccagaagcctagctccatcaggtgccccgggcttccggggctgcgggccacccaccccagtctcacaaaggccccgggctgcagccaggctgggagctgggagtatacccactgccaacaagcctgtgtgtcccacagaggggccaggggactccacttgcacacacctgagcttctgagtccctgattctggcacagcacccaactcaggactgggctcctgggtggcccaccatggctctcgggcctgtgcccctcactgctgtgtccctattgccttctgcagcttcaagtccgttgagaagaaaatgacagacatgctaaaagaggaagaagagaggctccagctggcgcacagcaacatgaccaagggccaggagctgctgctgaccatccagatgggcatcgacaacctctatgtccggctgatgggcattaacttgcctgcgacccaggtaccgggagtgaggctgagctgccacacaccaggtccctgggcagggccagaggggagatgagaccctcctcccggcctacagagagaagtggtgctctccaacaccctcgatttgaacagcaagctggcgtactgcgaggggaagctcacgtacctggctgacagagtgcagatggtgtccaggaccgaggagggcgacacaaaggtgagggacaccctggagtcctcgactctgatggagaagtacaacaccaggatcagctttgagaaccgggaggaggatatgatcggaggaggcatgccatgccagacgggcccggaggagaggcaccagggctggagcagggaggagcgcggtgaagacaccttccagttccccgacatggaccacagctacgtcccttcgcgcgccgagatcaagaggcaggcgcagcggctaatcgaggggaagctcaaggcggccaagaaaaagaagaagtagccccgccgccccgctccctgctttgctacacaaataaacatttttccaggactgctgcggacgctggggcgaccggggtctcggagaggagcacgggacacgcaggatcgggggaggttctgcgtaaggaggcagcccgggcccggaactgcgcgccagaaccgcgtgcgcatgcgccgaccgcgcgcgccgcgcccccgcggccctcgcggcgccccgtagccgcgcacccctcccgtcccgccgagccggcgccaagatggcggcgctgactcctggagagcggtcgcgccggaggccgcgggggccggagcggagcagccgcggctgaggttcccgagtcgccgctcggggctgcgctccgccgccgggaccccggcctctggccgcgccggctccggcctccgggggggccggggccgccgggacatggtgccagtcgcaccccttccccgccgccgctgagctcgccggccgcgcccgggctgggacgtccgagcgggaagatgttttccgccctgaagaagctggtggggtcggaccaggccccgggccgggacaagaacatccccgccgggctgcagtccatgaaccaggcgttgcagaggcgcttcgccaagggggtgcagtacaacatgaagatagtgatccggggagacaggaacacgggcaagacagcgctgtggcaccgcctgcagggccggccgttcgtggaggagtacatccccacacaggagatccaggtcaccagcatccactggagctacaagaccacggatgacatcgtgaaggttgaagtctgggatgtagtagacaaaggaaaatgcaaaaagcgaggcgacggcttaaagatggagaacgacccccaggaggcggagtctgaaatggccctggatgctgagttcctggacgtgtacaagaactgcaacggggtggtcatgatgttcgacattaccaagcagtggaccttcaattacattctccgggagcttccaaaagtgcccacccacgtgccagtgtgcgtgctggggaactaccgggacatgggcgagcaccgagtcatcctgccggacgacgtgcgtgacttcatcgacaacctggacagacctccaggttcctcctacttccgctatgctgagtcttccatgaagaacagcttcggcctaaagtaccttcataagttcttcaatatcccatttttgcagcttcagagggagacgctgttgcggcagctggagacgaaccagctggacatggacgccacgctggaggagctgtcggtgcagcaggagacggaggaccagaactacggcatcttcctggagatgatggaggctcgcagccgtggccatgcgtccccactggcggccaacgggcagagcccatccccgggctcccagtcaccagtggtgcctgcaggcgctgtgtccacggggagctccagccccggcacaccccagcctgagggcgacccaaaggtgaccacatgagatgtggatctactgtgaatctgtgtcccaggaatattgctggatgagagagccaaatgaaatcggtaaaggaggtgtacattttctgggacatacttgagagagactgaccagtcctctcgcaggccccgaggtctggcacttgctgagaacgggctccttacagctatgcggggaagcagcatccttacaggacgtgcgagctggccagcagaaggagcggttccccacgcagcatcagcgcctgagcctgggctgccggtgctggacgcgctgctccgcggtggtctgccctggagggatcactgagcgtggcggacgcagtcggcagggaagacccaggtgggcgtgcagcttcctgctggtgtgcagggtcccgggcaagaccgaggctggggggggagcccgctacatctgccgggaaacgcgcttccggaaagcgctggaggagtaggccagaggcgggctggcctggggttcaggagactgttcaaacgcgatgggggcaattaacgggggggggggggcctgtggggtggtaacaggcctgggacaggaagcgg

SEQ ID NO: 402625 - DNA, 3253 bp, Homo sapiens
  misc_feature (67)..(67): n is a, c, g, or t
cgcccaaaccagcttctccacttcttcggaccagtgctcagagccagagaccaagtggtcctccatntccagcttcgaagccggggacggggacagctcccacgaggaccgagcacccccctggccaggcggtgtctctgttcgcacaggtccggagaagcgcagcagcaccaggccccctgctgagatggagccggggaagggtgagcaggcctcctcgtcggagagtgaccccgagggacccattgctgcacaaatgctgtccttcgtcatggatgaccccgactttgagagcgagggatcagacacacagcgcagggcggatgactttcccgtgcgagatgacccctccgatgtgactgacgaggatgagggccctgccgagccgcccccaccccccaagctccctctccccgccttcagactgaagaatgactcggacctcttcgggctggagctggaggaggccgtgctcaagttccgccagaagcctagctccatcaggtgccccgggcttccggggctgcgggccacccaccccagtctcacaaaggccccgggctgcagccaggctgggagctgggagtatacccactgccaacaagcctgtgtgtcccacagaggggccaggggactccacttgcacacacctgagcttctgagtccctgattctggcacagcacccaactcaggactgggctcctgggtggcccaccatggctctcgggcctgtgcccctcactgctgtgtccctattgccttctgcagcttcaagtccgttgagaagaaaatgacagacatgctaaaagaggaagaagagaggctccagctggcgcacagcaacatgaccaagggccaggagctgctgctgaccatccagatgggcatcgacaacctctatgtccggctgatgggcattaacttgcctgcgacccaggtaccgggagtgaggctgagctgccacacaccaggtccctgggcagggccagaggggagatgagaccctcctcccggcctacagagagaagtggtgctctccaacaccctcgatttgaacagcaagctggcgtactgcgaggggaagctcacgtacctggctgacagagtgcagatggtgtccaggaccgaggagggcgacacaaaggtgagggacaccctggagtcctcgactctgatggagaagtacaacaccaggatcagctttgagaaccgggaggaggatatgatcggaggaggcatgccatgccagacgggcccggaggagaggcaccagggctggagcagggaggagcgcggtgaagacaccttccagttccccgacatggaccacagctacgtcccttcgcgcgccgagatcaagaggcaggcgcagcggctaatcgaggggaagctcaaggcggccaagaaaaagaagaagtagccccgccgccccgctccctgctttgctacacaaataaacatttttccaggactgctgcggacgctggggcgaccggggtctcggagaggagcacgggacacgcaggatcgggggaggttctgcgtaaggaggcagcccgggcccggaactgcgcgccagaaccgcgtgcgcatgcgccgaccgcgcgcgccgcgcccccgcggccctcgcggcgccccgtagccgcgcacccctcccgtcccgccgagccggcgccaagatggcggcgctgactcctggagagcggtcgcgccggaggccgcgggggccggagcggagcagccgcggctgaggttcccgagtcgccgctcggggctgcgctccgccgccgggaccccggcctctggccgcgccggctccggcctccgggggggccggggccgccgggacatggtgccagtcgcaccccttccccgccgccgctgagctcgccggccgcgcccgggctgggacgtccgagcgggaagatgttttccgccctgaagaagctggtggggtcggaccaggccccgggccgggacaagaacatccccgccgggctgcagtccatgaaccaggcgttgcagaggcgcttcgccaagggggtgcagtacaacatgaagatagtgatccggggagacaggaacacgggcaagacagcgctgtggcaccgcctgcagggccggccgttcgtggaggagtacatccccacacaggagatccaggtcaccagcatccactggagctacaagaccacggatgacatcgtgaaggttgaagtctgggatgtagtagacaaaggaaaatgcaaaaagcgaggcgacggcttaaagatggagaacgacccccaggaggcggagtctgaaatggccctggatgctgagttcctggacgtgtacaagaactgcaacggggtggtcatgatgttcgacattaccaagcagtggaccttcaattacattctccgggagcttccaaaagtgcccacccacgtgccagtgtgcgtgctggggaactaccgggacatgggcgagcaccgagtcatcctgccggacgacgtgcgtgacttcatcgacaacctggacagacctccaggttcctcctacttccgctatgctgagtcttccatgaagaacagcttcggcctaaagtaccttcataagttcttcaatatcccatttttgcagcttcagaaggatgtcaggcttgcccaggaaaggggctgtgctgtcgtcctggtgtcagaagaagtgaggatgcctgcaggctgggactgctgctggggacgtttgggttggaaggaaggcggcagtcagacttgtcctgtgccggcactgctggggaggcccctccttcctgcagagccgtcccctcatcactgggttgattactccttagagagctccccactgctcagctgctccattccctaatggtttgccctccaaacccttccaaagcctcccagggagagaacgggaccctggacagagtcttgagctggaagcgtagggctgagctgtgtgtgactatccttttgctatggatgtgttcaagcagatctgatgtcctcgcctgtctcagcagcgggacccctgtttcctctttgtcttgcccctggattgcctggaagcaaatttcaggccttctttatgtcacctaaaaatatttcaaacacatctctaaaaaaatcagttgtttttttaacctgaccgtagtacctaatgtaataccgcatgttaaactcacagaaggtttttcttggagaaataagccacaataacaaattgaaaaaataaaattcccaaagagtt

SEQ ID NO: 402626 - DNA, 4623 bp, Homo sapiens
  misc_feature (67)..(67): n is a, c, g, or t
cgcccaaaccagcttctccacttcttcggaccagtgctcagagccagagaccaagtggtcctccatntccagcttcgaagccggggacggggacagctcccacgaggaccgagcacccccctggccaggcggtgtctctgttcgcacaggtccggagaagcgcagcagcaccaggccccctgctgagatggagccggggaagggtgagcaggcctcctcgtcggagagtgaccccgagggacccattgctgcacaaatgctgtccttcgtcatggatgaccccgactttgagagcgagggatcagacacacagcgcagggcggatgactttcccgtgcgagatgacccctccgatgtgactgacgaggatgagggccctgccgagccgcccccaccccccaagctccctctccccgccttcagactgaagaatgactcggacctcttcgggctggagctggaggaggccgtgctcaagttccgccagaagcctagctccatcaggtgccccgggcttccggggctgcgggccacccaccccagtctcacaaaggccccgggctgcagccaggctgggagctgggagtatacccactgccaacaagcctgtgtgtcccacagaggggccaggggactccacttgcacacacctgagcttctgagtccctgattctggcacagcacccaactcaggactgggctcctgggtggcccaccatggctctcgggcctgtgcccctcactgctgtgtccctattgccttctgcagcttcaagtccgttgagaagaaaatgacagacatgctaaaagaggaagaagagaggctccagctggcgcacagcaacatgaccaagggccaggagctgctgctgaccatccagatgggcatcgacaacctctatgtccggctgatgggcattaacttgcctgcgacccaggtaccgggagtgaggctgagctgccacacaccaggtccctgggcagggccagaggggagatgagaccctcctcccggcctacagagagaagtggtgctctccaacaccctcgatttgaacagcaagctggcgtactgcgaggggaagctcacgtacctggctgacagagtgcagatggtgtccaggaccgaggagggcgacacaaaggtgagggacaccctggagtcctcgactctgatggagaagtacaacaccaggatcagctttgagaaccgggaggaggatatgatcggaggaggcatgccatgccagacgggcccggaggagaggcaccagggctggagcagggaggagcgcggtgaagacaccttccagttccccgacatggaccacagctacgtcccttcgcgcgccgagatcaagaggcaggcgcagcggctaatcgaggggaagctcaaggcggccaagaaaaagaagaagtagccccgccgccccgctccctgctttgctacacaaataaacatttttccaggactgctgcggacgctggggcgaccggggtctcggagaggagcacgggacacgcaggatcgggggaggttctgcgtaaggaggcagcccgggcccggaactgcgcgccagaaccgcgtgcgcatgcgccgaccgcgcgcgccgcgcccccgcggccctcgcggcgccccgtagccgcgcacccctcccgtcccgccgagccggcgccaagatggcggcgctgactcctggagagcggtcgcgccggaggccgcgggggccggagcggagcagccgcggctgaggttcccgagtcgccgctcggggctgcgctccgccgccgggaccccggcctctggccgcgccggctccggcctccgggggggccggggccgccgggacatggtgccagtcgcaccccttccccgccgccgctgagctcgccggccgcgcccgggctgggacgtccgagcgggaagatgttttccgccctgaagaagctggtggggtcggaccaggccccgggccgggacaagaacatccccgccgggctgcagtccatgaaccaggcgttgcagaggcgcttcgccaagggggtgcagtacaacatgaagatagtgatccggggagacaggaacacgggcaagacagcgctgtggcaccgcctgcagggccggccgttcgtggaggagtacatccccacacaggagatccaggtcaccagcatccactggagctacaagaccacggatgacatcgtgaaggttgaagtctgggatgtagtagacaaaggaaaatgcaaaaagcgaggcgacggcttaaagatggagaacgacccccaggaggcggagtctgaaatggccctggatgctgagttcctggacgtgtacaagaactgcaacggggtggtcatgatgttcgacattaccaagcagtggaccttcaattacattctccgggagcttccaaaagtgcccacccacgtgccagtgtgcgtgctggggaactaccgggacatgggcgagcaccgagtcatcctgccggacgacgtgcgtgacttcatcgacaacctggacagacctccaggttcctcctacttccgctatgctgagtcttccatgaagaacagcttcggcctaaagtaccttcataagttcttcaatatcccatttttgcagcttcaggtaagcactcaccacgtggggtggagtggctgctggtctctcacctccttccaggtgtctcctgtgtagcaacgggtctccctcctaacccctgagaaagctgtggacctgctcggagattggctgctggcaagggcccagcgttctactgcacctgcctgctctgggtggcagagggtacagggtcctgagggctagacccagtcccaggagcccctccacctctgcggggaccccttgctcagtttcccccagtgtttttggttgtttttgtttgttgagataaggtcttgctgtgtggcccaggctggagtgcagtggcgcaatcatggctcactgcggcctcaaactccggggctcaggcagtcctcccacctgtctcccaaagtgctgggatgccaggcgtgagtcaccgaggtactcgctgttcacatctcacatttccctggtgcttgtgtcaaaaccaaggaaccaactttggcctacggactaaactcactttcctttgtagaaacaagggccaggccagctgtggctgcaaagtagcccagcaaatgatgaggcttgaacctcctcgccctgggctgccctgattgggtctgggggacctgaacctcctcgccctgggctgccctgactgggtctgggggacctgaacctcctcgccctgggctgccccagctgggtctggggacctgaacctcctcgccctgggctgccccgcctgggtctggggacctgaacctcctcgccctgggctgccccgcctgggtctggggacctgaacctcctcgccctgggctgccccgcctgggtctggggacctgaacctcctcgccctgggctgccccagctgggtctgggggacctgaacctcctcgccctgggctgccccagctgggtctgggggacctgaacctcctcgccctgggctgccccagctggatctgggggacctgaacctcctcgccctgggctgccccgcctgggtctgggggacctgaacctccttgcctgggctgccccgcctgggtctgggggacctgaacctcctcgccctgggctgccccagctgggtctgggggacctgtacctcctcgccctgggctgccccgcctgggtctgggggacctgaacctcctcgccctgggctgccccgactgggtctgggggacctgaatctcctcaccctgggctgccccagctgggtctggggacctgaacctcctcgccctgggctgccccagctgggtctgggggacctgaacctcctcgccctgggctgccccgactgggtctgggggacctggggcccagctgcagctgcagcagccttggtctttctccagaaggatgtcaggcttgcccaggaaaggggctgtgctgtcgtcctggtgtcagaagaagtgaggatgcctgcaggctgggactgctgctggggacgtttgggttggaaggaaggcggcagtcagacttgtcctgtgccggcactgctggggaggcccctccttcctgcagagccgtcccctcatcactgggttgattactccttagagagctccccactgctcagctgctccattccctaatggtttgccctccaaacccttccaaagcctcccagggagagaacgggaccctggacagagtcttgagctggaagcgtagggctgagctgtgtgtgactatccttttgctatggatgtgttcaagcagatctgatgtcctcgcctgtctcagcagcgggacccctgtttcctctttgtcttgcccctggattgcctggaagcaaatttcaggccttctttatgtcacctaaaaatatttcaaacacatctctaaaaaaatcagttgtttttttaacctgaccgtagtacctaatgtaataccgcatgttaaactcacagaaggtttttcttggagaaataagccacaataacaaattgaaaaaataaaattcccaaagagttatgttaaaaaaaaaaaagaaa

SEQ ID NO: 402627 - DNA, 2346 bp, Homo sapiens
  misc_feature (67)..(67): n is a, c, g, or t
  misc_feature (2303)..(2303): n is a, c, g, or t
  misc_feature (2334)..(2334): n is a, c, g, or t
  misc_feature (2340)..(2340): n is a, c, g, or t
cgcccaaaccagcttctccacttcttcggaccagtgctcagagccagagaccaagtggtcctccatntccagcttcgaagccggggacggggacagctcccacgaggaccgagcacccccctggccaggcggtgtctctgttcgcacaggtccggagaagcgcagcagcaccaggccccctgctgagatggagccggggaagggtgagcaggcctcctcgtcggagagtgaccccgagggacccattgctgcacaaatgctgtccttcgtcatggatgaccccgactttgagagcgagggatcagacacacagcgcagggcggatgactttcccgtgcgagatgacccctccgatgtgactgacgaggatgagggccctgccgagccgcccccaccccccaagctccctctccccgccttcagactgaagaatgactcggacctcttcgggctggagctggaggaggccgtgctcaagttccgccagaagcctagctccatcaggtgccccgggcttccggggctgcgggccacccaccccagtctcacaaaggccccgggctgcagccaggctgggagctgggagtatacccactgccaacaagcctgtgtgtcccacagaggggccaggggactccacttgcacacacctgagcttctgagtccctgattctggcacagcacccaactcaggactgggctcctgggtggcccaccatggctctcgggcctgtgcccctcactgctgtgtccctattgccttctgcagcttcaagtccgttgagaagaaaatgacagacatgctaaaagaggaagaagagaggctccagctggcgcacagcaacatgaccaagggccaggagctgctgctgaccatccagatgggcatcgacaacctctatgtccggctgatgggcattaacttgcctgcgacccaggtaccgggagtgaggctgagctgccacacaccaggtccctgggcagggccagaggggagatgagaccctcctcccggcctacagagagaagtggtgctctccaacaccctcgatttgaacagcaagctggcgtactgcgaggggaagctcacgtacctggctgacagagtgcagatggtgtccaggaccgaggagggcgacacaaaggtgagggacaccctggagtcctcgactctgatggagaagtacaacaccaggatcagctttgagaaccgggaggaggatatgatcggaggaggcatgccatgccagacgggcccggaggagaggcaccagggctggagcagggaggagcgcggtgaagacaccttccagttccccgacatggaccacagctacgtcccttcgcgcgccgagatcaagaggcaggcgcagcggctaatcgaggggaagctcaaggcggccaagaaaaagaagaagtagccccgccgccccgctccctgctttgctacacaaataaacatttttccaggactgctgcggacgctggggcgaccggggtctcggagaggagcacgggacacgcaggatcgggggaggttctgcgtaaggaggcagcccgggcccggaactgcgcgccagaaccgcgtgcgcatgcgccgaccgcgcgcgccgcgcccccgcggccctcgcggcgccccgtagccgcgcacccctcccgtcccgccgagccggcgccaagatggcggcgctgactcctggagagcggtcgcgccggaggccgcgggggccggagcggagcagccgcggctgaggttcccgagtcgccgctcggggctgcgctccgccgccgggaccccggcctctggccgcgccggctccggcctccgggggggccggggccgccgggacatggtgccagtcgcaccccttccccgccgccgctgagctcgccggccgcgcccgggctgggacgtccgagcgggaagatgttttccgccctgaagaagctggtggggtcggaccaggccccgggccgggacaagaacatccccgccgggctgcagtccatgaaccaggcgttgcagaggcgcttcgccaagggggtgcagtacaacatgaagatagtgatccggggagacaggaacacgggcaagacagcgctgtggcaccgcctgcagggccggccgttcgtggaggagtacatccccacacaggagatccaggtcaccagcatccactggagctacaagaccacggatgacatcgtgaaggttgaagtctgggatgtagtagacaaaggaaaatgcaaaaagcgaggcgacggcttaaagatggagaacgacccccaggaggcggagtctnaaatggccctgggccccgtaccttccctgantctttnccctgg

SEQ ID NO: 402628 - DNA, 819 bp, Homo sapiens
cccagaggaacatgaggcaaagggaggcgtccttcatcgaggagcgccgggcaagggagaaccggctcaaccagcagaagaagctgatcgacaagatccacacgaaggagaccagcgagaagtaccgccgggtaagccccaggccagggcctggctggctgcccatccccatgacagctgggtggacacaggctcagggccaccactcagggcccactccctgccaaggatgtctcatcccttccccgcccccacctcccatcagggccagatggacttggacttcccctcgaacctgatgagcacggagaccctgaaatgtaagcgctcagctccccacctgcccccagccagggtcccaaggagaggctggcactgattcaggccaacggatcaagtcaccctgaggccaggtgtgacatgtggtcgccagggtgaagggaaggacaggtccctgcctctccctccagaggctgagagcctgtagccaaatgtggcctcagagatgctggccccagcacccaagggccctgcaccaagggcccagtccccagtgactctgcagaggatgagcatcctgacccctaagctgcctctgagaagcaccaccgggcccacagtgctcacagtgctgcgccactcactccgggtccacctctgctctggggctgcctggggcgtccctgcagggctgggctgaggagggagcaggttggggcgggggcaggcatctctgaaggatgcctgtgtcttgggtggccgccccagcagctgggcaggtacagaggtgtctgacagccttacacagagcccctgagc

SEQ ID NO: 402629 - DNA, 231 bp, Homo sapiens
acatctctaaaaaaatcagttgtttttttaacctgaccgtagtacctaatgtaataccgcatgttaaactcacagaaggtttttcttggagaaataagccacaataacaaattgaaaaaataaaattcccaaagagttttcttccagtcgtcagatatttggtcagtattcagagtaggatccagagttcacacattacatttggttgacaagtctgtagatttctctttg

SEQ ID NO: 402630 - DNA, 733 bp, Homo sapiens
  misc_feature (3)..(3): n is a, c, g, or t
  misc_feature (30)..(30): n is a, c, g, or t
ccnctaagggaccaaagctgagctccacgncgtgccgccgctctagccgggcggatccccgggctcaggatttcgccacgaggtgccagcctggggcggggggcgtgcctgtcactgcctggggaggcatttgcctctgtaccatcgcctttgccgctgccccgtggctgccgtgtgcgcttctgagctggaagaggccgggcattggtggtccccaggctgggccctgcaggtgctgggccttcaggcccagtgtgagcctgctctgcaagaagggaggggacagctggcttcagccaggctcggtggacaccctggccctctcggggcagagccgccagtgtttctcagggatgtgactgaggcccaggagggacctgtgagggtctgtttacagaggctgggcaggggccgcttggctgtggggtgtgcgctgccccggcacctgcttgccctccgcgctcatctggggccgcagcatgcctatggttccgcttccggccgggagccctgaacacgggtgtgcagactcaccctaaagggcggcccaggccccacgctagaaggctggcgagaccgaaggcagcatgtgaggcctctcctgggagtgggggttgtgtttcccacagtggcctcagctgcgcccccgctcaggtgagcccgaaggcaggagccgggaggcactcctcccaaacactccactcagaccataaagcactcctgtttcactctg

SEQ ID NO: 402631 - DNA, 4782 bp, Homo sapiens
  misc_feature (67)..(67): n is a, c, g, or t
cgcccaaaccagcttctccacttcttcggaccagtgctcagagccagagaccaagtggtcctccatntccagcttcgaagccggggacggggacagctcccacgaggaccgagcacccccctggccaggcggtgtctctgttcgcacaggtccggagaagcgcagcagcaccaggccccctgctgagatggagccggggaagggtgagcaggcctcctcgtcggagagtgaccccgagggacccattgctgcacaaatgctgtccttcgtcatggatgaccccgactttgagagcgagggatcagacacacagcgcagggcggatgactttcccgtgcgagatgacccctccgatgtgactgacgaggatgagggccctgccgagccgcccccaccccccaagctccctctccccgccttcagactgaagaatgactcggacctcttcgggctggagctggaggaggccgtgctcaagttccgccagaagcctagctccatcaggtgccccgggcttccggggctgcgggccacccaccccagtctcacaaaggccccgggctgcagccaggctgggagctgggagtatacccactgccaacaagcctgtgtgtcccacagaggggccaggggactccacttgcacacacctgagcttctgagtccctgattctggcacagcacccaactcaggactgggctcctgggtggcccaccatggctctcgggcctgtgcccctcactgctgtgtccctattgccttctgcagcttcaagtccgttgagaagaaaatgacagacatgctaaaagaggaagaagagaggctccagctggcgcacagcaacatgaccaagggccaggagctgctgctgaccatccagatgggcatcgacaacctctatgtccggctgatgggcattaacttgcctgcgacccaggtaccgggagtgaggctgagctgccacacaccaggtccctgggcagggccagaggggagatgagaccctcctcccggcctacagagagaagtggtgctctccaacaccctcgatttgaacagcaagctggcgtactgcgaggggaagctcacgtacctggctgacagagtgcagatggtgtccaggaccgaggagggcgacacaaaggtgagggacaccctggagtcctcgactctgatggagaagtacaacaccaggatcagctttgagaaccgggaggaggatatgatcggaggaggcatgccatgccagacgggcccggaggagaggcaccagggctggagcagggaggagcgcggtgaagacaccttccagttccccgacatggaccacagctacgtcccttcgcgcgccgagatcaagaggcaggcgcagcggctaatcgaggggaagctcaaggcggccaagaaaaagaagaagtagccccgccgccccgctccctgctttgctacacaaataaacatttttccaggactgctgcggacgctggggcgaccggggtctcggagaggagcacgggacacgcaggatcgggggaggttctgcgtaaggaggcagcccgggcccggaactgcgcgccagaaccgcgtgcgcatgcgccgaccgcgcgcgccgcgcccccgcggccctcgcggcgccccgtagccgcgcacccctcccgtcccgccgagccggcgccaagatggcggcgctgactcctggagagcggtcgcgccggaggccgcgggggccggagcggagcagccgcggctgaggttcccgagtcgccgctcggggctgcgctccgccgccgggaccccggcctctggccgcgccggctccggcctccgggggggccggggccgccgggacatggtgccagtcgcaccccttccccgccgccgctgagctcgccggccgcgcccgggctgggacgtccgagcgggaagatgttttccgccctgaagaagctggtggggtcggaccaggccccgggccgggacaagaacatccccgccgggctgcagtccatgaaccaggcgttgcagaggcgcttcgccaagggggtgcagtacaacatgaagatagtgatccggggagacaggaacacgggcaagacagcgctgtggcaccgcctgcagggccggccgttcgtggaggagtacatccccacacaggagatccaggtcaccagcatccactggagctacaagaccacggatgacatcgtgaaggttgaagtctgggatgtagtagacaaaggaaaatgcaaaaagcgaggcgacggcttaaagatggagaacgacccccaggaggcggagtctgaaatggccctggatgctgagttcctggacgtgtacaagaactgcaacggggtggtcatgatgttcgacattaccaagcagtggaccttcaattacattctccgggagcttccaaaagtgcccacccacgtgccagtgtgcgtgctggggaactaccgggacatgggcgagcaccgagtcatcctgccggacgacgtgcgtgacttcatcgacaacctggacagacctccaggttcctcctacttccgctatgctgagtcttccatgaagaacagcttcggcctaaagtaccttcataagttcttcaatatcccatttttgcagcttcagagggagacgctgttgcggcagctggagacgaaccagctggacatggacgccacgctggaggagctgtcggtgcagcaggagacggaggaccagaactacggcatcttcctggagatgatggaggctcgcagccgtggccatgcgtccccactggcggccaacgggcagagcccatccccgggctcccagtcaccagtggtgcctgcaggcgctgtgtccacggggagctccagccccggcacaccccagcccgccccacagctgcccctcaatgccgccccaccatcctctgtgccccctgtaccaccctcagaggccctgcccccacctgcgtgcccctcagcccccgccccacggcgcagcatcatctctaggctgtttgggacgtcacctgccaccgaggcagcccctccacctccagagccagtcccggccgcacagggcccagcaacggtccagagtgtggaggactttgttcctgacgaccgcctggaccgcagcttcctggaagacacaacccccgccagggacgagaagaaggtgggggccaaggctgcccagcaggacagcgacagtgatggggaggccctgggcggcaacccgatggtggcagggttccaggacgatgtggacctcgaagaccagccacgtgggagtcccccgctgcctgcaggccccgtccccagtcaagacatcactctttcgagtgaggaggaagcagaagtggcagctcccacaaaaggccctgccccagctccccagcagtgctcagagccagagaccaagtggtcctccataccagcttcgaagccacggagggggacagctcccacgaggaccgcagcacccccctggccaggcggtgtctctgttcgcacaggtccggagaagcgcagcagcaccaggccccctgctgagatggagccggggaagggtgagcaggcctcctcgtcggagagtgaccccgagggacccattgctgcacaaatgctgtccttcgtcatggatgaccccgactttgagagcgagggatcagacacacagcgcagggcggatgactttcccgtgcgagatgacccctccgatgtgactgacgaggatgagggccctgccgagccgcccccaccccccaagctccctctccccgccttcagactgaagaatgactcggacctcttcgggctggggctggaggaggccggacccaaggagagcagtgaggaaggtaaggagggcaaaaccccctctaaggagaagaagaagaagaagaaaaaaggcaaagaggaagaagaaaaagctgccaagaagaagagcaaacacaagaagagcaaggacaaggaggagggcaaggaggagcggcgacggcggcagcagcggcccccgcgcagcagggagaggacggctgccgatgagctggaggctttcctggggggcggggccccgggcggccgccaccctgggggtggcgactacgaggagctctaggccggcgtgggcagtggccgccctggggcggggggcgtgcctgtcactgcctggggaggcatttgcctctgtaccatcgcctttgccgctgccccgtggctgccgtgtgcgcttctgagctggaagaggccgggcattggtggtccccaggctgggccctgcaggtgctgggccttcaggcccagtgtgagcctgctctgcaagaagggaggggacagctggcttcagccaggctcggtggacaccctggccctctcggggcagagccgccagtgtttctcagggatgtgactgaggcccaggagggacctgtgagggtctgtttacagaggctgggcaggggccgcttggctgtggggtgtgcgctgccccggcacctgcttgccctccgcgctcatctggggccgcagcatgcctatggttccgcttccggccgggagccctgaacacgggtgtgcagactcaccctaaagggcggcccaggccccacgctagaaggctggcgagaccgaaggcagcatgtgaggcctctcctgggagtgggggttgtgtttcccacagtggcctcagctgcgcccccgctcaggtgagcccgaaggcaggagccgggaggcactcctcccaaacactccactcagaccataaagcactcctgtttcactctg

SEQ ID NO: 402632 - DNA, 5252 bp, Homo sapiens
acttcgctgcttcataaccaagcgtcctacttgcctgccttaagggtctaccttgcaaaggcacatgctgcttttaaagtcctttgtggtcattaataagtatctatggctttcctcttcagtgataagagctgttgggtgcgtgagcaggggttagcagatgacggttttagctgcccaagggcacgctggaagaggccaggttttggggaagaggatgaatctgtcttcaggcaggctgaatgcacttccgtgagttctaggtggacctggccaggaggcagctgggggccagcggctggagggcagcagagcgtctgggctggcacatgctctgaggcatgggcaaggagggccgtgagctgaggggccacgggcacaagtggtttaggaaaagggtgtggccattggccggggatgcagttccaaagtctagtaaggtgagcatggccaaccgcccgctggctttactgccattaggggccttgttgagacagctccccaaccctgtgcccacccgcatgtccccagaggaacatgaggcaaagggaggcgtccttcatcgaggagcgccgggcaagggagaaccggctcaaccagcagaagaagctgatcgacaagatccacacgaaggagaccagcgagaagtaccgccggggccagatggacttggacttcccctcgaacctgatgagcacggagaccctgaaattgaggagaaaagagacctccacagcagaaatggaataccagtcgggcgtgactgctgtggtggagaaggtcaagagtgctgtacggtgctctcacgtctgggacatcactagccgcttcctggcccagaggaacacggaggagaacctggagctgcagatggaggactgtgaggagtggcgggtgcagctgaaggccctggtgaagcagctggagctggaggaggccgtgctcaagttccgccagaagcctagctccatcaggtgccccgggcttccggggctgcgggccacccaccccagtctcacaaaggccccgggctgcagccaggctgggagctgggagtatacccactgccaacaagcctgtgtgtcccacagaggggccaggggactccacttgcacacacctgagcttctgagtccctgattctggcacagcacccaactcaggactgggctcctgggtggcccaccatggctctcgggcctgtgcccctcactgctgtgtccctattgccttctgcagcttcaagtccgttgagaagaaaatgacagacatgctaaaagaggaagaagagaggctccagctggcgcacagcaacatgaccaagggccaggagctgctgctgaccatccagatgggcatcgacaacctctatgtccggctgatgggcattaacttgcctgcgacccaggtaccgggagtgaggctgagctgccacacaccaggtccctgggcagggccagaggggagatgagaccctcctcccggcctacagagagaagtggtgctctccaacaccctcgatttgaacagcaagctggcgtactgcgaggggaagctcacgtacctggctgacagagtgcagatggtgtccaggaccgaggagggcgacacaaaggtgagggacaccctggagtcctcgactctgatggagaagtacaacaccaggatcagctttgagaaccgggaggaggatatgatcggaggaggcatgccatgccagacgggcccggaggagaggcaccagggctggagcagggaggagcgcggtgaagacaccttccagttccccgacatggaccacagctacgtcccttcgcgcgccgagatcaagaggcaggcgcagcggctaatcgaggggaagctcaaggcggccaagaaaaagaagaagtagccccgccgccccgctccctgctttgctacacaaataaacatttttccaggactgctgcggacgctggggcgaccggggtctcggagaggagcacgggacacgcaggatcgggggaggttctgcgtaaggaggcagcccgggcccggaactgcgcgccagaaccgcgtgcgcatgcgccgaccgcgcgcgccgcgcccccgcggccctcgcggcgccccgtagccgcgcacccctcccgtcccgccgagccggcgccaagatggcggcgctgactcctggagagcggtcgcgccggaggccgcgggggccggagcggagcagccgcggctgaggttcccgagtcgccgctcggggctgcgctccgccgccgggaccccggcctctggccgcgccggctccggcctccgggggggccggggccgccgggacatggtgccagtcgcaccccttccccgccgccgctgagctcgccggccgcgcccgggctgggacgtccgagcgggaagatgttttccgccctgaagaagctggtggggtcggaccaggccccgggccgggacaagaacatccccgccgggctgcagtccatgaaccaggcgttgcagaggcgcttcgccaagggggtgcagtacaacatgaagatagtgatccggggagacaggaacacgggcaagacagcgctgtggcaccgcctgcagggccggccgttcgtggaggagtacatccccacacaggagatccaggtcaccagcatccactggagctacaagaccacggatgacatcgtgaaggttgaagtctgggatgtagtagacaaaggaaaatgcaaaaagcgaggcgacggcttaaagatggagaacgacccccaggaggcggagtctgaaatggccctggatgctgagttcctggacgtgtacaagaactgcaacggggtggtcatgatgttcgacattaccaagcagtggaccttcaattacattctccgggagcttccaaaagtgcccacccacgtgccagtgtgcgtgctggggaactaccgggacatgggcgagcaccgagtcatcctgccggacgacgtgcgtgacttcatcgacaacctggacagacctccaggttcctcctacttccgctatgctgagtcttccatgaagaacagcttcggcctaaagtaccttcataagttcttcaatatcccatttttgcagcttcagagggagacgctgttgcggcagctggagacgaaccagctggacatggacgccacgctggaggagctgtcggtgcagcaggagacggaggaccagaactacggcatcttcctggagatgatggaggctcgcagccgtggccatgcgtccccactggcggccaacgggcagagcccatccccgggctcccagtcaccagtggtgcctgcaggcgctgtgtccacggggagctccagccccggcacaccccagcccgccccacagctgcccctcaatgccgccccaccatcctctgtgccccctgtaccaccctcagaggccctgcccccacctgcgtgcccctcagcccccgccccacggcgcagcatcatctctaggctgtttgggacgtcacctgccaccgaggcagcccctccacctccagagccagtcccggccgcacagggcccagcaacggtccagagtgtggaggactttgttcctgacgaccgcctggaccgcagcttcctggaagacacaacccccgccagggacgagaagaaggtgggggccaaggctgcccagcaggacagcgacagtgatggggaggccctgggcggcaacccgatggtggcagggttccaggacgatgtggacctcgaagaccagccacgtgggagtcccccgctgcctgcaggccccgtccccagtcaagacatcactctttcgagtgaggaggaagcagaagtggcagctcccacaaaaggccctgccccagctccccagcagtgctcagagccagagaccaagtggtcctccataccagcttcgaagccacggagggggacagctcccacgaggaccgcagcacccccctggccaggcggtgtctctgttcgcacaggtccggagaagcgcagcagcaccaggccccctgctgagatggagccggggaagggtgagcaggcctcctcgtcggagagtgaccccgagggacccattgctgcacaaatgctgtccttcgtcatggatgaccccgactttgagagcgagggatcagacacacagcgcagggcggatgactttcccgtgcgagatgacccctccgatgtgactgacgaggatgagggccctgccgagccgcccccaccccccaagctccctctccccgccttcagactgaagaatgactcggacctcttcgggctggggctggaggaggccggacccaaggagagcagtgaggaaggtaaggagggcaaaaccccctctaaggagaagaagaagaagaagaaaaaaggcaaagaggaagaagaaaaagctgccaagaagaagagcaaacacaagaagagcaaggacaaggaggagggcaaggaggagcggcgacggcggcagcagcggcccccgcgcagcagggagaggacggctgccgatgagctggaggctttcctggggggcggggccccgggcggccgccaccctgggggtggcgactacgaggagctctaggccggcgtgggcagtggccgccctggggcggggggcgtgcctgtcactgcctggggaggcatttgcctctgtaccatcgcctttgccgctgccccgtggctgccgtgtgcgcttctgagctggaagaggccgggcattggtggtccccaggctgggccctgcaggtgctgggccttcaggcccagtgtgagcctgctctgcaagaagggaggggacagctggcttcagccaggctcggtggacaccctggccctctcggggcagagccgccagtgtttctcagggatgtgactgaggcccaggagggacctgtgagggtctgtttacagaggctgggcaggggccgcttggctgtggggtgtgcgctgccccggcacctgcttgccctccgcgctcatctggggccgcagcatgcctatggttccgcttccggccgggagccctgaacacgggtgtgcagactcaccctaaagggcggcccaggccccacgctagaaggctggcgagaccgaaggcagcatgtgaggcctctcctgggagtgggggttgtgtttcccacagtggcctcagctgcgcccccgctcaggtgagcccgaaggcaggagccgggaggcactcctcccaaacactccactcagaccataaagcactcctgtttcactctg

SEQ ID NO: 402633 - DNA, 4831 bp, Homo sapiens
acttcgctgcttcataaccaagcgtcctacttgcctgccttaagggtctaccttgcaaaggcacatgctgcttttaaagtcctttgtggtcattaataagtatctatggctttcctcttcagtgataagagctgttgggtgcgtgagcaggggttagcagatgacggttttagctgcccaagggcacgctggaagaggccaggttttggggaagaggatgaatctgtcttcaggcaggctgaatgcacttccgtgagttctaggtggacctggccaggaggcagctgggggccagcggctggagggcagcagagcgtctgggctggcacatgctctgaggcatgggcaaggagggccgtgagctgaggggccacgggcacaagtggtttaggaaaagggtgtggccattggccggggatgcagttccaaagtctagtaaggtgagcatggccaaccgcccgctggctttactgccattaggggccttgttgagacagctccccaaccctgtgcccacccgcatgtccccagaggaacatgaggcaaagggaggcgtccttcatcgaggagcgccgggcaagggagaaccggctcaaccagcagaagaagctgatcgacaagatccacacgaaggagaccagcgagaagtaccgccggggccagatggacttggacttcccctcgaacctgatgagcacggagaccctgaaattgaggagaaaagagacctccacagcagaaatggaataccagtcgggcgtgactgctgtggtggagaaggtcaagagtgctgtacggtgctctcacgtctgggacatcactagccgcttcctggcccagaggaacacggaggagaacctggagctgcagatggaggactgtgaggagtggcgggtgcagctgaaggccctggtgaagcagctggagctggaggaggccgtgctcaagttccgccagaagcctagctccatcagcttcaagtccgttgagaagaaaatgacagacatgctaaaagaggaagaagagaggctccagctggcgcacagcaacatgaccaagggccaggagctgctgctgaccatccagatgggcatcgacaacctctatgtccggctgatgggcattaacttgcctgcgacccagagagaagtggtgctctccaacaccctcgatttgaacagcaagctggcgtactgcgaggggaagctcacgtacctggctgacagagtgcagatggtgtccaggaccgaggagggcgacacaaaggtgagggacaccctggagtcctcgactctgatggagaagtacaacaccaggatcagctttgagaaccgggaggaggatatgatcgacaccttccagttccccgacatggaccacagctacgtcccttcgcgcgccgagatcaagaggcaggcgcagcggctaatcgaggggaagctcaaggcggccaagaaaaagaagaagtagccccgccgccccgctccctgctttgctacacaaataaacatttttccaggactgctgcggacgctggggcgaccggggtctcggagaggagcacgggacacgcaggatcgggggaggttctgcgtaaggaggcagcccgggcccggaactgcgcgccagaaccgcgtgcgcatgcgccgaccgcgcgcgccgcgcccccgcggccctcgcggcgccccgtagccgcgcacccctcccgtcccgccgagccggcgccaagatggcggcgctgactcctggagagcggtcgcgccggaggccgcgggggccggagcggagcagccgcggctgaggttcccgagtcgccgctcggggctgcgctccgccgccgggaccccggcctctggccgcgccggctccggcctccgggggggccggggccgccgggacatggtgccagtcgcaccccttccccgccgccgctgagctcgccggccgcgcccgggctgggacgtccgagcgggaagatgttttccgccctgaagaagctggtggggtcggaccaggccccgggccgggacaagaacatccccgccgggctgcagtccatgaaccaggcgttgcagaggcgcttcgccaagggggtgcagtacaacatgaagatagtgatccggggagacaggaacacgggcaagacagcgctgtggcaccgcctgcagggccggccgttcgtggaggagtacatccccacacaggagatccaggtcaccagcatccactggagctacaagaccacggatgacatcgtgaaggttgaagtctgggatgtagtagacaaaggaaaatgcaaaaagcgaggcgacggcttaaagatggagaacgacccccaggaggcggagtctgaaatggccctggatgctgagttcctggacgtgtacaagaactgcaacggggtggtcatgatgttcgacattaccaagcagtggaccttcaattacattctccgggagcttccaaaagtgcccacccacgtgccagtgtgcgtgctggggaactaccgggacatgggcgagcaccgagtcatcctgccggacgacgtgcgtgacttcatcgacaacctggacagacctccaggttcctcctacttccgctatgctgagtcttccatgaagaacagcttcggcctaaagtaccttcataagttcttcaatatcccatttttgcagcttcagagggagacgctgttgcggcagctggagacgaaccagctggacatggacgccacgctggaggagctgtcggtgcagcaggagacggaggaccagaactacggcatcttcctggagatgatggaggctcgcagccgtggccatgcgtccccactggcggccaacgggcagagcccatccccgggctcccagtcaccagtggtgcctgcaggcgctgtgtccacggggagctccagccccggcacaccccagcccgccccacagctgcccctcaatgccgccccaccatcctctgtgccccctgtaccaccctcagaggccctgcccccacctgcgtgcccctcagcccccgccccacggcgcagcatcatctctaggctgtttgggacgtcacctgccaccgaggcagcccctccacctccagagccagtcccggccgcacagggcccagcaacggtccagagtgtggaggactttgttcctgacgaccgcctggaccgcagcttcctggaagacacaacccccgccagggacgagaagaaggtgggggccaaggctgcccagcaggacagcgacagtgatggggaggccctgggcggcaacccgatggtggcagggttccaggacgatgtggacctcgaagaccagccacgtgggagtcccccgctgcctgcaggccccgtccccagtcaagacatcactctttcgagtgaggaggaagcagaagtggcagctcccacaaaaggccctgccccagctccccagcagtgctcagagccagagaccaagtggtcctccataccagcttcgaagccacggagggggacagctcccacgaggaccgcagcacccccctggccaggcggtgtctctgttcgcacaggtccggagaagcgcagcagcaccaggccccctgctgagatggagccggggaagggtgagcaggcctcctcgtcggagagtgaccccgagggacccattgctgcacaaatgctgtccttcgtcatggatgaccccgactttgagagcgagggatcagacacacagcgcagggcggatgactttcccgtgcgagatgacccctccgatgtgactgacgaggatgagggccctgccgagccgcccccaccccccaagctccctctccccgccttcagactgaagaatgactcggacctcttcgggctggggctggaggaggccggacccaaggagagcagtgaggaaggtaaggagggcaaaaccccctctaaggagaagaagaagaagaagaaaaaaggcaaagaggaagaagaaaaagctgccaagaagaagagcaaacacaagaagagcaaggacaaggaggagggcaaggaggagcggcgacggcggcagcagcggcccccgcgcagcagggagaggacggctgccgatgagctggaggctttcctggggggcggggccccgggcggccgccaccctgggggtggcgactacgaggagctctaggccggcgtgggcagtggccgccctggggcggggggcgtgcctgtcactgcctggggaggcatttgcctctgtaccatcgcctttgccgctgccccgtggctgccgtgtgcgcttctgagctggaagaggccgggcattggtggtccccaggctgggccctgcaggtgctgggccttcaggcccagtgtgagcctgctctgcaagaagggaggggacagctggcttcagccaggctcggtggacaccctggccctctcggggcagagccgccagtgtttctcagggatgtgactgaggcccaggagggacctgtgagggtctgtttacagaggctgggcaggggccgcttggctgtggggtgtgcgctgccccggcacctgcttgccctccgcgctcatctggggccgcagcatgcctatggttccgcttccggccgggagccctgaacacgggtgtgcagactcaccctaaagggcggcccaggccccacgctagaaggctggcgagaccgaaggcagcatgtgaggcctctcctgggagtgggggttgtgtttcccacagtggcctcagctgcgcccccgctcaggtgagcccgaaggcaggagccgggaggcactcctcccaaacactccactcagaccataaagcactcctgtttcactctg

SEQ ID NO: 402634 - DNA, 5352 bp, Homo sapiens
  misc_feature (67)..(67): n is a, c, g, or t
cgcccaaaccagcttctccacttcttcggaccagtgctcagagccagagaccaagtggtcctccatntccagcttcgaagccggggacggggacagctcccacgaggaccgagcacccccctggccaggcggtgtctctgttcgcacaggtccggagaagcgcagcagcaccaggccccctgctgagatggagccggggaagggtgagcaggcctcctcgtcggagagtgaccccgagggacccattgctgcacaaatgctgtccttcgtcatggatgaccccgactttgagagcgagggatcagacacacagcgcagggcggatgactttcccgtgcgagatgacccctccgatgtgactgacgaggatgagggccctgccgagccgcccccaccccccaagctccctctccccgccttcagactgaagaatgactcggacctcttcgggctggagctggaggaggccgtgctcaagttccgccagaagcctagctccatcaggtgccccgggcttccggggctgcgggccacccaccccagtctcacaaaggccccgggctgcagccaggctgggagctgggagtatacccactgccaacaagcctgtgtgtcccacagaggggccaggggactccacttgcacacacctgagcttctgagtccctgattctggcacagcacccaactcaggactgggctcctgggtggcccaccatggctctcgggcctgtgcccctcactgctgtgtccctattgccttctgcagcttcaagtccgttgagaagaaaatgacagacatgctaaaagaggaagaagagaggctccagctggcgcacagcaacatgaccaagggccaggagctgctgctgaccatccagatgggcatcgacaacctctatgtccggctgatgggcattaacttgcctgcgacccaggtaccgggagtgaggctgagctgccacacaccaggtccctgggcagggccagaggggagatgagaccctcctcccggcctacagagagaagtggtgctctccaacaccctcgatttgaacagcaagctggcgtactgcgaggggaagctcacgtacctggctgacagagtgcagatggtgtccaggaccgaggagggcgacacaaaggtgagggacaccctggagtcctcgactctgatggagaagtacaacaccaggatcagctttgagaaccgggaggaggatatgatcggaggaggcatgccatgccagacgggcccggaggagaggcaccagggctggagcagggaggagcgcggtgaagacaccttccagttccccgacatggaccacagctacgtcccttcgcgcgccgagatcaagaggcaggcgcagcggctaatcgaggggaagctcaaggcggccaagaaaaagaagaagtagccccgccgccccgctccctgctttgctacacaaataaacatttttccaggactgctgcggacgctggggcgaccggggtctcggagaggagcacgggacacgcaggatcgggggaggttctgcgtaaggaggcagcccgggcccggaactgcgcgccagaaccgcgtgcgcatgcgccgaccgcgcgcgccgcgcccccgcggccctcgcggcgccccgtagccgcgcacccctcccgtcccgccgagccggcgccaagatggcggcgctgactcctggagagcggtcgcgccggaggccgcgggggccggagcggagcagccgcggctgaggttcccgagtcgccgctcggggctgcgctccgccgccgggaccccggcctctggccgcgccggctccggcctccgggggggccggggccgccgggacatggtgccagtcgcaccccttccccgccgccgctgagctcgccggccgcgcccgggctgggacgtccgagcgggaagatgttttccgccctgaagaagctggtggggtcggaccaggccccgggccgggacaagaacatccccgccgggctgcagtccatgaaccaggcgttgcagaggcgcttcgccaagggggtgcagtacaacatgaagatagtgatccggggagacaggaacacgggcaagacagcgctgtggcaccgcctgcagggccggccgttcgtggaggagtacatccccacacaggagatccaggtcaccagcatccactggagctacaagaccacggatgacatcgtgaaggttgaagtctgggatgtagtagacaaaggaaaatgcaaaaagcgaggcgacggcttaaagatggagaacgacccccaggaggcggagtctgaaatggccctggatgctgagttcctggacgtgtacaagaactgcaacggggtggtcatgatgttcgacattaccaagcagtggaccttcaattacattctccgggagcttccaaaagtgcccacccacgtgccagtgtgcgtgctggggaactaccgggacatgggcgagcaccgagtcatcctgccggacgacgtgcgtgacttcatcgacaacctggacagacctccaggttcctcctacttccgctatgctgagtcttccatgaagaacagcttcggcctaaagtaccttcataagttcttcaatatcccatttttgcagcttcagagggagacgctgttgcggcagctggagacgaaccagctggacatggacgccacgctggaggagctgtcggtgcagcaggagacggaggaccagaactacggcatcttcctggagatgatggaggctcgcagccgtggccatgcgtccccactggcggccaacgggcagagcccatccccgggctcccagtcaccagtggtgcctgcaggcgctgtgtccacggggagctccagccccggcacaccccagcccgccccacagctgcccctcaatgccgccccaccatcctctgtgccccctgtaccaccctcagaggccctgcccccacctgcgtgcccctcagcccccgccccacggcgcagcatcatctctaggctgtttgggacgtcacctgccaccgaggcagcccctccacctccagagccagtcccggccgcacagggcccagcaacggtccagagtgtggaggactttgttcctgacgaccgcctggaccgcagcttcctggaagacacaacccccgccagggacgagaagaaggtgggggccaaggctgcccagcaggacagcgacagtgatggggaggccctgggcggcaacccgatggtggcagggttccaggacgatgtggacctcgaagaccagccacgtgggagtcccccgctgcctgcaggccccgtccccagtcaagacatcactctttcgagtgaggaggaagcagaagtggcagctcccacaaaaggccctgccccagctccccagcagtgctcagagccagagaccaagtggtcctccataccagcttcgaagccacggagggggacagctcccacgaggaccgcagcacccccctggccaggcggtgtctctgttcgcacaggtccggagaagcgcagcagcaccaggccccctgctgagatggagccggggaagggtgagcaggcctcctcgtcggagagtgaccccgagggacccattgctgcacaaatgctgtccttcgtcatggatgaccccgactttgagagcgagggatcagacacacagcgcagggcggatgactttcccgtgcgagatgacccctccgatgtgactgacgaggatgagggccctgccgagccgcccccaccccccaagctccctctccccgccttcagactgaagaatgactcggacctcttcgggctggggctggaggaggccggacccaaggagagcagtgaggaaggtaaggagggcaaaaccccctctaaggagaagaagaagaagaagaaaaaaggcaaagaggaagaagaaaaagctgccaagaagaagagcaaacacaagaagagcaaggacaaggaggagggcaaggaggagcggcgacggcggcagcagcggcccccgcgcagcagggagaggacggctgccgatgagctggaggctttcctggggggcggggccccgggcggccgccaccctgggggtggcgactacgaggagctctaggccggcgtgggcagtggccgccctggggcggggggcgtgcctgtcactgcctggggaggcatttgcctctgtaccatcgcctttgccgctgccccgtggctgccgtgtgcgcttctgagctggaagaggccgggcattggtggtccccaggctgggccctgcaggtgctgggccttcaggcccagtgtgagcctgctctgcaagaagggaggggacagctggcttcagccaggctcggtggacaccctggccctctcggggcagagccgccagtgtttctcagggatgtgactgaggcccaggagggacctgtgagggtctgtttacagaggctgggcaggggccgcttggctgtggggtgtgcgctgccccggcacctgcttgccctccgcgctcatctggggccgcagcatgcctatggttccgcttccggccgggagccctgaacacgggtgtgcagactcaccctaaagggcggcccaggccccacgctagaaggctggcgagaccgaaggcagcatgtgaggcctctcctgggagtgggggttgtgtttcccacagtggcctcagctgcgcccccgctcaggtgagcccgaaggcaggagccgggaggcactcctcccaaacactccactcagaccataaagcactcctgtttcactctgaaaaaaaaaaaaaaaaaaaaaaaaaaaaaaaaaaaaaaaaaaaacaaaaaaaaaaaaaaaaaaaataaaagaaagggggagcgcagccgccgccgtcaataatatttctctctgactgagagggacgccaaagtaaggtgaggcccgacccccagcatttttttcttcaagaagggcggcgccgccaattatgatgcaggcgcctcttattattagcgaagggacgggccgcccgttctgttaacatcatgttcgtcatgtagcgtgaggaaaactagcgcgccaccttcgcgggaatactactcgtgcgagaggaagagaacccccatcacacctgcgtcgagctgggggtgaccacctaattctttgggagacaacaccctccccgacgacgggatattacgacagccgcctctggggctaaacctatactaaacctgttacgagtgtgtcgatcagcgcggcttgaaacaccagccaccgccactacttgctgccggctcggtcaataaaacagtttgtgacacagctgcgatattcattctagcgaaacaactattacacgcaggg

SEQ ID NO: 402635 - DNA, 4757 bp, Homo sapiens
  misc_feature (67)..(67): n is a, c, g, or t
cgcccaaaccagcttctccacttcttcggaccagtgctcagagccagagaccaagtggtcctccatntccagcttcgaagccggggacggggacagctcccacgaggaccgagcacccccctggccaggcggtgtctctgttcgcacaggtccggagaagcgcagcagcaccaggccccctgctgagatggagccggggaagggtgagcaggcctcctcgtcggagagtgaccccgagggacccattgctgcacaaatgctgtccttcgtcatggatgaccccgactttgagagcgagggatcagacacacagcgcagggcggatgactttcccgtgcgagatgacccctccgatgtgactgacgaggatgagggccctgccgagccgcccccaccccccaagctccctctccccgccttcagactgaagaatgactcggacctcttcgggctggagctggaggaggccgtgctcaagttccgccagaagcctagctccatcaggtgccccgggcttccggggctgcgggccacccaccccagtctcacaaaggccccgggctgcagccaggctgggagctgggagtatacccactgccaacaagcctgtgtgtcccacagaggggccaggggactccacttgcacacacctgagcttctgagtccctgattctggcacagcacccaactcaggactgggctcctgggtggcccaccatggctctcgggcctgtgcccctcactgctgtgtccctattgccttctgcagcttcaagtccgttgagaagaaaatgacagacatgctaaaagaggaagaagagaggctccagctggcgcacagcaacatgaccaagggccaggagctgctgctgaccatccagatgggcatcgacaacctctatgtccggctgatgggcattaacttgcctgcgacccaggtaccgggagtgaggctgagctgccacacaccaggtccctgggcagggccagaggggagatgagaccctcctcccggcctacagagagaagtggtgctctccaacaccctcgatttgaacagcaagctggcgtactgcgaggggaagctcacgtacctggctgacagagtgcagatggtgtccaggaccgaggagggcgacacaaaggtgagggacaccctggagtcctcgactctgatggagaagtacaacaccaggatcagctttgagaaccgggaggaggatatgatcggaggaggcatgccatgccagacgggcccggaggagaggcaccagggctggagcagggaggagcgcggtgaagacaccttccagttccccgacatggaccacagctacgtcccttcgcgcgccgagatcaagaggcaggcgcagcggctaatcgaggggaagctcaaggcggccaagaaaaagaagaagtagccccgccgccccgctccctgctttgctacacaaataaacatttttccaggactgctgcggacgctggggcgaccggggtctcggagaggagcacgggacacgcaggatcgggggaggttctgcgtaaggaggcagcccgggcccggaactgcgcgccagaaccgcgtgcgcatgcgccgaccgcgcgcgccgcgcccccgcggccctcgcggcgccccgtagccgcgcacccctcccgtcccgccgagccggcgccaagatggcggcgctgactcctggagagcggtcgcgccggaggccgcgggggccggagcggagcagccgcggctgaggttcccgagtcgccgctcggggctgcgctccgccgccgggaccccggcctctggccgcgccggctccggcctccgggggggccggggccgccgggacatggtgccagtcgcaccccttccccgccgccgctgagctcgccggccgcgcccgggctgggacgtccgagcgggaagatgttttccgccctgaagaagctggtggggtcggaccaggccccgggccgggacaagaacatccccgccgggctgcagtccatgaaccaggcgttgcagaggcgcttcgccaagggggtgcagtacaacatgaagatagtgatccggggagacaggaacacgggcaagacagcgctgtggcaccgcctgcagggccggccgttcgtggaggagtacatccccacacaggagatccaggtcaccagcatccactggagctacaagaccacggatgacatcgtgaaggttgaagtctgggatgtagtagacaaaggaaaatgcaaaaagcgaggcgacggcttaaagatggagaacgacccccaggaggcggagtctgaaatggccctggatgctgagttcctggacgtgtacaagaactgcaacggggtggtcatgatgttcgacattaccaagcagtggaccttcaattacattctccgggagcttccaaaagtgcccacccacgtgccagtgtgcgtgctggggaactaccgggacatgggcgagcaccgagtcatcctgccggacgacgtgcgtgacttcatcgacaacctggacagacctccaggttcctcctacttccgctatgctgagtcttccatgaagaacagcttcggcctaaagtaccttcataagttcttcaatatcccatttttgcagcttcagagggagacgctgttgcggcagctggagacgaaccagctggacatggacgccacgctggaggagctgtcggtgcagcaggagacggaggaccagaactacggcatcttcctggagatgatggaggctcgcagccgtggccatgcgtccccactggcggccaacgggcagagcccatccccgggctcccagtcaccagtggtgcctgcaggcgctgtgtccacggggagctccagccccggcacaccccagcccgccccacagctgcccctcaatgccgccccaccatcctctgtgccccctgtaccaccctcagaggccctgcccccacctgcgtgcccctcagcccccgccccacggcgcagcatcatctctaggctgtttgggacgtcacctgccaccgaggcagcccctccacctccagagccagtcccggccgcacagggcccagcaacggtccagagtgtggaggactttgttcctgacgaccgcctggaccgcagcttcctggaagacacaacccccgccagggacgagaagaaggtgggggccaaggctgcccagcaggacagcgacagtgatggggaggccctgggcggcaacccgatggtggcagggttccaggacgatgtggacctcgaagaccagccacgtgggagtcccccgctgcctgcaggccccgtccccagtcaagacatcactctttcgagtgaggaggaagcagaagtggcagctcccacaaaaggccctgccccagctccccagcagtgctcagagccagagaccaagtggtcctccataccagcttcgaagccacggagggggacagctcccacgaggaccgcagcacccccctggccaggcggtgtctctgttcgcacaggtccggagaagcgcagcagcaccaggccccctgctgagatggagccggggaagggtgagcaggcctcctcgtcggagagtgaccccgagggacccattgctgcacaaatgctgtccttcgtcatggatgaccccgactttgagagcgagggatcagacacacagcgcagggcggatgactttcccgtgcgagatgacccctccgatgtgactgacgaggatgagggccctgccgagccgcccccaccccccaagctccctctccccgccttcagactgaagaatgactcggacctcttcgggctggggctggaggaggccggacccaaggagagcagtgaggaaggtaaggagggcaaaaccccctctaaggagaagaagaagaagaagaaaaaaggcaaagaggaagaagaaaaagctgccaagaagaagagcaaacacaagaagagcaaggacaaggaggagggcaaggaggagcggcgacggcggcagcagcggcccccgcgcagcagggagaggacggctgccgatgagctggaggctttcctggggggcggggccccgggcggccgccaccctgggggtggcgactacgaggagctctaggccggcgtgggcagtggccgccctggggcggggggcgtgcctgtcactgcctggggaggcatttgcctctgtaccatcgcctttgccgctgccccgtggctgccgtgtgcgcttctgagctggaagaggccgggcattggtggtccccaggctgggccctgcaggtgctgggccttcaggcccagtgtgagcctgctctgcaagaagggaggggacagctggcttcagccaggctcggtggacaccctggccctctcggggcagagccgccagtgtttctcagggatgtgaggtctgtttacagaggctgggcaggggccgcttggctgtggggtgtgcgctgccccggcacctgcttgccctccgcgctcatctggggccgcagcatgcctatggttccgcttccggccgggagccctgaacacgggtgtgcagactcaccctaaagggcggcccaggccccacgctagaaggctggcgagaccgaaggcagcatgtgaggcctctcctgggagtgggggttgtgtttcccacagtggcctcagctgcgcccccgctcaggtgagcccgaaggcaggagccgggaggcactcctcccaaacactccactcagaccataaagcactcctgtttcactctg

SEQ ID NO: 402636 - DNA, 4788 bp, Homo sapiens
  misc_feature (67)..(67): n is a, c, g, or t
cgcccaaaccagcttctccacttcttcggaccagtgctcagagccagagaccaagtggtcctccatntccagcttcgaagccggggacggggacagctcccacgaggaccgagcacccccctggccaggcggtgtctctgttcgcacaggtccggagaagcgcagcagcaccaggccccctgctgagatggagccggggaagggtgagcaggcctcctcgtcggagagtgaccccgagggacccattgctgcacaaatgctgtccttcgtcatggatgaccccgactttgagagcgagggatcagacacacagcgcagggcggatgactttcccgtgcgagatgacccctccgatgtgactgacgaggatgagggccctgccgagccgcccccaccccccaagctccctctccccgccttcagactgaagaatgactcggacctcttcgggctggagctggaggaggccgtgctcaagttccgccagaagcctagctccatcaggtgccccgggcttccggggctgcgggccacccaccccagtctcacaaaggccccgggctgcagccaggctgggagctgggagtatacccactgccaacaagcctgtgtgtcccacagaggggccaggggactccacttgcacacacctgagcttctgagtccctgattctggcacagcacccaactcaggactgggctcctgggtggcccaccatggctctcgggcctgtgcccctcactgctgtgtccctattgccttctgcagcttcaagtccgttgagaagaaaatgacagacatgctaaaagaggaagaagagaggctccagctggcgcacagcaacatgaccaagggccaggagctgctgctgaccatccagatgggcatcgacaacctctatgtccggctgatgggcattaacttgcctgcgacccaggtaccgggagtgaggctgagctgccacacaccaggtccctgggcagggccagaggggagatgagaccctcctcccggcctacagagagaagtggtgctctccaacaccctcgatttgaacagcaagctggcgtactgcgaggggaagctcacgtacctggctgacagagtgcagatggtgtccaggaccgaggagggcgacacaaaggtgagggacaccctggagtcctcgactctgatggagaagtacaacaccaggatcagctttgagaaccgggaggaggatatgatcggaggaggcatgccatgccagacgggcccggaggagaggcaccagggctggagcagggaggagcgcggtgaagacaccttccagttccccgacatggaccacagctacgtcccttcgcgcgccgagatcaagaggcaggcgcagcggctaatcgaggggaagctcaaggcggccaagaaaaagaagaagtagccccgccgccccgctccctgctttgctacacaaataaacatttttccaggactgctgcggacgctggggcgaccggggtctcggagaggagcacgggacacgcaggatcgggggaggttctgcgtaaggaggcagcccgggcccggaactgcgcgccagaaccgcgtgcgcatgcgccgaccgcgcgcgccgcgcccccgcggccctcgcggcgccccgtagccgcgcacccctcccgtcccgccgagccggcgccaagatggcggcgctgactcctggagagcggtcgcgccggaggccgcgggggccggagcggagcagccgcggctgaggttcccgagtcgccgctcggggctgcgctccgccgccgggaccccggcctctggccgcgccggctccggcctccgggggggccggggccgccgggacatggtgccagtcgcaccccttccccgccgccgctgagctcgccggccgcgcccgggctgggacgtccgagcgggaagatgttttccgccctgaagaagctggtggggtcggaccaggccccgggccgggacaagaacatccccgccgggctgcagtccatgaaccaggcgttgcagaggcgcttcgccaagggggtgcagtacaacatgaagatagtgatccggggagacaggaacacgggcaagacagcgctgtggcaccgcctgcagggccggccgttcgtggaggagtacatccccacacaggagatccaggtcaccagcatccactggagctacaagaccacggatgacatcgtgaaggttgaagtctgggatgtagtagacaaaggaaaatgcaaaaagcgaggcgacggcttaaagatggagaacgacccccaggaggcggagtctgaaatggccctggatgctgagttcctggacgtgtacaagaactgcaacggggtggtcatgatgttcgacattaccaagcagtggaccttcaattacattctccgggagcttccaaaagtgcccacccacgtgccagtgtgcgtgctggggaactaccgggacatgggcgagcaccgagtcatcctgccggacgacgtgcgtgacttcatcgacaacctggacagacctccaggttcctcctacttccgctatgctgagtcttccatgaagaacagcttcggcctaaagtaccttcataagttcttcaatatcccatttttgcagcttcagagggagacgctgttgcggcagctggagacgaaccagctggacatggacgccacgctggaggagctgtcggtgcagcaggagacggaggaccagaactacggcatcttcctggagatgatggaggctcgcagccgtggccatgcgtccccactggcggccaacgggcagagcccatccccgggctcccagtcaccagtggtgcctgcaggcgctgtgtccacggggagctccagccccggcacaccccagcccgccccacagctgcccctcaatgccgccccaccatcctctgtgccccctgtaccaccctcagaggccctgcccccacctgcgtgcccctcagcccccgccccacggcgcagcatcatctctaggctgtttgggacgtcacctgccaccgaggcagcccctccacctccagagccagtcccggccgcacagggcccagcaacggtccagagtgtggaggactttgttcctgacgaccgcctggaccgcagcttcctggaagacacaacccccgccagggacgagaagaaggtgggggccaaggctgcccagcaggacagcgacagtgatggggaggccctgggcggcaacccgatggtggcagggttccaggacgatgtggacctcgaagaccagccacgtgggagtcccccgctgcctgcaggccccgtccccagtcaagacatcactctttcgagtgaggaggaagcagaagtggcagctcccacaaaaggccctgccccagctccccagcagtgctcagagccagagaccaagtggtcctccataccagcttcgaagccacggagggggacagctcccacgaggaccgcagcacccccctggccaggcggtgtctctgttcgcacaggtccggagaagcgcagcagcaccaggccccctgctgagatggagccggggaagggtgagcaggcctcctcgtcggagagtgaccccgagggacccattgctgcacaaatgctgtccttcgtcatggatgaccccgactttgagagcgagggatcagacacacagcgcagggcggatgactttcccgtgcgagatgacccctccgatgtgactgacgaggatgagggccctgccgagccgcccccaccccccaagctccctctccccgccttcagactgaagaatgactcggacctcttcgggctggggctggaacacccaacgcccccgttgagccacaacaaaaatcaaggtaaggagggcaaaaccccctctaaggagaagaagaagaagaagaaaaaaggcaaagaggaagaagaaaaagctgccaagaagaagagcaaacacaagaagagcaaggacaaggaggagggcaaggaggagcggcgacggcggcagcagcggcccccgcgcagcagggagaggacggctgccgatgagctggaggctttcctggggggcggggccccgggcggccgccaccctgggggtggcgactacgaggagctctaggccggcgtgggcagtggccgccctggggcggggggcgtgcctgtcactgcctggggaggcatttgcctctgtaccatcgcctttgccgctgccccgtggctgccgtgtgcgcttctgagctggaagaggccgggcattggtggtccccaggctgggccctgcaggtgctgggccttcaggcccagtgtgagcctgctctgcaagaagggaggggacagctggcttcagccaggctcggtggacaccctggccctctcggggcagagccgccagtgtttctcagggatgtgactgaggcccaggagggacctgtgagggtctgtttacagaggctgggcaggggccgcttggctgtggggtgtgcgctgccccggcacctgcttgccctccgcgctcatctggggccgcagcatgcctatggttccgcttccggccgggagccctgaacacgggtgtgcagactcaccctaaagggcggcccaggccccacgctagaaggctggcgagaccgaaggcagcatgtgaggcctctcctgggagtgggggttgtgtttcccacagtggcctcagctgcgcccccgctcaggtgagcccgaaggcaggagccgggaggcactcctcccaaacactccactcagaccataaagcactcctgtttcactctg

SEQ ID NO: 402637 - DNA, 4644 bp, Homo sapiens
  misc_feature (67)..(67): n is a, c, g, or t
cgcccaaaccagcttctccacttcttcggaccagtgctcagagccagagaccaagtggtcctccatntccagcttcgaagccggggacggggacagctcccacgaggaccgagcacccccctggccaggcggtgtctctgttcgcacaggtccggagaagcgcagcagcaccaggccccctgctgagatggagccggggaagggtgagcaggcctcctcgtcggagagtgaccccgagggacccattgctgcacaaatgctgtccttcgtcatggatgaccccgactttgagagcgagggatcagacacacagcgcagggcggatgactttcccgtgcgagatgacccctccgatgtgactgacgaggatgagggccctgccgagccgcccccaccccccaagctccctctccccgccttcagactgaagaatgactcggacctcttcgggctggagctggaggaggccgtgctcaagttccgccagaagcctagctccatcaggtgccccgggcttccggggctgcgggccacccaccccagtctcacaaaggccccgggctgcagccaggctgggagctgggagtatacccactgccaacaagcctgtgtgtcccacagaggggccaggggactccacttgcacacacctgagcttctgagtccctgattctggcacagcacccaactcaggactgggctcctgggtggcccaccatggctctcgggcctgtgcccctcactgctgtgtccctattgccttctgcagcttcaagtccgttgagaagaaaatgacagacatgctaaaagaggaagaagagaggctccagctggcgcacagcaacatgaccaagggccaggagctgctgctgaccatccagatgggcatcgacaacctctatgtccggctgatgggcattaacttgcctgcgacccaggtaccgggagtgaggctgagctgccacacaccaggtccctgggcagggccagaggggagatgagaccctcctcccggcctacagagagaagtggtgctctccaacaccctcgatttgaacagcaagctggcgtactgcgaggggaagctcacgtacctggctgacagagtgcagatggtgtccaggaccgaggagggcgacacaaaggtgagggacaccctggagtcctcgactctgatggagaagtacaacaccaggatcagctttgagaaccgggaggaggatatgatcggaggaggcatgccatgccagacgggcccggaggagaggcaccagggctggagcagggaggagcgcggtgaagacaccttccagttccccgacatggaccacagctacgtcccttcgcgcgccgagatcaagaggcaggcgcagcggctaatcgaggggaagctcaaggcggccaagaaaaagaagaagtagccccgccgccccgctccctgctttgctacacaaataaacatttttccaggactgctgcggacgctggggcgaccggggtctcggagaggagcacgggacacgcaggatcgggggaggttctgcgtaaggaggcagcccgggcccggaactgcgcgccagaaccgcgtgcgcatgcgccgaccgcgcgcgccgcgcccccgcggccctcgcggcgccccgtagccgcgcacccctcccgtcccgccgagccggcgccaagatggcggcgctgactcctggagagcggtcgcgccggaggccgcgggggccggagcggagcagccgcggctgaggttcccgagtcgccgctcggggctgcgctccgccgccgggaccccggcctctggccgcgccggctccggcctccgggggggccggggccgccgggacatggtgccagtcgcaccccttccccgccgccgctgagctcgccggccgcgcccgggctgggacgtccgagcgggaagatgttttccgccctgaagaagctggtggggtcggaccaggccccgggccgggacaagaacatccccgccgggctgcagtccatgaaccaggcgttgcagaggcgcttcgccaagggggtgcagtacaacatgaagatagtgatccggggagacaggaacacgggcaagacagcgctgtggcaccgcctgcagggccggccgttcgtggaggagtacatccccacacaggagatccaggtcaccagcatccactggagctacaagaccacggatgacatcgtgaaggttgaagtctgggatgtagtagacaaaggaaaatgcaaaaagcgaggcgacggcttaaagatggagaacgacccccaggaggcggagtctgaaatggccctggatgctgagttcctggacgtgtacaagaactgcaacggggtggtcatgatgttcgacattaccaagcagtggaccttcaattacattctccgggagcttccaaaagtgcccacccacgtgccagtgtgcgtgctggggaactaccgggacatgggcgagcaccgagtcatcctgccggacagggagacgctgttgcggcagctggagacgaaccagctggacatggacgccacgctggaggagctgtcggtgcagcaggagacggaggaccagaactacggcatcttcctggagatgatggaggctcgcagccgtggccatgcgtccccactggcggccaacgggcagagcccatccccgggctcccagtcaccagtggtgcctgcaggcgctgtgtccacggggagctccagccccggcacaccccagcccgccccacagctgcccctcaatgccgccccaccatcctctgtgccccctgtaccaccctcagaggccctgcccccacctgcgtgcccctcagcccccgccccacggcgcagcatcatctctaggctgtttgggacgtcacctgccaccgaggcagcccctccacctccagagccagtcccggccgcacagggcccagcaacggtccagagtgtggaggactttgttcctgacgaccgcctggaccgcagcttcctggaagacacaacccccgccagggacgagaagaaggtgggggccaaggctgcccagcaggacagcgacagtgatggggaggccctgggcggcaacccgatggtggcagggttccaggacgatgtggacctcgaagaccagccacgtgggagtcccccgctgcctgcaggccccgtccccagtcaagacatcactctttcgagtgaggaggaagcagaagtggcagctcccacaaaaggccctgccccagctccccagcagtgctcagagccagagaccaagtggtcctccataccagcttcgaagccacggagggggacagctcccacgaggaccgcagcacccccctggccaggcggtgtctctgttcgcacaggtccggagaagcgcagcagcaccaggccccctgctgagatggagccggggaagggtgagcaggcctcctcgtcggagagtgaccccgagggacccattgctgcacaaatgctgtccttcgtcatggatgaccccgactttgagagcgagggatcagacacacagcgcagggcggatgactttcccgtgcgagatgacccctccgatgtgactgacgaggatgagggccctgccgagccgcccccaccccccaagctccctctccccgccttcagactgaagaatgactcggacctcttcgggctggggctggaggaggccggacccaaggagagcagtgaggaaggtaaggagggcaaaaccccctctaaggagaagaagaagaagaagaaaaaaggcaaagaggaagaagaaaaagctgccaagaagaagagcaaacacaagaagagcaaggacaaggaggagggcaaggaggagcggcgacggcggcagcagcggcccccgcgcagcagggagaggacggctgccgatgagctggaggctttcctggggggcggggccccgggcggccgccaccctgggggtggcgactacgaggagctctaggccggcgtgggcagtggccgccctggggcggggggcgtgcctgtcactgcctggggaggcatttgcctctgtaccatcgcctttgccgctgccccgtggctgccgtgtgcgcttctgagctggaagaggccgggcattggtggtccccaggctgggccctgcaggtgctgggccttcaggcccagtgtgagcctgctctgcaagaagggaggggacagctggcttcagccaggctcggtggacaccctggccctctcggggcagagccgccagtgtttctcagggatgtgactgaggcccaggagggacctgtgagggtctgtttacagaggctgggcaggggccgcttggctgtggggtgtgcgctgccccggcacctgcttgccctccgcgctcatctggggccgcagcatgcctatggttccgcttccggccgggagccctgaacacgggtgtgcagactcaccctaaagggcggcccaggccccacgctagaaggctggcgagaccgaaggcagcatgtgaggcctctcctgggagtgggggttgtgtttcccacagtggcctcagctgcgcccccgctcaggtgagcccgaaggcaggagccgggaggcactcctcccaaacactccactcagaccataaagcactcctgtttcactctg

SEQ ID NO: 402638 - DNA, 3923 bp, Homo sapiens
  misc_feature (67)..(67): n is a, c, g, or t
cgcccaaaccagcttctccacttcttcggaccagtgctcagagccagagaccaagtggtcctccatntccagcttcgaagccggggacggggacagctcccacgaggaccgagcacccccctggccaggcggtgtctctgttcgcacaggtccggagaagcgcagcagcaccaggccccctgctgagatggagccggggaagggtgagcaggcctcctcgtcggagagtgaccccgagggacccattgctgcacaaatgctgtccttcgtcatggatgaccccgactttgagagcgagggatcagacacacagcgcagggcggatgactttcccgtgcgagatgacccctccgatgtgactgacgaggatgagggccctgccgagccgcccccaccccccaagctccctctccccgccttcagactgaagaatgactcggacctcttcgggctggagctggaggaggccgtgctcaagttccgccagaagcctagctccatcaggtgccccgggcttccggggctgcgggccacccaccccagtctcacaaaggccccgggctgcagccaggctgggagctgggagtatacccactgccaacaagcctgtgtgtcccacagaggggccaggggactccacttgcacacacctgagcttctgagtccctgattctggcacagcacccaactcaggactgggctcctgggtggcccaccatggctctcgggcctgtgcccctcactgctgtgtccctattgccttctgcagcttcaagtccgttgagaagaaaatgacagacatgctaaaagaggaagaagagaggctccagctggcgcacagcaacatgaccaagggccaggagctgctgctgaccatccagatgggcatcgacaacctctatgtccggctgatgggcattaacttgcctgcgacccaggtaccgggagtgaggctgagctgccacacaccaggtccctgggcagggccagaggggagatgagaccctcctcccggcctacagagagaagtggtgctctccaacaccctcgatttgaacagcaagctggcgtactgcgaggggaagctcacgtacctggctgacagagtgcagatggtgtccaggaccgaggagggcgacacaaaggtgagggacaccctggagtcctcgactctgatggagaagtacaacaccaggatcagctttgagaaccgggaggaggatatgatcggaggaggcatgccatgccagacgggcccggaggagaggcaccagggctggagcagggaggagcgcggtgaagacaccttccagttccccgacatggaccacagctacgtcccttcgcgcgccgagatcaagaggcaggcgcagcggctaatcgaggggaagctcaaggcggccaagaaaaagaagaagtagccccgccgccccgctccctgctttgctacacaaataaacatttttccaggactgctgcggacgctggggcgaccggggtctcggagaggagcacgggacacgcaggatcgggggaggttctgcgtaaggaggcagcccgggcccggaactgcgcgccagaaccgcgtgcgcatgcgccgaccgcgcgcgccgcgcccccgcggccctcgcggcgccccgtagccgcgcacccctcccgtcccgccgagccggcgccaagatggcggcgctgactcctggagagcggtcgcgccggaggccgcgggggccggagcggagcagccgcggctgaggttcccgagtcgccgctcggggctgcgctccgccgccgggaccccggcctctggccgcgccggctccggcctccgggggggccggggccgccgggacatggtgccagtcgcaccccttccccgccgccgctgagctcgccggccgcgcccgggctgggacgtccgagcgggaagatgttttccgccctgaagaagctggtggggtcggaccaggccccgggccgggacaagaacatccccgccgggctgcagtccatgaaccaggcgttgcagaggcgcttcgccaagggggtgcagtacaacatgaagatagtgatccggggagacaggaacacgggcaagacagcgctgtggcaccgcctgcagggccggccgttcgtggaggagtacatccccacacaggagatccaggtcaccagcatccactggagctacaagaccacggatgacatcgtgaaggttgaagtctgggatgtagtagacaaaggaaaatgcaaaaagcgaggcgacggcttaaagatggagaacgacccccaggaggcggagtctgaaatggccctggatgctgagttcctggacgtgtacaagaactgcaacggggtggtcatgatgttcgacattaccaagcagtggaccttcaattacattctccgggagcttccaaaagtgcccacccacgtgccagtgtgcgtgctggggaactaccgggacatgggcgagcaccgagtcatcctgccggacgacgtgcgtgacttcatcgacaacctggacagacctccaggttcctcctacttccgctatgctgagtcttccatgaagaacagcttcggcctaaagtaccttcataagttcttcaatatcccatttttgcagcttcagagggagacgctgttgcggcagctggagacgaaccagctggacatggacgccacgctggaggagctgtcggtgcagcaggagacggaggaccagaactacggcatcttcctggagatgatggaggctcgcagccgtggccatgcgtccccactggcggccaacgggcagagcccatccccgggctcccagtcaccagtggtgcctgcaggcgctgtgtccacggggagctccagccccggcacaccccagcccgccccacagctgcccctcaatgccgccccaccatcctctgtgccccctgtaccaccctcagaggccctgcccccacctgcgtgcccctcagcccccgccccacggcgcagcatcatctctaggctgtttgggacgtcacctgccaccgaggcagcccctccacctccagagccagtcccggccgcacagggcccagcaacggtccagagtgtggaggactttgttcctgacgaccgcctggaccgcagcttcctggaagacacaacccccgccagggacgagaagaaggtgggggccaaggctgcccagcaggacagcgacagtgatggggaggccctgggcggcaacccgatggtggcagggttccaggacgatgtggacctcgaagaccagccacgtgggagtcccccgctgcctgcaggccccgtccccagtcaagacatcactctttcgagtgaggaggaagcagaagtggcagctcccacaaaaggccctgccccagctccccagcagtgctcagagccagagaccaagtggtcctccataccagcttcgaagccacggagggggacagctcccacgaggaccgcagcacccccctggccaggcggtgtctctgttcgcacaggtccggagaagcgcagcagcaccaggccccctgctgagatggagccggggaagggtgagcaggcctcctcgtcggagagtgaccccgagggacccattgctgcacaaatgctgtccttcgtcatggatgaccccgactttgagagcgagggatcagacacacagcgcagggcggatgactttcccgtgcgagatgacccctccgatgtgactgacgaggatgagggccctgccgagccgcccccaccccccaagctccctctccccgccttcagactgaagaatgactcggacctcttcgggctggggctggaggaggccggacccaaggagagcagtgaggaaggtgggtgggggcaccagagtgcggtcagcctgctggagtttgggtagaacgtgggcctcctcccag

SEQ ID NO: 402639 - DNA, 2910 bp, Homo sapiens
  misc_feature (67)..(67): n is a, c, g, or t
cgcccaaaccagcttctccacttcttcggaccagtgctcagagccagagaccaagtggtcctccatntccagcttcgaagccggggacggggacagctcccacgaggaccgagcacccccctggccaggcggtgtctctgttcgcacaggtccggagaagcgcagcagcaccaggccccctgctgagatggagccggggaagggtgagcaggcctcctcgtcggagagtgaccccgagggacccattgctgcacaaatgctgtccttcgtcatggatgaccccgactttgagagcgagggatcagacacacagcgcagggcggatgactttcccgtgcgagatgacccctccgatgtgactgacgaggatgagggccctgccgagccgcccccaccccccaagctccctctccccgccttcagactgaagaatgactcggacctcttcgggctggagctggaggaggccgtgctcaagttccgccagaagcctagctccatcaggtgccccgggcttccggggctgcgggccacccaccccagtctcacaaaggccccgggctgcagccaggctgggagctgggagtatacccactgccaacaagcctgtgtgtcccacagaggggccaggggactccacttgcacacacctgagcttctgagtccctgattctggcacagcacccaactcaggactgggctcctgggtggcccaccatggctctcgggcctgtgcccctcactgctgtgtccctattgccttctgcagcttcaagtccgttgagaagaaaatgacagacatgctaaaagaggaagaagagaggctccagctggcgcacagcaacatgaccaagggccaggagctgctgctgaccatccagatgggcatcgacaacctctatgtccggctgatgggcattaacttgcctgcgacccaggtaccgggagtgaggctgagctgccacacaccaggtccctgggcagggccagaggggagatgagaccctcctcccggcctacagagagaagtggtgctctccaacaccctcgatttgaacagcaagctggcgtactgcgaggggaagctcacgtacctggctgacagagtgcagatggtgtccaggaccgaggagggcgacacaaaggtgagggacaccctggagtcctcgactctgatggagaagtacaacaccaggatcagctttgagaaccgggaggaggatatgatcggaggaggcatgccatgccagacgggcccggaggagaggcaccagggctggagcagggaggagcgcggtgaagacaccttccagttccccgacatggaccacagctacgtcccttcgcgcgccgagatcaagaggcaggcgcagcggctaatcgaggggaagctcaaggcggccaagaaaaagaagaagtagccccgccgccccgctccctgctttgctacacaaataaacatttttccaggactgctgcggacgctggggcgaccggggtctcggagaggagcacgggacacgcaggatcgggggaggttctgcgtaaggaggcagcccgggcccggaactgcgcgccagaaccgcgtgcgcatgcgccgaccgcgcgcgccgcgcccccgcggccctcgcggcgccccgtagccgcgcacccctcccgtcccgccgagccggcgccaagatggcggcgctgactcctggagagcggtcgcgccggaggccgcgggggccggagcggagcagccgcggctgaggttcccgagtcgccgctcggggctgcgctccgccgccgggaccccggcctctggccgcgccggctccggcctccgggggggccggggccgccgggacatggtgccagtcgcaccccttccccgccgccgctgagctcgccggccgcgcccgggctgggacgtccgagcgggaagatgttttccgccctgaagaagctggtggggtcggaccaggccccgggccgggacaagaacatccccgccgggctgcagtccatgaaccaggcgttgcagaggcgcttcgccaagggggtgcagtacaacatgaagatagtgatccggggagacaggaacacgggcaagacagcgctgtggcaccgcctgcagggccggccgttcgtggaggagtacatccccacacaggagatccaggtcaccagcatccactggagctacaagaccacggatgacatcgtgaaggttgaagtctgggatgtagtagacaaaggaaaatgcaaaaagcgaggcgacggcttaaagatggagaacgacccccaggaggcggagtctgaaatggccctggatgctgagttcctggacgtgtacaagaactgcaacggggtggtcatgatgttcgacattaccaagcagtggaccttcaattacattctccgggagcttccaaaagtgcccacccacgtgccagtgtgcgtgctggggaactaccgggacatgggcgagcaccgagtcatcctgccggacgacgtgcgtgacttcatcgacaacctggacagacctccaggttcctcctacttccgctatgctgagtcttccatgaagaacagcttcggcctaaagtaccttcataagttcttcaatatcccatttttgcagcttcagagggagacgctgttgcggcagctggagacgaaccagctggacatggacgccacgctggaggagctgtcggtgcagcaggagacggaggaccagaactacggcatcttcctggagatgatggaggctcgcagccgtggccatgcgtccccactggcggccaacgggcagagcccatccccgggctcccagtcaccagtggtgcctgcaggcgctgtgtccacggggagctccagccccggcacaccccagcctcgggtggagcgggatcctctagatct

SEQ ID NO: 402640 - DNA, 4628 bp, Homo sapiens
  misc_feature (67)..(67): n is a, c, g, or t
cgcccaaaccagcttctccacttcttcggaccagtgctcagagccagagaccaagtggtcctccatntccagcttcgaagccggggacggggacagctcccacgaggaccgagcacccccctggccaggcggtgtctctgttcgcacaggtccggagaagcgcagcagcaccaggccccctgctgagatggagccggggaagggtgagcaggcctcctcgtcggagagtgaccccgagggacccattgctgcacaaatgctgtccttcgtcatggatgaccccgactttgagagcgagggatcagacacacagcgcagggcggatgactttcccgtgcgagatgacccctccgatgtgactgacgaggatgagggccctgccgagccgcccccaccccccaagctccctctccccgccttcagactgaagaatgactcggacctcttcgggctggagctggaggaggccgtgctcaagttccgccagaagcctagctccatcaggtgccccgggcttccggggctgcgggccacccaccccagtctcacaaaggccccgggctgcagccaggctgggagctgggagtatacccactgccaacaagcctgtgtgtcccacagaggggccaggggactccacttgcacacacctgagcttctgagtccctgattctggcacagcacccaactcaggactgggctcctgggtggcccaccatggctctcgggcctgtgcccctcactgctgtgtccctattgccttctgcagcttcaagtccgttgagaagaaaatgacagacatgctaaaagaggaagaagagaggctccagctggcgcacagcaacatgaccaagggccaggagctgctgctgaccatccagatgggcatcgacaacctctatgtccggctgatgggcattaacttgcctgcgacccaggtaccgggagtgaggctgagctgccacacaccaggtccctgggcagggccagaggggagatgagaccctcctcccggcctacagagagaagtggtgctctccaacaccctcgatttgaacagcaagctggcgtactgcgaggggaagctcacgtacctggctgacagagtgcagatggtgtccaggaccgaggagggcgacacaaaggtgagggacaccctggagtcctcgactctgatggagaagtacaacaccaggatcagctttgagaaccgggaggaggatatgatcggaggaggcatgccatgccagacgggcccggaggagaggcaccagggctggagcagggaggagcgcggtgaagacaccttccagttccccgacatggaccacagctacgtcccttcgcgcgccgagatcaagaggcaggcgcagcggctaatcgaggggaagctcaaggcggccaagaaaaagaagaagtagccccgccgccccgctccctgctttgctacacaaataaacatttttccaggactgctgcggacgctggggcgaccggggtctcggagaggagcacgggacacgcaggatcgggggaggttctgcgtaaggaggcagcccgggcccggaactgcgcgccagaaccgcgtgcgcatgcgccgaccgcgcgcgccgcgcccccgcggccctcgcggcgccccgtagccgcgcacccctcccgtcccgccgagccggcgccaagatggcggcgctgactcctggagagcggtcgcgccggaggccgcgggggccggagcggagcagccgcggctgaggttcccgagtcgccgctcggggctgcgctccgccgccgggaccccggcctctggccgcgccggctccggcctccgggggggccggggccgccgggacatggtgccagtcgcaccccttccccgccgccgctgagctcgccggccgcgcccgggctgggacgtccgagcgggaagatgttttccgccctgaagaagctggtggggtcggaccaggccccgggccgggacaagaacatccccgccgggctgcagtccatgaaccaggcgttgcagaggcgcttcgccaagggggtgcagtacaacatgaagatagtgatccggggagacaggaacacgggcaagacagcgctgtggcaccgcctgcagggccggccgttcgtggaggagtacatccccacacaggagatccaggtcaccagcatccactggagctacaagaccacggatgacatcgtgaaggttgaagtctgggatgtagtagacaaaggaaaatgcaaaaagcgaggcgacggcttaaagatggagaacgacccccaggaggcggagtctgaaatggccctggatgctgagttcctggacgtgtacaagaactgcaacggggtggtcatgatgttcgacattaccaagcagtggaccttcaattacattctccgggagcttccaaaagtgcccacccacgtgccagtgtgcgtgctggggaactaccgggacatgggcgagcaccgagtcatcctgccggacgacgtgcgtgacttcatcgacaacctggacagacctccaggttcctcctacttccgctatgctgagtcttccatgaagaacagcttcggcctaaagtaccttcataagttcttcaatatcccatttttgcagcttcaggtaagcactcaccacgtggggtggagtggctgctggtctctcacctccttccaggtgtctcctgtgtagcaacgggtctccctcctaacccctgagaaagctgtggacctgctcggagattggctgctggcaagggcccagcgttctactgcacctgcctgctctgggtggcagagggtacagggtcctgagggctagacccagtcccaggagcccctccacctctgcggggaccccttgctcagtttcccccagtgtttttggttgtttttgtttgttgagataaggtcttgctgtgtggcccaggctggagtgcagtggcgcaatcatggctcactgcggcctcaaactccggggctcaggcagtcctcccacctgtctcccaaagtgctgggatgccaggcgtgagtcaccgaggtactcgctgttcacatctcacatttccctggtgcttgtgtcaaaaccaaggaaccaactttggcctacggactaaactcactttcctttgtagaaacaagggccaggccagctgtggctgcaaagtagcccagcaaatgatgaggcttgaacctcctcgccctgggctgccctgattgggtctgggggacctgaacctcctcgccctgggctgccctgactgggtctgggggacctgaacctcctcgccctgggctgccccagctgggtctggggacctgaacctcctcgccctgggctgccccgcctgggtctggggacctgaacctcctcgccctgggctgccccgcctgggtctggggacctgaacctcctcgccctgggctgccccgcctgggtctggggacctgaacctcctcgccctgggctgccccagctgggtctgggggacctgaacctcctcgccctgggctgccccagctgggtctgggggacctgaacctcctcgccctgggctgccccagctggatctgggggacctgaacctcctcgccctgggctgccccgcctgggtctgggggacctgaacctccttgcctgggctgccccgcctgggtctgggggacctgaacctcctcgccctgggctgccccagctgggtctgggggacctgtacctcctcgccctgggctgccccgcctgggtctgggggacctgaacctcctcgccctgggctgccccgactgggtctgggggacctgaatctcctcaccctgggctgccccagctgggtctggggacctgaacctcctcgccctgggctgccccagctgggtctgggggacctgaacctcctcgccctgggctgccccgactgggtctgggggacctggggcccagctgcagctgcagcagccttggtctttctccagaaggatgtcaggcttgcccaggaaaggggctgtgctgtcgtcctggtgtcagaagaagtgaggatgcctgcaggctgggactgctgctggggacgtttgggttggaaggaaggcggcagtcagacttgtcctgtgccggcactgctggggaggcccctccttcctgcagagccgtcccctcatcactgggttgattactccttagagagctccccactgctcagctgctccattccctaatggtttgccctccaaacccttccaaagcctcccagggagagaacgggaccctggacagagtcttgagctggaagcgtagggctgagctgtgtgtgactatccttttgctatggatgtgttcaagcagatctgatgtcctcgcctgtctcagcagcgggacccctgtttcctctttgtcttgcccctggattgcctggaagcaaatttcaggccttctttatgtcacctaaaaatatttcaaacacatctctaaaaaaatcagttgtttttttaacctgaccgtagtacctaatgtaataccgcatgttaaactcacagaaggtttttcttggagaaataagccacaataacaaattgaaaaaataaaattcccaaagagttaagagaaaacaaacaacacaaaccgg

SEQ ID NO: 402641 - DNA, 2522 bp, Homo sapiens
  misc_feature (67)..(67): n is a, c, g, or t
  misc_feature (2508)..(2508): n is a, c, g, or t
cgcccaaaccagcttctccacttcttcggaccagtgctcagagccagagaccaagtggtcctccatntccagcttcgaagccggggacggggacagctcccacgaggaccgagcacccccctggccaggcggtgtctctgttcgcacaggtccggagaagcgcagcagcaccaggccccctgctgagatggagccggggaagggtgagcaggcctcctcgtcggagagtgaccccgagggacccattgctgcacaaatgctgtccttcgtcatggatgaccccgactttgagagcgagggatcagacacacagcgcagggcggatgactttcccgtgcgagatgacccctccgatgtgactgacgaggatgagggccctgccgagccgcccccaccccccaagctccctctccccgccttcagactgaagaatgactcggacctcttcgggctggagctggaggaggccgtgctcaagttccgccagaagcctagctccatcaggtgccccgggcttccggggctgcgggccacccaccccagtctcacaaaggccccgggctgcagccaggctgggagctgggagtatacccactgccaacaagcctgtgtgtcccacagaggggccaggggactccacttgcacacacctgagcttctgagtccctgattctggcacagcacccaactcaggactgggctcctgggtggcccaccatggctctcgggcctgtgcccctcactgctgtgtccctattgccttctgcagcttcaagtccgttgagaagaaaatgacagacatgctaaaagaggaagaagagaggctccagctggcgcacagcaacatgaccaagggccaggagctgctgctgaccatccagatgggcatcgacaacctctatgtccggctgatgggcattaacttgcctgcgacccaggtaccgggagtgaggctgagctgccacacaccaggtccctgggcagggccagaggggagatgagaccctcctcccggcctacagagagaagtggtgctctccaacaccctcgatttgaacagcaagctggcgtactgcgaggggaagctcacgtacctggctgacagagtgcagatggtgtccaggaccgaggagggcgacacaaaggtgagggacaccctggagtcctcgactctgatggagaagtacaacaccaggatcagctttgagaaccgggaggaggatatgatcggaggaggcatgccatgccagacgggcccggaggagaggcaccagggctggagcagggaggagcgcggtgaagacaccttccagttccccgacatggaccacagctacgtcccttcgcgcgccgagatcaagaggcaggcgcagcggctaatcgaggggaagctcaaggcggccaagaaaaagaagaagtagccccgccgccccgctccctgctttgctacacaaataaacatttttccaggactgctgcggacgctggggcgaccggggtctcggagaggagcacgggacacgcaggatcgggggaggttctgcgtaaggaggcagcccgggcccggaactgcgcgccagaaccgcgtgcgcatgcgccgaccgcgcgcgccgcgcccccgcggccctcgcggcgccccgtagccgcgcacccctcccgtcccgccgagccggcgccaagatggcggcgctgactcctggagagcggtcgcgccggaggccgcgggggccggagcggagcagccgcggctgaggttcccgagtcgccgctcggggctgcgctccgccgccgggaccccggcctctggccgcgccggctccggcctccgggggggccggggccgccgggacatggtgccagtcgcaccccttccccgccgccgctgagctcgccggccgcgcccgggctgggacgtccgagcgggaagatgttttccgccctgaagaagctggtggggtcggaccaggccccgggccgggacaagaacatccccgccgggctgcagtccatgaaccaggcgttgcagaggcgcttcgccaagggggtgcagtacaacatgaagatagtgatccggggagacaggaacacgggcaagacagcgctgtggcaccgcctgcagggccggccgttcgtggaggagtacatccccacacaggagatccaggtcaccagcatccactggagctacaagaccacggatgacatcgtgaaggttgaagtctgggatgtagtagacaaaggaaaatgcaaaaagcgaggcgacggcttaaagatggagaacgacccccaggaggcggagtctgaaatggccctggatgctgagttcctggacgtgtacaagaactgcaacggggtggtcatgatgttcgacattaccaagcagtggaccttcaattacattctccgggagcttccaaaagtgcccacccacgtgccagtgtgcgtgctggggaactaccgggacatgggcgagcaccgagtcatcctgccggacagtccctgcattgngatcctgtagttcg

SEQ ID NO: 402642 - DNA, 2353 bp, Homo sapiens
  misc_feature (67)..(67): n is a, c, g, or t
cgcccaaaccagcttctccacttcttcggaccagtgctcagagccagagaccaagtggtcctccatntccagcttcgaagccggggacggggacagctcccacgaggaccgagcacccccctggccaggcggtgtctctgttcgcacaggtccggagaagcgcagcagcaccaggccccctgctgagatggagccggggaagggtgagcaggcctcctcgtcggagagtgaccccgagggacccattgctgcacaaatgctgtccttcgtcatggatgaccccgactttgagagcgagggatcagacacacagcgcagggcggatgactttcccgtgcgagatgacccctccgatgtgactgacgaggatgagggccctgccgagccgcccccaccccccaagctccctctccccgccttcagactgaagaatgactcggacctcttcgggctggagctggaggaggccgtgctcaagttccgccagaagcctagctccatcaggtgccccgggcttccggggctgcgggccacccaccccagtctcacaaaggccccgggctgcagccaggctgggagctgggagtatacccactgccaacaagcctgtgtgtcccacagaggggccaggggactccacttgcacacacctgagcttctgagtccctgattctggcacagcacccaactcaggactgggctcctgggtggcccaccatggctctcgggcctgtgcccctcactgctgtgtccctattgccttctgcagcttcaagtccgttgagaagaaaatgacagacatgctaaaagaggaagaagagaggctccagctggcgcacagcaacatgaccaagggccaggagctgctgctgaccatccagatgggcatcgacaacctctatgtccggctgatgggcattaacttgcctgcgacccaggtaccgggagtgaggctgagctgccacacaccaggtccctgggcagggccagaggggagatgagaccctcctcccggcctacagagagaagtggtgctctccaacaccctcgatttgaacagcaagctggcgtactgcgaggggaagctcacgtacctggctgacagagtgcagatggtgtccaggaccgaggagggcgacacaaaggtgagggacaccctggagtcctcgactctgatggagaagtacaacaccaggatcagctttgagaaccgggaggaggatatgatcggaggaggcatgccatgccagacgggcccggaggagaggcaccagggctggagcagggaggagcgcggtgaagacaccttccagttccccgacatggaccacagctacgtcccttcgcgcgccgagatcaagaggcaggcgcagcggctaatcgaggggaagctcaaggcggccaagaaaaagaagaagtagccccgccgccccgctccctgctttgctacacaaataaacatttttccaggactgctgcggacgctggggcgaccggggtctcggagaggagcacgggacacgcaggatcgggggaggttctgcgtaaggaggcagcccgggcccggaactgcgcgccagaaccgcgtgcgcatgcgccgaccgcgcgcgccgcgcccccgcggccctcgcggcgccccgtagccgcgcacccctcccgtcccgccgagccggcgccaagatggcggcgctgactcctggagagcggtcgcgccggaggccgcgggggccggagcggagcagccgcggctgaggttcccgagtcgccgctcggggctgcgctccgccgccgggaccccggcctctggccgcgccggctccggcctccgggggggccggggccgccgggacatggtgccagtcgcaccccttccccgccgccgctgagctcgccggccgcgcccgggctgggacgtccgagcgggaagatgttttccgccctgaagaagctggtggggtcggaccaggccccgggccgggacaagaacatccccgccgggctgcagtccatgaaccaggcgttgcagaggcgcttcgccaagggggtgcagtacaacatgaagatagtgatccggggagacaggaacacgggcaagacagcgctgtggcaccgcctgcagggccggccgttcgtggaggagtacatccccacacaggagatccaggtcaccagcatccactggagctacaagaccacggatgacatcgtgaaggttgaagtctgggatgtagtagacaaaggaaaatgcaaaaagcgaggcgacggcttaaagatggagaacgacccccaggaggcggagtctgaaacggcctggatgtgtcgacgtgtacagaactgcacgggtgtcagcccg

SEQ ID NO: 402643 - DNA, 324 bp, Homo sapiens
gagaagagaggcagtagaaaccgtggttagaaaggtgatttggggtggacccaagaatggccattgatggcctttgtggacgaccttgaaacctgggctgagaaccttggcttttattctgtccacattggggagctcccagaagctttgaggaggggtgatatggcttggctgtgtccccactcaaatctcatcttgaattgtagctcctataattcccacatctcgtgggagggacctggtgggaggtaattgaatcatgggggcagatcgttctcatgctgttcccatgatagtgaataagtctcatgagatctgatggtt

SEQ ID NO: 402644 - DNA, 705 bp, Homo sapiens
cccgagtagctgggattacagtcatgcatcaccatgcctggctaattttgtatttgtagtggagatggggtttctccatgttggtcaggctggtctcaaacacctgacctcagctgatctgcctgccttggccttccaaagtgctgggattacaggcatgagccaccgcgcccggcctgcccctttccaagagatatgctcagcataatgagagatcaaccgtggtggggagtgggtccaagtaagggttctcattgttgccttttaagaggcctaagtcctgcattaactcagtccaaccattaagtgatgcaggctgctcttccctcatgtgagaaaaacctgtttccctctggttcttcctggctttgcacctggtggctattacaaagcagtactgcagtatgtcttggacctggaaagttggacatgtgtgtggctcaacagttttctcgggggagttcagtgaccttttggtggccaccctctgttctcacctgtgagttcttgcaggtggcgacttcatctgcaaggtcacttacatagccccactcagctgcttcggaaagcgtgacgaagcagtagtcctcagtgtgtgtgtaagtgaagaggaccttgtggtagcagggaccatgcttcattcgtggctgtgtccccatctgagggcctggtatgcagtaagatcaataaatacttgtggaatgc

SEQ ID NO: 402645 - DNA, 812 bp, Homo sapiens
cccgagtagctgggattacagtcatgcatcaccatgcctggctaattttgtatttgtagtggagatggggtttctccatgttggtcaggctggtctcaaacacctgacctcagctgatctgcctgccttggccttccaaagtgctgggattacaggcatgagccaccgcgcccggcctgcccctttccaagagatatgctcagcataatgagagatcaaccgtggtggggagtgggtccaagtaagggttctcattgttgccttttaagaggcctaagtcctgcattaactcagtccaaccattaagtgatgcaggctgctcttccctcatgtgagaaaaacctgtttccctctggttcttcctggctttgcacctggtggctattacaaagcagtactgcagtatgtcttggacctggaaagttggacatgtgtgtggctcaacagttttctcgggggagttcagtgaccttttggtggccaccctctgttctcacctgtgagttcttgcaggtggcgacttcatctgcaaggtcacttacatagccccactcagctgcttcggaaagcgtgacgaagcagtagtcctcagtgtgtgtgtaagtgaagaggaccttgtggtagcagggaccatgcttcattcgtggctgtgtccccatctgagggcctggtatgcagtaagatcaataaatacttgtggaatgcatgactgctggctgcctgtgtctgcctggtgggagagctgtggaactaggggtccacatgaggacagactactgtggtgctgcctacctgccaggctggcccacctt

SEQ ID NO: 402646 - DNA, 1954 bp, Homo sapiens
gaggctcggctgaggatgccgggaagggctggtggtcgggggcctagagcggcggttgcacttagttgcggctgctgtcaccatgtcccgcgttttggtgccttgccatgtgaaaggctccgtagccctccaggtgggcgacgtgcggacctcccaaggccggcctggcgtgctggtcatcgatgtcaccttccccagcgtcgctcccttcgagttgcaggaaatcacgtttaagaattactacacagcttttttgagcatccgtgtccgtcagtacacctcagcacacacacctgccaagtgggtgacctgcctgcgggactactgcctaatgcctgacccacacagtgaggagggagcccaggagtatgtatcgctgttcaagcatcagatgctgtgtgacatggctagaatatcggagctacgcctgattctgcggcagccatcaccactgtggctgtctttcacagtggaggagctgcagatctatcagcagggaccaaagagcccctccgtgacctttcccaagtggctctcccacccagtgccctgtgagcaacctgcactcctccgtgagggtctcccagaccccagcagggtatcctccgaggtgcagcagatgtgggcactgacagagatgatccgggccagtcacacctccgcaaggatcggccgctttgatgtggatggctgttatgacctgaacttgctctcctacacttgaatggttgctcctagccaagatgttggcctttctgtgcccacccagacttggtttgggccaccagaggctgaagtgtatttcctgtgcattccaagtgttgcctgcatgcctgttctgtctgggccacattcacagattcaggattctcaggggcttaccgtgttacttcagcatgagctcctggcatgggggtgctctgtcttcgcctggctgcaactcaattcttccttctacccaaaaacactccagtcagttgtacttactgagaatccctgagtgccctctgccccttctggcaacatgcacattcctgtcttctgcctgctccctcatgtcagtgcagttgggctgggctgacctactaaaacctgctccatgtatggacctggaaggccattgctgccatggcacttgggacacttgaggaagaaacagaaaccttatttcttcctgtgtgtcccctagtggttttctttccatttgtgttatgccacagagagaaatttcctgtctgaactcttctgctgcctgcctaggaaggaaacctgaagatttgggcagcctgagtctcttggtttctgagctggctccctgaatatatgttcaagtgggtgtgcccatagggcctgggcacgtgtctctagcaaaaccagggcctgagcataagaatgggattacaggcatgagccaccgcgcccggcctgcccctttccaagagatatgctcagcataatgagagatcaaccgtggtggggagtgggtccaagtaagggttctcattgttgccttttaagaggcctaagtcctgcattaactcagtccaaccattaagtgatgcaggctgctcttccctcatgtgagaaaaacctgtttccctctggttcttcctggctttgcacctggtggctattacaaagcagtactgcagtatgtcttggacctggaaagttggacatgtgtgtggctcaacagttttctcgggggagttcagtgaccttttggtggccaccctctgttctcacctgtgagttcttgcaggtggcgacttcatctgcaaggtcacttacatagccccactcagctgcttcggaaagcgtgacgaagcagtagtcctcagtgtgtgtgtaagtgaagaggaccttgtggtagcagggaccatgcttcattcgtggctgtgtccccatctgagggcctggtatgcagtaagatcaataaatacttgtggaatgc

SEQ ID NO: 402647 - DNA, 1934 bp, Homo sapiens
gaggctcggctgaggatgccgggaagggctggtggtcgggggcctagagcggcggttgcacttagttgcggctgctgtcaccatgtcccgcgttttggtgccttgccatgtgaaaggctccgtagccctccaggtgggcgacgtgcggacctcccaaggccggcctggcgtgctggtcatcgatgtcaccttccccagcgtcgctcccttcgagttgcaggaaatcacgtttaagaattactacacagcttttttgagcatccgtgtccgtcagtacacctcagcacacacacctgccaagtgggtgacctgcctgcgggactactgcctaatgcctgacccacacagtgaggagggagcccaggagtatgtatcgctgttcaagcatcagatgctgtgtgacatggctagaatatcggagctacgcctgattctgcggcagccatcaccactgtggctgtctttcacagtggaggagctgcagatctatcagcagggaccaaagagcccctccgtgacctttcccaagtggctctcccacccagtgccctgtgagcaacctgcactcctccgtgagggtatcctccgaggtgcagcagatgtgggcactgacagagatgatccgggccagtcacacctccgcaaggatcggccgctttgatgtggatggctgttatgacctgaacttgctctcctacacttgaatggttgctcctagccaagatgttggcctttctgtgcccacccagacttggtttgggccaccagaggctgaagtgtatttcctgtgcattccaagtgttgcctgcatgcctgttctgtctgggccacattcacagattcaggattctcaggggcttaccgtgttacttcagcatgagctcctggcatgggggtgctctgtcttcgcctggctgcaactcaattcttccttctacccaaaaacactccagtcagttgtacttactgagaatccctgagtgccctctgccccttctggcaacatgcacattcctgtcttctgcctgctccctcatgtcagtgcagttgggctgggctgacctactaaaacctgctccatgtatggacctggaaggccattgctgccatggcacttgggacacttgaggaagaaacagaaaccttatttcttcctgtgtgtcccctagtggttttctttccatttgtgttatgccacagagagaaatttcctgtctgaactcttctgctgcctgcctaggaaggaaacctgaagatttgggcagcctgagtctcttggtttctgagctggctccctgaatatatgttcaagtgggtgtgcccatagggcctgggcacgtgtctctagcaaaaccagggcctgagcataagaatgggattacaggcatgagccaccgcgcccggcctgcccctttccaagagatatgctcagcataatgagagatcaaccgtggtggggagtgggtccaagtaagggttctcattgttgccttttaagaggcctaagtcctgcattaactcagtccaaccattaagtgatgcaggctgctcttccctcatgtgagaaaaacctgtttccctctggttcttcctggctttgcacctggtggctattacaaagcagtactgcagtatgtcttggacctggaaagttggacatgtgtgtggctcaacagttttctcgggggagttcagtgaccttttggtggccaccctctgttctcacctgtgagttcttgcaggtggcgacttcatctgcaaggtcacttacatagccccactcagctgcttcggaaagcgtgacgaagcagtagtcctcagtgtgtgtgtaagtgaagaggaccttgtggtagcagggaccatgcttcattcgtggctgtgtccccatctgagggcctggtatgcagtaagatcaataaatacttgtggaatgc

SEQ ID NO: 402648 - DNA, 2266 bp, Homo sapiens
gaggctcggctgaggatgccgggaagggctggtggtcgggggcctagagcggcggttgcacttagttgcggctgctgtcaccatgtcccgcgttttggtgccttgccatgtgaaaggctccgtagccctccaggtgggcgacgtgcggacctcccaaggccggcctggcgtgctggtcatcgatgtcaccttccccagcgtcgctcccttcgagttgcaggaaatcacgtttaagaattactacacagcttttttgagcatccgtgtccgtcagtacacctcagcacacacacctgccaagtgggtgacctgcctgcgggactactgcctaatgcctgacccacacagtgaggagggagcccaggagtatgtatcgctgttcaagcatcagatgctgtgtgacatggctagaatatcggagctacgcctgattctgcggcagccatcaccactgtggctgtctttcacagtggaggagctgcagatctatcagcagggaccaaagagcccctccgtgacctttcccaagtggctctcccacccagtgccctgtgagcaacctgcactcctccgtgaggtaagccctcaccctaggtaagaaccatgtgtgaatggctctagtgtccaacacaggccaggtagaccccttcctgtaaaattctggggctgggcccagggcccttgggtgttatcttcctcctgggtattctgtgggatttgaggcatctctgttgtggggctacatcaggccctaacctcatgtttcataagccatctgagaatgttgttggtctcagctggagggcccctagcccaggttggcctctctggagcctgaagggcactgctggggagagaccatggccactgacccctccttctggagcagggtctcccagaccccagcagggtatcctccgaggtgcagcagatgtgggcactgacagagatgatccgggccagtcacacctccgcaaggatcggccgctttgatgtggatggctgttatgacctgaacttgctctcctacacttgaatggttgctcctagccaagatgttggcctttctgtgcccacccagacttggtttgggccaccagaggctgaagtgtatttcctgtgcattccaagtgttgcctgcatgcctgttctgtctgggccacattcacagattcaggattctcaggggcttaccgtgttacttcagcatgagctcctggcatgggggtgctctgtcttcgcctggctgcaactcaattcttccttctacccaaaaacactccagtcagttgtacttactgagaatccctgagtgccctctgccccttctggcaacatgcacattcctgtcttctgcctgctccctcatgtcagtgcagttgggctgggctgacctactaaaacctgctccatgtatggacctggaaggccattgctgccatggcacttgggacacttgaggaagaaacagaaaccttatttcttcctgtgtgtcccctagtggttttctttccatttgtgttatgccacagagagaaatttcctgtctgaactcttctgctgcctgcctaggaaggaaacctgaagatttgggcagcctgagtctcttggtttctgagctggctccctgaatatatgttcaagtgggtgtgcccatagggcctgggcacgtgtctctagcaaaaccagggcctgagcataagaatgggattacaggcatgagccaccgcgcccggcctgcccctttccaagagatatgctcagcataatgagagatcaaccgtggtggggagtgggtccaagtaagggttctcattgttgccttttaagaggcctaagtcctgcattaactcagtccaaccattaagtgatgcaggctgctcttccctcatgtgagaaaaacctgtttccctctggttcttcctggctttgcacctggtggctattacaaagcagtactgcagtatgtcttggacctggaaagttggacatgtgtgtggctcaacagttttctcgggggagttcagtgaccttttggtggccaccctctgttctcacctgtgagttcttgcaggtggcgacttcatctgcaaggtcacttacatagccccactcagctgcttcggaaagcgtgacgaagcagtagtcctcagtgtgtgtgtaagtgaagaggaccttgtggtagcagggaccatgcttcattcgtggctgtgtccccatctgagggcctggtatgcagtaagatcaataaatacttgtggaatgc

SEQ ID NO: 402649 - DNA, 1840 bp, Homo sapiens
gaggctcggctgaggatgccgggaagggctggtggtcgggggcctagagcggcggttgcacttagttgcggctgctgtcaccatgtcccgcgttttggtgccttgccatgtgaaaggctccgtagccctccaggtgggcgacgtgcggacctcccaaggccggcctggcgtgctggtcatcgatgtcaccttccccagcgtcgctcccttcgagttgcaggaaatcacgtttaagaattactacacagcttttttgagcatccgtgtccgtcagtacacctcagcacacacacctgccaagtgggtgacctgcctgcgggactactgcctaatgcctgacccacacagtgaggagggagcccaggagtatgtatcgctgttcaagcatcagagcccctccgtgacctttcccaagtggctctcccacccagtgccctgtgagcaacctgcactcctccgtgagggtctcccagaccccagcagggtatcctccgaggtgcagcagatgtgggcactgacagagatgatccgggccagtcacacctccgcaaggatcggccgctttgatgtggatggctgttatgacctgaacttgctctcctacacttgaatggttgctcctagccaagatgttggcctttctgtgcccacccagacttggtttgggccaccagaggctgaagtgtatttcctgtgcattccaagtgttgcctgcatgcctgttctgtctgggccacattcacagattcaggattctcaggggcttaccgtgttacttcagcatgagctcctggcatgggggtgctctgtcttcgcctggctgcaactcaattcttccttctacccaaaaacactccagtcagttgtacttactgagaatccctgagtgccctctgccccttctggcaacatgcacattcctgtcttctgcctgctccctcatgtcagtgcagttgggctgggctgacctactaaaacctgctccatgtatggacctggaaggccattgctgccatggcacttgggacacttgaggaagaaacagaaaccttatttcttcctgtgtgtcccctagtggttttctttccatttgtgttatgccacagagagaaatttcctgtctgaactcttctgctgcctgcctaggaaggaaacctgaagatttgggcagcctgagtctcttggtttctgagctggctccctgaatatatgttcaagtgggtgtgcccatagggcctgggcacgtgtctctagcaaaaccagggcctgagcataagaatgggattacaggcatgagccaccgcgcccggcctgcccctttccaagagatatgctcagcataatgagagatcaaccgtggtggggagtgggtccaagtaagggttctcattgttgccttttaagaggcctaagtcctgcattaactcagtccaaccattaagtgatgcaggctgctcttccctcatgtgagaaaaacctgtttccctctggttcttcctggctttgcacctggtggctattacaaagcagtactgcagtatgtcttggacctggaaagttggacatgtgtgtggctcaacagttttctcgggggagttcagtgaccttttggtggccaccctctgttctcacctgtgagttcttgcaggtggcgacttcatctgcaaggtcacttacatagccccactcagctgcttcggaaagcgtgacgaagcagtagtcctcagtgtgtgtgtaagtgaagaggaccttgtggtagcagggaccatgcttcattcgtggctgtgtccccatctgagggcctggtatgcagtaagatcaataaatacttgtggaatgc

SEQ ID NO: 402650 - DNA, 2061 bp, Homo sapiens
gaggctcggctgaggatgccgggaagggctggtggtcgggggcctagagcggcggttgcacttagttgcggctgctgtcaccatgtcccgcgttttggtgccttgccatgtgaaaggctccgtagccctccaggtgggcgacgtgcggacctcccaaggccggcctggcgtgctggtcatcgatgtcaccttccccagcgtcgctcccttcgagttgcaggaaatcacgtttaagaattactacacagcttttttgagcatccgtgtccgtcagtacacctcagcacacacacctgccaagtgggtgacctgcctgcgggactactgcctaatgcctgacccacacagtgaggagggagcccaggagtatgtatcgctgttcaagcatcagatgctgtgtgacatggctagaatatcggagctacgcctgattctgcggcagccatcaccactgtggctgtctttcacagtggaggagctgcagatctatcagcagggaccaaagagcccctccgtgacctttcccaagtggctctcccacccagtgccctgtgagcaacctgcactcctccgtgagggtctcccagaccccagcagggtatcctccgaggtgcagcagatgtgggcactgacagagatgatccgggccagtcacacctccgcaaggatcggccgctttgatgtggatggctgttatgacctgaacttgctctcctacacttgaatggttgctcctagccaagatgttggcctttctgtgcccacccagacttggtttgggccaccagaggctgaagtgtatttcctgtgcattccaagtgttgcctgcatgcctgttctgtctgggccacattcacagattcaggattctcaggggcttaccgtgttacttcagcatgagctcctggcatgggggtgctctgtcttcgcctggctgcaactcaattcttccttctacccaaaaacactccagtcagttgtacttactgagaatccctgagtgccctctgccccttctggcaacatgcacattcctgtcttctgcctgctccctcatgtcagtgcagttgggctgggctgacctactaaaacctgctccatgtatggacctggaaggccattgctgccatggcacttgggacacttgaggaagaaacagaaaccttatttcttcctgtgtgtcccctagtggttttctttccatttgtgttatgccacagagagaaatttcctgtctgaactcttctgctgcctgcctaggaaggaaacctgaagatttgggcagcctgagtctcttggtttctgagctggctccctgaatatatgttcaagtgggtgtgcccatagggcctgggcacgtgtctctagcaaaaccagggcctgagcataagaatgggattacaggcatgagccaccgcgcccggcctgcccctttccaagagatatgctcagcataatgagagatcaaccgtggtggggagtgggtccaagtaagggttctcattgttgccttttaagaggcctaagtcctgcattaactcagtccaaccattaagtgatgcaggctgctcttccctcatgtgagaaaaacctgtttccctctggttcttcctggctttgcacctggtggctattacaaagcagtactgcagtatgtcttggacctggaaagttggacatgtgtgtggctcaacagttttctcgggggagttcagtgaccttttggtggccaccctctgttctcacctgtgagttcttgcaggtggcgacttcatctgcaaggtcacttacatagccccactcagctgcttcggaaagcgtgacgaagcagtagtcctcagtgtgtgtgtaagtgaagaggaccttgtggtagcagggaccatgcttcattcgtggctgtgtccccatctgagggcctggtatgcagtaagatcaataaatacttgtggaatgcatgactgctggctgcctgtgtctgcctggtgggagagctgtggaactaggggtccacatgaggacagactactgtggtgctgcctacctgccaggctggcccacctt

SEQ ID NO: 402651 - DNA, 1702 bp, Homo sapiens
gaggctcggctgaggatgccgggaagggctggtggtcgggggcctagagcggcggttgcacttagttgcggctgctgtcaccatgtcccgcgttttggtgccttgccatgtgaaaggctccgtagccctccaggtgggcgacgtgcggacctcccaaggccggcctggcgtgctggtcatcgatgtcaccttccccagcgtcgctcccttcgagttgcaggaaatcacgtttaagaattactacacagcttttttgagcatccgtgtccgtcagtacacctcagcacacacacctgccaagtgggtgacctgcctgcgggactactgcctaatgcctgacccacacagtgaggagggagcccaggagtatgtatcgctgttcaagcatcagatgctgtgtgacatggctagaatatcggagctacgcctgattctgcggcagccatcaccactgtggctgtctttcacagtggaggagctgcagatctatcagcagggaccaaagagcccctccgtgacctttcccaagtggctctcccacccagtgccctgtgagcaacctgcactcctccgtgagggtctcccagaccccagcagggtatcctccgaggtgcagcagatgtgggcactgacagagatgatccgggccagtcacacctccgcaaggatcggccgctttgatgtggatggctgttatgacctgaacttgctctcctacacttgaatggttgctcctagccaagatgttggcctttctgtgcccacccagacttggtttgggccaccagaggctgaagtgtatttcctgtgcattccaagtgttgcctgcatgcctgttctgtctgggccacattcacagattcaggattctcaggggcttaccgtgttacttcagcatgagctcctggcatgggggtgctctgtcttcgcctggctgcaactcaattcttccttctacccaaaaacactccagtcagttgtacttactgagaatccctgagtgccctctgccccttctggcaacatgcacattcctgtcttctgcctgctccctcatgtcagtgcagttgggctgggctgacctactaaaacctgctccatgtatggacctggaaggccattgctgccatggcacttgggacacttgaggaagaaacagaaaccttatttcttcctgtgtgtcccctagtggttttctttccatttgtgttatgccacagagagaaatttcctgtctgaactcttctgctgcctgcctaggaaggaaacctgaagatttgggcagcctgagtctcttggtttctgagctggctccctgaatatatgttcaagtgggtgtgcccatagggcctgggcacgtgtctctagcaaaaccagggcctgagcataagaactgggacccttctaggcagggtgcagtggctcacgcctgtaatcccagcactttgggaggcccaggcaggcggatcacctgaggtcaggagttcaagaccagcctgaccaacctggagaaaccccgtctctactaaaaatacaaaaaattagctgggcgtggtggtaggcacctgtaatcccagctacttgggaggctgaggcaggagaatctcttgaacccgggaagtggaggttgcggacctgagatcatgccattgcactccagcctgggcaagaagagcgaaactccatcttaaacaaacaaaca

SEQ ID NO: 402652 - DNA, 835 bp, Homo sapiens
gaggctcggctgaggatgccgggaagggctggtggtcgggggcctagagcggcggttgcacttagttgcggctgctgtcaccatgtcccgcgttttggtgccttgccatgtgaaaggctccgtagccctccaggtgggcgacgtgcggacctcccaaggccggcctggcgtgctggtcatcgatgtcaccttccccagcgtcgctcccttcgagttgcaggaaatcacgtttaagaattactacacagcttttttgagcatccgtgtccgtcagtacacctcagcacacacacctgccaagtgggtgacctgcctgcgggactactgcctaatgcctgacccacacagtgaggagggagcccaggagtatgtatcgctgttcaagcatcagatgctgtgtgacatggctagaatatcggagctacgcctgattctgcggcagccatcaccactgtggctgtctttcacagtggaggagctgcagatctatcagcagggaccaaagagcccctccgtgacctttcccaagtggctctcccacccagtgccctgtgagcaacctgcactcctccgtgagggtctcccagaccccagcagggtatcctccgaggtgcagcagatgtgggcactgacagagatgatccgggccagtcacacctccgcaaggatcggccgctttgatgtggatgtggcctagacagaacaggcatgcaggcgacacttggaatgcacaggaaatacacttcagcctctggtgccccaaaccaagtctgggtggcacagaaagccaacatctggctaggagcaaccattcaagtgtagagaagcaagcttc

SEQ ID NO: 402653 - DNA, 291 bp, Homo sapiens
gaggactccgtctgcacagcaggagaacttaggtagtctgactgcctctttaggtctctgtgggctccctaaacagggttttcccagtgtctgaggcccagcggcccttctctctgctcctaggaccttggaatctggtcccagagctgtccactttgtctcactcagggcagtacatctttgctttgcagagcccctccgtgacctttcccaagtggctctcccacccagtgccctgtgagcaacctgcactcctccgtgaggtaagccctcaccctaggtaagaaccat

SEQ ID NO: 402654 - DNA, 1626 bp, Homo sapiens
gaggctcggctgaggatgccgggaagggctggtggtcgggggcctagagcggcggttgcacttagttgcggctgctgtcaccatgtcccgcgttttggtgccttgccatgtgaaaggctccgtagccctccaggtgggcgacgtgcggacctcccaaggccggcctggcgtgctggtcatcgatgtcaccttccccagcgtcgctcccttcgagttgcaggaaatcacgtttaagaattactacacagcttttttgagcatccgtgtccgtcagtacacctcagcacacacacctgccaagtgggtgacctgcctgcgggactactgcctaatgcctgacccacacagtgaggagggagcccaggagtatgtatcgctgttcaagcatcagatgctgtgtgacatggctagaatatcggagctacgcctgattctgcggcagccatcaccactgtggctgtctttcacagtggaggagctgcagatctatcagcagggaccaaagagcccctccgtgacctttcccaagtggctctcccacccagtgccctgtgagcaacctgcactcctccgtgagggtctcccagaccccagcagggtatcctccgaggtgcagcagatgtgggcactgacagagatgatccgggccagtcacacctccgcaaggatcggccgctttgatgtggatggctgttatgacctgaacttgctctcctacacttgaatggttgctcctagccaagatgttggcctttctgtgcccacccagacttggtttgggccaccagaggctgaagtgtatttcctgtgcattccaagtgttgcctgcatgcctgttctgtctgggccacattcacagattcaggattctcaggggcttaccgtgttacttcagcatgagctcctggcatgggggtgctctgtcttcgcctggctgcaactcaattcttccttctacccaaaaacactccagtcagttgtacttactgagaatccctgagtgccctctgccccttctggcaacatgcacattcctgatctgcctgccttggccttccaaagtgctgggattacaggcatgagccaccgcgcccggcctgcccctttccaagagatatgctcagcataatgagagatcaaccgtggtggggagtgggtccaagtaagggttctcattgttgccttttaagaggcctaagtcctgcattaactcagtccaaccattaagtgatgcaggctgctcttccctcatgtgagaaaaacctgtttccctctggttcttcctggctttgcacctggtggctattacaaagcagtactgcagtatgtcttggacctggaaagttggacatgtgtgtggctcaacagttttctcgggggagttcagtgaccttttggtggccaccctctgttctcacctgtgagttcttgcaggtggcgacttcatctgcaaggtcacttacatagccccactcagctgcttcggaaagcgtgacgaagcagtagtcctcagtgtgtgtgtaagtgaagaggaccttgtggtagcagggaccatgcttcattcgtggctgtgtccccatctgagggcctggtatgcagtaagatcaataaatacttgtggaatgc

SEQ ID NO: 402655 - DNA, 2046 bp, Homo sapiens
gaggctcggctgaggatgccgggaagggctggtggtcgggggcctagagcggcggttgcacttagttgcggctgctgtcaccatgtcccgcgttttggtgccttgccatgtgaaaggctccgtagccctccaggtgggcgacgtgcggacctcccaaggccggcctggcgtgctggtcatcgatgtcaccttccccagcgtcgctcccttcgagttgcaggaaatcacgtttaagaattactacacagcttttttgagcatccgtgtccgtcagtacacctcagcacacacacctgccaagtgggtgacctgcctgcgggactactgcctaatgcctgacccacacagtgaggagggagcccaggagtatgtatcgctgttcaagcatcagatgctgtgtgacatggctagaatatcggagctacgcctgattctgcggcagccatcaccactgtggctgtctttcacagtggaggagctgcagatctatcagcagggaccaaagagcccctccgtgacctttcccaagtggctctcccacccagtgccctgtgagcaacctgcactcctccgtgagctggagggcccctagcccaggttggcctctctggagcctgaagggcactgctggggagagaccatggccactgacccctccttctggagcagggtctcccagaccccagcagggtatcctccgaggtgcagcagatgtgggcactgacagagatgatccgggccagtcacacctccgcaaggatcggccgctttgatgtggatggctgttatgacctgaacttgctctcctacacttgaatggttgctcctagccaagatgttggcctttctgtgcccacccagacttggtttgggccaccagaggctgaagtgtatttcctgtgcattccaagtgttgcctgcatgcctgttctgtctgggccacattcacagattcaggattctcaggggcttaccgtgttacttcagcatgagctcctggcatgggggtgctctgtcttcgcctggctgcaactcaattcttccttctacccaaaaacactccagtcagttgtacttactgagaatccctgagtgccctctgccccttctggcaacatgcacattcctgtcttctgcctgctccctcatgtcagtgcagttgggctgggctgacctactaaaacctgctccatgtatggacctggaaggccattgctgccatggcacttgggacacttgaggaagaaacagaaaccttatttcttcctgtgtgtcccctagtggttttctttccatttgtgttatgccacagagagaaatttcctgtctgaactcttctgctgcctgcctaggaaggaaacctgaagatttgggcagcctgagtctcttggtttctgagctggctccctgaatatatgttcaagtgggtgtgcccatagggcctgggcacgtgtctctagcaaaaccagggcctgagcataagaatgggattacaggcatgagccaccgcgcccggcctgcccctttccaagagatatgctcagcataatgagagatcaaccgtggtggggagtgggtccaagtaagggttctcattgttgccttttaagaggcctaagtcctgcattaactcagtccaaccattaagtgatgcaggctgctcttccctcatgtgagaaaaacctgtttccctctggttcttcctggctttgcacctggtggctattacaaagcagtactgcagtatgtcttggacctggaaagttggacatgtgtgtggctcaacagttttctcgggggagttcagtgaccttttggtggccaccctctgttctcacctgtgagttcttgcaggtggcgacttcatctgcaaggtcacttacatagccccactcagctgcttcggaaagcgtgacgaagcagtagtcctcagtgtgtgtgtaagtgaagaggaccttgtggtagcagggaccatgcttcattcgtggctgtgtccccatctgagggcctggtatgcagtaagatcaataaatacttgtggaatgc

SEQ ID NO: 402656 - DNA, 1966 bp, Homo sapiens
gaggctcggctgaggatgccgggaagggctggtggtcgggggcctagagcggcggttgcacttagttgcggctgctgtcaccatgtcccgcgttttggtgccttgccatgtgaaaggctccgtagccctccaggtgggcgacgtgcggacctcccaaggccggcctggcgtgctggtcatcgatgtcaccttccccagcgtcgctcccttcgagttgcaggaaatcacgtttaagaattactacacagcttttttgagcatccgtgtccgtcagtacacctcagcacacacacctgccaagtgggtgacctgcctgcgggactactgcctaatgcctgacccacacagtgaggagggagcccaggagtatgtatcgctgttcaagcatcagatgctgtgtgacatggctagaatatcggagctacgcctgattctgcggcagccatcaccactgtggctgtctttcacagtggaggagctgcagatctatcagcagggaccaaagagcccctccgtgacctttcccaagtggctctcccacccagtgccctgtgagcaacctgcactcctccgtgagggtctcccagaccccagcagggtatcctccgaggtgcagcagatgtgggcactgacagagatgatccgggccagtcacacctccgcaaggatcggccgctttgatgtggatggctgttatgacctgaacttgctctcctacacttgaatggttgctcctagccaagatgttggcctttctgtgcccacccagacttggtttgggccaccagaggctgaagtgtatttcctgtgcattccaagtgttgcctgcatgcctgttctgtctgggccacattcacagattcaggattctcaggggcttaccgtgttacttcagcatgagctcctggcatgggggtgctctgtcttcgcctggctgcaactcaattcttccttctacccaaaaacactccagtcagttgtacttactgagaatccctgagtgccctctgccccttctggcaacatgcacattcctgtcttctgcctgctccctcatgtcagtgcagttgggctgggctgacctactaaaacctgctccatgtatggacctggaaggccattgctgccatggcacttgggacacttgaggaagaaacagaaaccttatttcttcctgtgtgtcccctagtggttttctttccatttgtgttatgccacagagagaaatttcctgtctgaactcttctgctgcctgcctaggaaggaaacctgaagatttgggcagcctgagtctcttggtttctgagctggctccctgaatatatgttcaagtgggtgtgcccatagggcctgggcacgtgtctctagcaaaaccagggcctgagcataagaatgggattacaggcatgagccaccgcgcccggcctgcccctttccaagagatatgctcagcataatgagagatcaaccgtggtggggagtgggtccaagtaagggttctcattgttgccttttaagaggcctaagtcctgcattaactcagtccaaccattaagtgatgcaggctgctcttccctcatgtgagaaaaacctgtttccctctggttcttcctggctttgcacctggtggctattacaaagcagtactgcagtatgtcttggacctggaaagttggacatgtgtgtggctcaacagttttctcgggggagttcagtgaccttttggtggccaccctctgttctcacctgtgagttcttgcaggtggcgacttcatctgcaaggtcacttacatagccccactcagctgcttcggaaagcgtgacgaagcagtagtcctcagtgtgtgtgtaagtgaagaggaccttgtggtagcagggaccatgcttcattccctcctgtgcagcacaaccccggcaaaacaacccaacccacgaggaccatcgggggcagagtcgttggagactg

SEQ ID NO: 402657 - DNA, 677 bp, Homo sapiens
gaggctcggctgaggatgccgggaagggctggtggtcgggggcctagagcggcggttgcacttagttgcggctgctgtcaccatgtcccgcgttttggtgccttgccatgtgaaaggctccgtagccctccaggtgggcgacgtgcggacctcccaaggccggcctggcgtgctggtcatcgatgtcaccttccccagcgtcgctcccttcgagttgcaggaaatcacgtttaagaattactacacagcttttttgagcatccgtgtccgtcagtacacctcagcacacacacctgccaagtgggtgacctgcctgcgggactactgcctaatgcctgacccacacagtgaggagggagcccaggagtatgtatcgctgttcaagcatcagatgctgtgtgacatggctagaatatcggagctacgcctgattctgcggcagccatcaccactgtggctgtctttcacagtggaggagctgcagatctatcagcagggaccaaagagcccctccgtgacctttcccaagtggctctcccacccagtgccctgtgagcaacctgcactcctccgtgaggtaagccctcaccctaggtaagaaccatgtgtgaatggctctagtgtccaacacaggccaggtagacccaggctggctagacccaggggtgatcctctag

SEQ ID NO: 402658 - DNA, 147 bp, Homo sapiens
aattatgaataaagatgttataattatctgtgcagacttttgtgtgtatatacgttatttcccacaaattcatatatttacttcattgttagtcagtggagtacatacacacatatagatgtctctgagtcaccttaagtcacataa

SEQ ID NO: 402659 - DNA, 572 bp, Homo sapiens
aggggaggcttctctggagcaaggaggcgcagcagggtgctcctggcggagggatcggcgggtgcaaaggccccggcgtgagacgggcagtgaggggtggatggggcaaaggctcagcccaggcactgggagcctgggtagcaggaaaggaccttctctggtgccctgaagggcaccgcagagaccctgtggaggccaaagctgaggcagcccaaggctttctctttcccagcagggcatcggttgcagcagtgaccttgaccttcaggttttggggtacacaagggcagagactgcagcactgtgccagactcaggagaggaccatcgtccctaccccacacctttagggaaagcctcctctttcagaatccgactgatgatctcctgctttctgagcttctgctcctcctcaaaggccctgcgtggagtcgcttctcagatgagtgcaagaggtcccctgcctccaccttgccccagactgcacttcccgggtgcctcctacatgccaggcctgcgccaggctaagggatgtataggcggtggagctgctgccaggacccccccgcccag

SEQ ID NO: 402660 - DNA, 410 bp, Homo sapiens
ggattataagtaaccagccagaagagtttgctgttacacgtcatccaagagcatgcagaatgaactgaggccttcaggtcattggtttaagaatttatctgtaatatgaaagcctaaaatgcagacagttctatgtatctttttacttgttttcacctttctttcacctgaactactgctacagtacagcatttgacatttggagctgtttctacatatgattcttttaattaccataaaatttcatgcttgaatatttatactttttaacatttattttatgtttttccatatgttgaaggcttatctctggaatagagtgaaaagctgtaaggactacagtattggttttaaagtcagtgccaagcgcatggaaatgctgaataaatgttcgttttaatgtgttggtt

SEQ ID NO: 402661 - DNA, 362 bp, Homo sapiens
ccttggctgtgtcaaaaacaagtttagaaccctagtgttttcagggggtaactaaatttaaaaagccttaaatgggctgggtgtggtggctcacacctgtaatcccagcactttgggaggccaaggtgggctgatcacgaagtcaggagttcaagaccagcctggccaacatagtgaaaccctgtctctactaaaaatacaaaaaaaaaaaaattagccaggtgtggtggcaggcagctgtagtcccagctacttgggaggccgaggcaggagaattacttgaagccgggaggtggaggttgcagtgagctgaaatctcacaactgcactccagctcaggtgacagagtgagactctgtctc

SEQ ID NO: 402662 - DNA, 509 bp, Homo sapiens
ctgcttcctgggttcaagcaattctgccgcagcctcccgagtagctgggattacaggcacccacctccacacccggataatttttgtacttttagtagagatagggtttcaccatgttgtccaggctggtcttgaacttctgacctcctgatctgcctgtcttggcctcccaaagtgctgggattaaaggcatgagccactgcgcctggcccacacctgggtaatttttgtatatttaatagagacggagtttcactgtgttggccaggctggtctcacactcctgacctcaggtgatctgcctgcctcggcctcccaaagtgctgggattacagacctgagccactgcacctggcttccattacagatttttactttgaattattttatctaatttgaagctaatatagcatataataaaaattcaggagaaaaaaggttatttttaaatcttttttgagagagtccattctttagcctgaaagtaaagtgcatatgtaagcacagtt

SEQ ID NO: 402663 - DNA, 469 bp, Homo sapiens
aagttttcagctattagttggtgatttacttggtacctcatttaattttcctgtcccctcttcaacttggactcaatcactccacaggtctctaagactcttcattttctttaagatttttcactcttttattcagaatggacaatttctattgctctgtgttctgtttctaatctttgaataagctcaaaagtattttttaaatttccttatcttcttattgtttcgtaatttccatgtctttgctgaggttccacagctcttcattcatgattagaatattttcctttacccccatgaacagatttataatggctgcctttaaacatcctgaattacaacatcttaaatatcttaggatcacttctactgcctgctttttaaattgtgtatggatctcattttcgtgtttcttcacacgtctcatgaattttaatgttgtgtactaaaactgtaaagaatcattata

SEQ ID NO: 402664 - DNA, 537 bp, Homo sapiens
gatgggaatcatagcatatggatggtatttgaaagcttggttttaggtgacatgatcttgagaccaaatatggagtgagaaaagaaggccaagtttctagccctaacggattctagcacttatagaactaggagaagaagcatgagtttgtaaggaagatgaggagcagaagtggggaagggccaatagttactcttctaataatctagcctagggacacagaaatgaggatctagatttatgcacgaagaggctcattgtagcatttaccgtagtgaaaaattagcttcaacctcaaatgtcaaaaaatagatgtttacatacgttgtgacacattaattctggggaataaatgaagtcaaataagatgcttttgaaaattataacattaagtgaaatgatacggtttggatctgcatccctaccaaatctcatgttgaattatagtctccagctttggaggtgaggcctgctgagaggtggttggatcatgggggtggatatctcaggaatggattagcaccatccccttggtgc

SEQ ID NO: 402665 - DNA, 410 bp, Homo sapiens
aagcacatgaagtgaggctacttttcttactactcatcagggaagggcaaattaaaacacaatgaatggcacggtggctcacgcctgtaaacccaccactttgggaggccgaggtgtgggaattacctgaggtcaggagtttgagaccagcatggccaacatggtgaaaccctgtctctactaaaaacacaaaaattagccaggcatggtggtacacacctgtcatcccagctactcaggaggctgaggcagaagaaacccttgaacccaggaggtgaaggctgcagtgagccgagatcatgccactgcactccagcccaggtgagagagtgagtgagactctgtctcaaaacaaaaaacaaaaccaaaaaaacacaatgaggtacaattacgcacccatctgaatgttt

SEQ ID NO: 402666 - DNA, 394 bp, Homo sapiens
tactattttttttgactgtgttacatgcacgttttaagattataagctttagtatctgatggatttgggttcagatccttgcctcagacttcttggggtttttaatgggaatgaaaattgtacagtgttgtaagaattaccaacaatataaataaagcatcttgggtttgttaaatttttggtaaatggtggttggaatcattttttagtgttgcgtagaccctacaagttttgagctgtgattcctcctcactgtgacagtctccattgttggctttgattacactgtaccatcctggttgttctgccagcccattgataacttttaccatttgctggcttttattgctatccccactctattaaagtatgcattcaaatgcctttcttttct

SEQ ID NO: 402667 - DNA, 506 bp, Homo sapiens
ggctttgaaatcctgacatccgggttatatctcagttctatcatttgctcggcatgtggcccctaaacaagttaaccaccactctgagcctcagtttcctcaagtgtaaaataggaaagataaaatctacctgcacattaaaagtgacacagtgtatctaattcatgggtcaattatggagaggagtgtgttgaaatatttcactatgatggtggattggttgatttcttcttgaagttctgataatgtatacggagaacttagcacagggcaggcatggtcggcactaaataaacacacacatttaaccggcggaaagctaacgtagggtgatagatacaacattttatttttcacagccataaaaaagaaagaaatcatgtcctttgcagcaacatggatgcagctggaggccattatcctaagcgaattaacacaggaacagaaaaccaaatattgcatattctgacttacaagcgggagctaaacactgggtactcgtggac

SEQ ID NO: 402668 - DNA, 511 bp, Homo sapiens
gaaggcacgtgctctgcagagctctagctgccttggctctccctgagctcccagacttcactcatggcctaattttcaatgacagaacgtaggttttatcgtgaggatgcagacacaaccacaattacgtatgtcaacataacttcataaatatgtaactgtaacttattggtaacatcagtgcaagatgattaaagcttcatgtgtagtattttatcaacaaacagattctgaaagcttatggacatgcgcaatagttgattcagcttcaatcaataagaacataaatatggcaatttgaaaacactatgtatatacctactcacatatatattatacttacgatatatacttatatgtagtatataataatattacatataaaaatgttataaaaataaatgctaaagtaaataaaaaaagagccactaatatgttaactattgttaaataatagctaaaataatacagattattaaattattttaatacttacttgccataataatct

SEQ ID NO: 402669 - DNA, 257 bp, Homo sapiens
agctacacgggaggctgagacaggagaactggttgaacctggaaggtggaggttgcagtgagccaagattgtgccactgtactccagcttgggtgacagagcaaaactctgtctcaaaaaaaaagaaaaaaaaaagaaaatggattacttatacccaatgctaccatctttgtgtctacctttccagacttttctgtgcttacatatacataaagatatagaaatatacattttcaataaaaatagcatcatgcttt

SEQ ID NO: 402670 - DNA, 468 bp, Homo sapiens
ctgagcccttcgctgccggccctggacttagtggacggagcgggagattcccgcccaggggaagaggttcccacggagggcatgcggtcgcgggtgcctttggattcgtgtgttcagggaggccagataatctcctccccgcgccggagcccctgttcctcatttctagcattttaaaaaaggtcaagaatacagtgaatccggctgggggctgccggctgggtgacgcgcctctggctagaccgaatggcacaggctgagcccgggggtgcggaccggtgggcacggagaagggtccctcggcgcggactcgactgcaggagccgcggcgccgggggtggggggcgtgtgccgctcgcgagggggccggaggacttgacagatcgcagcgaaagaaaacattaaaccaaaacaaaacccaccgattccccacgtcgttcagcaaagacatcgtgggtggagccagga

SEQ ID NO: 402671 - DNA, 486 bp, Homo sapiens
cgtccagaaatgcagacacagccgccaggcaaagcacctgctcctcccatcgcccccctggcaaaatccccagtctgggtccacggagagtcccaggctgcagctctgtgccaagcagccgaggggaacagagcacgggctcgccagctgcccccaggtgtggagacgtgacgcacacagaggcctcccaggaggagcagccatgactccgggggacacatgggccagcttcaaccccagagcagggcacagcaaaagccaaggtgagggacaggagagcagtggtgcgtccaggcaagacaggcatcccgtcagccgctgggtagaaaggcagagggaggcctggggagcccccaggagcagcagtgcaggtggagtaaaggttgctgcgaccacagaaagggaacccgagtttaaaataaagactggaaaggcgtgaagcaaaggaaagaggctttctgctctcgttcagcatccttttcccag

SEQ ID NO: 402672 - DNA, 479 bp, Homo sapiens
gttatgtcaaatgctgaaacatcaactgtggcttcctctaggcattgcaccaaaatttctttcaagtaactgtggaagaaacagacatcgcttctctaatccacagtgtgtccattttagagggtaacactcagaaagccatcttgtttctctcatttctaaatgattacagagcacccagtgttgcccttttgcaccaattacataaaatagtacctatgagctgaatggtgaggagtctaaataccccggggcacggtggtgacagagtaacactctccctaagatgtctgcatgctaatccccagaacctctgcaaacattaggctacacagccaagggaattgaggttactaatcagatgggcttcagaagagagattatcctggattctctgggtatattcaatttaaatactttccttaactaagctagagagagaagagttgggatgatgatgcactgtgagaaggactcaa

SEQ ID NO: 402673 - DNA, 2101 bp, Homo sapiens
caggagccggggacggtgcgccagtgccccctccgcgagccccaaccagtagacggttccctgtctcccgcgccccaatttcgattttcaaacgcaactcctacaggattctgagaccccgtcccatctcccatatcccatttccagctgcaaattactgcagaatctgaacccaggaaagaaacccatttgccgaccccctcttccctctccagacaggtggagagcgggtgagggtctcgctcggctttccccctgcacctttcccaccctcccgcccgtccctgggggtcctccgtcaccgcggccatggcccagaagccgaaggtggacccccacgtcgggcggctgggatacctgcaggcgctggtcacggaattccaggagacccaaagccaagacgccaaggagcaagtcctcgccaacctcgccaacttcgcttatgaccccagcaactacgagtatctgcggcagctgcaggtcctggatttatttctcgattcgctgtcggaggagaatgagaccctggtggagtttgctattggaggcctgtgcaacctgtgcccagacagggccaacaaggagcacatcctgcacgcaggaggtgtcccactcatcatcaactgcctatccagccccaatgaggagacggtgctgtctgccatcaccacgctcatgcacctgagcccgccgggccgcagctttctcccagagctgaccgccacgcccgtggtgcagtgcatgcttcgcttctccctctcggccagcgccaggctccggaacctggcacagatcttcctggaggacttctgctccccccgccaggtggccgaggcccgcagccggcaggcgcactctgccctgggtatcccactgccgaggagcgtggccccacggcagcgctgatccatggagactgcgagaccgtggcacccctactgctggggaccacagtcctgatgtggacgcagggaacggggagcacatactgccccattggtgccttttcagccatctgaaaggcgggttctttcagcaggacaggcatttacactgatgaaacgccactgggagtgaggaagccagactccagagacacggagaagatcaaactggagctgcgttcataggctggcactctcaatcctacatcaggtgccaccaccaccagactcaggccctggtgtaagaagcggccaagtgcctggacccagaggctttgcaggacagtgttctcaggagctgggcctgaggcttaggagagctgccttcgctgcaggaaatcagggattatcccttaacagaagtgtctggagtagttttcaggtataggaatgagatgcctcgtggtgaaaggatctcaccctgggaagatgtggtgccccctccagggctctggaggatggatgcctcccccaggggctctccaagctgggcatttgggcctggtggatgccaacctggataacctgtggcccagcattgactgtccacccagccttgctgttaggcaccatgactccaagatgaagatgtggtccctgcccttgagtgacagcccagggacttaatgtggccatcgggcatcaagcacaaggccatgcaggtgatgatacgtcggaatagaggcaccagccctggtaactgcatcttctccccttgccaccccatggccccggctgaaagcttcggccctcctctgctgtcactcaatgatggggagccctaccccagaagtgtatcccacgagggcatcagggacgcagtgagtgttgctcaagggagtcaggaagagacggcaacgtaaaggatgtggctccatgtccatggtgccccctggtcaacataaggagcgtgggatccgatggaaaggtggagctcagggaaaatgggggtccttgcctctcgtgtaccccctcaaggctgaccccttagatggcccaggaatggcaggtgctacaaaaatggtacccacgtgggcatggaaatggggcagattaggggaccactggactcagaggggagggaagggctcatcagcacccgctcagggagcctgtccctttatgttcccaaataaagggtcctagaagactagaaa

SEQ ID NO: 402674 - DNA, 652 bp, Homo sapiens
caggagccggggacggtgcgccagtgccccctccgcgagccccaaccagtagacggttccctgtctcccgcgccccaatttcgattttcaaacgcaactcctacaggattctgagaccccgtcccatctcccatatcccatttccagctgcaaattactgcagaatctgaacccaggaaagaaacccatttgccgaccccctcttccctctccagacaggtggagagcgggtgagggtctcgctcggctttccccctgcacctttcccaccctcccgcccgtccctgggggtcctccgtcaccgcggccatggcccagaagccgaaggtggacccccacgtcgggcggctgggatacctgcaggcgctggtcacggaattccaggagacccaaagccaagacgccaaggagcaagtcctcgccaacctcgccaacttcgcttatgaccccagcaactacgagtatctgcggcagctgcaggtcctggatttatttctcgattcgctgtcggaggagaatgagaccctggtggagtttgctattgcaagacccccccgccccaagcacagtagctttctcagcgtcgaatccctccgtgggaccatgttgcaatgaaatttcaacatgcaaatgaaatttctcgaaatttctc

SEQ ID NO: 402675 - DNA, 1676 bp, Homo sapiens
atagctagtacgaggctgggttgacagcaactacgagtatctgcggcagctgcaggtcctggatttatttctcgattcgctgtcggaggagaatgagaccctggtggagtttgctattggaggcctgtgcaacctgtgcccagacagggccaacaaggagcacatcctgcacgcaggaggtgtcccactcatcatcaactgcctatccagccccaatgaggagacggtgctgtctgccatcaccacgctcatgcacctgagcccgccgggccgcagctttctcccagagctgaccgccacgcccgtggtgcagtgcatgcttcgcttctccctctcggccagcgccaggctccggaacctggcacagatcttcctggaggacttctgctccccccgccaggtggccgaggcccgcagccggcaggcgcactctgccctgggtatcccactgccgaggagcgtggccccacggcagcgctgatccatggagactgcgagaccgtggcacccctactgctggggaccacagtcctgatgtggacgcagggaacggggagcacatactgccccattggtgccttttcagccatctgaaaggcgggttctttcagcaggacaggcatttacactgatgaaacgccactgggagtgaggaagccagactccagagacacggagaagatcaaactggagctgcgttcataggctggcactctcaatcctacatcaggtgccaccaccaccagactcaggccctggtgtaagaagcggccaagtgcctggacccagaggctttgcaggacagtgttctcaggagctgggcctgaggcttaggagagctgccttcgctgcaggaaatcagggattatcccttaacagaagtgtctggagtagttttcaggtataggaatgagatgcctcgtggtgaaaggatctcaccctgggaagatgtggtgccccctccagggctctggaggatggatgcctcccccaggggctctccaagctgggcatttgggcctggtggatgccaacctggataacctgtggcccagcattgactgtccacccagccttgctgttaggcaccatgactccaagatgaagatgtggtccctgcccttgagtgacagcccagggacttaatgtggccatcgggcatcaagcacaaggccatgcaggtgatgatacgtcggaatagaggcaccagccctggtaactgcatcttctccccttgccaccccatggccccggctgaaagcttcggccctcctctgctgtcactcaatgatggggagccctaccccagaagtgtatcccacgagggcatcagggacgcagtgagtgttgctcaagggagtcaggaagagacggcaacgtaaaggatgtggctccatgtccatggtgccccctggtcaacataaggagcgtgggatccgatggaaaggtggagctcagggaaaatgggggtccttgcctctcgtgtaccccctcaaggctgaccccttagatggcccaggaatggcaggtgctacaaaaatggtacccacgtgggcatggaaatggggcagattaggggaccactggactcagaggggagggaagggctcatcagcacccgctcagggagcctgtccctttatgttcccaaataaagggtcctagaagactagaaa

SEQ ID NO: 402676 - DNA, 1618 bp, Homo sapiens
caggggaggtgggaggaggcccggggctacagcatccagactcttccttgctctcccacaggaggcctgtgcaacctgtgcccagacagggccaacaaggagcacatcctgcacgcaggaggtgtcccactcatcatcaactgcctatccagccccaatgaggagacggtgctgtctgccatcaccacgctcatgcacctgagcccgccgggccgcagctttctcccagagctgaccgccacgcccgtggtgcagtgcatgcttcgcttctccctctcggccagcgccaggctccggaacctggcacagatcttcctggaggacttctgctccccccgccaggtggccgaggcccgcagccggcaggcgcactctgccctgggtatcccactgccgaggagcgtggccccacggcagcgctgatccatggagactgcgagaccgtggcacccctactgctggggaccacagtcctgatgtggacgcagggaacggggagcacatactgccccattggtgccttttcagccatctgaaaggcgggttctttcagcaggacaggcatttacactgatgaaacgccactgggagtgaggaagccagactccagagacacggagaagatcaaactggagctgcgttcataggctggcactctcaatcctacatcaggtgccaccaccaccagactcaggccctggtgtaagaagcggccaagtgcctggacccagaggctttgcaggacagtgttctcaggagctgggcctgaggcttaggagagctgccttcgctgcaggaaatcagggattatcccttaacagaagtgtctggagtagttttcaggtataggaatgagatgcctcgtggtgaaaggatctcaccctgggaagatgtggtgccccctccagggctctggaggatggatgcctcccccaggggctctccaagctgggcatttgggcctggtggatgccaacctggataacctgtggcccagcattgactgtccacccagccttgctgttaggcaccatgactccaagatgaagatgtggtccctgcccttgagtgacagcccagggacttaatgtggccatcgggcatcaagcacaaggccatgcaggtgatgatacgtcggaatagaggcaccagccctggtaactgcatcttctccccttgccaccccatggccccggctgaaagcttcggccctcctctgctgtcactcaatgatggggagccctaccccagaagtgtatcccacgagggcatcagggacgcagtgagtgttgctcaagggagtcaggaagagacggcaacgtaaaggatgtggctccatgtccatggtgccccctggtcaacataaggagcgtgggatccgatggaaaggtggagctcagggaaaatgggggtccttgcctctcgtgtaccccctcaaggctgaccccttagatggcccaggaatggcaggtgctacaaaaatggtacccacgtgggcatggaaatggggcagattaggggaccactggactcagaggggagggaagggctcatcagcacccgctcagggagcctgtccctttatgttcccaaataaagggtcctagaagactagaaa

SEQ ID NO: 402677 - DNA, 2133 bp, Homo sapiens
caggagccggggacggtgcgccagtgccccctccgcgagccccaaccagtagacggttccctgtctcccgcgccccaatttcgattttcaaacgcaactcctacaggattctgagaccccgtcccatctcccatatcccatttccagctgcaaattactgcagaatctgaacccaggaaagaaacccatttgccgaccccctcttccctctccagacaggtggagagcgggtgagggtctcgctcggctttccccctgcacctttcccaccctcccgcccgtccctgggggtcctccgtcaccgcggccatggcccagaagccgaaggtggacccccacgtcgggcggctgggatacctgcaggcgctggtcacggaattccaggagacccaaagccaagacgccaaggagcaagtcctcgccaacctcgccaacttcgcttatgaccccagcaactacgagtatctgcggcagctgcaggtcctggatttatttctcgattcgctgtcggaggagaatgagaccctggtggagtttgctattggaggcctgtgcaacctgtgcccagacagggccaacaaggagcacatcctgcacgcaggaggtgtcccactcatcatcaactgcctatccagccccaatgaggagacggtgctgtctgccatcaccacgctcatgcacctgagcccgccgggccgcagctttctcccagagctgaccgccacgcccgtggtgcagtgcatgcttcgcttctccctctcggccagcgccaggctccggaacctggcacagatcttcctggaggacttctgctccccccgccaggtggccgaggcccgcagccggcaggcgcactctgccctgggtatcccactgccgaggagcgtggccccacggcagcgctgatccatggagactgcgagaccgtggcacccctactgctggggaccacagtcctgatgtggacgcagggaacggggagcacatactgccccattggtgccttttcagccatctgaaaggcgggttctttcagcaggacaggcatttacactgatgaaacgccactgggagtgaggaagccagactccagagacacggagaagatcaaactggagctgcgttcataggctggcactctcaatcctacatcaggtgccaccaccaccagactcaggccctggtgtaagaagcggccaagtgcctggacccagaggctttgcaggacagtgttctcaggagctgggcctgaggcttaggagagctgccttcgctgcaggaaatcagggattatcccttaacagaagtgtctggagtagttttcaggtataggaatgagatgcctcgtggtgaaaggatctcaccctgggaagatgtggtgccccctccagggctctggaggatggatgcctcccccaggggctctccaagctgggcatttgggcctggtggatgccaacctggataacctgtggcccagcattgactgtccacccagccttgctgttaggcaccatgactccaagatgaagatgtggtccctgcccttgagtgacagcccagggacttaatgtggccatcgggcatcaagcacaaggccatgcaggtgatgatacgtcggaatagaggcaccagccctggtaactgcatcttctccccttgccaccccatggccccggctgaaagcttcggccctcctctgctgtcactcaatgatggggagccctaccccagaagtgtatcccacgagggcatcagggacgcagtgagtgttgctcaagggagtcaggaagagacggcaacgtaaaggatgtggctccatgtccatggtgccccctggtcaacataaggagcgtgggatccgatggaaaggtggagctcagggaaaatgggggtccttgcctctcgtgtaccccctcaaggctgaccccttagatggcccaggaatggcaggtgctacaaaaatggtacccacgtgggcatggaaatggggcagattaggggaccactggactcagaggggagggaagggctcatcagcacccgctcagggagcctgtccctttatgttcccaaataaagggtcctagaagactagaaagccaaggtcttttattaaaggtcccgactggt

SEQ ID NO: 402678 - DNA, 1212 bp, Homo sapiens
caggagccggggacggtgcgccagtgccccctccgcgagccccaaccagtagacggttccctgtctcccgcgccccaatttcgattttcaaacgcaactcctacaggattctgagaccccgtcccatctcccatatcccatttccagctgcaaattactgcagaatctgaacccaggaaagaaacccatttgccgaccccctcttccctctccagacaggtggagagcgggtgagggtctcgctcggctttccccctgcacctttcccaccctcccgcccgtccctgggggtcctccgtcaccgcggccatggcccagaagccgaaggtggacccccacgtcgggcggctgggatacctgcaggcgctggtcacggaattccaggagacccaaagccaagacgccaaggagcaagtcctcgccaacctcgccaacttcgcttatgaccccagcaactacgagtatctgcggcagctgcaggtcctggatttatttctcgattcgctgtcggaggagaatgagaccctggtggagtttgctattgctgctgcagtctgaacggtgacggtggcccctgcagaagcatgtggctaaatctccaccagggggcgatagagctcctccaaatcaagctgctgcccctggagaaaaattggcggaagtcacagagcagtccccaccaaaagtgtttaccaagtggagtctttcctgctggcgtttcctcagggtcaggaagcaactttcccaggacaggggcaccctgaggtccgggtccactgagctatgggggcggcgtgggcctgggctgggttcttgccatcctgggcagcttcccggcgtgggtgactgagcccgggtcctggagtccgcggtcccagcgtctccacttctcagctgattcctagaagctgagtcccgtcccttctccgagcgtggtttcctctcccgccttgcctgcgtcgcaagcagttgtgggagcagaagtgtgtctgtgcatctgtgtctctgtgcaggtattttagaattgttaggatcattatcaccagctttacttttcccaaccatttttttcctcctttttttctcttccttcttctgccacagcaagacccccccgccccaagcacagtagctttctcagcgtcgaatccctccgtgggaccatgttgcaatgaaatttcaacatgcaaatgaaatttctcgaaatttctc

SEQ ID NO: 402679 - DNA, 4364 bp, Homo sapiens
  misc_feature (263)..(263): n is a, c, g, or t
  misc_feature (2896)..(2896): n is a, c, g, or t
  misc_feature (2940)..(2940): n is a, c, g, or t
  misc_feature (2956)..(2956): n is a, c, g, or t
  misc_feature (2963)..(2963): n is a, c, g, or t
  misc_feature (3001)..(3001): n is a, c, g, or t
  misc_feature (3005)..(3005): n is a, c, g, or t
  misc_feature (3015)..(3015): n is a, c, g, or t
  misc_feature (3060)..(3060): n is a, c, g, or t
  misc_feature (3066)..(3066): n is a, c, g, or t
  misc_feature (3086)..(3086): n is a, c, g, or t
  misc_feature (3111)..(3111): n is a, c, g, or t
  misc_feature (3124)..(3124): n is a, c, g, or t
  misc_feature (3129)..(3129): n is a, c, g, or t
  misc_feature (3138)..(3138): n is a, c, g, or t
  misc_feature (3347)..(3347): n is a, c, g, or t
  misc_feature (3501)..(3501): n is a, c, g, or t
  misc_feature (4061)..(4061): n is a, c, g, or t
  misc_feature (4134)..(4134): n is a, c, g, or t
  misc_feature (4154)..(4154): n is a, c, g, or t
  misc_feature (4207)..(4207): n is a, c, g, or t
  misc_feature (4236)..(4236): n is a, c, g, or t
  misc_feature (4244)..(4244): n is a, c, g, or t
  misc_feature (4271)..(4271): n is a, c, g, or t
  misc_feature (4285)..(4285): n is a, c, g, or t
  misc_feature (4352)..(4352): n is a, c, g, or t
ctgatgctgataaattgaagaagaaaacagctgaggacagaacgcaggcatttcacctgcggcagaacctgagcgccctggataagatgcatgaggagcaagagcttttcactgagaagatgagaggggagctgcgcgcctgtcggcagaggcgggacctgatcgacaagcagcaggaggctgtggcagccgagatcgccacagaggaagaggcgggcaacatggccgctgtgggccgcctccaggccgtgtccagacgcctntttgcagagctggagaacgagagagacctgcagtcgaggactgaggccgtgctgaaggagagcgagaacaccatgtggcacatcgagatccaggaggggcgactcgaggccttccggacagctgaccgtgaggaggtggaggccacggggcggcggctccaggtgcgcgcagccgagcagctctgcagagagcaggaggccctggggaaggtggagcggaaccgactgctgaggatcaggaagtccctgaacacccagaaggagctcgggctcaggcaccagaagctgctggaggacgcccggaagaaccacaaggttgccgtgcggttcctgaaggcctccctgggaagaatccgagagcaagagaagaaggaggagatggagtgccacgagtacatgaggcgacgcatggatgcggtggtggcgctgaagggcagcatctccgcgaaccgggacacactgcggaagttccaagcatgggaccgtgccaaggcagagctggcggagcagagggtccaggctgagaagaaggcgattctggcccagggcagggatgcattcaggcaccttgtccaccagcgccggcgccaggagctggaggcccagaagagggcctttgaggaggagcagaagctcagaaagcaggagatcatcagtcggattctgaaagaggaggctgaggaggaaaagaggaagaaacagcatccccccaccagtgccaggcaccggctgaccctgagggacaagacctggaactacatttctgacttttgcaagaagaccacagtcccaaccaacacgtacacactggactacgaggctgctgcaggccccgggccctctcggttgctggaagtcgtttccagtgagcttatccagggggaccccggggccagctcagaggaggaaacgttagctgagcccgagatctctgggctttggaatgaagactacaagccataccaggtgcccaaggaggacgtggaccgaaagcccgtgggcgggacaaagatggacaaggacatcctggagcgcacggtggagcggctgcggagcagggtggtccacaagcaggtggtgtgggggcgtgagttccaaggacgccccttcaacagcaaaccggagctcctccacttccaggactttgatattggcaaagtgtacaagaaaaagatcacgttggtaaacaccacctacacgatcaactactgcaagctggtgggcgtggaggagcacctccgggacttcatccacgttgactttgacccccctggccccctgtcagccggaatgtcctgtgaagtgcttgtcaccttcaagccgatgataaacaaggatctagaaggaaatatctcatttttggctcagacgggcgagttttcagttccactgaaatgttcaacaaagaaatgttcgctgtccctcgacaaggagctcattgacttcggcagctacgtggtaggagagaccacgtctcggaccatcacgctgaccaacgttgggggcttgggcacgactttcaagttcctgccagcttcagagccctgtgagatggacgactcccagtctgccctgaaattaagcagtctcctgacctacgaagataaaagcttgtatgacaaagccgccaccagcttctctgagcagcagctagagggcacggagtcctcccaggcggacatgcagagccggaaggagctggagaagctggacaaggagcaggaggaggagcagcccgcaggtgagccaggctgccaggccaagccagggtgggcgggcggtgagggcctcagggcagcattccagggggctgaggggcccaggggagggctggaaagtagagaattttcccaggccttcgatgttaagtgacggttaagcaagaaaatattcttatgtgccactaagtgttgtttttggagtggacgaaaatgtacattcacgttgacgctaaccgaagacttgaaggcacctccagcattggcccagcaggcccagcacgggcggagccgcacagggcggggaagaggctctgcggtgccccctggaggggccgggctgcggggggcttctgtctagctctgcagctgtggctgttgttagacgcgcaccagcggggagaggtgccgagaaacgggcgggccctgccctccccatgcctcctgccctgcagcccgccgccatcgggaatcgcttgcgtctcctccttgcttctcttgatcgttttcccacatacgcatcgagatccagaaacctccgtcctcctcctgtctgtcttcgcgtggtgcgcgttccgcacgccctgcagctcagcgcggagctgggccggttctccacagcctgtgtgagcctcacttccggtgtgagccgcacttccggtgtgagccgcacttcctgtcctcaccactgcgtggcgtttcctttcctgagagagcctcgggttctagatccgtccttctgccagtgcgcacttgggagcgttcgtggtacacactgttgcgaaggccgttctgcactgccccttggcctgtgtgtgagttcccacagggcacctggctggggctcatgcctgcatcacagggcatagccagcctcactggcatcagctaataccaaagtgagttctttttctnttgagacagggtctctgtcgcctaggctggagtgcagtggtgcngtcacagctcactgcngcctcgncctcccgggctcaagcaatcctcctgcctcagctcctnagtngctggaactncaggcacgcaccaccgcacctggctagtttttgtatttttttgtngacacngggtttcgccatgtttcccnggctggtgtggaactcctgaactcnggctgtctgcccncctcngcctcccanggtgctggattacaggcatgagccacctcgcctagcccaccgagttctttttcaaagtggttgtgcaagtttacactcccaccaacagtgtacaagactgtgctgtccagcgtggctgtcactgccacatctggctatttaaacttaaattgatccaaattaaataatagtgaaaattcaggtcctcctccacaagggccacatttcanatgctccatagcgacctgtgggcaacggctgccctactggacagcccagaagcccagctctgcctggtcacagagggtcctacggggccacactgggcttgagggccttgcttcacatccgcaggagcacgaggtcacacggcccggggctgcntgtctggggggcctgcaccacggtctgctgttgagatgttgctttttggtttcccagatcaccagtgagattgcgtgtctttccctgggcccatttacaagttgtatcttctttggtgtgacatctctgtttaaggctatcccttgttcttctgtgggattgtctgtcttcttctcattcattcataggagctcttcatgcacccagattccagccctcctccctgaggaatgttgcaggtgctgcctccgagtctgtggctgggccttcctctccctttatgacgtcttttctcaaatcaaagttcttcagtccagtctttgcatatttaccagtcatttctattggaatttgttttttatgatttttaggcaatttttttctcctccagggtcataaagacataggacatcgcttttgtgttgaggtgtatgatccacctcaaattcactcctgcttgtggtggaagtcagggctgaggctcatttcccctggtgcgtgtttgtgtattccacggcacaagtggactctgctatcccattcgatccattcgttgtccntgtcaaaaatcaattgaccatccaggcacagtggctcatgcctgtaatcccagaactttgggaggccgaggcnggaggatcacttgaggtcangagtttgagaccagcctggccaacatggtgaaaccccatttctactaaaaatncaaaaaattagccaggcgtggtggcgggngcctgtantcccagctacttgggtggctgaggcangagaattgcttgancccgggaggcggaggttgcagtgagctgagatcgcgccattgcactccagcctggcctataagagtnaaatactgtctc

SEQ ID NO: 402680 - DNA, 2921 bp, Homo sapiens
  misc_feature (1453)..(1453): n is a, c, g, or t
  misc_feature (1497)..(1497): n is a, c, g, or t
  misc_feature (1513)..(1513): n is a, c, g, or t
  misc_feature (1520)..(1520): n is a, c, g, or t
  misc_feature (1558)..(1558): n is a, c, g, or t
  misc_feature (1562)..(1562): n is a, c, g, or t
  misc_feature (1572)..(1572): n is a, c, g, or t
  misc_feature (1617)..(1617): n is a, c, g, or t
  misc_feature (1623)..(1623): n is a, c, g, or t
  misc_feature (1643)..(1643): n is a, c, g, or t
  misc_feature (1668)..(1668): n is a, c, g, or t
  misc_feature (1681)..(1681): n is a, c, g, or t
  misc_feature (1686)..(1686): n is a, c, g, or t
  misc_feature (1695)..(1695): n is a, c, g, or t
  misc_feature (1904)..(1904): n is a, c, g, or t
  misc_feature (2058)..(2058): n is a, c, g, or t
  misc_feature (2618)..(2618): n is a, c, g, or t
  misc_feature (2691)..(2691): n is a, c, g, or t
  misc_feature (2711)..(2711): n is a, c, g, or t
  misc_feature (2764)..(2764): n is a, c, g, or t
  misc_feature (2793)..(2793): n is a, c, g, or t
  misc_feature (2801)..(2801): n is a, c, g, or t
  misc_feature (2828)..(2828): n is a, c, g, or t
  misc_feature (2842)..(2842): n is a, c, g, or t
  misc_feature (2909)..(2909): n is a, c, g, or t
tgactgtgctctgggtggtgaggcgagcgtctgccctccgcagcactaacccccgtgtgctatgggtcacgccctgcagctttgacccccctggccccctgtcagccggaatgtcctgtgaagtgcttgtcaccttcaagccgatgataaacaaggatctagaaggaaatatctcatttttggctcagacgggcgagttttcagttccactgaaatgttcaacaaagaaatgttcgctgtccctcgacaaggagctcattgacttcggcagctacgtggtaggagagaccacgtctcggaccatcacgctgaccaacgttgggggcttgggcacgactttcaagttcctgccagcttcagagccctgtgagatggacgactcccagtctgccctgaaattaagcagtctcctgacctacgaagataaaagcttgtatgacaaagccgccaccagcttctctgagcagcagctagagggcacggagtcctcccaggcggacatgcagagccggaaggagctggagaagctggacaaggagcaggaggaggagcagcccgcaggtgagccaggctgccaggccaagccagggtgggcgggcggtgagggcctcagggcagcattccagggggctgaggggcccaggggagggctggaaagtagagaattttcccaggccttcgatgttaagtgacggttaagcaagaaaatattcttatgtgccactaagtgttgtttttggagtggacgaaaatgtacattcacgttgacgctaaccgaagacttgaaggcacctccagcattggcccagcaggcccagcacgggcggagccgcacagggcggggaagaggctctgcggtgccccctggaggggccgggctgcggggggcttctgtctagctctgcagctgtggctgttgttagacgcgcaccagcggggagaggtgccgagaaacgggcgggccctgccctccccatgcctcctgccctgcagcccgccgccatcgggaatcgcttgcgtctcctccttgcttctcttgatcgttttcccacatacgcatcgagatccagaaacctccgtcctcctcctgtctgtcttcgcgtggtgcgcgttccgcacgccctgcagctcagcgcggagctgggccggttctccacagcctgtgtgagcctcacttccggtgtgagccgcacttccggtgtgagccgcacttcctgtcctcaccactgcgtggcgtttcctttcctgagagagcctcgggttctagatccgtccttctgccagtgcgcacttgggagcgttcgtggtacacactgttgcgaaggccgttctgcactgccccttggcctgtgtgtgagttcccacagggcacctggctggggctcatgcctgcatcacagggcatagccagcctcactggcatcagctaataccaaagtgagttctttttctnttgagacagggtctctgtcgcctaggctggagtgcagtggtgcngtcacagctcactgcngcctcgncctcccgggctcaagcaatcctcctgcctcagctcctnagtngctggaactncaggcacgcaccaccgcacctggctagtttttgtatttttttgtngacacngggtttcgccatgtttcccnggctggtgtggaactcctgaactcnggctgtctgcccncctcngcctcccanggtgctggattacaggcatgagccacctcgcctagcccaccgagttctttttcaaagtggttgtgcaagtttacactcccaccaacagtgtacaagactgtgctgtccagcgtggctgtcactgccacatctggctatttaaacttaaattgatccaaattaaataatagtgaaaattcaggtcctcctccacaagggccacatttcanatgctccatagcgacctgtgggcaacggctgccctactggacagcccagaagcccagctctgcctggtcacagagggtcctacggggccacactgggcttgagggccttgcttcacatccgcaggagcacgaggtcacacggcccggggctgcntgtctggggggcctgcaccacggtctgctgttgagatgttgctttttggtttcccagatcaccagtgagattgcgtgtctttccctgggcccatttacaagttgtatcttctttggtgtgacatctctgtttaaggctatcccttgttcttctgtgggattgtctgtcttcttctcattcattcataggagctcttcatgcacccagattccagccctcctccctgaggaatgttgcaggtgctgcctccgagtctgtggctgggccttcctctccctttatgacgtcttttctcaaatcaaagttcttcagtccagtctttgcatatttaccagtcatttctattggaatttgttttttatgatttttaggcaatttttttctcctccagggtcataaagacataggacatcgcttttgtgttgaggtgtatgatccacctcaaattcactcctgcttgtggtggaagtcagggctgaggctcatttcccctggtgcgtgtttgtgtattccacggcacaagtggactctgctatcccattcgatccattcgttgtccntgtcaaaaatcaattgaccatccaggcacagtggctcatgcctgtaatcccagaactttgggaggccgaggcnggaggatcacttgaggtcangagtttgagaccagcctggccaacatggtgaaaccccatttctactaaaaatncaaaaaattagccaggcgtggtggcgggngcctgtantcccagctacttgggtggctgaggcangagaattgcttgancccgggaggcggaggttgcagtgagctgagatcgcgccattgcactccagcctggcctataagagtnaaatactgtctc

SEQ ID NO: 402681 - DNA, 496 bp, Homo sapiens
taatctgataaaaggtagctgtaatgacatttagcgcctcagtcatatttaatgataaaatggaaagctttccttttcagatcaggaacaaaacaagggtgcctcctgttaactattttcctcaacagtgctttagaagttctggccagtgtactagtataagaaaaagaaataaaatataaaaattagagggggggaaacctgtccctttatttgcagatgttatgaatatgtatttagaacatgaaagagaacctatggataagtcattagtattaataagagagtagggttcctgagtataaaatctgtacataaaaatcagttcttcctgccagcagaggtattattaaaaaatcgatcctctctctttaaataagcaataagtgctcagaaaatgaaatattataacgtctataatagtatcagaaaatatcaagtatcttataataaacccaacaaaagaagtataagacttttgtgaagaaaagaaaaa

SEQ ID NO: 402682 - DNA, 1007 bp, Homo sapiens
  misc_feature (181)..(181): n is a, c, g, or t
  misc_feature (192)..(193): n is a, c, g, or t
  misc_feature (197)..(197): n is a, c, g, or t
  misc_feature (202)..(204): n is a, c, g, or t
ctcacacccaccgcaatacccgagacttttattaccccgtcaattccctcccctttgtaatcaatcaatagggaggttccttcgcgccacggtccacataccccaacccccgctcccggctccaattttcaccatacaccccccaccgcagaggcgacgcccaaaatgctctccaccttanccgccccatcnngttntaatnnntcccggaagtagagacactttacatccggcacaggaagccttctgatggagcacacctggcccatgaaaagacaagggaaagaaacggggccaaaggtcacagtcctctcatcccatcatcctccttaaaatcatcctaatttcatgggccctgaagccagggctgtttctttacacctagaggccttggcgccgggcctcaattccgccctgttccttaccgtctaagacatgttgggaaaatccctagagccaggatcttcattcctgctaagccagacagccggaagacacacccaaattctgtccctcttacttcagggaacatgtccactttcggcagcgttacaattttggcaccaaatgtgctaactgcaattccaccatacaatgcgtaactggaaatggaggcaacatctccgatcctgaacgatcgatgcgagaatccaggatatgcacggcttattttggccttttcccactgaaacaagggccagtattaaaaatggcacgctatcctctgtttcactccctgcttttaaacgtctccgatgtttctccctgagacagggcctcacttccgtcagccgggcttttctacggtataattttccttgtttgcttttgtccaaattagaactttttatttcatctctaggaaacgttgatccattatcacatacgtatggaaatattatcaaacatgctgtgagatacgttgtttttattttcatcaattccttaataaacacggatgcggccaggttttttttttcccactattaaataatatatatatggca

SEQ ID NO: 402683 - DNA, 980 bp, Homo sapiens
  misc_feature (181)..(181): n is a, c, g, or t
  misc_feature (192)..(193): n is a, c, g, or t
  misc_feature (197)..(197): n is a, c, g, or t
  misc_feature (202)..(204): n is a, c, g, or t
ctcacacccaccgcaatacccgagacttttattaccccgtcaattccctcccctttgtaatcaatcaatagggaggttccttcgcgccacggtccacataccccaacccccgctcccggctccaattttcaccatacaccccccaccgcagaggcgacgcccaaaatgctctccaccttanccgccccatcnngttntaatnnntcccggaagtagagacactttacatccggcacaggaagccttctgatggagcacacctggcccatgaaaagacaagggaaagaaacggggccaaaggtcacagtcctctcatcccatcatcctccttaaaatcatcctaatttcatgggccctgaagccagggctgtttctttacacctagaggccttggcgccgggcctcaattccgccctgttccttaccgtctaagacatgttgggaaaatccctagagccaggatcttcattcctgctaagccagacagccggaagacacacccaaattctgtccctcttacttcagggaacatgtccactttcggcagcgttacaattttggcaccaaatgtgctaactgcaattccaccatacaatgcgtaactggaaatggaggcaacatctccgatcctgaacgatcgatgcgagaatccaggatatgcacggcttattttggccttttcccactgaaacaagggccagtattaaaaatggcacgctatcctctgtttcactccctgcttttaaacgtctccgatgtttctccctgagacagggcctcacttccgtcagccgggcttttctacggtataattttccttgtttgcttttgtccaaattagaactttttatttcatctctaggaaacgttgatccattatcacatacgtatggaaatattatcaaacatgctgtgagatacgttgtttttattttcatcaattccttaataaacaaaagggtatagctgggataccttct

SEQ ID NO: 402684 - DNA, 791 bp, Homo sapiens
  misc_feature (11)..(11): n is a, c, g, or t
  misc_feature (72)..(72): n is a, c, g, or t
  misc_feature (175)..(175): n is a, c, g, or t
  misc_feature (318)..(318): n is a, c, g, or t
  misc_feature (488)..(488): n is a, c, g, or t
ggtggaggttncagtgagctgagatcgcaccactgcactcaagcctgggcgacagagggagattccgtctcnaaaaaaaaaaaaaaagagacaacacagagacagaggagaagcccacgtgaggctggagtgatgtggccacaaaccaaggaacacctggagccaccaggagctngaaggctggctggaagaggcaggaaggtacttccctagagcctctggagggagtggagccctgcccacaccttgattgcagacttctggcctccggagctgggagagaatatatttctgttgttttaagcaaccccagatcanggtacttgctgtggtagccccagaaagcaaatacgagggagactgagagcctcagtctttgagatcctgtcatcactgcctctcgagtcgccatgggcatgtggcctcaggccgtcagcatctcagggtgttggctctgctcaaagccatccgtcctcgtccacattgcnccttgtccaggccttcttcgagttggtcacctgagcctattattgacggtttggctgtcctccccgttgcaagcatggggatggtgcgatgctgccatttgtcaaacaagagccccggaaagccagaggtacaaccaaagacagaaaaataagaaccatgagcagtcgcggtgcctctattattttcccaggacgattgctcttttcctccaatgggcctggggaagaagcaattctcacagatcctcctcaacatgaagggtgtcagggtccctgcagatttggctggagctccagacctcc

SEQ ID NO: 402685 - DNA, 474 bp, Homo sapiens
tccctcccgccaaaccgccgagtgggcccaggcgtccgacccgcccccggcgccatagcaacgcagaaggcttcgactcccagggggccttgcggctactcagccaggaggggcgcgaagatctaacagaagcgggagagggacgcacgcctgcccgtcttccgcagacccacaccctcgggagcctcagttttcccatttgtacaacgacaagactaacccagagaagcgggttcactgttgcgataacgcgtcctaccctttgtttgacctctcccactttccaacacacccctccttcgagaatcagcccggcctcctgtccggcctaatcagaatcattcttttgcgtaatcccgcctcctccgataagcctcgccccgttcccgcccctaccattccgccctgcctcctttgtgatcagccccgccctccactggtctcgccaatgaatcgcgtcccgtttctccaatc

SEQ ID NO: 402686 - DNA, 314 bp, Homo sapiens
ccccacccacccctcctaatggctctgaatctcccccatgcctctccgcttcttctctctccacgccctatgtacccacgcccttctccactcctgttttaggctttagttccccgaagtcttctggttccctctctggcccctcccgggctggcgcctgcaaacccaccccatcccccattcccaacgcccccacccctcccactcctgggcccctgccttctgcggatccctgaactcgaggcctggcgcggattgcagatactcagtaaatattcgctgaaagagcaaataaaatgaaaaatcgtgttgaa

SEQ ID NO: 402687 - DNA, 439 bp, Homo sapiens
gcactcatgaaggcccgcgtgagtgctttcccccgcacccagcactgactcagaaccaccaccttctgctttgctgtcggacttcaattcctacctgttttctgagtgcagtcctagcaggtgaagcaaggtgatgtccttgccaagaagttgcattcctgtctgctttgcatctgctactttgctgcagtttggattcagagcagaatggaccccactctgtcgaggtgacctgaagggaaacgccaggctctgtagcagcagaggcaaggttccaaggtgtaaaggtcatgctgctagcacattattaaaaatcagtctgggtgcaatggctcacagctataatcccagtactttgggaggtctaggtaggagggttgcttgaagccaagcatttgagaccagcctaggcgaaaaagagagactcagtctctacaaa

SEQ ID NO: 402688 - DNA, 150 bp, Homo sapiens
actgactatacattgtaaataaccagtccatggatgtgtccctgcattggaacccaagattaagatttggatatggatgatgtatgcttatataagtctttttacttgtttgtctacactgtcttaataaatcagtcttttttttctaca

SEQ ID NO: 402689 - DNA, 396 bp, Homo sapiens
gagatggagtctcgctctgtcacccaggctggagtgcagtggcccaatctcggctcactgcaagctccgcctcccgggttcatgccattctcctgcctcagcctcctgagtgtttggttctcaagccagagactagctgcccttggaacttgatcccaccatggaagggctcaaggaaagctatagattttctcgtctaacctcactgtgttacctatgaggaaactgaggcccagagagtgaaatcacttacccaaagccacacagctagaggcagagagtgggatctagagccttggtctgtgccttctaggccagagcttctattgtcagggacagaagaccaagcttggatctcatttcatgaccctgaccctgcccttccagccagatctc

SEQ ID NO: 402690 - DNA, 839 bp, Homo sapiens
aagcagtccgtcttgacgttctgtgcaattacttctctagcaagaggggaagggcacacaagcagtaacctatgatcaccagaaactgcctatagcctgtcatcgtgagatttattccttcctgtgtgattggagattgagaatcagtccagccagcatcgtaaaacattaaaagtagattaaggattatccctcaaagcaaaggaactttgaaccttagttttctttctaagctgttttggttgattttatgagacacataatcaacgtacattaaataatctgggctggctcatgcctgtaatccatgcagttcgggaggtctaggcaggaggggattgctcgagaccaggaattcaaaagcagcctgggcaacatagcaagacctcatctctacaaaaacaaacaaaaaaaatagctgggtgtggtggtgcatgccggtagtttcagctacttgggagcctgaggcaggaggatcacttgcacccaggagctcaaggctgtagtgagctgattgcaccactgcactccagcctgggagaccaaaaaaaaaaaaaaaaaaaaaaaaaaaacatttggagggcggcactgggccctcggaagaggtttaagaacaatgggggggagccgggggccccaaggggaacggggacacggggcaaaagggtgaaccacaagggaaaaccccggggcagaacccaacgaggaggggatatctacgcaaaaaaaaaagcgccgaggcggaaaccaggagagttatgagaaaaagtcacaagagaagtcagaaggacaaacagggcatataacaaggagtccaagagacccgaatcaaagtgccg

SEQ ID NO: 402691 - DNA, 369 bp, Homo sapiens
tcgaagattccaagacctgcacatgaaggatacagctggccccacccagatcaatgaactggctcatctgatctcgtgcccctcctccccaacccagtaactgactgcgcattgcattctggtggaacaactgatgccacccagacttgtgacccccacccaggaactgacagaggcacagagacagttttgataaccctgtggtttcatccctgaccaaaccaatcagtatttcccattccctagctccctgcctgccaaactatccttaaaaccctagcctccgcattctctgggaggcagatttgagaattgtctcatcttctcgcttggctggccttgcaattaaacatgttctttgctgcaaaa

SEQ ID NO: 402692 - DNA, 367 bp, Homo sapiens
tccatcttgcttctgaccttcaagctgtccttgtacattcttgggtggatgccaaactaactttgggaaggaattcagttcatgatttgactctgaaacaaaattggcattgcattctggtggaacaactgatgccacccagacttgtgacccccacccaggaactgacagaggcacagagacagttttgataaccctgtggtttcatccctgaccaaaccaatcagtatttcccattccctagctccctgcctgccaaactatccttaaaaccctagcctccgcattctctgggaggcagatttgagaattgtctcatcttctcgcttggctggccttgcaattaaacatgttctttgctgcaaaa

SEQ ID NO: 402693 - DNA, 440 bp, Homo sapiens
tgtacctcatttattatttgtgaaataattacaacttctgaatgccattatgagttaagagagaaggggtctagcttttggactttaggtctccccatctaccacctgcctgctacccatcattctggctccccagtcccccagaatctgcctgacagtgggacacgaatgcccacaggcataacaatgaagctgctaggaggccatacccaaagctactatgatgataagatggcaagacatggagtggcaaaggcaccagaagtttaactctgggactatctgtccatcacctttctttcttgcacagcatgcaggttgcatgggcttaaactgtagtggtcaataaagccacacagatcagggtgagcaaatgaaaggcaaatctaactcaggtagaaaaaagagcatttatttccttgactggtaccctatcaaag

SEQ ID NO: 402694 - DNA, 984 bp, Homo sapiens
tagtagagatggggtttcaccgtgttagccaggttggtcttgatctcctgaccttgtgatctgcccacttcggcctcccaaagtgctgggattataggcatgagccaccgcgtctggcccaccccagctaaatttttaaccaaatttgttttattcattaagagatcgttcatgcttttcttctacaatgctgaacctctctctttaataagatttgtagtactaatgatttaaaacaaacaaaagcaaatgtgttctgaaattctgaaagatgagttcaggtttcttgtgtctctgatgaagtaaactcagataaatacagagaagtgcaaattatcctttatcacatgtcttggaagagccaattccatgaagttaatcagtaattattttggcaggctgcacttgtgaggaacttgcaccctccctgttgtttgacgaggggtgtcttgtcagaaagtaaatttataacattgttcatttttttctttaagtgattgtaacaaatatttggtggtaaatttaactactgaaattaggaatactttgtgaaactaagagggtagcattcagcagctttagaatcttttctttctttttttaaagacagtctcgctctgtcaccgaggctgaagtacaatggcaggatcatggctcactgcaacctccacctcctgagttcaagcagttctcatgcctcagcttcccgagtagctgggactacaattgtgccaccaccatgcctggctaatttttgtattttctgtagagacgggattttgagaccagcctaggcaacatggcgaaaccatgtctctactaaaaatacaaaaaattagccgggcgtggtggtgcattcgtgtggtcccagctccttggggagctgaggtgggaggatcgcttgaggccaggaagtcaaggctgcagtgagcccagatcatgccacagcactccagcctggcgacagagtgagatcctgtctga

SEQ ID NO: 402695 - DNA, 390 bp, Homo sapiens
ctagcacttggagctggctgacagagaaatagactgcttgggtgactgcctgtttccttctccaggacaagactgaatgggaagtctttatgggattctgaaaaatatgatagacctccctcaccccccaccaggaactctgagtcagacagccctgttggcattcgggctcttgtgcctgatgggttttttttttttttatactttaagttctaggtgtgcctgatggttttgaggcctctgactctgttactctgtacctcctcatcattggagccatcactgtaaccctgtgtccctcagggcttgggcggggcttaagtgagtcctgtatgcaaagcagccagagccctacctcttagtatgtgctaaattaagtgttagtctcag

SEQ ID NO: 402696 - DNA, 685 bp, Homo sapiens
ttcaaagcttcaaattattcagtaacatctaagagtgataattgtatctctcaggaggcacatctaatgtttaaaaagaaacgttgacttctaagacaatgaaggagctatttacacttgctgcagaagccaaatcacttatcaatagcctgcctctcctaaatgagttaatagaactattcacagggccaagactattgatgtttagtatatcttgggccttttgagttaatttttccactgccgagttgcaataaaagacagtgaaagactttgtcttttaacagtgaagtaaatagagctataatagaaagtacactggcctagcctcggtgtccaaaaaataggtcaactctcccaaccatattttttatttttctatcataaatcccttaacctctttcaacctcagttttcccatttataaaatgaaacaataaaactggaaattctcttaaagtctagtgtacctctaatactctaagattataatatttacattgttatcaatatgagagttgcaaagaccagttcttcccgccaagagcatggcttttctgggggcgggaagtctaattcctaatggatacactatgacatggcttggaggggcattgaataacttcttccaaaatctccaccagctgtccttggaaatccagaaacagaagagacaatctaaatt

SEQ ID NO: 402697 - DNA, 274 bp, Homo sapiens
ttgctaagggtctaaaatacattggtcacttttgaatagatagcagggttaaggaattaaagaactctgttttctcatgaccttcttttatcccgactttcggaactttcttctttatttaggccactttcagtgctctctctatggaactatttgtccattctacaaacccaaccctttcttgatccctgtagctttaagtaaatcttgaagccaggttatgtcagttctccaattttgcttgtttcattcaatatggagttggctattcctt

SEQ ID NO: 402698 - DNA, 409 bp, Homo sapiens
gaggggaatcgagggtgaaaaggaagaaaatgagaataaataaaaccagaaagagatctcccagaaactaatgaaaaaagtgagctgaagaattttgttaaaatcgatactctggatgtgagatcccataggacacggggccctattgacaaggtaaactcctaaaggagatgaattctgatggtgaatctgtctggtcctgggctttttttttttttttttggttggtaggctattaattactgcctcaatttgagaacttattattagtctattcagggattcgacttcttcctggtttcgtcttgggagggtgtatgtgtccaggaatttatcagtttcttctagattttctagtttatttgtgtagaggtctttatagtacactccaatggtagtttgtatttcc

SEQ ID NO: 402699 - DNA, 485 bp, Homo sapiens
aggtgtttcaatagttaataatgatcaaacgttataaatattgggaaactataatggatgaggtgaaaaagaaaaggccactaagtagaaaattagataaaatagacatatataaaattaagtcatgtgttatgggctaaactgtgtcccccacaaaattcatgttggggtcagtacctcagaatgtgtctgtatttggagacagggcctttatagaaataattaaattaaaatgaggtcactagggtcagctctaatccaacaagatgggcatcctgataggaagagggaatttggatacagagggaagattatataaagacacggggagaggatgaccatctacaagaccaagagagaggcctgtccgtaagaaaccaaccctcaaggagagaggcctttctgtaagaaaccaaccctgccagcacccagcttttggagctctagtctccagaaatgtgaaataaatttcttttgtttaagcc

SEQ ID NO: 402700 - DNA, 826 bp, Homo sapiens
gggcggggccgcgccgtccacaccggccgcagccggttttcgaggcgggcgccgagcggatccgcggcggaggttgagggaccccacacatcccacgagaacacacgacctacagaatgaagatactgaccactcatcaaccaatacagacagggactcatatacagatgggcagagagagttacagcagggcctatgggaagttacgcgacgtgacagaaaggacgtcggaagccagaagggcacatcggacaacatggggggcaccacaccgagacgatggcaccgcgcgggacagtggccacgaccggggggacaccccagggacacgatccaaggaacagaggcggacaccaattccaacccggataccagaggacggcaaagaaaggaagaccgaagcgcacacaagagaacacaaagcgaccgtgcgctaggggcaccggcagggtgcacaggggattggcaacggcatgcggccacattttacgaaaggcaagtggatcacaaccacgaggcacacaacatgaaccttgacacatggagagggggcacacacgaagaaacggccaagagaccatgacaaagaaagcccaaaggaaggcacagttgcaggcccattgaggaggacacgcgagtgagcaacagggaacagtgcggcccaccaggggaatgcacgagagaccaacccgaggggacaaacgataacagagcaaagagcactcggcaacggacacacagaagcgaggagcacggaacaacgtggaggagaaatcggggcaaacaatgggagaacagggtgcgaggcaaggatgcagacactccg

SEQ ID NO: 402701 - DNA, 109 bp, Homo sapiens
aattcaagcttctaacgatgtacggggcatgtttgtttttgaagctcaggtgtctcacgtctgggctgcaccaggcgaagagagaaattaaagatttgaggtttttcca

SEQ ID NO: 402702 - DNA, 4502 bp, Homo sapiens
cgcgtcctgagagtcagccctcgccgctgcagcctcggcgcccggccggccggccatggagcgccccccgccccgcgccgccggccgggaccccagtgcgctgcgggccgaggcgccgtggctgcgcgcggagggtccggggccgcgcgccgcgcccgtgacggtgcccacgccgccgcagggctcttccgtgggcggcggcttcgcgggcttggagttcgcgcggccgcaggagtcggagccgcgggcctcggacctgggggccccccggacgtggacgggggcggcggcggggccccggactccgtcggcgcacatccccgtcccagcgcagagagccaccccaggaaaagcccggctggacgaggtcatggctgccgctgcccttacaagcctgtccaccagccctctccttctgggggccccagttgcagccttcagcccagagcctggcctggagccctggaaggaggccctggtgcggcccccaggcagctacagcagcagcagcaacagtggagactggggatgggacctggccagtgaccagtcctctccgtccaccccgtcacccccactgccccccgaggcagcccactttctgtttggggagcccaccctgagaaaaaggaagagcccggcccaggtcatgttccagtgtctgtggaagagctgcgggaaggtgctgagcacggcgtcggcgatgcagagacacatccgcctggtgcacctggggaggcaggcagagcctgatcagagtgatggtgaggaggacttctactacacagagctggatgttggtgtggacacgctgaccgacgggctgtccagcctgactccagtgtcccccacggcctccatgccgcctgccttcccccgcctggagctgccagagctgctggagcccccagccctgcctagtcccctgcggccgcctgccccgcccctgcccccgccccctgtcctgagcaccgttgctaacccccagtcctgtcacagtgaccgtgtctaccagggctgcctgacgcccgcccgcctggagccgcagcccacggaggtcggagcctgcccacccgccttgtcctccaggatcggagtcaccctgaggaagccccgcggcgacgcgaagaagtgccggaaggtgtatggcatggagcgccgggacctctggtgcacagcctgccgctggaagaaagcctgccagcggttcctggactaagtccggctcgttcaagaacataagctaccaccttctccctccccaccccctccaggcccggggctgaaacagcccgaggacagccccaggggctggccttcaccagctgcagggtctgcttttacttggggtgggggggcggggctgaccctgaaccctcccccccgccaggtcggggaggggtcccaccactcaaagtgcctctaaagaaaccagctttttgcactaaagccaaaccacaccgctgtccccttagccccaagggccctgggggcagccaccctcccgcctgtcggcccgtagatttatcaagggtgttatgggcccagctttggggggccagtcccgatgcactttgaggggtgttggagaggggactcccccactcgcacttaactcaacggctctcgggccctggggctgtttttaccatgtttgtttttgaagctcaggtgtctcacgtctgggctgcaccaggcgaagagagaaattaaagatttgaggtttttccagaagctttgtctgcctctcgggaggaaggccgtggggctgggaccctgtggtgggcaagtgggtggagtctggcagctgcccacagagggccgagggtcacccgtcggccgccgccaccccaggcgaggccggaggaaggatcatctgagacgcaggaggcatctgctggagcagcaatttcccaatttattgaaagtgatcgctttgcaaggatgtctaagctaatcccgtcacagaaaggaaacgcacaggcgcctaggcagaaacttggagactcaccgcagaggccacgtgaacccacggccacagagaggcaggacggcagagccatgatttcccaccgagcgattacgagaacctcttcccccaatagtagacacatctccaatacaaacacaggtttataataagtaataggaagtcaatataatatagattatccccagaaaaaaatcaacaatcttcaaacactgccctttttttgtgtgttttgtttttgttgacaggttgaaagcatgttgaaaaaaataaatatttaagaaaagcacacacagcaccctcactacaagtagttctaaaagggctgcatacaaaacacaatataagatctaaaaaaaaccaccaccattaagtatggctttcttaagagtcgcacatgtcacagaatgagctaaaataagattacttcttttataatattgcaaaaagttccagtttttgcattttctcagttttttaaagaggaagatgtgcaaagttggaagcagtaagctgcgtcttctgagtcagttccctacgtagccctggcagtgtcctgtgtcccaaagctcagagagccccagtgtacaacctggtcaggatccagagcttgacagaaaaatcgtggtgtccctgccccctccccgcccccaaataacaccatccccaatggactgtatttcccactttggtgttgtaaacaccaaaatacaaacagacacaaacaaaaatacaaaatgtgaaatgtaatctacacatttttcctcttcataaaaaaatatttattagtttgaacatcgatttaaaaaaaaatcagtcacataaaaaaaacccttcatgacatgtcttttccctccacgcctcctgagatggacgtgctcacctgggcctcggaaatcccacactcttcagtcggcaaactgcgaacaagaacaggaaatctgccacgcagcaaacacttggggaggtcagtgggacactgttggttttagggaagaaaatgcccctgtagctccggcggggaaccccaaaacggtcagcaaaggcaggccacacggagtgagccggccagatggagcaggacatcctgagtgtggagggggaggcgggcccgggtcctgggcagggtggcctgagagcagggactggtacaaaacccagagacattggtgggtagcaaaggtctggtttccaaatgcattttgtaagaaagtcagtctgtttagaaaaagggtttaaaaatcaggggaaaggtacaaagttctgagaattctcaaagaggccggggtggggctggcctggggtgagggctggagggctccgctgcagctccctggtagccatgctctccccctgggggactcgtgccagagccacccaccttgctcggtaagagtgggcagggctcaccgctgaggggccagcgcttggcccggctcctatccccacactccgtgtgcagaaaaatcttggcctctttctccagctttgaggagcccacagcctccgagctgaggggtgtgtgtgatgacagctccagccagggcaccctgtcattggtagaaccgggggccaatgtcaaaaaacaaaagccgtgactcctgcgctgtacctggagtcctccatgtactcctccacaggacccccggccagccccagccctccccgagcagcagcggtcagggaagctggtgctctacctgacaatgtggggaaaagcctggtatacaggctagaaaaagagagtaaaaactctttccacgcagccctgaagctcagcactccggggggtcttcacacgggcaggtcctggagggaaggaggcggccaccgcgcccacctcccatctgaaggcacagcaccgcagtggtggcctgtgccagaggagggggtgaaggatggaatgtcctcatggaaaagaaagaacatgtgagtgcttctgaaaacacagcaagaggacttgagcacaagctaaaggaaaaacaaccctatatagtttcttcgagtgagaaaaataatgccaaacaaaataattttatgtaactacctcgatatgtctctgactacttaaaaatttggttacccacgcggggaggtgtaagcagcacactgcagttaggaacaccgcctccagtgttagcagcaaaggcaggagcccagctccagcccgtccaggaggggtcagcaggagcggccgggctgggccatgggcagaacaggcacggcagagcccggggtggacgtggcagcccaaggctctccgaggaagtgcacacgactgagccgaggcccttgcagagggaacctggtgtggcctgaagtggtggggggcacagggctgagggtcccctcctggaaggagcccccagggctgtgtccacctaagatagcacctggagccctcggcctccagcagggtctgcagctgtgtcgtgtgttaagcaccaaagcccagaggtaagacggtggcagggctctctgtgcacctggattctacaggctgccatgggcc

SEQ ID NO: 402703 - DNA, 4707 bp, Homo sapiens
gggcggggccgcgccgtccacaccggccgcagccggttttcgaggcgggcgccgagcggatccgcggcggaggttgagggacccccctcccccggccaccgcctccgctgagtctgccccctccccatccgcagggctcttccgtgggcggcggcttcgcgggcttggagttcgcgcggccgcaggagtcggagccgcgggcctcggacctgggggccccccggacgtggacgggggcggcggcggggccccggactccgtcggcgcacatccccgtcccagcgcagagagccaccccaggaaaagcccggctggacgaggtcatggctgccgctgcccttacaagcctgtccaccagccctctccttctgggggccccagttgcagccttcagcccagagcctggcctggagccctggaaggaggccctggtgcggcccccaggcagctacagcagcagcagcaacagtggagactggggatgggacctggccagtgaccagtcctctccgtccaccccgtcacccccactgccccccgaggcagcccactttctgtttggggagcccaccctgagaaaaaggaagagcccggcccaggtcatgttccagtgtctgtggaagagctgcgggaaggtgctgagcacggcgtcggcgatgcagagacacatccgcctggtgcacctggggtgcggcggggcctggggtgcggcggggcctgcgggttggctggggttgtgaggcccggccaggccaccccttcagctcccactggctggctgtgtctcccgcaggaggcaggcagagcctgatcagagtgatggtgaggaggacttctactacacagagctggatgttggtgtggacacgctgaccgacgggctgtccagcctgactccagtgtcccccacggcctccatgccgcctgccttcccccgcctggagctgccagagctgctggagcccccagccctgcctagtcccctgcggccgcctgccccgcccctgcccccgccccctgtcctgagcaccgttgctaacccccagtcctgtcacagtgaccgtgtctaccagggctgcctgacgcccgcccgcctggagccgcagcccacggaggtcggagcctgcccacccgccttgtcctccaggatcggagtcaccctgaggaagccccgcggcgacgcgaagaagtgccggaaggtgtatggcatggagcgccgggacctctggtgcacagcctgccgctggaagaaagcctgccagcggttcctggactaagtccggctcgttcaagaacataagctaccaccttctccctccccaccccctccaggcccggggctgaaacagcccgaggacagccccaggggctggccttcaccagctgcagggtctgcttttacttggggtgggggggcggggctgaccctgaaccctcccccccgccaggtcggggaggggtcccaccactcaaagtgcctctaaagaaaccagctttttgcactaaagccaaaccacaccgctgtccccttagccccaagggccctgggggcagccaccctcccgcctgtcggcccgtagatttatcaagggtgttatgggcccagctttggggggccagtcccgatgcactttgaggggtgttggagaggggactcccccactcgcacttaactcaacggctctcgggccctggggctgtttttaccatgtttgtttttgaagctcaggtgtctcacgtctgggctgcaccaggcgaagagagaaattaaagatttgaggtttttccagaagctttgtctgcctctcgggaggaaggccgtggggctgggaccctgtggtgggcaagtgggtggagtctggcagctgcccacagagggccgagggtcacccgtcggccgccgccaccccaggcgaggccggaggaaggatcatctgagacgcaggaggcatctgctggagcagcaatttcccaatttattgaaagtgatcgctttgcaaggatgtctaagctaatcccgtcacagaaaggaaacgcacaggcgcctaggcagaaacttggagactcaccgcagaggccacgtgaacccacggccacagagaggcaggacggcagagccatgatttcccaccgagcgattacgagaacctcttcccccaatagtagacacatctccaatacaaacacaggtttataataagtaataggaagtcaatataatatagattatccccagaaaaaaatcaacaatcttcaaacactgccctttttttgtgtgttttgtttttgttgacaggttgaaagcatgttgaaaaaaataaatatttaagaaaagcacacacagcaccctcactacaagtagttctaaaagggctgcatacaaaacacaatataagatctaaaaaaaaccaccaccattaagtatggctttcttaagagtcgcacatgtcacagaatgagctaaaataagattacttcttttataatattgcaaaaagttccagtttttgcattttctcagttttttaaagaggaagatgtgcaaagttggaagcagtaagctgcgtcttctgagtcagttccctacgtagccctggcagtgtcctgtgtcccaaagctcagagagccccagtgtacaacctggtcaggatccagagcttgacagaaaaatcgtggtgtccctgccccctccccgcccccaaataacaccatccccaatggactgtatttcccactttggtgttgtaaacaccaaaatacaaacagacacaaacaaaaatacaaaatgtgaaatgtaatctacacatttttcctcttcataaaaaaatatttattagtttgaacatcgatttaaaaaaaaatcagtcacataaaaaaaacccttcatgacatgtcttttccctccacgcctcctgagatggacgtgctcacctgggcctcggaaatcccacactcttcagtcggcaaactgcgaacaagaacaggaaatctgccacgcagcaaacacttggggaggtcagtgggacactgttggttttagggaagaaaatgcccctgtagctccggcggggaaccccaaaacggtcagcaaaggcaggccacacggagtgagccggccagatggagcaggacatcctgagtgtggagggggaggcgggcccgggtcctgggcagggtggcctgagagcagggactggtacaaaacccagagacattggtgggtagcaaaggtctggtttccaaatgcattttgtaagaaagtcagtctgtttagaaaaagggtttaaaaatcaggggaaaggtacaaagttctgagaattctcaaagaggccggggtggggctggcctggggtgagggctggagggctccgctgcagctccctggtagccatgctctccccctgggggactcgtgccagagccacccaccttgctcggtaagagtgggcagggctcaccgctgaggggccagcgcttggcccggctcctatccccacactccgtgtgcagaaaaatcttggcctctttctccagctttgaggagcccacagcctccgagctgaggggtgtgtgtgatgacagctccagccagggcaccctgtcattggtagaaccgggggccaatgtcaaaaaacaaaagccgtgactcctgcgctgtacctggagtcctccatgtactcctccacaggacccccggccagccccagccctccccgagcagcagcggtcagggaagctggtgctctacctgacaatgtggggaaaagcctggtatacaggctagaaaaagagagtaaaaactctttccacgcagccctgaagctcagcactccggggggtcttcacacgggcaggtcctggagggaaggaggcggccaccgcgcccacctcccatctgaaggcacagcaccgcagtggtggcctgtgccagaggagggggtgaaggatggaatgtcctcatggtgagtgctgtcagaggcaggcctgaacgagaagacaggccgtggcaacggtcccgaggctgtgagtctaggcagcctgcctccgggacccccaaagccaggcggtgcaccacagcacacaccgtgggacctttgcttttcactcaggaaaagaaagaacatgtgagtgcttctgaaaacacagcaagaggacttgagcacaagctaaaggaaaaacaaccctatatagtttcttcgagtgagaaaaataatgccaaacaaaataattttatgtaactacctcgatatgtctctgactacttaaaaatttggttacccacgcggggaggtgtaagcagcacactgcagttaggaacaccgcctccagtgttagcagcaaaggcaggagcccagctccagcccgtccaggaggggtcagcaggagcggccgggctgggccatgggcagaacaggcacggcagagcccggggtggacgtggcagcccaaggctctccgaggaagtgcacacgactgagccgaggcccttgcagagggaacctggtgtggcctgaagtggtggggggcacagggctgagggtcccctcctggaaggagcccccagggctgtgtccacctaagatagcacctggagccctcggcctccagcagggtctgcagctgtgtcgtgtgttaagcaccaaagcccagaggtaagacggtggcagggctctctgtgcacctggattctacaggctgccatgggcc

SEQ ID NO: 402704 - DNA, 4241 bp, Homo sapiens
gggctgggagtggggagcctggtgtgcacgcgtgcccaggcctgcacgtggaccgaccaggggaggggcccagagctctggctgggtcacccgcaccccgcccccatctcctccagagccaccccaggaaaagcccggctggacgaggtcatggctgccgctgcccttacaagcctgtccaccagccctctccttctgggggccccagttgcagccttcagcccagagcccggcccaggtcatgttccagtgtctgtggaagagctgcgggaaggtgctgagcacggcgtcggcgatgcagagacacatccgcctggtgcacctggggaggcaggcagagcctgatcagagtgatggtgaggaggacttctactacacagagctggatgttggtgtggacacgctgaccgacgggctgtccagcctgactccagtgtcccccacggcctccatgccgcctgccttcccccgcctggagctgccagagctgctggagcccccagccctgcctagtcccctgcggccgcctgccccgcccctgcccccgccccctgtcctgagcaccgttgctaacccccagtcctgtcacagtgaccgtgtctaccagggctgcctgacgcccgcccgcctggagccgcagcccacggaggtcggagcctgcccacccgccttgtcctccaggatcggagtcaccctgaggaagccccgcggcgacgcgaagaagtgccggaaggtgtatggcatggagcgccgggacctctggtgcacagcctgccgctggaagaaagcctgccagcggttcctggactaagtccggctcgttcaagaacataagctaccaccttctccctccccaccccctccaggcccggggctgaaacagcccgaggacagccccaggggctggccttcaccagctgcagggtctgcttttacttggggtgggggggcggggctgaccctgaaccctcccccccgccaggtcggggaggggtcccaccactcaaagtgcctctaaagaaaccagctttttgcactaaagccaaaccacaccgctgtccccttagccccaagggccctgggggcagccaccctcccgcctgtcggcccgtagatttatcaagggtgttatgggcccagctttggggggccagtcccgatgcactttgaggggtgttggagaggggactcccccactcgcacttaactcaacggctctcgggccctggggctgtttttaccatgtttgtttttgaagctcaggtgtctcacgtctgggctgcaccaggcgaagagagaaattaaagatttgaggtttttccagaagctttgtctgcctctcgggaggaaggccgtggggctgggaccctgtggtgggcaagtgggtggagtctggcagctgcccacagagggccgagggtcacccgtcggccgccgccaccccaggcgaggccggaggaaggatcatctgagacgcaggaggcatctgctggagcagcaatttcccaatttattgaaagtgatcgctttgcaaggatgtctaagctaatcccgtcacagaaaggaaacgcacaggcgcctaggcagaaacttggagactcaccgcagaggccacgtgaacccacggccacagagaggcaggacggcagagccatgatttcccaccgagcgattacgagaacctcttcccccaatagtagacacatctccaatacaaacacaggtttataataagtaataggaagtcaatataatatagattatccccagaaaaaaatcaacaatcttcaaacactgccctttttttgtgtgttttgtttttgttgacaggttgaaagcatgttgaaaaaaataaatatttaagaaaagcacacacagcaccctcactacaagtagttctaaaagggctgcatacaaaacacaatataagatctaaaaaaaaccaccaccattaagtatggctttcttaagagtcgcacatgtcacagaatgagctaaaataagattacttcttttataatattgcaaaaagttccagtttttgcattttctcagttttttaaagaggaagatgtgcaaagttggaagcagtaagctgcgtcttctgagtcagttccctacgtagccctggcagtgtcctgtgtcccaaagctcagagagccccagtgtacaacctggtcaggatccagagcttgacagaaaaatcgtggtgtccctgccccctccccgcccccaaataacaccatccccaatggactgtatttcccactttggtgttgtaaacaccaaaatacaaacagacacaaacaaaaatacaaaatgtgaaatgtaatctacacatttttcctcttcataaaaaaatatttattagtttgaacatcgatttaaaaaaaaatcagtcacataaaaaaaacccttcatgacatgtcttttccctccacgcctcctgagatggacgtgctcacctgggcctcggaaatcccacactcttcagtcggcaaactgcgaacaagaacaggaaatctgccacgcagcaaacacttggggaggtcagtgggacactgttggttttagggaagaaaatgcccctgtagctccggcggggaaccccaaaacggtcagcaaaggcaggccacacggagtgagccggccagatggagcaggacatcctgagtgtggagggggaggcgggcccgggtcctgggcagggtggcctgagagcagggactggtacaaaacccagagacattggtgggtagcaaaggtctggtttccaaatgcattttgtaagaaagtcagtctgtttagaaaaagggtttaaaaatcaggggaaaggtacaaagttctgagaattctcaaagaggccggggtggggctggcctggggtgagggctggagggctccgctgcagctccctggtagccatgctctccccctgggggactcgtgccagagccacccaccttgctcggtaagagtgggcagggctcaccgctgaggggccagcgcttggcccggctcctatccccacactccgtgtgcagaaaaatcttggcctctttctccagctttgaggagcccacagcctccgagctgaggggtgtgtgtgatgacagctccagccagggcaccctgtcattggtagaaccgggggccaatgtcaaaaaacaaaagccgtgactcctgcgctgtacctggagtcctccatgtactcctccacaggacccccggccagccccagccctccccgagcagcagcggtcagggaagctggtgctctacctgacaatgtggggaaaagcctggtatacaggctagaaaaagagagtaaaaactctttccacgcagccctgaagctcagcactccggggggtcttcacacgggcaggtcctggagggaaggaggcggccaccgcgcccacctcccatctgaaggcacagcaccgcagtggtggcctgtgccagaggagggggtgaaggatggaatgtcctcatggtgagtgctgtcagaggcaggcctgaacgagaagacaggccgtggcaacggtcccgaggctgtgagtctaggcagcctgcctccgggacccccaaagccaggcggtgcaccacagcacacaccgtgggacctttgcttttcactcaggaaaagaaagaacatgtgagtgcttctgaaaacacagcaagaggacttgagcacaagctaaaggaaaaacaaccctatatagtttcttcgagtgagaaaaataatgccaaacaaaataattttatgtaactacctcgatatgtctctgactacttaaaaatttggttacccacgcggggaggtgtaagcagcacactgcagttaggaacaccgcctccagtgttagcagcaaaggcaggagcccagctccagcccgtccaggaggggtcagcaggagcggccgggctgggccatgggcagaacaggcacggcagagcccggggtggacgtggcagcccaaggctctccgaggaagtgcacacgactgagccgaggcccttgcagagggaacctggtgtggcctgaagtggtggggggcacagggctgagggtcccctcctggaaggagcccccagggctgtgtccacctaagatagcacctggagccctcggcctccagcagggtctgcagctgtgtcgtgtgttaagcaccaaagcccagaggtaagacggtggcagggctctctgtgcacctggattctacaggctgccatgggcc

SEQ ID NO: 402705 - DNA, 4685 bp, Homo sapiens
gggcggggccgcgccgtccacaccggccgcagccggttttcgaggcgggcgccgagcggatccgcggcggaggttgagggacccccctcccccggccaccgcctccgctgagtctgccccctccccatccgcagggctcttccgtgggcggcggcttcgcgggcttggagttcgcgcggccgcaggagtcggagccgcgggcctcggacctgggggccccccggacgtggacgggggcggcggcggggccccggactccgtcggcgcacatccccgtcccagcgcagagagccaccccaggaaaagcccggctggacgaggtcatggctgccgctgcccttacaagcctgtccaccagccctctccttctgggggccccagttgcagccttcagcccagagcctggcctggagccctggaaggaggccctggtgcggcccccaggcagctacagcagcagcagcaacagtggagactggggatgggacctggccagtgaccagtcctctccgtccaccccgtcacccccactgccccccgaggcagcccactttctgtttggggagcccaccctgagaaaaaggaagagcccggcccaggtcatgttccagtgtctgtggaagagctgcgggaaggtgctgagcacggcgtcggcgatgcagagacacatccgcctggtgcacctggggaggcaggcagagcctgatcagagtgatggtgaggaggacttctactacacagagctggatgttggtgtggacacgctgaccgacgggctgtccagcctgactccagtgtcccccacggcctccatgccgcctgccttcccccgcctggagctgccagagctgctggagcccccagccctgcctagtcccctgcggccgcctgccccgcccctgcccccgccccctgtcctgagcaccgttgctaacccccagtcctgtcacagtgaccgtgtctaccaggtgggtgaggccacgggtggcagctggggcgggtctcagggctctctggaggggagtgaagccctggctgtgtctccctgtagggctgcctgacgcccgcccgcctggagccgcagcccacggaggtcggagcctgcccacccgccttgtcctccaggatcggagtcaccctgaggaagccccgcggcgacgcgaagaagtgccggaaggtgtatggcatggagcgccgggacctctggtgcacagcctgccgctggaagaaagcctgccagcggttcctggactaagtccggctcgttcaagaacataagctaccaccttctccctccccaccccctccaggcccggggctgaaacagcccgaggacagccccaggggctggccttcaccagctgcagggtctgcttttacttggggtgggggggcggggctgaccctgaaccctcccccccgccaggtcggggaggggtcccaccactcaaagtgcctctaaagaaaccagctttttgcactaaagccaaaccacaccgctgtccccttagccccaagggccctgggggcagccaccctcccgcctgtcggcccgtagatttatcaagggtgttatgggcccagctttggggggccagtcccgatgcactttgaggggtgttggagaggggactcccccactcgcacttaactcaacggctctcgggccctggggctgtttttaccatgtttgtttttgaagctcaggtgtctcacgtctgggctgcaccaggcgaagagagaaattaaagatttgaggtttttccagaagctttgtctgcctctcgggaggaaggccgtggggctgggaccctgtggtgggcaagtgggtggagtctggcagctgcccacagagggccgagggtcacccgtcggccgccgccaccccaggcgaggccggaggaaggatcatctgagacgcaggaggcatctgctggagcagcaatttcccaatttattgaaagtgatcgctttgcaaggatgtctaagctaatcccgtcacagaaaggaaacgcacaggcgcctaggcagaaacttggagactcaccgcagaggccacgtgaacccacggccacagagaggcaggacggcagagccatgatttcccaccgagcgattacgagaacctcttcccccaatagtagacacatctccaatacaaacacaggtttataataagtaataggaagtcaatataatatagattatccccagaaaaaaatcaacaatcttcaaacactgccctttttttgtgtgttttgtttttgttgacaggttgaaagcatgttgaaaaaaataaatatttaagaaaagcacacacagcaccctcactacaagtagttctaaaagggctgcatacaaaacacaatataagatctaaaaaaaaccaccaccattaagtatggctttcttaagagtcgcacatgtcacagaatgagctaaaataagattacttcttttataatattgcaaaaagttccagtttttgcattttctcagttttttaaagaggaagatgtgcaaagttggaagcagtaagctgcgtcttctgagtcagttccctacgtagccctggcagtgtcctgtgtcccaaagctcagagagccccagtgtacaacctggtcaggatccagagcttgacagaaaaatcgtggtgtccctgccccctccccgcccccaaataacaccatccccaatggactgtatttcccactttggtgttgtaaacaccaaaatacaaacagacacaaacaaaaatacaaaatgtgaaatgtaatctacacatttttcctcttcataaaaaaatatttattagtttgaacatcgatttaaaaaaaaatcagtcacataaaaaaaacccttcatgacatgtcttttccctccacgcctcctgagatggacgtgctcacctgggcctcggaaatcccacactcttcagtcggcaaactgcgaacaagaacaggaaatctgccacgcagcaaacacttggggaggtcagtgggacactgttggttttagggaagaaaatgcccctgtagctccggcggggaaccccaaaacggtcagcaaaggcaggccacacggagtgagccggccagatggagcaggacatcctgagtgtggagggggaggcgggcccgggtcctgggcagggtggcctgagagcagggactggtacaaaacccagagacattggtgggtagcaaaggtctggtttccaaatgcattttgtaagaaagtcagtctgtttagaaaaagggtttaaaaatcaggggaaaggtacaaagttctgagaattctcaaagaggccggggtggggctggcctggggtgagggctggagggctccgctgcagctccctggtagccatgctctccccctgggggactcgtgccagagccacccaccttgctcggtaagagtgggcagggctcaccgctgaggggccagcgcttggcccggctcctatccccacactccgtgtgcagaaaaatcttggcctctttctccagctttgaggagcccacagcctccgagctgaggggtgtgtgtgatgacagctccagccagggcaccctgtcattggtagaaccgggggccaatgtcaaaaaacaaaagccgtgactcctgcgctgtacctggagtcctccatgtactcctccacaggacccccggccagccccagccctccccgagcagcagcggtcagggaagctggtgctctacctgacaatgtggggaaaagcctggtatacaggctagaaaaagagagtaaaaactctttccacgcagccctgaagctcagcactccggggggtcttcacacgggcaggtcctggagggaaggaggcggccaccgcgcccacctcccatctgaaggcacagcaccgcagtggtggcctgtgccagaggagggggtgaaggatggaatgtcctcatggtgagtgctgtcagaggcaggcctgaacgagaagacaggccgtggcaacggtcccgaggctgtgagtctaggcagcctgcctccgggacccccaaagccaggcggtgcaccacagcacacaccgtgggacctttgcttttcactcaggaaaagaaagaacatgtgagtgcttctgaaaacacagcaagaggacttgagcacaagctaaaggaaaaacaaccctatatagtttcttcgagtgagaaaaataatgccaaacaaaataattttatgtaactacctcgatatgtctctgactacttaaaaatttggttacccacgcggggaggtgtaagcagcacactgcagttaggaacaccgcctccagtgttagcagcaaaggcaggagcccagctccagcccgtccaggaggggtcagcaggagcggccgggctgggccatgggcagaacaggcacggcagagcccggggtggacgtggcagcccaaggctctccgaggaagtgcacacgactgagccgaggcccttgcagagggaacctggtgtggcctgaagtggtggggggcacagggctgagggtcccctcctggaaggagcccccagggctgtgtccacctaagatagcacctggagccctcggcctccagcagggtctgcagctgtgtcgtgtgttaagcaccaaagcccagaggtaagacggtggcagggctctctgtgcacctggattctacaggctgccatgggcc

SEQ ID NO: 402706 - DNA, 4351 bp, Homo sapiens
gggcggggccgcgccgtccacaccggccgcagccggttttcgaggcgggcgccgagcggatccgcggcggaggttgagggacccccctcccccggccaccgcctccgctgagtctgccccctccccatccgcagggctcttccgtgggcggcggcttcgcgggcttggagttcgcgcggccgcaggagtcggagccgcgggcctcggacctgggggccccccggacgtggacgggggcggcggcggggccccggactccgtcggcgcacatccccgtcccagcgcagagagccaccccaggaaaagcccggctggacgaggtcatggctgccgctgcccttacaagcctgtccaccagccctctccttctgggggccccagttgcagccttcagcccagagcctggcctggagccctggaaggaggccctggtgcggcccccaggcagctacagcagcagcagcaacagtggagactggggatgggacctggccagtgaccagtcctctccgtccaccccgtcacccccactgccccccgaggcagcccactttctgtttggggagcccaccctgagaaaaaggaagagcccggcccaggtcatgttccagtgtctgtggaagagctgcgggaaggtgctgagcacggcgtcggcgatgcagagacacatccgcctggtgcacctggggaggcaggcagagcctgatcagagtgatgggctgcctgacgcccgcccgcctggagccgcagcccacggaggtcggagcctgcccacccgccttgtcctccaggatcggagtcaccctgaggaagccccgcggcgacgcgaagaagtgccggaaggtgtatggcatggagcgccgggacctctggtgcacagcctgccgctggaagaaagcctgccagcggttcctggactaagtccggctcgttcaagaacataagctaccaccttctccctccccaccccctccaggcccggggctgaaacagcccgaggacagccccaggggctggccttcaccagctgcagggtctgcttttacttggggtgggggggcggggctgaccctgaaccctcccccccgccaggtcggggaggggtcccaccactcaaagtgcctctaaagaaaccagctttttgcactaaagccaaaccacaccgctgtccccttagccccaagggccctgggggcagccaccctcccgcctgtcggcccgtagatttatcaagggtgttatgggcccagctttggggggccagtcccgatgcactttgaggggtgttggagaggggactcccccactcgcacttaactcaacggctctcgggccctggggctgtttttaccatgtttgtttttgaagctcaggtgtctcacgtctgggctgcaccaggcgaagagagaaattaaagatttgaggtttttccagaagctttgtctgcctctcgggaggaaggccgtggggctgggaccctgtggtgggcaagtgggtggagtctggcagctgcccacagagggccgagggtcacccgtcggccgccgccaccccaggcgaggccggaggaaggatcatctgagacgcaggaggcatctgctggagcagcaatttcccaatttattgaaagtgatcgctttgcaaggatgtctaagctaatcccgtcacagaaaggaaacgcacaggcgcctaggcagaaacttggagactcaccgcagaggccacgtgaacccacggccacagagaggcaggacggcagagccatgatttcccaccgagcgattacgagaacctcttcccccaatagtagacacatctccaatacaaacacaggtttataataagtaataggaagtcaatataatatagattatccccagaaaaaaatcaacaatcttcaaacactgccctttttttgtgtgttttgtttttgttgacaggttgaaagcatgttgaaaaaaataaatatttaagaaaagcacacacagcaccctcactacaagtagttctaaaagggctgcatacaaaacacaatataagatctaaaaaaaaccaccaccattaagtatggctttcttaagagtcgcacatgtcacagaatgagctaaaataagattacttcttttataatattgcaaaaagttccagtttttgcattttctcagttttttaaagaggaagatgtgcaaagttggaagcagtaagctgcgtcttctgagtcagttccctacgtagccctggcagtgtcctgtgtcccaaagctcagagagccccagtgtacaacctggtcaggatccagagcttgacagaaaaatcgtggtgtccctgccccctccccgcccccaaataacaccatccccaatggactgtatttcccactttggtgttgtaaacaccaaaatacaaacagacacaaacaaaaatacaaaatgtgaaatgtaatctacacatttttcctcttcataaaaaaatatttattagtttgaacatcgatttaaaaaaaaatcagtcacataaaaaaaacccttcatgacatgtcttttccctccacgcctcctgagatggacgtgctcacctgggcctcggaaatcccacactcttcagtcggcaaactgcgaacaagaacaggaaatctgccacgcagcaaacacttggggaggtcagtgggacactgttggttttagggaagaaaatgcccctgtagctccggcggggaaccccaaaacggtcagcaaaggcaggccacacggagtgagccggccagatggagcaggacatcctgagtgtggagggggaggcgggcccgggtcctgggcagggtggcctgagagcagggactggtacaaaacccagagacattggtgggtagcaaaggtctggtttccaaatgcattttgtaagaaagtcagtctgtttagaaaaagggtttaaaaatcaggggaaaggtacaaagttctgagaattctcaaagaggccggggtggggctggcctggggtgagggctggagggctccgctgcagctccctggtagccatgctctccccctgggggactcgtgccagagccacccaccttgctcggtaagagtgggcagggctcaccgctgaggggccagcgcttggcccggctcctatccccacactccgtgtgcagaaaaatcttggcctctttctccagctttgaggagcccacagcctccgagctgaggggtgtgtgtgatgacagctccagccagggcaccctgtcattggtagaaccgggggccaatgtcaaaaaacaaaagccgtgactcctgcgctgtacctggagtcctccatgtactcctccacaggacccccggccagccccagccctccccgagcagcagcggtcagggaagctggtgctctacctgacaatgtggggaaaagcctggtatacaggctagaaaaagagagtaaaaactctttccacgcagccctgaagctcagcactccggggggtcttcacacgggcaggtcctggagggaaggaggcggccaccgcgcccacctcccatctgaaggcacagcaccgcagtggtggcctgtgccagaggagggggtgaaggatggaatgtcctcatggtgagtgctgtcagaggcaggcctgaacgagaagacaggccgtggcaacggtcccgaggctgtgagtctaggcagcctgcctccgggacccccaaagccaggcggtgcaccacagcacacaccgtgggacctttgcttttcactcaggaaaagaaagaacatgtgagtgcttctgaaaacacagcaagaggacttgagcacaagctaaaggaaaaacaaccctatatagtttcttcgagtgagaaaaataatgccaaacaaaataattttatgtaactacctcgatatgtctctgactacttaaaaatttggttacccacgcggggaggtgtaagcagcacactgcagttaggaacaccgcctccagtgttagcagcaaaggcaggagcccagctccagcccgtccaggaggggtcagcaggagcggccgggctgggccatgggcagaacaggcacggcagagcccggggtggacgtggcagcccaaggctctccgaggaagtgcacacgactgagccgaggcccttgcagagggaacctggtgtggcctgaagtggtggggggcacagggctgagggtcccctcctggaaggagcccccagggctgtgtccacctaagatagcacctggagccctcggcctccagcagggtctgcagctgtgtcgtgtgttaagcaccaaagcccagaggtaagacggtggcagggctctctgtgcacctggattctacaggctgccatgggcc

SEQ ID NO: 402707 - DNA, 1433 bp, Homo sapiens
gggcggggccgcgccgtccacaccggccgcagccggttttcgaggcgggcgccgagcggatccgcggcggaggttgagggacccccctcccccggccaccgcctccgctgagtctgccccctccccatccgcagggctcttccgtgggcggcggcttcgcgggcttggagttcgcgcggccgcaggagtcggagccgcgggcctcggacctgggggccccccggacgtggacgggggcggcggcggggccccggactccgtcggcgcacatccccgtcccagcgcagagagccaccccaggaaaagcccggctggacgaggtcatggctgccgctgcccttacaagcctgtccaccagccctctccttctgggggccccagttgcagccttcagcccagagcctggcctggagccctggaaggaggccctggtgcggcccccaggcagctacagcagcagcagcaacagtggagactggggatgggacctggccagtgaccagtcctctccgtccaccccgtcacccccactgccccccgaggcagcccactttctgtttggggagcccaccctgagaaaaaggaagagcccggcccaggtcatgttccagtgtctgtggaagagctgcgggaaggtgctgagcacggcgtcggcgatgcagagacacatccgcctggtgcacctggggaggcaggcagagcctgatcagagtgatgggctgcctgacgcccgcccgcctggagccgcagcccacggaggtcggagcctgcccacccgccttgtcctccaggatcggagtcaccctgaggaagccccgcggcgacgcgaagaagtgccggaaggtgtatggcatggagcgccgggacctctggtgcacagcctgccgctggaagaaagcctgccagcggttcctggactaagtccggctcgttcaagaacataagctaccaccttctccctccccaccccctccaggcccggggctgaaacagcccgaggacagccccaggggctggccttcaccagctgcagggtctgcttttacttggggtgggggggcggggctgaccctgaaccctcccccccgccaggtcggggaggggtcccaccactcaaagtgcctctaaagaaaccagctttttgcactaaagccaaaccacaccgctgtccccttagccccaagggccctgggggcagccaccctcccgcctgtcggcccgtagatttatcaagggtgttatgggcccagctttggggggccagtcccgatgcactttgaggggtgttggagaggggactcccccactcgcacttaactcaacggctctcgggccctggggctgtttttaccatgtttgtttttgaagctcaggtgtctcacgtctgggctgcaccaggcgaagagagaaattaaagatttgaggtttttcca

SEQ ID NO: 402708 - DNA, 2617 bp, Homo sapiens
aattcaagcttctaacgatgtacggggccatgatttcccaccgagcgattacgagaacctcttcccccaatagtagacacatctccaatacaaacacaggtttataataagtaataggaagtcaatataatatagattatccccagaaaaaaatcaacaatcttcaaacactgccctttttttgtgtgttttgtttttgttgacaggttgaaagcatgttgaaaaaaataaatatttaagaaaagcacacacagcaccctcactacaagtagttctaaaagggctgcatacaaaacacaatataagatctaaaaaaaaccaccaccattaagtatggctttcttaagagtcgcacatgtcacagaatgagctaaaataagattacttcttttataatattgcaaaaagttccagtttttgcattttctcagttttttaaagaggaagatgtgcaaagttggaagcagtaagctgcgtcttctgagtcagttccctacgtagccctggcagtgtcctgtgtcccaaagctcagagagccccagtgtacaacctggtcaggatccagagcttgacagaaaaatcgtggtgtccctgccccctccccgcccccaaataacaccatccccaatggactgtatttcccactttggtgttgtaaacaccaaaatacaaacagacacaaacaaaaatacaaaatgtgaaatgtaatctacacatttttcctcttcataaaaaaatatttattagtttgaacatcgatttaaaaaaaaatcagtcacataaaaaaaacccttcatgacatgtcttttccctccacgcctcctgagatggacgtgctcacctgggcctcggaaatcccacactcttcagtcggcaaactgcgaacaagaacaggaaatctgccacgcagcaaacacttggggaggtcagtgggacactgttggttttagggaagaaaatgcccctgtagctccggcggggaaccccaaaacggtcagcaaaggcaggccacacggagtgagccggccagatggagcaggacatcctgagtgtggagggggaggcgggcccgggtcctgggcagggtggcctgagagcagggactggtacaaaacccagagacattggtgggtagcaaaggtctggtttccaaatgcattttgtaagaaagtcagtctgtttagaaaaagggtttaaaaatcaggggaaaggtacaaagttctgagaattctcaaagaggccggggtggggctggcctggggtgagggctggagggctccgctgcagctccctggtagccatgctctccccctgggggactcgtgccagagccacccaccttgctcggtaagagtgggcagggctcaccgctgaggggccagcgcttggcccggctcctatccccacactccgtgtgcagaaaaatcttggcctctttctccagctttgaggagcccacagcctccgagctgaggggtgtgtgtgatgacagctccagccagggcaccctgtcattggtagaaccgggggccaatgtcaaaaaacaaaagccgtgactcctgcgctgtacctggagtcctccatgtactcctccacaggacccccggccagccccagccctccccgagcagcagcggtcagggaagctggtgctctacctgacaatgtggggaaaagcctggtatacaggctagaaaaagagagtaaaaactctttccacgcagccctgaagctcagcactccggggggtcttcacacgggcaggtcctggagggaaggaggcggccaccgcgcccacctcccatctgaaggcacagcaccgcagtggtggcctgtgccagaggagggggtgaaggatggaatgtcctcatggtgagtgctgtcagaggcaggcctgaacgagaagacaggccgtggcaacggtcccgaggctgtgagtctaggcagcctgcctccgggacccccaaagccaggcggtgcaccacagcacacaccgtgggacctttgcttttcactcaggaaaagaaagaacatgtgagtgcttctgaaaacacagcaagaggacttgagcacaagctaaaggaaaaacaaccctatatagtttcttcgagtgagaaaaataatgccaaacaaaataattttatgtaactacctcgatatgtctctgactacttaaaaatttggttacccacgcggggaggtgtaagcagcacactgcagttaggaacaccgcctccagtgttagcagcaaaggcaggagcccagctccagcccgtccaggaggggtcagcaggagcggccgggctgggccatgggcagaacaggcacggcagagcccggggtggacgtggcagcccaaggctctccgaggaagtgcacacgactgagccgaggcccttgcagagggaacctggtgtggcctgaagtggtggggggcacagggctgagggtcccctcctggaaggagcccccagggctgtgtccacctaagatagcacctggagccctcggcctccagcagggtctgcagctgtgtcgtgtgttaagcaccaaagcccagaggtaagacggtggcagggctctctgtgcacctggattctacaggctgccatgggcc

SEQ ID NO: 402709 - DNA, 2143 bp, Homo sapiens
gggttgtaaggaacggaggtgagttgttaaaagaggcatataagggagaagtgggaaaagggagaaataggaggggaaagaaaaaaaagttggtagattaaaagggaggggaaagaggggatagaagtaatgatatgaggagatggagaagggaggagggagagaaaggggaggagagaagggtggagagagaggaaagaatgatttgtatttgtttttttaggtaatattatgtatttttatttttcctcttcataaaaaaatatttattagtttgaacatcgatttaaaaaaaaatcagtcacataaaaaaaacccttcatgacatgtcttttccctccacgcctcctgagatggacgtgctcacctgggcctcggaaatcccacactcttcagtcggcaaactgcgaacaagaacaggaaatctgccacgcagcaaacacttggggaggtcagtgggacactgttggttttagggaagaaaatgcccctgtagctccggcggggaaccccaaaacggtcagcaaaggcaggccacacggagtgagccggccagatggagcaggacatcctgagtgtggagggggaggcgggcccgggtcctgggcagggtggcctgagagcagggactggtacaaaacccagagacattggtgggtagcaaaggtctggtttccaaatgcattttgtaagaaagtcagtctgtttagaaaaagggtttaaaaatcaggggaaaggtacaaagttctgagaattctcaaagaggccggggtggggctggcctggggtgagggctggagggctccgctgcagctccctggtagccatgctctccccctgggggactcgtgccagagccacccaccttgctcggtaagagtgggcagggctcaccgctgaggggccagcgcttggcccggctcctatccccacactccgtgtgcagaaaaatcttggcctctttctccagctttgaggagcccacagcctccgagctgaggggtgtgtgtgatgacagctccagccagggcaccctgtcattggtagaaccgggggccaatgtcaaaaaacaaaagccgtgactcctgcgctgtacctggagtcctccatgtactcctccacaggacccccggccagccccagccctccccgagcagcagcggtcagggaagctggtgctctacctgacaatgtggggaaaagcctggtatacaggctagaaaaagagagtaaaaactctttccacgcagccctgaagctcagcactccggggggtcttcacacgggcaggtcctggagggaaggaggcggccaccgcgcccacctcccatctgaaggcacagcaccgcagtggtggcctgtgccagaggagggggtgaaggatggaatgtcctcatggtgagtgctgtcagaggcaggcctgaacgagaagacaggccgtggcaacggtcccgaggctgtgagtctaggcagcctgcctccgggacccccaaagccaggcggtgcaccacagcacacaccgtgggacctttgcttttcactcaggaaaagaaagaacatgtgagtgcttctgaaaacacagcaagaggacttgagcacaagctaaaggaaaaacaaccctatatagtttcttcgagtgagaaaaataatgccaaacaaaataattttatgtaactacctcgatatgtctctgactacttaaaaatttggttacccacgcggggaggtgtaagcagcacactgcagttaggaacaccgcctccagtgttagcagcaaaggcaggagcccagctccagcccgtccaggaggggtcagcaggagcggccgggctgggccatgggcagaacaggcacggcagagcccggggtggacgtggcagcccaaggctctccgaggaagtgcacacgactgagccgaggcccttgcagagggaacctggtgtggcctgaagtggtggggggcacagggctgagggtcccctcctggaaggagcccccagggctgtgtccacctaagatagcacctggagccctcggcctccagcagggtctgcagctgtgtcgtgtgttaagcaccaaagcccagaggtaagacggtggcagggctctctgtgcacctggattctacaggctgccatgggcc

SEQ ID NO: 402710 - DNA, 965 bp, Homo sapiens
gggcggggccgcgccgtccacaccggccgcagccggttttcgaggcgggcgccgagcggatccgcggcggaggttgagggacccccctcccccggccaccgcctccgctgagtctgccccctccccatccgcagggctcttccgtgggcggcggcttcgcgggcttggagttcgcgcggccgcaggagtcggagccgcgggcctcggacctgggggccccccggacgtggacgggggcggcggcggggccccggactccgtcggcgcacatccccgtcccagcgcagaggtgagcgggaggcccggtgcctcgggactcggtgtgcgcaggggcggtgggtggggtgcggagacaccggccccgacggaggccaggtcagggccccaggtttgtaattaccagccacccccaagctcttcagccctggaggagctgagcagaaatgatcgatgactgggagtccctacacctccctccaccgcagttcctcggggctagagctcagaacccggagcgggtggctgtgcgtctctgtgcagaagaggctgcgcggtcggcatggggcgactgtccaggaatccctggggctcctgaccgccacctcccaacccctgccaggccggacacctcggtctggctgccagggcaggggcgggccctggcctggctcgctggggcctggggagctgcccgtgcttccagcccagtctccccctggctgctgccggctgctggccactcccacctcccaggcctggcgtgaggcccacagctgctgttgcacaaccctggttaatgtgtgatggggggaggcctgggcctggcccgcccctctgccagggcttcagacccctgcccagccccagtatctgaaggaaccacagtggagccaagcccgcgatgtggagaactcaggcttcaggagaccctggccctgctcctggcggctccgggtggctttcag

SEQ ID NO: 402711 - DNA, 4649 bp, Homo sapiens
cgcgtcctgagagtcagccctcgccgctgcagcctcggcgcccggccggccggccatggagcgccccccgccccgcgccgccggccgggaccccagtgcgctgcgggccgaggcgccgtggctgcgcgcggagggtccggggccgcgcgccgcgcccgtgacggtgcccacgccgccgcagggctcttccgtgggcggcggcttcgcgggcttggagttcgcgcggccgcaggagtcggagccgcgggcctcggacctgggggccccccggacgtggacgggggcggcggcggggccccggactccgtcggcgcacatccccgtcccagcgcagagagccaccccaggaaaagcccggctggacgaggtcatggctgccgctgcccttacaagcctgtccaccagccctctccttctgggggccccagttgcagccttcagcccagagcctggcctggagccctggaaggaggccctggtgcggcccccaggcagctacagcagcagcagcaacagtggagactggggatgggacctggccagtgaccagtcctctccgtccaccccgtcacccccactgccccccgaggcagcccactttctgtttggggagcccaccctgagaaaaaggaagagcccggcccaggtcatgttccagtgtctgtggaagagctgcgggaaggtgctgagcacggcgtcggcgatgcagagacacatccgcctggtgcacctggggaggcaggcagagcctgatcagagtgatggtgaggaggacttctactacacagagctggatgttggtgtggacacgctgaccgacgggctgtccagcctgactccagtgtcccccacggcctccatgccgcctgccttcccccgcctggagctgccagagctgctggagcccccagccctgcctagtcccctgcggccgcctgccccgcccctgcccccgccccctgtcctgagcaccgttgctaacccccagtcctgtcacagtgaccgtgtctaccagggctgcctgacgcccgcccgcctggagccgcagcccacggaggtcggagcctgcccacccgccttgtcctccaggatcggagtcaccctgaggaagccccgcggcgacgcgaagaagtgccggaaggtgtatggcatggagcgccgggacctctggtgcacagcctgccgctggaagaaagcctgccagcggttcctggactaagtccggctcgttcaagaacataagctaccaccttctccctccccaccccctccaggcccggggctgaaacagcccgaggacagccccaggggctggccttcaccagctgcagggtctgcttttacttggggtgggggggcggggctgaccctgaaccctcccccccgccaggtcggggaggggtcccaccactcaaagtgcctctaaagaaaccagctttttgcactaaagccaaaccacaccgctgtccccttagccccaagggccctgggggcagccaccctcccgcctgtcggcccgtagatttatcaagggtgttatgggcccagctttggggggccagtcccgatgcactttgaggggtgttggagaggggactcccccactcgcacttaactcaacggctctcgggccctggggctgtttttaccatgtttgtttttgaagctcaggtgtctcacgtctgggctgcaccaggcgaagagagaaattaaagatttgaggtttttccagaagctttgtctgcctctcgggaggaaggccgtggggctgggaccctgtggtgggcaagtgggtggagtctggcagctgcccacagagggccgagggtcacccgtcggccgccgccaccccaggcgaggccggaggaaggatcatctgagacgcaggaggcatctgctggagcagcaatttcccaatttattgaaagtgatcgctttgcaaggatgtctaagctaatcccgtcacagaaaggaaacgcacaggcgcctaggcagaaacttggagactcaccgcagaggccacgtgaacccacggccacagagaggcaggacggcagagccatgatttcccaccgagcgattacgagaacctcttcccccaatagtagacacatctccaatacaaacacaggtttataataagtaataggaagtcaatataatatagattatccccagaaaaaaatcaacaatcttcaaacactgccctttttttgtgtgttttgtttttgttgacaggttgaaagcatgttgaaaaaaataaatatttaagaaaagcacacacagcaccctcactacaagtagttctaaaagggctgcatacaaaacacaatataagatctaaaaaaaaccaccaccattaagtatggctttcttaagagtcgcacatgtcacagaatgagctaaaataagattacttcttttataatattgcaaaaagttccagtttttgcattttctcagttttttaaagaggaagatgtgcaaagttggaagcagtaagctgcgtcttctgagtcagttccctacgtagccctggcagtgtcctgtgtcccaaagctcagagagccccagtgtacaacctggtcaggatccagagcttgacagaaaaatcgtggtgtccctgccccctccccgcccccaaataacaccatccccaatggactgtatttcccactttggtgttgtaaacaccaaaatacaaacagacacaaacaaaaatacaaaatgtgaaatgtaatctacacatttttcctcttcataaaaaaatatttattagtttgaacatcgatttaaaaaaaaatcagtcacataaaaaaaacccttcatgacatgtcttttccctccacgcctcctgagatggacgtgctcacctgggcctcggaaatcccacactcttcagtcggcaaactgcgaacaagaacaggaaatctgccacgcagcaaacacttggggaggtcagtgggacactgttggttttagggaagaaaatgcccctgtagctccggcggggaaccccaaaacggtcagcaaaggcaggccacacggagtgagccggccagatggagcaggacatcctgagtgtggagggggaggcgggcccgggtcctgggcagggtggcctgagagcagggactggtacaaaacccagagacattggtgggtagcaaaggtctggtttccaaatgcattttgtaagaaagtcagtctgtttagaaaaagggtttaaaaatcaggggaaaggtacaaagttctgagaattctcaaagaggccggggtggggctggcctggggtgagggctggagggctccgctgcagctccctggtagccatgctctccccctgggggactcgtgccagagccacccaccttgctcggtaagagtgggcagggctcaccgctgaggggccagcgcttggcccggctcctatccccacactccgtgtgcagaaaaatcttggcctctttctccagctttgaggagcccacagcctccgagctgaggggtgtgtgtgatgacagctccagccagggcaccctgtcattggtagaaccgggggccaatgtcaaaaaacaaaagccgtgactcctgcgctgtacctggagtcctccatgtactcctccacaggacccccggccagccccagccctccccgagcagcagcggtcagggaagctggtgctctacctgacaatgtggggaaaagcctggtatacaggctagaaaaagagagtaaaaactctttccacgcagccctgaagctcagcactccggggggtcttcacacgggcaggtcctggagggaaggaggcggccaccgcgcccacctcccatctgaaggcacagcaccgcagtggtggcctgtgccagaggagggggtgaaggatggaatgtcctcatggtgagtgctgtcagaggcaggcctgaacgagaagacaggccgtggcaacggtcccgaggctgtgagtctaggcagcctgcctccgggacccccaaagccaggcggtgcaccacagcacacaccgtgggacctttgcttttcactcaggaaaagaaagaacatgtgagtgcttctgaaaacacagcaagaggacttgagcacaagctaaaggaaaaacaaccctatatagtttcttcgagtgagaaaaataatgccaaacaaaataattttatgtaactacctcgatatgtctctgactacttaaaaatttggttacccacgcggggaggtgtaagcagcacactgcagttaggaacaccgcctccagtgttagcagcaaaggcaggagcccagctccagcccgtccaggaggggtcagcaggagcggccgggctgggccatgggcagaacaggcacggcagagcccggggtggacgtggcagcccaaggctctccgaggaagtgcacacgactgagccgaggcccttgcagagggaacctggtgtggcctgaagtggtggggggcacagggctgagggtcccctcctggaaggagcccccagggctgtgtccacctaagatagcacctggagccctcggcctccagcagggtctgcagctgtgtcgtgtgttaagcaccaaagcccagaggtaagacggtggcagggctctctgtgcacctggattctacaggctgccatgggcc

SEQ ID NO: 402712 - DNA, 4602 bp, Homo sapiens
gggcggggccgcgccgtccacaccggccgcagccggttttcgaggcgggcgccgagcggatccgcggcggaggttgagggacccccctcccccggccaccgcctccgctgagtctgccccctccccatccgcagggctcttccgtgggcggcggcttcgcgggcttggagttcgcgcggccgcaggagtcggagccgcgggcctcggacctgggggccccccggacgtggacgggggcggcggcggggccccggactccgtcggcgcacatccccgtcccagcgcagagagccaccccaggaaaagcccggctggacgaggtcatggctgccgctgcccttacaagcctgtccaccagccctctccttctgggggccccagttgcagccttcagcccagagcctggcctggagccctggaaggaggccctggtgcggcccccaggcagctacagcagcagcagcaacagtggagactggggatgggacctggccagtgaccagtcctctccgtccaccccgtcacccccactgccccccgaggcagcccactttctgtttggggagcccaccctgagaaaaaggaagagcccggcccaggtcatgttccagtgtctgtggaagagctgcgggaaggtgctgagcacggcgtcggcgatgcagagacacatccgcctggtgcacctggggaggcaggcagagcctgatcagagtgatggtgaggaggacttctactacacagagctggatgttggtgtggacacgctgaccgacgggctgtccagcctgactccagtgtcccccacggcctccatgccgcctgccttcccccgcctggagctgccagagctgctggagcccccagccctgcctagtcccctgcggccgcctgccccgcccctgcccccgccccctgtcctgagcaccgttgctaacccccagtcctgtcacagtgaccgtgtctaccagggctgcctgacgcccgcccgcctggagccgcagcccacggaggtcggagcctgcccacccgccttgtcctccaggatcggagtcaccctgaggaagccccgcggcgacgcgaagaagtgccggaaggtgtatggcatggagcgccgggacctctggtgcacagcctgccgctggaagaaagcctgccagcggttcctggactaagtccggctcgttcaagaacataagctaccaccttctccctccccaccccctccaggcccggggctgaaacagcccgaggacagccccaggggctggccttcaccagctgcagggtctgcttttacttggggtgggggggcggggctgaccctgaaccctcccccccgccaggtcggggaggggtcccaccactcaaagtgcctctaaagaaaccagctttttgcactaaagccaaaccacaccgctgtccccttagccccaagggccctgggggcagccaccctcccgcctgtcggcccgtagatttatcaagggtgttatgggcccagctttggggggccagtcccgatgcactttgaggggtgttggagaggggactcccccactcgcacttaactcaacggctctcgggccctggggctgtttttaccatgtttgtttttgaagctcaggtgtctcacgtctgggctgcaccaggcgaagagagaaattaaagatttgaggtttttccagaagctttgtctgcctctcgggaggaaggccgtggggctgggaccctgtggtgggcaagtgggtggagtctggcagctgcccacagagggccgagggtcacccgtcggccgccgccaccccaggcgaggccggaggaaggatcatctgagacgcaggaggcatctgctggagcagcaatttcccaatttattgaaagtgatcgctttgcaaggatgtctaagctaatcccgtcacagaaaggaaacgcacaggcgcctaggcagaaacttggagactcaccgcagaggccacgtgaacccacggccacagagaggcaggacggcagagccatgatttcccaccgagcgattacgagaacctcttcccccaatagtagacacatctccaatacaaacacaggtttataataagtaataggaagtcaatataatatagattatccccagaaaaaaatcaacaatcttcaaacactgccctttttttgtgtgttttgtttttgttgacaggttgaaagcatgttgaaaaaaataaatatttaagaaaagcacacacagcaccctcactacaagtagttctaaaagggctgcatacaaaacacaatataagatctaaaaaaaaccaccaccattaagtatggctttcttaagagtcgcacatgtcacagaatgagctaaaataagattacttcttttataatattgcaaaaagttccagtttttgcattttctcagttttttaaagaggaagatgtgcaaagttggaagcagtaagctgcgtcttctgagtcagttccctacgtagccctggcagtgtcctgtgtcccaaagctcagagagccccagtgtacaacctggtcaggatccagagcttgacagaaaaatcgtggtgtccctgccccctccccgcccccaaataacaccatccccaatggactgtatttcccactttggtgttgtaaacaccaaaatacaaacagacacaaacaaaaatacaaaatgtgaaatgtaatctacacatttttcctcttcataaaaaaatatttattagtttgaacatcgatttaaaaaaaaatcagtcacataaaaaaaacccttcatgacatgtcttttccctccacgcctcctgagatggacgtgctcacctgggcctcggaaatcccacactcttcagtcggcaaactgcgaacaagaacaggaaatctgccacgcagcaaacacttggggaggtcagtgggacactgttggttttagggaagaaaatgcccctgtagctccggcggggaaccccaaaacggtcagcaaaggcaggccacacggagtgagccggccagatggagcaggacatcctgagtgtggagggggaggcgggcccgggtcctgggcagggtggcctgagagcagggactggtacaaaacccagagacattggtgggtagcaaaggtctggtttccaaatgcattttgtaagaaagtcagtctgtttagaaaaagggtttaaaaatcaggggaaaggtacaaagttctgagaattctcaaagaggccggggtggggctggcctggggtgagggctggagggctccgctgcagctccctggtagccatgctctccccctgggggactcgtgccagagccacccaccttgctcggtaagagtgggcagggctcaccgctgaggggccagcgcttggcccggctcctatccccacactccgtgtgcagaaaaatcttggcctctttctccagctttgaggagcccacagcctccgagctgaggggtgtgtgtgatgacagctccagccagggcaccctgtcattggtagaaccgggggccaatgtcaaaaaacaaaagccgtgactcctgcgctgtacctggagtcctccatgtactcctccacaggacccccggccagccccagccctccccgagcagcagcggtcagggaagctggtgctctacctgacaatgtggggaaaagcctggtatacaggctagaaaaagagagtaaaaactctttccacgcagccctgaagctcagcactccggggggtcttcacacgggcaggtcctggagggaaggaggcggccaccgcgcccacctcccatctgaaggcacagcaccgcagtggtggcctgtgccagaggagggggtgaaggatggaatgtcctcatggtgagtgctgtcagaggcaggcctgaacgagaagacaggccgtggcaacggtcccgaggctgtgagtctaggcagcctgcctccgggacccccaaagccaggcggtgcaccacagcacacaccgtgggacctttgcttttcactcaggaaaagaaagaacatgtgagtgcttctgaaaacacagcaagaggacttgagcacaagctaaaggaaaaacaaccctatatagtttcttcgagtgagaaaaataatgccaaacaaaataattttatgtaactacctcgatatgtctctgactacttaaaaatttggttacccacgcggggaggtgtaagcagcacactgcagttaggaacaccgcctccagtgttagcagcaaaggcaggagcccagctccagcccgtccaggaggggtcagcaggagcggccgggctgggccatgggcagaacaggcacggcagagcccggggtggacgtggcagcccaaggctctccgaggaagtgcacacgactgagccgaggcccttgcagagggaacctggtgtggcctgaagtggtggggggcacagggctgagggtcccctcctggaaggagcccccagggctgtgtccacctaagatagcacctggagccctcggcctccagcagggtctgcagctgtgtcgtgtgttaagcaccaaagcccagaggtaagacggtggcagggctctctgtgcacctggattctacaggctgccatgggcc

SEQ ID NO: 402713 - DNA, 1684 bp, Homo sapiens
gggcggggccgcgccgtccacaccggccgcagccggttttcgaggcgggcgccgagcggatccgcggcggaggttgagggacccccctcccccggccaccgcctccgctgagtctgccccctccccatccgcagggctcttccgtgggcggcggcttcgcgggcttggagttcgcgcggccgcaggagtcggagccgcgggcctcggacctgggggccccccggacgtggacgggggcggcggcggggccccggactccgtcggcgcacatccccgtcccagcgcagagagccaccccaggaaaagcccggctggacgaggtcatggctgccgctgcccttacaagcctgtccaccagccctctccttctgggggccccagttgcagccttcagcccagagcctggcctggagccctggaaggaggccctggtgcggcccccaggcagctacagcagcagcagcaacagtggagactggggatgggacctggccagtgaccagtcctctccgtccaccccgtcacccccactgccccccgaggcagcccactttctgtttggggagcccaccctgagaaaaaggaagagcccggcccaggtcatgttccagtgtctgtggaagagctgcgggaaggtgctgagcacggcgtcggcgatgcagagacacatccgcctggtgcacctggggaggcaggcagagcctgatcagagtgatggtgaggaggacttctactacacagagctggatgttggtgtggacacgctgaccgacgggctgtccagcctgactccagtgtcccccacggcctccatgccgcctgccttcccccgcctggagctgccagagctgctggagcccccagccctgcctagtcccctgcggccgcctgccccgcccctgcccccgccccctgtcctgagcaccgttgctaacccccagtcctgtcacagtgaccgtgtctaccagggctgcctgacgcccgcccgcctggagccgcagcccacggaggtcggagcctgcccacccgccttgtcctccaggatcggagtcaccctgaggaagccccgcggcgacgcgaagaagtgccggaaggtgtatggcatggagcgccgggacctctggtgcacagcctgccgctggaagaaagcctgccagcggttcctggactaagtccggctcgttcaagaacataagctaccaccttctccctccccaccccctccaggcccggggctgaaacagcccgaggacagccccaggggctggccttcaccagctgcagggtctgcttttacttggggtgggggggcggggctgaccctgaaccctcccccccgccaggtcggggaggggtcccaccactcaaagtgcctctaaagaaaccagctttttgcactaaagccaaaccacaccgctgtccccttagccccaagggccctgggggcagccaccctcccgcctgtcggcccgtagatttatcaagggtgttatgggcccagctttggggggccagtcccgatgcactttgaggggtgttggagaggggactcccccactcgcacttaactcaacggctctcgggccctggggctgtttttaccatgtttgtttttgaagctcaggtgtctcacgtctgggctgcaccaggcgaagagagaaattaaagatttgaggtttttcca

SEQ ID NO: 402714 - DNA, 1167 bp, Homo sapiens
gggcggggccgcgccgtccacaccggccgcagccggttttcgaggcgggcgccgagcggatccgcggcggaggttgagggacccccctcccccggccaccgcctccgctgagtctgccccctccccatccgcagggctcttccgtgggcggcggcttcgcgggcttggagttcgcgcggccgcaggagtcggagccgcgggcctcggacctgggggccccccggacgtggacgggggcggcggcggggccccggactccgtcggcgcacatccccgtcccagcgcagagagccaccccaggaaaagcccggctggacgaggtcatggctgccgctgcccttacaagcctgtccaccagccctctccttctgggggccccagttgcagccttcagcccagagcctggcctggagccctggaaggaggccctggtgcggcccccaggcagctacagcagcagcagcaacagtggagactggggatgggacctggccagtgaccagtcctctccgtccaccccgtcacccccactgccccccgaggcagcccactttctgtttggggagcccaccctgagaaaaaggaagagcccggcccaggtcatgttccagtgtctgtggaagagctgcgggaaggtgctgagcacggcgtcggcgatgcagagacacatccgcctggtgcacctggggaggcaggcagagcctgatcagagtgatggtgaggaggacttctactacacagagctggatgttggtgtggacacgctgaccgacgggctgtccagcctgactccagtgtcccccacggcctccatgccgcctgccttcccccgcctggagctgccagagctgctggagcccccagccctgcctagtcccctgcggccgcctgccccgcccctgcccccgccccctgtcctgagcaccgttgctaacccccagtcctgtcacagtgaccgtgtctaccagggctgcctgacgcccgcccgcctggagccgcagcccacggaggtcggagcctgcccacccgcctttcccccactcgcacttaactcaacggctctcgggccctggggctgtttttaccatgtttgtttttgaagctcaggtgtctcacgtctgggctgcaccaggcgaagagagaaattaaagatttgaggtttttcca

SEQ ID NO: 402715 - DNA, 275 bp, Homo sapiens
cttagctttgtttacaggtttgtttaaatacacaagtgagatggtgaaactaattgtatctgtgtgtgcttcccctattttcaaatccgatattgctaaaatctgatggaacaaaatattcccactgaaagtgtttcggtggctcacgccattctcctgcctcagcctcctgagtagctgagactacaggcgcccgccaaccacgcccggctaattgttttgtatttttagtagagacagggttaaaccgtgttagccaggacggtcttgatctc

SEQ ID NO: 402716 - DNA, 388 bp, Homo sapiens
cggcctcatgactttatacttcgcggcagagccatccccattaaacagggcatgctcttaaagcgaagtgggaaatggctgaagacatggaaaaagaaatatgtcaccctgtgttccaatggcgtgctcacctattattcaagcttaggtgattatatgaagaatattcataaaaaagagattgaccttcggacatctaccatcaaagtcccaggaaagtggccatccctagccacatcggcctgcgcacccatctccagctctaaaagcaatggcctatccaaggacatgagacatcgggctgggtgactccatatgcttcagccccagtatctccagcaccaccagccccaagctcaacctgcccccctcccctcatgccaataaa

SEQ ID NO: 402717 - DNA, 557 bp, Homo sapiens
gcaccagccaggaggacctttatttcagtgttcctcccactgccaacacacccacgcccatttgcaagcagtccatgggctggtccaacctgtttacatctgagaaagggagtgacccagacaaagggaggaaagccctggagagtcacgctgacaccatcgggagcggcagagccatccccattaaacagggcatgctcttaaagcgaagtgggaaatggctgaagacatggaaaaagaaatatgtcaccctgtgttccaatggcgtgctcacctattattcaagcttaggtgattatatgaagaatattcataaaaaagagattgaccttcggacatctaccatcaaagtcccaggaaagtggccatccctagccacatcggcctgcgcacccatctccagctctaaaagcaatggcctatccaaggacatggaagctctgcatatgtcagccaattcagacatcgggctgggtgactccatatgcttcagccccagtatctccagcaccaccagccccaagctcaacctgcccccctcccctcatgccaataaa

SEQ ID NO: 402718 - DNA, 564 bp, Homo sapiens
gcaccagccaggaggacctttatttcagtgttcctcccactgccaacacacccacgcccatttgcaagcagtccatgggctggtccaacctgtttacatctgagaaagggagtgacccagacaaagggaggaaagccctggagagtcacgctgacaccatcgggagcggcagagccatccccattaaacagggcatgctcttaaagcgaagtgggaaatggctgaagacatggaaaaagaaatatgtcaccctgtgttccaatggcgtgctcacctattattcaagcttaggtgattatatgaagaatattcataaaaaagagattgaccttcggacatctaccatcaaagtcccaggaaagtggccatccctagccacatcggcctgcgcacccatctccagctctaaaagcaatggcctatccaaggacatggaagctctgcatatgtcagccaattcccacttcgctttaagagcatgccctgtgttccaatgacgtgctcaccgcgcggtgacgcattttccagctaaacaggatgtgacgagacttacctatctacaca

SEQ ID NO: 402719 - DNA, 409 bp, Homo sapiens
tctcaagtcccctttccagtttcccccgctccctttctctcctttctaatagaagagaggagtcaggtgaggagaagagaggttggtgtccaggggagatggacaaatctctttctttggatggaacctctctttcttcctcctctgttttggattgtcagttaagacccaggggcaagctgagtgtttctttcaggagaggaaaaaagctaaagttaacatgggaaaaagagcacgagaagtacatggcctccatgaaaatcagatttctttaaaaaaagaaatcgtttccttcctcaatacctagtggggctcagctcccagagacaagcggtaaatgtgcaggatgaaaagctcaaggtggaggaaggtttgctcctaagtcagagactgggaggtccccgaggca

SEQ ID NO: 402720 - DNA, 450 bp, Homo sapiens
tccatctaaacctagaaaagccttctggggaataaatcaataattctgttaggtgttttgaaactatgattttaaaattgaaatttgaaattgaaaagtgaaatttgattgttgaaccattgatttgatttaaatttttgcttgggaaatataagaggtgaaaaaacgtggggcaaagtaggtaatttaaaatttttagttaaaatctggtcactgtctagaatgggcttcttttaggacttcacataattttctttaacacagatctgtaggcccaggatttctagcttgtatgagtgccttaatattttaaactgataatcttggaccagccatagaaacccctcagatgtctcagtttaaaatataaattatttggcttttaattggaaaatattttattttagtattctttttttgagatggaatctctctctctccccaaggctg

SEQ ID NO: 402721 - DNA, 1644 bp, Homo sapiens
gggcacagtcacatacccaggatacaagacactgcagactcccgagagacataacacagaattgcaccatgccaaactacaaactcacttattttaatatgagggggagagcagaaattattcgttacatatttgcttatttggacatacagtatgaagaccacagaatagaacaagctgactggcctgaaatcaaatcaactctcccatttggaaaaatccccattttggaagttgatggacttactcttcaccagagcctagcaatagcaagatatttgaccaaaaacacagatttggctggaaacacagaaatggaacaatgtcatgttgatgctattgtggacactctggatgatttcatgtcatgttttccttgggcagagaaaaagcaagatgtgaaagagcagatgttcaatgagctgctcacgtataatgcgcctcatcttatgcaagacttggacacatatttaggggggagagaatggcttattggtaactctgtaacttgggcagacttctactgggagatttgcagtaccacacttttggtctttaagcctgacctgttagacaaccatccaaggctggtgactttacggaagaaagtccaagccattcctgccgtcgctaactggataaaacgaaggccccaaaccaaactctagctgatccatgttgccttcaagtttgtttttctcgggggcatctctctcatcagataagacagctacatcagcctgccagataatccacatgctccctccccagctccactaagattttcactttagccatattctgatttttaaaaaggaaaataaaaacaaatctttcttcagtatctttttctttcagaatagcttctcatcatttacaattacagaaaaatagtatgtaatacaggcagaccttgctttgcacaggttctaacatgcacgaattgcagtcataatggtttagcaacaccattcttcccctcccccaaaatgttttggacttcagctaccacaattacctgtaattgcataaaacacaaactttgctagtagctctccagttcacatatcgctgtgtaaataacctatgtacatcatgaccaatgaccagtcacttctatcaaagactgccagaggtcactgcacatctgttattcctgcatagatagcaaagtgtgtagttgtattgctattgcctgcttgtggcccagtgataaatccctttgacattttacaaaaatgaatcaaaagagggaactccccaacaaagatgaaagtgcagcaaaggaacaaaaactgataatcctggaatgaaattcaaactgaatataaagagttatcgagaaaagagctgactgtgggaatctgacacggctcaaaaggctctagatatgcagccagagaaacttgtaaagatgaatttactgacatgaataaagttgttgtgatgagaaaaatgtagataccccagagatcaagagaaggagaagacaagccacagacttggagaaaatacttgtaaaacatgtatctgacaaaagactattattcaaaattatatagaactcataaaactcggctgactctcttttcggactcagcccacctgcacccaggtgaaataaacagccacgttgctcacaca

SEQ ID NO: 402722 - DNA, 511 bp, Homo sapiens
ttttttactattattatattttttatttgttatcaatctagaacagagcagatgttcaatgagctgctcacgtataatgcgcctcatcttatgcaagacttggacacatatttaggggggagagaatggcttattggtaactctgtaacttgggcagacttctactgggagatttgcagtaccacacttttggtctttaagcctgacctgttagacaaccatccaaggctggtgactttacggaagaaagtccaagccattcctgccgtcgctaactggataaaacgaaggccccaaaccaaactctagctgatccatgttgccttcaagtttgtttttctcgggggcatctctctcatcagataagacagctacatcagcctgccagataatccacatgctccctccccagctccactaagattttcactttagccatattctgatttttaaaaaggaaaataaaaacaaatctttcttcataaaaaaaaaatcggtcttgttggcctta

SEQ ID NO: 402723 - DNA, 674 bp, Homo sapiens
ggcatctctagagggctcttaaaataatccctccctttttctttttccagaattgcaccatgccaaactacaaactcacttattttaatatgagggggagagcagaaattattcgttacatatttgcttatttggacatacagtatgaagaccacagaatagaacaagctgactggcctgaaatcaaatcaagtaagtagcaaaaataataaatgtaggaaaaatatgctttcagaaccttttgtttttcctcagggaaatgaactaaataaatgctgtgtgatcaagcaaatttcctattagaggtgaaaacacaaaacttacagaaagagaatataaaggtaaaccagtataaagctttagcagacaatatgagctgaaataaacatgcgacattgtttgtttgtttgtttttctattttgtcactgggatagctgaagtgcacagagtttaggtaatttttccagtttcacgaccctagcaagtagaactgagtttcaaacccaggtcagtttaataccaggctcaagctatttgcactagacaatgccaaaacaacactactatgataacaggcatattaacaatgaattgccacagcctttggaagcatgagctccttaaaagtcattgcccttataaccattctttttcttagcagagacctcttctc

SEQ ID NO: 402724 - DNA, 1266 bp, Homo sapiens
  misc_feature (1)..(1): n is a, c, g, or t
  misc_feature (11)..(12): n is a, c, g, or t
  misc_feature (24)..(24): n is a, c, g, or t
ntgcagcaaannttcaattcaggngagagcagatgttcaatgagctgctcacgtataatgcgcctcatcttatgcaagacttggacacatatttaggggggagagaatggcttattggtaactctgtaacttgggcagacttctactgggagatttgcagtaccacacttttggtctttaagcctgacctgttagacaaccatccaaggctggtgactttacggaagaaagtccaagccattcctgccgtcgctaactggataaaacgaaggccccaaaccaaactctagctgatccatgttgccttcaagtttgtttttctcgggggcatctctctcatcagataagacagctacatcagcctgccagataatccacatgctccctccccagctccactaagattttcactttagccatattctgatttttaaaaaggaaaataaaaacaaatctttcttcagtatctttttctttcagaatagcttctcatcatttacaattacagaaaaatagtatgtaatacaggcagaccttgctttgcacaggttctaacatgcacgaattgcagtcataatggtttagcaacaccattcttcccctcccccaaaatgttttggacttcagctaccacaattacctgtaattgcataaaacacaaactttgctagtagctctccagttcacatatcgctgtgtaaataacctatgtacatcatgaccaatgaccagtcacttctatcaaagactgccagaggtcactgcacatctgttattcctgcatagatagcaaagtgtgtagttgtattgctattgcctgcttgtggcccagtgataaatccctttgacattttacaaaaatgaatcaaaagagggaactccccaacaaagatgaaagtgcagcaaaggaacaaaaactgataatcctggaatgaaattcaaactgaatataaagagttatcgagaaaagagctgactgtgggaatctgacacggctcaaaaggctctagatatgcagccagagaaacttgtaaagatgaatttactgacatgaataaagttgttgtgatgagaaaaatgtagataccccagagatcaagagaaggagaagacaagccacagacttggagaaaatacttgtaaaacatgtatctgacaaaagactattattcaaaattatatagaactcataaaactcggctgactctcttttcggactcagcccacctgcacccaggtgaaataaacagccacgttgctcacaca

SEQ ID NO: 402725 - DNA, 1260 bp, Homo sapiens
acaagtggaaaattccacatgagcagatgttcaatgagctgctcacgtataatgcgcctcatcttatgcaagacttggacacatatttaggggggagagaatggcttattggtaactctgtaacttgggcagacttctactgggagatttgcagtaccacacttttggtctttaagcctgacctgttagacaaccatccaaggctggtgactttacggaagaaagtccaagccattcctgccgtcgctaactggataaaacgaaggccccaaaccaaactctagctgatccatgttgccttcaagtttgtttttctcgggggcatctctctcatcagataagacagctacatcagcctgccagataatccacatgctccctccccagctccactaagattttcactttagccatattctgatttttaaaaaggaaaataaaaacaaatctttcttcagtatctttttctttcagaatagcttctcatcatttacaattacagaaaaatagtatgtaatacaggcagaccttgctttgcacaggttctaacatgcacgaattgcagtcataatggtttagcaacaccattcttcccctcccccaaaatgttttggacttcagctaccacaattacctgtaattgcataaaacacaaactttgctagtagctctccagttcacatatcgctgtgtaaataacctatgtacatcatgaccaatgaccagtcacttctatcaaagactgccagaggtcactgcacatctgttattcctgcatagatagcaaagtgtgtagttgtattgctattgcctgcttgtggcccagtgataaatccctttgacattttacaaaaatgaatcaaaagagggaactccccaacaaagatgaaagtgcagcaaaggaacaaaaactgataatcctggaatgaaattcaaactgaatataaagagttatcgagaaaagagctgactgtgggaatctgacacggctcaaaaggctctagatatgcagccagagaaacttgtaaagatgaatttactgacatgaataaagttgttgtgatgagaaaaatgtagataccccagagatcaagagaaggagaagacaagccacagacttggagaaaatacttgtaaaacatgtatctgacaaaagactattattcaaaattatatagaactcataaaactcggctgactctcttttcggactcagcccacctgcacccaggtgaaataaacagccacgttgctcacaca

SEQ ID NO: 402726 - DNA, 430 bp, Homo sapiens
tcttttagattaagaaactaatttcaattttggaatgctgatacagctacactttctatgttcaaatgaaaagtttgtttcctttaaactaggtaacttgggcagacttctactgggagatttgcagtaccacacttttggtctttaagcctgacctgttagacaaccatccaaggctggtgactttacggaagaaagtccaagccattcctgccgtcgctaactggataaaacgaaggccccaaaccaaactctagctgatccatgttgccttcaagtttgtttttctcgggggcatctctctcatcagataagacagctacatcagcctgccagataatccacatgctccctccccagctccactaagattttcactttagccatattctgatttttaaaaaggaaaataaaaacaaatctttcttca

SEQ ID NO: 402727 - DNA, 921 bp, Homo sapiens
gaagggaccttgatgttccttttttttttttgtatccctaacatctagcaagggacccagcactcggtaaatgttcactgaatgaaatgaggggtgtagctttctgccctgagtcctgctgttcccctgtagggagtgctgctgtatggacctccaggcactgggaagacactgttggcccgggctgtggctcatcatacggactgtacctttattcgtgtctctggctctgaattggtacagaaattcataggggaaggggcaagaatggtgagggagctgtttgtcatggcacgggaacatgctccatctatcatcttcatggacgaaatcgactccatcggctcctcgcggctggaggggggttctggaggggacagtgaagtgcagcgcacgatgctggagttgctcaaccagctcgacggctttgaggccaccaagaacatcaaggttatcatggctactaataggattgatatcctggactcggcactgcttcgcccagggcgcattgacagaaaaattgaattcccaccccccaatgaggaggcccggctggacattttgaagattcattctcggaagatgaacctgacccgggggatcaacctgagaaaaattgctgagctcatgccaggagcatcaggggctgaagtgaagggcgtgtgcacagaagctggcatgtatgccctgcgagaacggcgagtccatgtcactcaggaggactttgagatggcagtagccaaggtcatgcagaaggacagtgagaaaaacatgtccatcaagaaattatggaagtgagtggacagcctttgtgtgtatctctccaataaagctctgtgggccaagtcctctaggactccagtctgttaatgagggctgtgctgttcaaggaccaggtccaggcaccaccaatagaca

SEQ ID NO: 402728 - DNA, 359 bp, Homo sapiens
agtcgtggcgtgccacgcccgcggctcccccaccaccatacccaaatagaaagaaaacttgagcgcggacgggcttctgtttattcattctcggaagatgaacctgacccgggggatcaacctgagaaaaattgctgagctcatgccaggagcatcaggggctgaagtgaagggcgtgtgcacagaagctggcatgtatgccctgcgagaacggcgagtccatgtcactcaggaggactttgagatggcagtagccaaggtcatgcagaaggacagtgagaaaaacatgtccatcaagaaattatggaagtgagtggacagcctttgtgtgtatctctccaataaagctctgtgggcca

SEQ ID NO: 402729 - DNA, 1497 bp, Homo sapiens
caggtcccaatcctccgcttccgcgcttgcgcgccaagacggctcggatgccggcggtctctgctgaagagagaagatggcgcttgacggaccagagcagatggagctggaggaggggaaggcaggcagcggactccgccaatattatctgtccaagattgaagaactccagctgattgtgaatgataagagccaaaacctccggaggctgcaggcacagaggaacgaactaaatgctaaagttcgcctattgcgggaggagctacagctgctgcaggagcagggctcctatgtgggggaagtagtccgggccatggataagaagaaagtgttggtcaaggtacatcctgaaggtaaatttgttgtagacgtggacaaaaacattgacatcaatgatgtgacacccaattgccgggtggctctaaggaatgacagctacactctgcacaagatcctgcccaacaaggtagacccattagtgtcactgatgatggtggagaaagtaccagattcaacttatgagatgattggtggactggacaaacagatcaaggagatcaaagaagtgatcgagctgcctgttaagcatcctgagctcttcgaagcactgggcattgctcagcccaagggagtgctgctgtatggacctccaggcactgggaagacactgttggcccgggctgtggctcatcatacggactgtacctttattcgtgtctctggctctgaattggtacagaaattcataggggaaggggcaagaatggtgagggagctgtttgtcatggcacgggaacatgctccatctatcatcttcatggacgaaatcgactccatcggctcctcgcggctggaggggggttctggaggggacagtgaagtgcagcgcacgatgctggagttgctcaaccagctcgacggctttgaggccaccaagaacatcaaggttatcatggctactaataggattgatatcctggactcggcactgcttcgcccagggcgcattgacagaaaaattgaattcccaccccccaatgaggaggtttgtgatggacactgtgcaaagtggctctggctgtgggggtggggtgtggggctcaggcttttccttgccatctccaggcccggctggacattttgaagattcattctcggaagatgaacctgacccgggggatcaacctgagaaaaattgctgagctcatgccaggagcatcaggggctgaagtgaagggcgtgtgcacagaagctggcatgtatgccctgcgagaacggcgagtccatgtcactcaggaggactttgagatggcagtagccaaggtcatgcagaaggacagtgagaaaaacatgtccatcaagaaattatggaagtgagtggacagcctttgtgtgtatctctccaataaagctctgtgggccaagtcctctaggactccagtctgttaatgagggctgtgctgttcaaggaccaggtccaggcaccaccaatagaca

SEQ ID NO: 402730 - DNA, 1298 bp, Homo sapiens
caggtcccaatcctccgcttccgcgcttgcgcgccaagacggctcggatgccggcggtctctgctgaagagagaagatggcgcttgacggaccagagcagatggagctggaggaggggaaggcaggcagcggactccgccaatattatctgtccaagattgaagaactccagctgattgtgaatgataagagccaaaacctccggaggctgcaggcacagaggaacgaactaaatgctaaagttcgcctattgcgggaggagctacagctgctgcaggagcagggctcctatgtgggggaagtagtccgggccatggataagaagaaagtgttggtcaaggtacatcctgaaggtaaatttgttgtagacgtggacaaaaacattgacatcaatgatgtgacacccaattgccgggtggctctaaggaatgacagctacactctgcacaagatcctgcccaacaaggtagacccattagtgtcactgatgatggtggagaaagtaccagattcaacttatgagatgattggtggactggacaaacagatcaaggagatcaaagaagtgatcgagctgcctgttaagcatcctgagctcttcgaagcactgggcattgctcagcccaagggagtgctgctgtatggacctccaggcactgggaagacactgttggcccgggctgtggctcatcatacggactgtacctttattcgtgtctctggctctgaattggtacagaaattcataggggaaggggcaagaatggtgagggagctgtttgtcatggcacgggaacatgctccatctatcatcttcatggacgaaatcgactccatcggctcctcgcggctggaggggggttctggaggggacagtgaagtgcagcgcacgatgctggagttgctcaaccagctcgacggctttgaggccaccaagaacatcaaggttatcatggctactaataggattgatatcctggactcggcactgcttcgcccagggcgcattgacagaaaaattgaattcccaccccccaatgaggagcccccttttgaggaggcccccccgggggggcggcgcgccctgggaccactttcttcactcttcgggccccccggcgccacacaacactctttccaattcttcccttttccccgggtcgggtccaccactggcgatttgggagaacctcctttgggaaaccccccccccggttgagcgcggcgtggcgccccctttctccccctccctctccccccccccttttggcgccccagccggctccaccctcccgcac

SEQ ID NO: 402731 - DNA, 1826 bp, Homo sapiens
caggtcccaatcctccgcttccgcgcttgcgcgccaagacggctcggatgccggcggtctctgctgaagagagaagatggcgcttgacggaccagagcaggtatggcgggtgcagtggcggcccggcaggttacggggctgggtgcggagcgagcgtgatctgagtggagagcgggccggggcaggagcgtcgggtgggtcggaggtgcctggaccagtccatgctggacgctgcctgcgaccggatctgctgtgtcagcgccgccctcggtgagtcagggcaaggctgggagaggaagacgcggtagaagcggagtgagtgagggaagcgatgggcgcgggaatggccggcccacgggtcgcaggagacgggacgccagtcctttggctccgttccgctggctccttcgtcagtactgacacctcgggcttgtagagcacttcacgcagtgcaaagcgccccccgtctatatcatatcgcctctcggtcctcctaaaagtcgtatgagatggagctggaggaggggaaggcaggcagcggactccgccaatattatctgtccaagattgaagaactccagctgattgtgaatgataagagccaaaacctccggaggctgcaggcacagaggaacgaactaaatgctaaagttcgcctattgcgggaggagctacagctgctgcaggagcagggctcctatgtgggggaagtagtccgggccatggataagaagaaagtgttggtcaaggtacatcctgaaggtaaatttgttgtagacgtggacaaaaacattgacatcaatgatgtgacacccaattgccgggtggctctaaggaatgacagctacactctgcacaagatcctgcccaacaaggtagacccattagtgtcactgatgatggtggagaaagtaccagattcaacttatgagatgattggtggactggacaaacagatcaaggagatcaaagaagtgatcgagctgcctgttaagcatcctgagctcttcgaagcactgggcattgctcagcccaagggagtgctgctgtatggacctccaggcactgggaagacactgttggcccgggctgtggctcatcatacggactgtacctttattcgtgtctctggctctgaattggtacagaaattcataggggaaggggcaagaatggtgagggagctgtttgtcatggcacgggaacatgctccatctatcatcttcatggacgaaatcgactccatcggctcctcgcggctggaggggggttctggaggggacagtgaagtgcagcgcacgatgctggagttgctcaaccagctcgacggctttgaggccaccaagaacatcaaggttatcatggctactaataggattgatatcctggactcggcactgcttcgcccagggcgcattgacagaaaaattgaattcccaccccccaatgaggaggcccggctggacattttgaagattcattctcggaagatgaacctgacccgggggatcaacctgagaaaaattgctgagctcatgccaggagcatcaggggctgaagtgaagggcgtgtgcacagaagctggcatgtatgccctgcgagaacggcgagtccatgtcactcaggaggactttgagatggcagtagccaaggtcatgcagaaggacagtgagaaaaacatgtccatcaagaaattatggaagtgagtggacagcctttgtgtgtatctctccaataaagctctgtgggccaagtcctctaggactccagtctgttaatgagggctgtgctgttcaaggaccaggtccaggcaccaccaatagaca

SEQ ID NO: 402732 - DNA, 1986 bp, Homo sapiens
caggtcccaatcctccgcttccgcgcttgcgcgccaagacggctcggatgccggcggtctctgctgaagagagaagatggcgcttgacggaccagagcaggtatggcgggtgcagtggcggcccggcaggttacggggctgggtgcggagcgagcgtgatctgagtggagagcgggccggggcaggagcgtcgggtgggtcggaggtgcctggaccagtccatgctggacgctgcctgcgaccggatctgctgtgtcagcgccgccctcggtgagtcagggcaaggctgggagaggaagacgcggtagaagcggagtgagtgagggaagcgatgggcgcgggaatggccggcccacgggtcgcaggagacgggacgccagtcctttggctccgttccgctggctccttcgtcagtactgacacctcgggcttgtagagcacttcacgcagtgcaaagcgccccccgtctatatcatatcgcctctcggtcctcctaaaagtcgtatgaggtaggcggcgttcccattcttttattttagtcctccgaagtccaaactttttctactacgcaaagctacctggtgtcaagccttattcaaagtgccctgcaagtggctttaccccctcggatgtttaacctgtcgtttaagactcactctgtgtcttcagatggagctggaggaggggaaggcaggcagcggactccgccaatattatctgtccaagattgaagaactccagctgattgtgaatgataagagccaaaacctccggaggctgcaggcacagaggaacgaactaaatgctaaagttcgcctattgcgggaggagctacagctgctgcaggagcagggctcctatgtgggggaagtagtccgggccatggataagaagaaagtgttggtcaaggtacatcctgaaggtaaatttgttgtagacgtggacaaaaacattgacatcaatgatgtgacacccaattgccgggtggctctaaggaatgacagctacactctgcacaagatcctgcccaacaaggtagacccattagtgtcactgatgatggtggagaaagtaccagattcaacttatgagatgattggtggactggacaaacagatcaaggagatcaaagaagtgatcgagctgcctgttaagcatcctgagctcttcgaagcactgggcattgctcagcccaagggagtgctgctgtatggacctccaggcactgggaagacactgttggcccgggctgtggctcatcatacggactgtacctttattcgtgtctctggctctgaattggtacagaaattcataggggaaggggcaagaatggtgagggagctgtttgtcatggcacgggaacatgctccatctatcatcttcatggacgaaatcgactccatcggctcctcgcggctggaggggggttctggaggggacagtgaagtgcagcgcacgatgctggagttgctcaaccagctcgacggctttgaggccaccaagaacatcaaggttatcatggctactaataggattgatatcctggactcggcactgcttcgcccagggcgcattgacagaaaaattgaattcccaccccccaatgaggaggcccggctggacattttgaagattcattctcggaagatgaacctgacccgggggatcaacctgagaaaaattgctgagctcatgccaggagcatcaggggctgaagtgaagggcgtgtgcacagaagctggcatgtatgccctgcgagaacggcgagtccatgtcactcaggaggactttgagatggcagtagccaaggtcatgcagaaggacagtgagaaaaacatgtccatcaagaaattatggaagtgagtggacagcctttgtgtgtatctctccaataaagctctgtgggccaagtcctctaggactccagtctgttaatgagggctgtgctgttcaaggaccaggtccaggcaccaccaatagaca

SEQ ID NO: 402733 - DNA, 2047 bp, Homo sapiens
gaaaaaggaccgtttatgttgttaatcaaatgtttgtgttaccagtaaggcttccagcagtaaggtatggcttccagtagtaagccttacagacaacataaacagtagtctgttagtgttacgttatactgttacggtaggctgttagtagtttaactttggacaggtccatggattttcaatttcaccctaaccccctgcgttgttcaagtgtcaactgtaatataaattggatgggggaaagccacaaaagacaattctgaattccaagtgcatttgcaggtattatgtttagtttaccatttttgaatgctttttcatgtgtttttattcgttcaccttagtagtcttgaagcagggtagctgatgctatacccatgtgccgtttggtaacagatctagatttttaaaaatagattgtcttacctttactttgcttttgattgacagcggctgggctagaactcaggtttctcacctaacaatctttccaccaggtgttgttgccttcctgcaagaaatttggtgttacatgagccagctgtaacttttctccattagattctgttactcctggaccagtattggacaagcagccttctttgatggctgctgtaaggtccagagggactcttgaaggacagggcagggtcattaggatcatactggagaatctgaaacaacatgcaggtgccctgtgcccttccctcagctcattcagacctgtgaggtcttggccaagatcctacctcctcctgtctcctgcccttgaataatggaatttgtctcttgtccgccacagctgattgtgaatgataagagccaaaacctccggaggctgcaggcacagaggaacgaactaaatgctaaagttcgcctattgcgggaggagctacagctgctgcaggagcagggctcctatgtgggggaagtagtccgggccatggataagaagaaagtgttggtcaaggtacatcctgaaggtaaatttgttgtagacgtggacaaaaacattgacatcaatgatgtgacacccaattgccgggtggctctaaggaatgacagctacactctgcacaagatcctgcccaacaaggtagacccattagtgtcactgatgatggtggagaaagtaccagattcaacttatgagatgattggtggactggacaaacagatcaaggagatcaaagaagtgatcgagctgcctgttaagcatcctgagctcttcgaagcactgggcattgctcagcccaagggagtgctgctgtatggacctccaggcactgggaagacactgttggcccgggctgtggctcatcatacggactgtacctttattcgtgtctctggctctgaattggtacagaaattcataggggaaggggcaagaatggtgagggagctgtttgtcatggcacgggaacatgctccatctatcatcttcatggacgaaatcgactccatcggctcctcgcggctggaggggggttctggaggggacagtgaagtgcagcgcacgatgctggagttgctcaaccagctcgacggctttgaggccaccaagaacatcaaggttatcatggctactaataggattgatatcctggactcggcactgcttcgcccagggcgcattgacagaaaaattgaattcccaccccccaatgaggaggcccggctggacattttgaagattcattctcggaagatgaacctgacccgggggatcaacctgagaaaaattgctgagctcatgccaggagcatcaggggctgaagtgaagggcgtgtgcacagaagctggcatgtatgccctgcgagaacggcgagtccatgtcactcaggaggactttgagatggcagtagccaaggtcatgcagaaggacagtgagaaaaacatgtccatcaagaaattatggaagtgagtggacagcctttgtgtgtatctctccaataaagctctgtgggccaagtcctctaggactccagtctgttaatgagggctgtgctgttcaaggaccaggtccaggcaccaccaatagaca

SEQ ID NO: 402734 - DNA, 1121 bp, Homo sapiens
atttggtggctgtcaaggaaggtcatgagcccttgtttctttaggtacatcctgaaggtaaatttgttgtagacgtggacaaaaacattgacatcaatgatgtgacacccaattgccgggtggctctaaggaatgacagctacactctgcacaagatcctgcccaacaaggtagacccattagtgtcactgatgatggtggagaaagtaccagattcaacttatgagatgattggtggactggacaaacagatcaaggagatcaaagaagtgatcgagctgcctgttaagcatcctgagctcttcgaagcactgggcattgctcagcccaagggagtgctgctgtatggacctccaggcactgggaagacactgttggcccgggctgtggctcatcatacggactgtacctttattcgtgtctctggctctgaattggtacagaaattcataggggaaggggcaagaatggtgagggagctgtttgtcatggcacgggaacatgctccatctatcatcttcatggacgaaatcgactccatcggctcctcgcggctggaggggggttctggaggggacagtgaagtgcagcgcacgatgctggagttgctcaaccagctcgacggctttgaggccaccaagaacatcaaggttatcatggctactaataggattgatatcctggactcggcactgcttcgcccagggcgcattgacagaaaaattgaattcccaccccccaatgaggaggcccggctggacattttgaagattcattctcggaagatgaacctgacccgggggatcaacctgagaaaaattgctgagctcatgccaggagcatcaggggctgaagtgaagggcgtgtgcacagaagctggcatgtatgccctgcgagaacggcgagtccatgtcactcaggaggactttgagatggcagtagccaaggtcatgcagaaggacagtgagaaaaacatgtccatcaagaaattatggaagtgagtggacagcctttgtgtgtatctctccaataaagctctgtgggccaagtcctctaggactccagtctgttaatgagggctgtgctgttcaaggaccaggtccaggcaccaccaatagaca

SEQ ID NO: 402735 - DNA, 1983 bp, Homo sapiens
caggtcccaatcctccgcttccgcgcttgcgcgccaagacggctcggatgccggcggtctctgctgaagagagaagatggcgcttgacggaccagagcaggtatggcgggtgcagtggcggcccggcaggttacggggctgggtgcggagcgagcgtgatctgagtggagagcgggccggggcaggagcgtcgggtgggtcggaggtgcctggaccagtccatgctggacgctgcctgcgaccggatctgctgtgtcagcgccgccctcggtgagtcagggcaaggctgggagaggaagacgcggtagaagcggagtgagtgagggaagcgatgggcgcgggaatggccggcccacgggtcgcaggagacgggacgccagtcctttggctccgttccgctggctccttcgtcagtactgacacctcgggcttgtagagcacttcacgcagtgcaaagcgccccccgtctatatcatatcgcctctcggtcctcctaaaagtcgtatgaggtaggcggcgttcccattcttttattttagtcctgggaaaatggagggttccaagggagggagggattagaacccagatcctgagcctccgaagtccaaactttttctactacgcaaagctacctggtgtcaagccttattcaaagtgccctgcaagtggctttaccccctcggatgtttaacctgtcgtttaagactcactctgtgtcttcagatggagctggaggaggggaaggcaggcagcggactccgccaatattatctgtccaagattgaagaactccagctgattgtgaatgataagagccaaaacctccggaggctgcaggcacagaggaacgaactaaatgctaaagttcgcctattgcgggaggagctacagctgctgcaggagcagggctcctatgtgggggaagtagtccgggccatggataagaagaaagtgttggtcaaggtgacacccaattgccgggtggctctaaggaatgacagctacactctgcacaagatcctgcccaacaaggtagacccattagtgtcactgatgatggtggagaaagtaccagattcaacttatgagatgattggtggactggacaaacagatcaaggagatcaaagaagtgatcgagctgcctgttaagcatcctgagctcttcgaagcactgggcattgctcagcccaagggagtgctgctgtatggacctccaggcactgggaagacactgttggcccgggctgtggctcatcatacggactgtacctttattcgtgtctctggctctgaattggtacagaaattcataggggaaggggcaagaatggtgagggagctgtttgtcatggcacgggaacatgctccatctatcatcttcatggacgaaatcgactccatcggctcctcgcggctggaggggggttctggaggggacagtgaagtgcagcgcacgatgctggagttgctcaaccagctcgacggctttgaggccaccaagaacatcaaggttatcatggctactaataggattgatatcctggactcggcactgcttcgcccagggcgcattgacagaaaaattgaattcccaccccccaatgaggaggcccggctggacattttgaagattcattctcggaagatgaacctgacccgggggatcaacctgagaaaaattgctgagctcatgccaggagcatcaggggctgaagtgaagggcgtgtgcacagaagctggcatgtatgccctgcgagaacggcgagtccatgtcactcaggaggactttgagatggcagtagccaaggtcatgcagaaggacagtgagaaaaacatgtccatcaagaaattatggaagtgagtggacagcctttgtgtgtatctctccaataaagctctgtgggccaagtcctctaggactccagtctgttaatgagggctgtgctgttcaaggaccaggtccaggcaccaccaatagaca

SEQ ID NO: 402736 - DNA, 1391 bp, Homo sapiens
caggtcccaatcctccgcttccgcgcttgcgcgccaagacggctcggatgccggcggtctctgctgaagagagaagatggcgcttgacggaccagagcagatggagctggaggaggggaaggcaggcagcggactccgccaatattatctgtccaagattgaagaactccagctgattgtgaatgataagagccaaaacctccggaggctgcaggcacagaggaacgaactaaatgctaaagttcgcctattgcgggaggagctacagctgctgcaggagcagggctcctatgtgggggaagtagtccgggccatggataagaagaaagtgttggtcaaggtacatcctgaaggtaaatttgttgtagacgtggacaaaaacattgacatcaatgataaggaatgacagctacactctgcacaagatcctgcccaacaaggtagacccattagtgtcactgatgatggtggagaaagtaccagattcaacttatgagatgattggtggactggacaaacagatcaaggagatcaaagaagtgatcgagctgcctgttaagcatcctgagctcttcgaagcactgggcattgctcagcccaagggagtgctgctgtatggacctccaggcactgggaagacactgttggcccgggctgtggctcatcatacggactgtacctttattcgtgtctctggctctgaattggtacagaaattcataggggaaggggcaagaatggtgagggagctgtttgtcatggcacgggaacatgctccatctatcatcttcatggacgaaatcgactccatcggctcctcgcggctggaggggggttctggaggggacagtgaagtgcagcgcacgatgctggagttgctcaaccagctcgacggctttgaggccaccaagaacatcaaggttatcatggctactaataggattgatatcctggactcggcactgcttcgcccagggcgcattgacagaaaaattgaattcccaccccccaatgaggaggcccggctggacattttgaagattcattctcggaagatgaacctgacccgggggatcaacctgagaaaaattgctgagctcatgccaggagcatcaggggctgaagtgaagggcgtgtgcacagaagctggcatgtatgccctgcgagaacggcgagtccatgtcactcaggaggactttgagatggcagtagccaaggtcatgcagaaggacagtgagaaaaacatgtccatcaagaaattatggaagtgagtggacagcctttgtgtgtatctctccaataaagctctgtgggccaagtcctctaggactccagtctgttaatgagggctgtgctgttcaaggaccaggtccaggcaccaccaatagaca

SEQ ID NO: 402737 - DNA, 1024 bp, Homo sapiens
  misc_feature (130)..(130): n is a, c, g, or t
  misc_feature (218)..(218): n is a, c, g, or t
  misc_feature (221)..(221): n is a, c, g, or t
cgatatttgtggttctggcttaggaggtctgactgataaattaactcaggcccagatctttgactacgcgtgaaatccccaacttttccctgaagtgcagcgcacgatgctggagttgctcaaccagctngacggctttgaggccaccaagaacatcaaggttatcatggctactaataggattgatatcctggactcggcactgcttcgcccagggncanttgctcagcccaagggagtgctgctgtatggacctccaggcactgggaagacactgttggcccgggctgtggctcatcatacggactgtacctttattcgtgtctctggctctgaattggtacagaaattcataggggaaggggcaagaatggtgagggagctgtttgtcatggcacgggaacatgctccatctatcatcttcatggacgaaatcgactccatcggctcctcgcggctggaggggggttctggaggggacagtgaagtgcagcgcacgatgctggagttgctcaaccagctcgacggctttgaggccaccaagaacatcaaggttatcatggctactaataggattgatatcctggactcggcactgcttcgcccagggcgcattgacagaaaaattgaattcccaccccccaatgaggaggcccggctggacattttgaagattcattctcggaagatgaacctgacccgggggatcaacctgagaaaaattgctgagctcatgccaggagcatcaggggctgaagtgaagggcgtgtgcacagaagctggcatgtatgccctgcgagaacggcgagtccatgtcactcaggaggactttgagatggcagtagccaaggtcatgcagaaggacagtgagaaaaacatgtccatcaagaaattatggaagtgagtggacagcctttgtgtgtatctctccaataaagctctgtgggccaagtcctctaggactccagtctgttaatgagggctgtgctgttcaaggaccaggtccaggcaccaccaatagaca

SEQ ID NO: 402738 - DNA, 1019 bp, Homo sapiens
gaagggaccttgatgttccttttttttttttgtatccctaacatctagcaagggacccagcactcggtaaatgttcactgaatgaaatgaggggtgtagctttctgccctgagtcctgctgttcccctgtagggagtgctgctgtatggacctccaggcactgggaagacactgttggcccgggctgtggctcatcatacggactgtacctttattcgtgtctctggctctgaattggtacagaaattcataggggaaggtaaccatggctagcaatgtgagaagcaagaggtaggggtagggggttagagagctaataagctaataagctccctaacaccagctcggcctccacacgggcaagaatggtgagggagctgtttgtcatggcacgggaacatgctccatctatcatcttcatggacgaaatcgactccatcggctcctcgcggctggaggggggttctggaggggacagtgaagtgcagcgcacgatgctggagttgctcaaccagctcgacggctttgaggccaccaagaacatcaaggttatcatggctactaataggattgatatcctggactcggcactgcttcgcccagggcgcattgacagaaaaattgaattcccaccccccaatgaggaggcccggctggacattttgaagattcattctcggaagatgaacctgacccgggggatcaacctgagaaaaattgctgagctcatgccaggagcatcaggggctgaagtgaagggcgtgtgcacagaagctggcatgtatgccctgcgagaacggcgagtccatgtcactcaggaggactttgagatggcagtagccaaggtcatgcagaaggacagtgagaaaaacatgtccatcaagaaattatggaagtgagtggacagcctttgtgtgtatctctccaataaagctctgtgggccaagtcctctaggactccagtctgttaatgagggctgtgctgttcaaggaccaggtccaggcaccaccaatagaca

SEQ ID NO: 402739 - DNA, 835 bp, Homo sapiens
caggtcccaatcctccgcttccgcgcttgcgcgccaagacggctcggatgccggcggtctctgctgaagagagaagatggcgcttgacggaccagagcagatggagctggaggaggggaaggcaggcagcggactccgccaatattatctgtccaagattgaagaactccagctgattgtgaatgataagagccaaaacctccggaggctgcaggcacagaggaacgaactaaatgctaaagttcgcctattgcgggaggagctacagctgctgcaggagcagggctcctatgtgggggaagtagtccgggccatggataagaagaaagtgttggtcaaggtacatcctgaaggtaaatttgttgtagacgtggacaaaaacattgacatcaatgatgtgacacccaattgccgggtggctctaaggaatgacagctacactctgcacaagatcctgcccaacaaggtagacccattagtgtcactgatgatggtggagaaagtaccagattcaacttatgagatgattggtggactggacaaacagatcaaggagatcaaaggttatcatggctactaataggattgatatcctggactcggcactgcttcgcccagggcgcattgacagaaaaattgaattcccaccccccaatgaggaggccggggtggctcttggagatcattctcggaagatgagctgtaccggggatcaactggaaattgttggcctgccaggccccgggtgatgagggtggcaatggttttctcgaaagggccctcccagggtgaggccgggtcgggggaactccatgtggggcggggtccgggggaa

SEQ ID NO: 402740 - DNA, 438 bp, Homo sapiens
ctcagctcattcagacctgtgaggtcttggccaagatcctacctcctcctgtctcctgcccttgaataatggaatttgtctcttgtccgccacagctgattgtgaatgataagagccaaaacctccggaggctgcaggcacagaggaacgaactaaatgctaaaggtgagtggagaaagatgggaagccgcatgtgggcagtttgtctgaggtctgtccttatctccctgcactgtgtcttcacagcagtgcttactgttttctccctgtcatcatctagtagtttcacatgcatctctttttcctgagccctattgtagcctccttaaatacatgaattttgacctttggccttcctttaataagagtgatgcttagctcatgcacgtagaattgggtcctggagactccaaaggagtagctaggtgaccactgtgt

SEQ ID NO: 402741 - DNA, 743 bp, Homo sapiens
  misc_feature (130)..(130): n is a, c, g, or t
  misc_feature (218)..(218): n is a, c, g, or t
  misc_feature (221)..(221): n is a, c, g, or t
cgatatttgtggttctggcttaggaggtctgactgataaattaactcaggcccagatctttgactacgcgtgaaatccccaacttttccctgaagtgcagcgcacgatgctggagttgctcaaccagctngacggctttgaggccaccaagaacatcaaggttatcatggctactaataggattgatatcctggactcggcactgcttcgcccagggncanttgctcagcccaagggagtgctgctgtatggacctccaggcactgggaagacactgttggcccgggctgtggctcatcatacggactgtacctttattcgtgtctctggctctgaattggtacagaaattcataggggaaggggcaagaatggtgagggagctgtttgtcatggcacgggaacatgctccatctatcatcttcatggacgaaatcgactccatcggctcctcgcggctggaggggggttctggaggggacaggcgtgtgcacagaagctggcatgtatgccctgcgagaacggcgagtccatgtcactcaggaggactttgagatggcagtagccaaggtcatgcagaaggacagtgagaaaaacatgtccatcaagaaattatggaagtgagtggacagcctttgtgtgtatctctccaataaagctctgtgggccaagtcctctaggactccagtctgttaatgagggctgtgctgttcaaggaccaggtccaggcaccaccaatagaca

SEQ ID NO: 402742 - DNA, 1417 bp, Homo sapiens
caggtcccaatcctccgcttccgcgcttgcgcgccaagacggctcggatgccggcggtctctgctgaagagagaagatggcgcttgacggaccagagcagatggagctggaggaggggaaggcaggcagcggactccgccaatattatctgtccaagattgaagaactccagctgattgtgaatgataagagccaaaacctccggaggctgcaggcacagaggaacgaactaaatgctaaagttcgcctattgcgggaggagctacagctgctgcaggagcagggctcctatgtgggggaagtagtccgggccatggataagaagaaagtgttggtcaaggtacatcctgaaggtaaatttgttgtagacgtggacaaaaacattgacatcaatgatgtgacacccaattgccgggtggctctaaggaatgacagctacactctgcacaagatcctgcccaacaaggtagacccattagtgtcactgatgatggtggagaaagtaccagattcaacttatgagatgattggtggactggacaaacagatcaaggagatcaaagaagtgatcgagctgcctgttaagcatcctgagctcttcgaagcactgggcattgctcagcccaagggagtgctgctgtatggacctccaggcactgggaagacactgttggcccgggctgtggctcatcatacggactgtacctttattcgtgtctctggctctgaattggtacagaaattcataggggaaggggcaagaatggtgagggagctgtttgtcatggcacgggaacatgctccatctatcatcttcatggacgaaatcgactccatcggctcctcgcggctggaggggggttctggaggggacagtgaagtgcagcgcacgatgctggagttgctcaaccagctcgacggctttgaggccaccaagaacatcaaggttatcatggctactaataggattgatatcctggactcggcactgcttcgcccagggcgcattgacagaaaaattgaattcccaccccccaatgaggaggcccggctggacattttgaagattcattctcggaagatgaacctgacccgggggatcaacctgagaaaaattgctgagctcatgccaggagcatcaggggctgaagtgaagggcgtgtgcacagaagctggcatgtatgccctgcgagaacggcgagtccatgtcactcaggaggactttgagatggcagtagccaaggtcatgcagaaggacagtgagaaaaacatgtccatcaagaaattatggaagtgagtggacagcctttgtgtgtatctctccaataaagctctgtgggccaagtcctctaggactccagtctgttaatgagggctgtgctgttcaaggaccaggtccaggcaccaccaatagaca

SEQ ID NO: 402743 - DNA, 1343 bp, Homo sapiens
caggtcccaatcctccgcttccgcgcttgcgcgccaagacggctcggatgccggcggtctctgctgaagagagaagatggcgcttgacggaccagagcagatggagctggaggaggggaaggcaggcagcggactccgccaatattatctgtccaagattgaagaactccagctgattgtgaatgataagagccaaaacctccggaggctgcaggcacagaggaacgaactaaatgctaaagttcgcctattgcgggaggagctacagctgctgcaggagcagggctcctatgtgggggaagtagtccgggccatggataagaagaaagtgttggtcaaggtacatcctgaaggtaaatttgttgtagacgtggacaaaaacattgacatcaatgatgtgacacccaattgccgggtggctctaaggaatgacagctacactctgcacaagatcctgcccaacaaggtagacccattagtgtcactgatgatggtggagaaagtaccagattcaacttatgagatgattggtggactggacaaacagatcaaggagatcaaagaagtgatcgagctgcctgttaagcatcctgagctcttcgaagcactgggcattgctcagcccaagggagtgctgctgtatggacctccaggcactgggaagacactgttggcccgggctgtggctcatcatacggactgtacctttattcgtgtctctggctctgaattggtacagaaattcataggggaaggggcaagaatggtgagggagctgtttgtcatggcacgggaacatgctccatctatcatcttcatggacgaaatcgactccatcggctcctcgcggctggaggggggttctggaggggacagtgaagtgcagcgcacgatgctggagttgctcaaccagctcgacggctttgaggccaccaagaacatcaaggttatcatggctactaataggattgatatcctggactcggcactgcttcgcccagggcgcattgacagaaaaattgaattcccaccccccaatgaggaggcccggctggacattttgaagattcattctcggaagatgaacctgacccgggggatcaacctgagaaaaattgctgagctcatgccaggagcatcaggggctgaagtgaagggcgtgtgcacagaagctggcatgtatgccctgcgagaacggcgagtccatgtcactcaggaggactttgagatggcagtagccaaggtcatgcagaaggacagtgagaaaaacatgtccatcaagaaattatggaagtgagtggacagcctttgtgtgtatctctccaataaagctctgtgggcca

SEQ ID NO: 402744 - DNA, 1570 bp, Homo sapiens
  misc_feature (1355)..(1355): n is a, c, g, or t
  misc_feature (1568)..(1568): n is a, c, g, or t
caggtcccaatcctccgcttccgcgcttgcgcgccaagacggctcggatgccggcggtctctgctgaagagagaagatggcgcttgacggaccagagcagatggagctggaggaggggaaggcaggcagcggactccgccaatattatctgtccaagattgaagaactccagctgattgtgaatgataagagccaaaacctccggaggctgcaggcacagaggaacgaactaaatgctaaagttcgcctattgcgggaggagctacagctgctgcaggagcagggctcctatgtgggggaagtagtccgggccatggataagaagaaagtgttggtcaaggtacatcctgaaggtaaatttgttgtagacgtggacaaaaacattgacatcaatgatgtgacacccaattgccgggtggctctaaggaatgacagctacactctgcacaagatcctgcccaacaaggtagacccattagtgtcactgatgatggtggagaaagtaccagattcaacttatgagatgattggtggactggacaaacagatcaaggagatcaaagaagtgatcgagctgcctgttaagcatcctgagctcttcgaagcactgggcattgctcagcccaagggagtgctgctgtatggacctccaggcactgggaagacactgttggcccgggctgtggctcatcatacggactgtacctttattcgtgtctctggctctgaattggtacagaaattcataggggaaggggcaagaatggtgagggagctgtttgtcatggcacgggaacatgctccatctatcatcttcatggacgaaatcgactccatcggctcctcgcggctggaggggggttctggaggggacagtgaagtgcagcgcacgatgctggagttgctcaaccagctcgacggctttgaggccaccaagaacatcaaggttatcatggctactaataggattgatatcctggactcggcactgcttcgcccagggcgcattgacagaaaaattgaattcccaccccccaatgaggaggcccggctggacattttgaagattcattctcggaagatgaacctgacccgggggatcaacctgagaaaaattgctgagctcatgccaggagcatcaggggctgaagtgaagggcgtgtgcacagaagctggcatgtatgccctgcgagaacggcgagtccatgtcactcaggaggactttgagatggcagtagccaaggtcatgcagaaggacagtgagaaaaacatgtccatcaagaaattatggaagtgagtggacagcctttgtgtgtatctctccaataaagctctgtgggccaaaaaaaaaaaanaaaaaaaaaaaaaaaaaaaaaaaaaaaaaaaaaaaaaaaaccggggggccttaaggggggggggggaaaaaggggcaagaaagggcaacggggccaaaagggtttcccggagaccacaatttgtgaaacaggggggaaaatcgggggagccccataaagaggagcggaaaaaatccagaaaccacgggttacccccgtaaaacccagaaaaangt

SEQ ID NO: 402745 - DNA, 1749 bp, Homo sapiens
  misc_feature (1503)..(1503): n is a, c, g, or t
  misc_feature (1719)..(1719): n is a, c, g, or t
  misc_feature (1740)..(1740): n is a, c, g, or t
  misc_feature (1748)..(1748): n is a, c, g, or t
caggtcccaatcctccgcttccgcgcttgcgcgccaagacggctcggatgccggcggtctctgctgaagagagaagatggcgcttgacggaccagagcagatggagctggaggaggggaaggcaggcagcggactccgccaatattatctgtccaagattgaagaactccagctgattgtgaatgataagagccaaaacctccggaggctgcaggcacagaggaacgaactaaatgctaaagttcgcctattgcgggaggagctacagctgctgcaggagcagggctcctatgtgggggaagtagtccgggccatggataagaagaaagtgttggtcaaggtacatcctgaaggtaaatttgttgtagacgtggacaaaaacattgacatcaatgatgtgacacccaattgccgggtggctctaaggaatgacagctacactctgcacaagatcctgcccaacaaggtagacccattagtgtcactgatgatggtggagaaagtaccagattcaacttatgagatgattggtggactggacaaacagatcaaggagatcaaagaagtgatcgagctgcctgttaagcatcctgagctcttcgaagcactgggcattgctcagcccaagggagtgctgctgtatggacctccaggcactgggaagacactgttggcccgggctgtggctcatcatacggactgtacctttattcgtgtctctggctctgaattggtacagaaattcataggggaaggggcaagaatggtgagggagctgtttgtcatggcacgggaacatgctccatctatcatcttcatggacgaaatcgactccatcggctcctcgcggctggaggggggttctggaggggacagtgaagtgcagcgcacgatgctggagttgctcaaccagctcgacggctttgaggccaccaagaacatcaaggttatcatggctactaataggattgatatcctggactcggcactgcttcgcccagggcgcattgacagaaaaattgaattcccaccccccaatgaggaggcccggctggacattttgaagattcattctcggaagatgaacctgacccgggggatcaacctgagaaaaattgctgagctcatgccaggagcatcaggggctgaagtgaagggcgtgtgcacagaagctggcatgtatgccctgcgagaacggcgagtccatgtcactcaggaggactttgagatggcagtagccaaggtcatgcagaaggacagtgagtcttgaccttctttgcggctcggccattttgtcccagtcagtccggaggctgcggctgcagaagtaccgcctgcggagtaactgcaaagatgctgtccgtgcgcgttgctgcggccgtggtccgcgcccttcctcggcgggccggactggtctccagaaatgctttgggttcatctttcattgctgcaaggaacttccatgcctctaacactcatcttcaaaagactgggactgctganatgtcctctattcttgaagagcgtattcttggagctgatacctctgttgatcttgaagaaactgggcgtgtcttaagtattggtgatggtattgcccgcgtacatgggctgaggaatgttcaagcagaagaaatggtagagttttcttcaggcttaaagggtatgtccttgaacttggaacctgacaatgttggtgttgcgtgtttggaaatgatnaactaattaaggaaggagatntagtgaana

SEQ ID NO: 402746 - DNA, 2040 bp, Homo sapiens
caggtcccaatcctccgcttccgcgcttgcgcgccaagacggctcggatgccggcggtctctgctgaagagagaagatggcgcttgacggaccagagcaggtatggcgggtgcagtggcggcccggcaggttacggggctgggtgcggagcgagcgtgatctgagtggagagcgggccggggcaggagcgtcgggtgggtcggaggtgcctggaccagtccatgctggacgctgcctgcgaccggatctgctgtgtcagcgccgccctcggtgagtcagggcaaggctgggagaggaagacgcggtagaagcggagtgagtgagggaagcgatgggcgcgggaatggccggcccacgggtcgcaggagacgggacgccagtcctttggctccgttccgctggctccttcgtcagtactgacacctcgggcttgtagagcacttcacgcagtgcaaagcgccccccgtctatatcatatcgcctctcggtcctcctaaaagtcgtatgaggtaggcggcgttcccattcttttattttagtcctgggaaaatggagggttccaagggagggagggattagaacccagatcctgagcctccgaagtccaaactttttctactacgcaaagctacctggtgtcaagccttattcaaagtgccctgcaagtggctttaccccctcggatgtttaacctgtcgtttaagactcactctgtgtcttcagatggagctggaggaggggaaggcaggcagcggactccgccaatattatctgtccaagattgaagaactccagctgattgtgaatgataagagccaaaacctccggaggctgcaggcacagaggaacgaactaaatgctaaagttcgcctattgcgggaggagctacagctgctgcaggagcagggctcctatgtgggggaagtagtccgggccatggataagaagaaagtgttggtcaaggtacatcctgaaggtaaatttgttgtagacgtggacaaaaacattgacatcaatgatgtgacacccaattgccgggtggctctaaggaatgacagctacactctgcacaagatcctgcccaacaaggtagacccattagtgtcactgatgatggtggagaaagtaccagattcaacttatgagatgattggtggactggacaaacagatcaaggagatcaaagaagtgatcgagctgcctgttaagcatcctgagctcttcgaagcactgggcattgctcagcccaagggagtgctgctgtatggacctccaggcactgggaagacactgttggcccgggctgtggctcatcatacggactgtacctttattcgtgtctctggctctgaattggtacagaaattcataggggaaggggcaagaatggtgagggagctgtttgtcatggcacgggaacatgctccatctatcatcttcatggacgaaatcgactccatcggctcctcgcggctggaggggggttctggaggggacagtgaagtgcagcgcacgatgctggagttgctcaaccagctcgacggctttgaggccaccaagaacatcaaggttatcatggctactaataggattgatatcctggactcggcactgcttcgcccagggcgcattgacagaaaaattgaattcccaccccccaatgaggaggcccggctggacattttgaagattcattctcggaagatgaacctgacccgggggatcaacctgagaaaaattgctgagctcatgccaggagcatcaggggctgaagtgaagggcgtgtgcacagaagctggcatgtatgccctgcgagaacggcgagtccatgtcactcaggaggactttgagatggcagtagccaaggtcatgcagaaggacagtgagaaaaacatgtccatcaagaaattatggaagtgagtggacagcctttgtgtgtatctctccaataaagctctgtgggccaagtcctctaggactccagtctgttaatgagggctgtgctgttcaaggaccaggtccaggcaccaccaatagaca

SEQ ID NO: 402747 - DNA, 1354 bp, Homo sapiens
tactctacaggatcttggtccgctcggacgagagcagatggagctggaggaggggaaggcaggcagcggactccgccaatattatctgtccaagattgaagaactccagctgattgtgaatgataagagccaaaacctccggaggctgcaggcacagaggaacgaactaaatgctaaagttcgcctattgcgggaggagctacagctgctgcaggagcagggctcctatgtgggggaagtagtccgggccatggataagaagaaagtgttggtcaaggtacatcctgaaggtaaatttgttgtagacgtggacaaaaacattgacatcaatgatgtgacacccaattgccgggtggctctaaggaatgacagctacactctgcacaagatcctgcccaacaaggtagacccattagtgtcactgatgatggtggagaaagtaccagattcaacttatgagatgattggtggactggacaaacagatcaaggagatcaaagaagtgatcgagctgcctgttaagcatcctgagctcttcgaagcactgggcattgctcagcccaagggagtgctgctgtatggacctccaggcactgggaagacactgttggcccgggctgtggctcatcatacggactgtacctttattcgtgtctctggctctgaattggtacagaaattcataggggaaggggcaagaatggtgagggagctgtttgtcatggcacgggaacatgctccatctatcatcttcatggacgaaatcgactccatcggctcctcgcggctggaggggggttctggaggggacagtgaagtgcagcgcacgatgctggagttgctcaaccagctcgacggctttgaggccaccaagaacatcaaggttatcatggctactaataggattgatatcctggactcggcactgcttcgcccagggcgcattgacagaaaaattgaattcccaccccccaatgaggaggcccggctggacattttgaagattcattctcggaagatgaacctgacccgggggatcaacctgagaaaaattgctgagctcatgccaggagcatcaggggctgaagtgaagggcgtgtgcacagaagctggcatgtatgccctgcgagaacggcgagtccatgtcactcaggaggactttgagatggcagtagccaaggtcatgcagaaggacagtgagaaaaacatgtccatcaagaaattatggaagtgagtggacagcctttgtgtgtatctctccaataaagctctgtgggccaagtcctctaggactccagtctgttaatgagggctgtgctgttcaaggaccaggtccaggcaccaccaatagaca

SEQ ID NO: 402748 - DNA, 1308 bp, Homo sapiens
gcgccacgcccgcgcaccactccagcccacaatattatctgtccaagattgaacgaactccagctgattgtgaatgataagagccaaaacctccggaggctgcaggcacagaggaacgaactaaatgctaaagttcgcctattgcgggaggagctacagctgctgcaggagcagggctcctatgtgggggaagtagtccgggccatggataagaagaaagtgttggtcaaggtacatcctgaaggtaaatttgttgtagacgtggacaaaaacattgacatcaatgatgtgacacccaattgccgggtggctctaaggaatgacagctacactctgcacaagatcctgcccaacaaggtagacccattagtgtcactgatgatggtggagaaagtaccagattcaacttatgagatgattggtggactggacaaacagatcaaggagatcaaagaagtgatcgagctgcctgttaagcatcctgagctcttcgaagcactgggcattgctcagcccaagggagtgctgctgtatggacctccaggcactgggaagacactgttggcccgggctgtggctcatcatacggactgtacctttattcgtgtctctggctctgaattggtacagaaattcataggggaaggggcaagaatggtgagggagctgtttgtcatggcacgggaacatgctccatctatcatcttcatggacgaaatcgactccatcggctcctcgcggctggaggggggttctggaggggacagtgaagtgcagcgcacgatgctggagttgctcaaccagctcgacggctttgaggccaccaagaacatcaaggttatcatggctactaataggattgatatcctggactcggcactgcttcgcccagggcgcattgacagaaaaattgaattcccaccccccaatgaggaggcccggctggacattttgaagattcattctcggaagatgaacctgacccgggggatcaacctgagaaaaattgctgagctcatgccaggagcatcaggggctgaagtgaagggcgtgtgcacagaagctggcatgtatgccctgcgagaacggcgagtccatgtcactcaggaggactttgagatggcagtagccaaggtcatgcagaaggacagtgagaaaaacatgtccatcaagaaattatggaagtgagtggacagcctttgtgtgtatctctccaataaagctctgtgggccaagtcctctaggactccagtctgttaatgagggctgtgctgttcaaggaccaggtccaggcaccaccaatagaca

SEQ ID NO: 402749 - DNA, 1411 bp, Homo sapiens
actcatccacacacttaacaatgaacagatattcgaaaaataggaggactactcaaaaccatacctctcacttcaacctccctcaccattggcagcctagcattagcaggaatacctttcctcacaggtttctactccaaagaccacatcatcgaaaccgcaaacatatcatacacaaacgcctgaagccacgtcgacgtggcttcaggcacagaggaacgaactaaatgctaaagttcgcctattgcgggaggagctacagctgctgcaggagcagggctcctatgtgggggaagtagtccgggccatggataagaagaaagtgttggtcaaggtacatcctgaaggtaaatttgttgtagacgtggacaaaaacattgacatcaatgatgtgacacccaattgccgggtggctctaaggaatgacagctacactctgcacaagatcctgcccaacaaggtagacccattagtgtcactgatgatggtggagaaagtaccagattcaacttatgagatgattggtggactggacaaacagatcaaggagatcaaagaagtgatcgagctgcctgttaagcatcctgagctcttcgaagcactgggcattgctcagcccaagggagtgctgctgtatggacctccaggcactgggaagacactgttggcccgggctgtggctcatcatacggactgtacctttattcgtgtctctggctctgaattggtacagaaattcataggggaaggggcaagaatggtgagggagctgtttgtcatggcacgggaacatgctccatctatcatcttcatggacgaaatcgactccatcggctcctcgcggctggaggggggttctggaggggacagtgaagtgcagcgcacgatgctggagttgctcaaccagctcgacggctttgaggccaccaagaacatcaaggttatcatggctactaataggattgatatcctggactcggcactgcttcgcccagggcgcattgacagaaaaattgaattcccaccccccaatgaggaggcccggctggacattttgaagattcattctcggaagatgaacctgacccgggggatcaacctgagaaaaattgctgagctcatgccaggagcatcaggggctgaagtgaagggcgtgtgcacagaagctggcatgtatgccctgcgagaacggcgagtccatgtcactcaggaggactttgagatggcagtagccaaggtcatgcagaaggacagtgagaaaaacatgtccatcaagaaattatggaagtgagtggacagcctttgtgtgtatctctccaataaagctctgtgggccaagtcctctaggactccagtctgttaatgagggctgtgctgttcaaggaccaggtccaggcaccaccaatagaca

SEQ ID NO: 402750 - DNA, 1360 bp, Homo sapiens
caggtcccaatcctccgcttccgcgcttgcgcgccaagacggctcggatgccggcggtctctgctgaagagagaagatggcgcttgacggaccagagcagatggagctggaggaggggaaggcaggcagcggactccgccaatattatctgtccaagattgaagaactccagctgattgtgaatgataagagccaaaacctccggaggctgcaggcacagaggaacgaactaaatgctaaagttcgcctattgcgggaggagctacagctgctgcaggagcagggctcctatgtgggggaagtagtccgggccatggataagaagaaagtgttggtcaaggtgacacccaattgccgggtggctctaaggaatgacagctacactctgcacaagatcctgcccaacaaggtagacccattagtgtcactgatgatggtggagaaagtaccagattcaacttatgagatgattggtggactggacaaacagatcaaggagatcaaagaagtgatcgagctgcctgttaagcatcctgagctcttcgaagcactgggcattgctcagcccaagggagtgctgctgtatggacctccaggcactgggaagacactgttggcccgggctgtggctcatcatacggactgtacctttattcgtgtctctggctctgaattggtacagaaattcataggggaaggggcaagaatggtgagggagctgtttgtcatggcacgggaacatgctccatctatcatcttcatggacgaaatcgactccatcggctcctcgcggctggaggggggttctggaggggacagtgaagtgcagcgcacgatgctggagttgctcaaccagctcgacggctttgaggccaccaagaacatcaaggttatcatggctactaataggattgatatcctggactcggcactgcttcgcccagggcgcattgacagaaaaattgaattcccaccccccaatgaggaggcccggctggacattttgaagattcattctcggaagatgaacctgacccgggggatcaacctgagaaaaattgctgagctcatgccaggagcatcaggggctgaagtgaagggcgtgtgcacagaagctggcatgtatgccctgcgagaacggcgagtccatgtcactcaggaggactttgagatggcagtagccaaggtcatgcagaaggacagtgagaaaaacatgtccatcaagaaattatggaagtgagtggacagcctttgtgtgtatctctccaataaagctctgtgggccaagtcctctaggactccagtctgttaatgagggctgtgctgttcaaggaccaggtccaggcaccaccaatagaca

SEQ ID NO: 402751 - DNA, 1909 bp, Homo sapiens
caggtcccaatcctccgcttccgcgcttgcgcgccaagacggctcggatgccggcggtctctgctgaagagagaagatggcgcttgacggaccagagcaggtatggcgggtgcagtggcggcccggcaggttacggggctgggtgcggagcgagcgtgatctgagtggagagcgggccggggcaggagcgtcgggtgggtcggaggtgcctggaccagtccatgctggacgctgcctgcgaccggatctgctgtgtcagcgccgccctcggtgagtcagggcaaggctgggagaggaagacgcggtagaagcggagtgagtgagggaagcgatgggcgcgggaatggccggcccacgggtcgcaggagacgggacgccagtcctttggctccgttccgctggctccttcgtcagtactgacacctcgggcttgtagagcacttcacgcagtgcaaagcgccccccgtctatatcatatcgcctctcggtcctcctaaaagtcgtatgaggtaggcggcgttcccattcttttattttagtcctgggaaaatggagggttccaagggagggagggattagaacccagatcctgagcctccgaagtccaaactttttctactacgcaaagctacctggtgtcaagccttattcaaagtgccctgcaagtggctttaccccctcggatgtttaacctgtcgtttaagactcactctgtgtcttcagatggagctggaggaggggaaggcaggcagcggactccgccaatattatctgtccaagattgaagaactccagctgattgtgaatgataagagccaaaacctccggaggctgcaggcacagaggaacgaactaaatgctaaagttcgcctattgcgggaggagctacagctgctgcaggagcagggctcctatgtgggggaagtagtccgggccatggataagaagaaagtgttggtcaaggtgacacccaattgccgggtggctctaaggaatgacagctacactctgcacaagatcctgcccaacaaggtagacccattagtgtcactgatgatggtggagaaagtaccagattcaacttatgagatgattggtggactggacaaacagatcaaggagatcaaagaagtgatcgagctgcctgttaagcatcctgagctcttcgaagcactgggcattgctcagcccaagggagtgctgctgtatggacctccaggcactgggaagacactgttggcccgggctgtggctcatcatacggactgtacctttattcgtgtctctggctctgaattggtacagaaattcataggggaaggggcaagaatggtgagggagctgtttgtcatggcacgggaacatgctccatctatcatcttcatggacgaaatcgactccatcggctcctcgcggctggaggggggttctggaggggacagtgaagtgcagcgcacgatgctggagttgctcaaccagctcgacggctttgaggccaccaagaacatcaaggttatcatggctactaataggattgatatcctggactcggcactgcttcgcccagggcgcattgacagaaaaattgaattcccaccccccaatgaggaggcccggctggacattttgaagattcattctcggaagatgaacctgacccgggggatcaacctgagaaaaattgctgagctcatgccaggagcatcaggggctgaagtgaagggcgtgtgcacagaagctggcatgtatgccctgcgagaacggcgagtccatgtcactcaggaggactttgagatggcagtagccaaggtcatgcagaaggacagtgagaaaaacatgtccatcaagaaattatggaagtgagtggacagcctttgtgtgtatctctccaataaagctctgtgggcca

SEQ ID NO: 402752 - DNA, 1233 bp, Homo sapiens
caggtcccaatcctccgcttccgcgcttgcgcgccaagacggctcggatgccggcggtctctgctgaagagagaagatggcgcttgacggaccagagcagatggagctggaggaggggaaggcaggcagcggactccgccaatattatctgtccaagattgaagaactccagctgattgtgaatgataagagccaaaacctccggaggctgcaggcacagaggaacgaactaaatgctaaagttcgcctattgcgggaggagctacagctgctgcaggagcagggctcctatgtgggggaagtagtccgggccatggataagaagaaagtgttggtcaaggtgacacccaattgccgggtggctctaaggaatgacagctacactctgcacaagatcctgcccaacaaggtagacccattagtgtcactgatgatggtggagaaagtaccagattcaacttatgagatgattggtggactggacaaacagatcaaggagatcaaagaagtgatcgagctgcctgttaagcatcctgagctcttcgaagcactgggcattgctcagcccaaggggcaagaatggtgagggagctgtttgtcatggcacgggaacatgctccatctatcatcttcatggacgaaatcgactccatcggctcctcgcggctggaggggggttctggaggggacagtgaagtgcagcgcacgatgctggagttgctcaaccagctcgacggctttgaggccaccaagaacatcaaggttatcatggctactaataggattgatatcctggactcggcactgcttcgcccagggcgcattgacagaaaaattgaattcccaccccccaatgaggaggcccggctggacattttgaagattcattctcggaagatgaacctgacccgggggatcaacctgagaaaaattgctgagctcatgccaggagcatcaggggctgaagtgaagggcgtgtgcacagaagctggcatgtatgccctgcgagaacggcgagtccatgtcactcaggaggactttgagatggcagtagccaaggtcatgcagaaggacagtgagaaaaacatgtccatcaagaaattatggaagtgagtggacagcctttgtgtgtatctctccaataaagctctgtgggccaagtcctctaggactccagtctgttaatgagggctgtgctgttcaaggaccaggtccaggcaccaccaatagaca

SEQ ID NO: 402753 - DNA, 669 bp, Homo sapiens
  misc_feature (130)..(130): n is a, c, g, or t
  misc_feature (218)..(218): n is a, c, g, or t
  misc_feature (221)..(221): n is a, c, g, or t
cgatatttgtggttctggcttaggaggtctgactgataaattaactcaggcccagatctttgactacgcgtgaaatccccaacttttccctgaagtgcagcgcacgatgctggagttgctcaaccagctngacggctttgaggccaccaagaacatcaaggttatcatggctactaataggattgatatcctggactcggcactgcttcgcccagggncanttgctcagcccaagggagtgctgctgtatggacctccaggcactgggaagacactgttggcccgggctgtggctcatcatacggactgtacctttattcgtgtctctggctctgaattggtacagaaattcataggggaaggggcaagaatggtgagggagctgtttgtcatggcacgggaacatgctccatctatcatcttcatggacgaaatcgactccatcggctcctcgcggctggaggggggttctggaggggacaggcgtgtgcacagaagctggcatgtatgccctgcgagaacggcgagtccatgtcactcaggaggactttgagatggcagtagccaaggtcatgcagaaggacagtgagaaaaacatgtccatcaagaaattatggaagtgagtggacagcctttgtgtgtatctctccaataaagctctgtgggcca

SEQ ID NO: 402754 - DNA, 511 bp, Homo sapiens
tttggcagtacctggggagcctgagcagcctcattagaaataagatcctcggctgggccggtggctcacacctgtaatcccagcactttgggaggcagaggcgggcagatcacctgaggtcaggagttcgagaccagcctgaccaacatggagaaacctcgtctctaccaaaaatacaaaattagccgggcgtggtggcgctcttgcctgtaatcccagctactgcggaggctgaggcaagagaatcgcttaacccgggaggcggaggttgcagtgagctgagatcacgccattgcactccagcctgggcaacaagagcgaaactccatttcaaaaaaagaaaaagaaataaggtcttcatccccaagtagggaagaggtcaaaaaggcctgcaggcatggcttatctcaccccatccaagctaaccagaatgttactacccataatggctaattgaccacatatttgtcactgcagctaaacccagacagataaaaataatttcagttgt

SEQ ID NO: 402755 - DNA, 385 bp, Homo sapiens
catggcctccacggtgctgtggaccgtgttcctgggcaaggtgtggcagaactcgcgctggcctggagaggtgtccttcaaggtgagccgcctgctcctgcacccgtaccacgaagaggacagccatgactacgacgtggcgctgctgcagctcgaccacccggtggtgcgctcggccgccgtgcgccccgtctgcctgcccgcgcgctcccacttcttcgagcccggcctgcactgctggattacgggctggggcgccttgcgcgagggcggccccatcagcaacgctctgcagaaagtggatgtgcagttgatcccacaggacctgtgcagcgaggtctatcgctaccaggtgacgccacgcatgctgtgtgccggctaccgc

SEQ ID NO: 402756 - DNA, 367 bp, Homo sapiens
attttctccagcccacatgacacctttccagctccaaagaaaaggaaaaaggagctgaaagtccaggtcacacaactcaacaagatagttccgtgattgtaacctggacatgaaaatctcacttcaaattgttccaaaagaagagcccagacaacagggcacacactcaggaggtgcatggccgtcggctgcctcctccatgtcctgatcccaccattcagaggcagggtggtggctgggcgaagccaaaagcacacccagaatttcaccttggtctctcccaagtaactgttctcagtcccaccactttcttaatgtgaagaacaggatataaaaaatataggtgtttccccataaaatgtttaaa

SEQ ID NO: 402757 - DNA, 402 bp, Homo sapiens
  misc_feature (55)..(55): n is a, c, g, or t
aacagtcccgccgggagctaggcatgctgttatgataaaggagtcacagccagcnaacctttccagctccaaagaaaaggaaaaaggagctgaaagtccaggtcacacaactcaacaagatagttccgtgattgtaacctggacatgaaaatctcacttcaaattgttccaaaagaagagcccagacaacagggcacacactcaggaggtgcatggccgtcggctgcctcctccatgtcctgatcccaccattcagaggcagggtggtggctgggcgaagccaaaagcacacccagaatttcaccttggtctctcccaagtaactgttctcagtcccaccactttcttaatgtgaagaacaggatataaaaaatataggtgtttccccataaaatgtttaaa

SEQ ID NO: 402758 - DNA, 357 bp, Homo sapiens
aaaaaaaggtaaaaggggcagttgggtgtttcttggaaagatcactccccgttgcttttcccatctttgcttttcccatcctttgcttttcccatccttcgctcctccatccgcggccgttaccccagccctcgagcaccagaaatagaaactcggaggctggcgtcgaggctagacatggactccgcgcctggccccttccagatcccagttttctaaagtgacttcgcaccaaagtccggtataattgcggaatggggaacgtgctgctaagtttggggggagggtgttgcgggggcttgcttcgtcctctccagttatcagcccctcattcgctccatcacctaaagtgttaaa

SEQ ID NO: 402759 - DNA, 398 bp, Homo sapiens
ggatccaggcagcatgctttacctatacagccaggaaatgcagacaggaaaacatcttcactggtgtgcactgacaaagaagcttggggaagccttccataataaaaaaagatggggccgggcgcggtggctcacgcctgtaatcccagcactttgggaggccgagacggggggatcacgaggtcaggagatcgagaccatcctggctaacgcggtgaaaccccgtctctactaaaaatacaaaaaaattagtcgggcgtggtagcagacgcctgtagtcccagctactcgggaggctgagacaggagaatggtgtgaacctgggaggcggagcttgcagtgagccgagatcgctccactgcactccagcctgggcaacagagtgagactctgtctca

SEQ ID NO: 402760 - DNA, 4997 bp, Homo sapiens
gtaacttctcaatttttctgtaaactctaactactctatattagtctttaaaaaatcgcttatcttacgaatgattttgaataagcgttttgggaatgttctagagatgaatctcctccccatgtcctacgctgggtgaggaagtgtcgggtacccgggcgacctgtcctcaggtgttctaggaacgcggccccatcccttgtcagcctctgtctctgtgtggtgagaaggcgcactggctcgtgcctccgcgaaactcgcgcacacagaaaagaccaatcaaggacgggtcattcccgccccccgcgcgccttttgcgaccgcccactcgacaggttgacaacctagacagctcccccggacttgccttacttttccatctcctcccacccagctataccctcccactggcggcgcggatggcacgccgcggagccagcgagtctgcgcgagcggtccgagcatgctcaatcagcgcgcggcgccccggagcttctccgcggaaccgcgaccaacgcggaggtctcggcggccgctgcgggagccacaggaagtgaagagcttccgccgggagaccgcggctgcaggaacggaggcggaaggggccctgcggcgacgacgtcgtcgacgggggtggccgtgggagctgagcacggagaagactccctctctcggaagccggatcccgagccgggcaggatggatcaccaccagccggggactgggcgctaccaggtgcttcttaatgaagaggataactcagaatcatcggctatagagcagccacctacttcaaacccagcaccgcagattgtgcaggctgcgtcttcagcaccagcacttgaaactgactcttcccctccaccatatagtagtattactgtggaagtacctacaacttcagatacagaagtttacggtgagttttatcccgtgccacctccctatagcgttgctacctctcttcctacatacgatgaagctgagaaggctaaagctgctgcaatggcagctgcagcagcagaaacatctcaaagaattcaggaggaagagtgtccaccaagagatgacttcagtgatgcagaccagctcagagtggggaatgatggcattttcatgctggcatttttcatggcatttattttcaactggcttggattttgtttatccttctgtatcaccaataccatagctggaaggtatggtgctatctgcggatttggcctttccttgatcaaatggatccttattgtcaggttttctgattattttactggatatttcaatggacagtattggctttggtggatatttcttgtacttggcctgctccttttcttcagaggatttgttaattatctaaaagtcagaaacatgtctgaaagtatggcagctgctcatagaacaaggtatttcttcttattgtagagactgcatcaacccgacattcctttcttataccaatgtgaaatttccagatcatctgtaaacctacaactttaatagaagactactaataacagaagacaaattagtgaagaaaagacggagtttcgaaattgaatggcagggtggtttttgcttacaagccatttctgttcattctttaagtatctatatttcatttgttttgcacatatgcatatgtgcccatttaagatatttgcatatacttgatagaaaccataaagttgtagcagttaagtccagtcacatttggttaatcagtgtttgatataattgaaagagttgagtggataaacagtcttccagcttgtaaatgccattgacttctgacctgacatttagtataataaaaatgaaattcttaaccatgtcaaatgatttagtttctggctcttagactcatctggcagttctacacatgaaacatcttttgttatataaggtgtattgaaacctgcagtgctgattattagaaaggatttgtcagatttttgaacatgatatttacattattatttaggaaaactcttcctgtaaataaccatgcataacttactttctgcaatgttttcttagaaattgtgtccagatagctttcactaattttaaattaagtgaactaaatatatatgtgtatatgtatacacatatatatacacacacacatatatatatttagaaacgtgagtgttaaagatagaatttgttttaggacaaattttaagaaaatgtgggaataccaaatgtcctttataagaaaaataaattttgttttaagggacatactagttttagggattttcagatgggaagctgcatttttaggattgcccatcttaagagatcttgcaggaagagattgtattagatattatatttatttcatttaagataattttcaaagttaattttctaaataagataattctcatttgtgtttgtcttttaaaaggccaataaaatatctttcagtatcattgtaataattttttagagtttaatttgtaaagcttagcaaataaaatcttgtactatgaatagcttcttgctttatgactttaggattaacttgtaaaaaacatatcctgaactgagatatgcaaaatactcattttcaagttatggaaatgtgtttgtggcatataggactgtggggtctgtgtgtgtagtgagagtgtgtagccactattataactggaatttaatttacattcataaactactatatttcccatcttgcaaatcattttatgtctcatctgtttttcctttcggttatatctttggttttgaataccaacatttaaaatgatggtattttatcttttaaacttaaaaattatttaatacagctatatggaccttataaaattgatttcttatttattattagacattactactaaaaggtacatctaactattcagggacatttttccatttccaaaaaataaaatttattatgctttataacctcttctgtattttctaattttttcattgtctttgataaataaaacagttttgttttgctaatatagcctattttttgttttgtctcattcagtttactttcctgcgtagaatttttattgttatattaaaatttttattgttgtattaaagtacctgtgttacaccccttgaagtaagacagtagcatggggtaaagaaaaaatatttagtttagttgcctaatttggaagttaattaaaattaaactgtactaataacatattcaaactcatgctggatctctttcatattaatttcttatagacctgtactttattctttcaataatttttaaatgaaattaagctttgctacatggtaattaaataattactaggaagcttagctatcaaacatcgacttactaaaatttcattttagcttttatggtatatgtgcttgttttctgaatatggatacatgttacttttgatccagcatcaaaacttcactttttgttttgacttttccccccaaatctgtaaggttcaagtatacatattactgaatcctctataattggcataattcaatggtagccttaaatctcatcatgtaagcaggggaatcagaatgttattttcaagaacttaatgttcccttcagatatataaaatcctgcatacttcatttcctgtgagcttgaacagctgctgttgtgttttggggatgcttgatcatctttgcactctgccttaaagattgaaaaatcaaaactcttgttagggtatctaaacatttttgagtgtgaactggggattggaagttaatacaaaaaaatttcaaattatttctattgtaaatgaataagctagtcatggctaggataatccattttcatgtatttatgcaataaactgaattttaaggcaaaaacaacacttttctatatagtgtatgcaggacagattttagaaacttagattaaaatacaaatcccattacatttggttaaaatgaaaatctctgcttaatggaaaaaatactaatctttagcctattttgagtctataagatatatttcattttagacatgccttctaagttgttcacagatttttacctgctaaaacaatattatttccagtaaaacctctcctaacaggaaaagtggagttcaaaatatccaattggagaaaaattcagagttccttcattaaatataatttttttcatctagtatgtactatttcaagaagtgcaaaaagtaatgatagtgaatgtgataccatacttaactaaggtaatatatatccttagtttgctcaaaagagtcctggttattcctgttttctcagcttaatagtgcctcatcgtactctcaaaagtgttctaatttggaggataagttatatgatcatcctgtgtataattgtagactgtaccaagaagcaactaccttagctccactgccctttgagggatggaactggggtaagggcaggagccagttattattgccacagtgttttctaatgaaccatttggcctgtagaagaggaatagtattttttttaatagttgtatttgaatgattccagcttatcgtaaatactaaactgaatggcttttatatttttaactgctgttaaatgttattttagcatttattagttgtttattatttaattcttcaaatagtcatatgaaaacatatatttgataaaggtcaattgttagatgataatgtgccattcattatcataggaatgtccttgcccatatataaaacatgctggcatgtattttacttgttaataaagttgtatagatgtggaagtgtgaacctgtgatgcatccttttcaaaatcagtttaagattcgcatattatcatgactgtgacctcactaaactgtttatgtgacaaacctttcaagattggagatgaaaacaacacttgtgaaattaggttggggttgcaacatcttttaacttctcagttatttgtatgtcaggagacagattgtggtttaattttaataaacaaaatatcatctttttgaaaaaaaaaaat

SEQ ID NO: 402761 - DNA, 1442 bp, Homo sapiens
gtaacttctcaatttttctgtaaactctaactactctatattagtctttaaaaaatcgcttatcttacgaatgattttgaataagcgttttgggaatgttctagagatgaatctcctccccatgtcctacgctgggtgaggaagtgtcgggtacccgggcgacctgtcctcaggtgttctaggaacgcggccccatcccttgtcagcctctgtctctgtgtggtgagaaggcgcactggctcgtgcctccgcgaaactcgcgcacacagaaaagaccaatcaaggacgggtcattcccgccccccgcgcgccttttgcgaccgcccactcgacaggttgacaacctagacagctcccccggacttgccttacttttccatctcctcccacccagctataccctcccactggcggcgcggatggcacgccgcggagccagcgagtctgcgcgagcggtccgagcatgctcaatcagcgcgcggcgccccggagcttctccgcggaaccgcgaccaacgcggaggtctcggcggccgctgcgggagccacaggaagtgaagagcttccgccgggagaccgcggctgcaggaacggaggcggaaggggccctgcggcgacgacgtcgtcgacgggggtggccgtgggagctgagcacggagaagactccctctctcggaagccggatcccgagccgggcaggatggatcaccaccagccggggactgggcgctaccaggtgcttcttaatgaagaggataactcagaatcatcggctatagagcagccacctacttcaaacccagcaccgcagattgtgcaggctgcgtcttcagcaccagcacttgaaactgactcttcccctccaccatatagtagtattactgtggaagtacctacaacttcagatacagaagtttacggtgagttttatcccgtgccacctccctatagcgttgctacctctcttcctacatacgatgaagctgagaaggctaaagctgctgcaatggcagctgcagcagcagaaacatctcaaagaattcaggaggaagagtgtccaccaagagatgacttcagtgatgcagaccagctcagagtggggaatgatggcattttcatgctggcatttttcatggcatttattttcaactggcttggattttgtttatccttctgtatcaccaataccatagctggaaggtatggtgctatctgcggatttggcctttccttgatcaaatggatccttattgtcaggttttctgattattttactggatatttcaatggacagtattggctttggtggatatttcttgtacttggtaagtttattcttaatgcatttagtttaacttggatatttccaaaaactgtaagatgtaaataaactgtgttgcaatttatgtggaaattatttttcttctgtaaaattctcatatt

SEQ ID NO: 402762 - DNA, 559 bp, Homo sapiens
gggttgctgtagtgtgtttgggatggtaattgtggttttgagagattatgaaaaaaggactgacgtgaaatttctaataagaaaatgtgtgattcagacatacagcatttactgtttcttgcggggagtttgaaactggtttttgtttctaaaaatactcccattttttttttgctattgcataagatgattttttctcaaataatttatatatgtgtatgctgtgtatgccattaagtgtttttatttttcctttgtgccatttttaagtgttaaagattatttgaagtaaatcattatgaaactgaagataatttatgattttcaaattcaggtgtatgaattcggttaatatatttatgttcactccatagttttctgattattttactggatatttcaatggacagtattggctttggtggatatttcttgtacttggtaagtttattcttaatgcatttagtttaacttggatatttccaaaaactgtaagatgtaaataaactgtgttgcaatttatgtggaaattatttttcttctgtaaaattctcatatt

SEQ ID NO: 402763 - DNA, 4760 bp, Homo sapiens
gtaacttctcaatttttctgtaaactctaactactctatattagtctttaaaaaatcgcttatcttacgaatgattttgaataagcgttttgggaatgttctagagatgaatctcctccccatgtcctacgctgggtgaggaagtgtcgggtacccgggcgacctgtcctcaggtgttctaggaacgcggccccatcccttgtcagcctctgtctctgtgtggtgagaaggcgcactggctcgtgcctccgcgaaactcgcgcacacagaaaagaccaatcaaggacgggtcattcccgccccccgcgcgccttttgcgaccgcccactcgacaggttgacaacctagacagctcccccggacttgccttacttttccatctcctcccacccagctataccctcccactggcggcgcggatggcacgccgcggagccagcgagtctgcgcgagcggtccgagcatgctcaatcagcgcgcggcgccccggagcttctccgcggaaccgcgaccaacgcggaggtctcggcggccgctgcgggagccacaggaagtgaagagcttccgccgggagaccgcggctgcaggaacggaggcggaaggggccctgcggcgacgacgtcgtcgacgggggtggccgtgggagctgagcacggagaagactccctctctcggaagccggatcccgagccgggcaggatggatcaccaccagccggggactgggcgctaccaggtgcttcttaatgaagaggataactcagaatcatcggctatagagcagccacctacttcaaacccagcaccgcagattgtgcaggctgcgtcttcagcaccagcacttgaaactgactcttcccctccaccatatagtagtattactgtggaagtacctacaacttcagatacagaagtttacggtgagttttatcccgtgccacctccctatagcgttgctacctctcttcctacatacgatgaagctgagaaggctaaagctgctgcaatggcagctgcagcagcagaaacatctcaaagaattcaggaggaagagtgtccaccaagagatgacttcagtgatgcagaccagctcagagtggggaatgatggcattttcatgctggcatttttcatggcatttattttcaactggcttggattttgtttatccttctgtatcaccaataccatagctggaaggtatggtgctatctgcggatttggcctttccttgatcaaatggatccttattgtcaggttttctgattattttactggatatttcaatggacagtattggctttggtggatatttcttgtacttggcctgctccttttcttcagaggatttgttaattatctaaaagtcagaaacatgtctgaaagtatggcagctgctcatagaacaaggtatttcttcttattgtagagactgcatcaacccgacattcctttcttataccaatgtgaaatttccagatcatctgtaaacctacaactttaatagaagactactaataacagaagacaaattagtgaagaaaagacggagtttcgaaattgaatggcagggtggtttttgcttacaagccatttctgttcattctttaagtatctatatttcatttgttttgcacatatgcatatgtgcccatttaagatatttgcatatacttgatagaaaccataaagttgtagcagttaagtccagtcacatttggttaatcagtgtttgatataattgaaagagttgagtggataaacagtcttccagcttgtaaatgccattgacttctgacctgacatttagtataataaaaatgaaattcttaaccatgtcaaatgatttagtttctggctcttagactcatctggcagttctacacatgaaacatcttttgttatataaggtgtattgaaacctgcagtgctgattattagaaaggatttgtcagatttttgaacatgatatttacattattatttaggaaaactcttcctgtaaataaccatgcataacttactttctgcaatgttttcttagaaattgtgtccagatagctttcactaattttaaattaagtgaactaaatatatatgtgtatatgtatacacatatatatacacacacacatatatatatttagaaacgtgagtgttaaagatagaatttgttttaggacaaattttaagaaaatgtgggaataccaaatgtcctttataagaaaaataaattttgttttaagggacatactagttttagggattttcagatgggaagctgcatttttaggattgcccatcttaagagatcttgcaggaagagattgtattagatattatatttatttcatttaagataattttcaaagttaattttctaaataagataattctcatttgtgtttgtcttttaaaaggccaataaaatatctttcagtatcattgtaataattttttagagtttaatttgtaaagcttagcaaataaaatcttgtactatgaatagcttcttgctttatgactttaggattaacttgtaaaaaacatatcctgaactgagatatgcaaaatactcattttcaagttatggaaatgtgtttgtggcatataggactgtggggtctgtgtgtgtagtgagagtgtgtagccactattataactggaatttaatttacattcataaactactatatttcccatcttgcaaatcattttatgtctcatctgtttttcctttcggttatatctttggttttgaataccaacatttaaaatgatggtattttatcttttaaacttaaaaattatttaatacagctatatggaccttataaaattgatttcttatttattattagacattactactaaaaggtacatctaactattcagggacatttttccatttccaaaaaataaaatttattatgctttataacctcttctgtattttctaattttttcattgtctttgataaataaaacagttttgttttgctaatatagcctattttttgttttgtctcattcagtttactttcctgcgtagaatttttattgttatattaaaatttttattgttgtattaaagtacctgtgttacaccccttgaagtaagacagtagcatggggtaaagaaaaaatatttagtttagttgcctaatttggaagttaattaaaattaaactgtactaataacatattcaaactcatgctggatctctttcatattaatttcttatagacctgtactttattctttcaataatttttaaatgaaattaagctttgctacatggtaattaaataattactaggaagcttagctatcaaacatcgacttactaaaatttcattttagcttttatggtatatgtgcttgttttctgaatatggatacatgttacttttgatccagcatcaaaacttcactttttgttttgacttttccccccaaatctgtaaggttcaagtatacatattactgaatcctctataattggcataattcaatggtagccttaaatctcatcatgtaagcaggggaatcagaatgttattttcaagaacttaatgttcccttcagatatataaaatcctgcatacttcatttcctgtgagcttgaacagctgctgttgtgttttggggatgcttgatcatctttgcactctgccttaaagattgaaaaatcaaaactcttgttagggtatctaaacatttttgagtgtgaactggggattggaagttaatacaaaaaaatttcaaattatttctattgtaaatgaataagctagtcatggctaggataatccattttcatgtatttatgcaataaactgaattttaaggcaaaaacaacacttttctatatagtgtatgcaggacagattttagaaacttagattaaaatacaaatcccattacatttggttaaaatgaaaatctctgcttaatggaaaaaatactaatctttagcctattttgagtctataagatatatttcattttagacatgccttctaagttgttcacagatttttacctgctaaaacaatattatttccagtaaaacctctcctaacaggaaaagtggagttcaaaatatccaattggagaaaaattcagagttccttcattaaatataatttttttcatctagtatgtactatttcaagaagtgcaaaaagtaatgatagtgaatgtgataccatacttaactaaggtaatatatatccttagtttgctcaaaagagtcctggttattcctgttttctcagcttaatagtgcctcatcgtactctcaaaagtgttctaatttggaggataagttatatgatcatcctgtgtataattgtagactgtaccaagaagcaactaccttagctccactgccctttgagggatggaactggggtaagggcaggagccagttattattgccacagtgttttctaatgaaccatttggcctgtagaagaggaatagtattttttttaatagttgtatttgaatgattccagcttatcgtaaatactaaactgaatggcttttatatttttaactgctgttaaatgttattttagcatttattagttgtttattatttaattcttcaaatagtcatatgaaaacatatatttgataaaggtcaattgttagatgataatgtgccattcattatcataggaatgtccttgcccatatataaaacatgctggcatgtattttacttgttaataaagttgtatagatgtgga

SEQ ID NO: 402764 - DNA, 4316 bp, Homo sapiens
atatcaatatttcatttatccgacgcattccacataccaaacgccacacccaccaagcttcttaatgaagaggataactcagaatcatcggctatagagcagccacctacttcaaacccagcaccgcagattgtgcaggctgcgtcttcagcaccagcacttgaaactgactcttcccctccaccatatagtagtattactgtggaagtacctacaacttcagatacagaagtttacggtgagttttatcccgtgccacctccctatagcgttgctacctctcttcctacatacgatgaagctgagaaggctaaagctgctgcaatggcagctgcagcagcagaaacatctcaaagaattcaggaggaagagtgtccaccaagagatgacttcagtgatgcagaccagctcagagtggggaatgatggcattttcatgctggcatttttcatggcatttattttcaactggcttggattttgtttatccttctgtatcaccaataccatagctggaaggtatggtgctatctgcggatttggcctttccttgatcaaatggatccttattgtcaggttttctgattattttactggatatttcaatggacagtattggctttggtggatatttcttgtacttggcctgctccttttcttcagaggatttgttaattatctaaaagtcagaaacatgtctgaaagtatggcagctgctcatagaacaaggtatttcttcttattgtagagactgcatcaacccgacattcctttcttataccaatgtgaaatttccagatcatctgtaaacctacaactttaatagaagactactaataacagaagacaaattagtgaagaaaagacggagtttcgaaattgaatggcagggtggtttttgcttacaagccatttctgttcattctttaagtatctatatttcatttgttttgcacatatgcatatgtgcccatttaagatatttgcatatacttgatagaaaccataaagttgtagcagttaagtccagtcacatttggttaatcagtgtttgatataattgaaagagttgagtggataaacagtcttccagcttgtaaatgccattgacttctgacctgacatttagtataataaaaatgaaattcttaaccatgtcaaatgatttagtttctggctcttagactcatctggcagttctacacatgaaacatcttttgttatataaggtgtattgaaacctgcagtgctgattattagaaaggatttgtcagatttttgaacatgatatttacattattatttaggaaaactcttcctgtaaataaccatgcataacttactttctgcaatgttttcttagaaattgtgtccagatagctttcactaattttaaattaagtgaactaaatatatatgtgtatatgtatacacatatatatacacacacacatatatatatttagaaacgtgagtgttaaagatagaatttgttttaggacaaattttaagaaaatgtgggaataccaaatgtcctttataagaaaaataaattttgttttaagggacatactagttttagggattttcagatgggaagctgcatttttaggattgcccatcttaagagatcttgcaggaagagattgtattagatattatatttatttcatttaagataattttcaaagttaattttctaaataagataattctcatttgtgtttgtcttttaaaaggccaataaaatatctttcagtatcattgtaataattttttagagtttaatttgtaaagcttagcaaataaaatcttgtactatgaatagcttcttgctttatgactttaggattaacttgtaaaaaacatatcctgaactgagatatgcaaaatactcattttcaagttatggaaatgtgtttgtggcatataggactgtggggtctgtgtgtgtagtgagagtgtgtagccactattataactggaatttaatttacattcataaactactatatttcccatcttgcaaatcattttatgtctcatctgtttttcctttcggttatatctttggttttgaataccaacatttaaaatgatggtattttatcttttaaacttaaaaattatttaatacagctatatggaccttataaaattgatttcttatttattattagacattactactaaaaggtacatctaactattcagggacatttttccatttccaaaaaataaaatttattatgctttataacctcttctgtattttctaattttttcattgtctttgataaataaaacagttttgttttgctaatatagcctattttttgttttgtctcattcagtttactttcctgcgtagaatttttattgttatattaaaatttttattgttgtattaaagtacctgtgttacaccccttgaagtaagacagtagcatggggtaaagaaaaaatatttagtttagttgcctaatttggaagttaattaaaattaaactgtactaataacatattcaaactcatgctggatctctttcatattaatttcttatagacctgtactttattctttcaataatttttaaatgaaattaagctttgctacatggtaattaaataattactaggaagcttagctatcaaacatcgacttactaaaatttcattttagcttttatggtatatgtgcttgttttctgaatatggatacatgttacttttgatccagcatcaaaacttcactttttgttttgacttttccccccaaatctgtaaggttcaagtatacatattactgaatcctctataattggcataattcaatggtagccttaaatctcatcatgtaagcaggggaatcagaatgttattttcaagaacttaatgttcccttcagatatataaaatcctgcatacttcatttcctgtgagcttgaacagctgctgttgtgttttggggatgcttgatcatctttgcactctgccttaaagattgaaaaatcaaaactcttgttagggtatctaaacatttttgagtgtgaactggggattggaagttaatacaaaaaaatttcaaattatttctattgtaaatgaataagctagtcatggctaggataatccattttcatgtatttatgcaataaactgaattttaaggcaaaaacaacacttttctatatagtgtatgcaggacagattttagaaacttagattaaaatacaaatcccattacatttggttaaaatgaaaatctctgcttaatggaaaaaatactaatctttagcctattttgagtctataagatatatttcattttagacatgccttctaagttgttcacagatttttacctgctaaaacaatattatttccagtaaaacctctcctaacaggaaaagtggagttcaaaatatccaattggagaaaaattcagagttccttcattaaatataatttttttcatctagtatgtactatttcaagaagtgcaaaaagtaatgatagtgaatgtgataccatacttaactaaggtaatatatatccttagtttgctcaaaagagtcctggttattcctgttttctcagcttaatagtgcctcatcgtactctcaaaagtgttctaatttggaggataagttatatgatcatcctgtgtataattgtagactgtaccaagaagcaactaccttagctccactgccctttgagggatggaactggggtaagggcaggagccagttattattgccacagtgttttctaatgaaccatttggcctgtagaagaggaatagtattttttttaatagttgtatttgaatgattccagcttatcgtaaatactaaactgaatggcttttatatttttaactgctgttaaatgttattttagcatttattagttgtttattatttaattcttcaaatagtcatatgaaaacatatatttgataaaggtcaattgttagatgataatgtgccattcattatcataggaatgtccttgcccatatataaaacatgctggcatgtattttacttgttaataaagttgtatagatgtggaagtgtgaacctgtgatgcatccttttcaaaatcagtttaagattcgcatattatcatgactgtgacctcactaaactgtttatgtgacaaacctttcaagattggagatgaaaacaacacttgtgaaattaggttggggttgcaacatcttttaacttctcagttatttgtatgtcaggagacagattgtggtttaattttaataaacaaaatatcatctttttgaaaaaaaaaaat

SEQ ID NO: 402765 - DNA, 3190 bp, Homo sapiens
  misc_feature (2998)..(3000): n is a, c, g, or t
gtaacttctcaatttttctgtaaactctaactactctatattagtctttaaaaaatcgcttatcttacgaatgattttgaataagcgttttgggaatgttctagagatgaatctcctccccatgtcctacgctgggtgaggaagtgtcgggtacccgggcgacctgtcctcaggtgttctaggaacgcggccccatcccttgtcagcctctgtctctgtgtggtgagaaggcgcactggctcgtgcctccgcgaaactcgcgcacacagaaaagaccaatcaaggacgggtcattcccgccccccgcgcgccttttgcgaccgcccactcgacaggttgacaacctagacagctcccccggacttgccttacttttccatctcctcccacccagctataccctcccactggcggcgcggatggcacgccgcggagccagcgagtctgcgcgagcggtccgagcatgctcaatcagcgcgcggcgccccggagcttctccgcggaaccgcgaccaacgcggaggtctcggcggccgctgcgggagccacaggaagtgaagagcttccgccgggagaccgcggctgcaggaacggaggcggaaggggccctgcggcgacgacgtcgtcgacgggggtggccgtgggagctgagcacggagaagactccctctctcggaagccggatcccgagccgggcaggatggatcaccaccagccggggactgggcgctaccaggtgcttcttaatgaagaggataactcagaatcatcggctatagagcagccacctacttcaaacccagcaccgcagattgtgcaggctgcgtcttcagcaccagcacttgaaactgactcttcccctccaccatatagtagtattactgtggaagtacctacaacttcagatacagaagtttacggtgagttttatcccgtgccacctccctatagcgttgctacctctcttcctacatacgatgaagctgagaaggctaaagctgctgcaatggcagctgcagcagcagaaacatctcaaagaattcaggaggaagagtgtccaccaagagatgacttcagtgatgcagaccagctcagagtggggaatgatggcattttcatgctggcatttttcatggcatttattttcaactggcttggattttgtttatccttctgtatcaccaataccatagctggaaggtatggtgctatctgcggatttggcctttccttgatcaaatggatccttattgtcaggttttctgattattttactggatatttcaatggacagtattggctttggtggatatttcttgtacttggcctgctccttttcttcagaggatttgttaattatctaaaagtcagaaacatgtctgaaagtatggcagctgctcatagaacaaggtatttcttcttattgtagagactgcatcaacccgacattcctttcttataccaatgtgaaatttccagatcatctgtaaacctacaactttaatagaagactactaataacagaagacaaattagtgaagaaaagacggagtttcgaaattgaatggcagggtggtttttgcttacaagccatttctgttcattctttaagtatctatatttcatttgttttgcacatatgcatatgtgcccatttaagatatttgcatatacttgatagaaaccataaagttgtagcagttaagtccagtcacatttggttaatcagtgtttgatataattgaaagagttgagtggataaacagtcttccagcttgtaaatgccattgacttctgacctgacatttagtataataaaaatgaaattcttaaccatgtcaaatgatttagtttctggctcttagactcatctggcagttctacacatgaaacatcttttgttatataaggtgtattgaaacctgcagtgctgattattagaaaggatttgtcagatttttgaacatgatatttacattattatttaggaaaactcttcctgtaaataaccatgcataacttactttctgcaatgttttcttagaaattgtgtccagatagctttcactaattttaaattaagtgaactaaatatatatgtgtatatgtatacacatatatatacacacacacatatatatatttagaaacgtgagtgttaaagatagaatttgttttaggacaaattttaagaaaatgtgggaataccaaatgtcctttataagaaaaataaattttgttttaagggacatactagttttagggattttcagatgggaagctgcatttttaggattgcccatcttaagagatcttgcaggaagagattgtattagatattatatttatttcatttaagataattttcaaagttaattttctaaataagataattctcatttgtgtttgtcttttaaaaggccaataaaatatctttcagtatcattgtaataattttttagagtttaatttgtaaagcttagcaaataaaatcttgtactatgaatagcttcttgctttatgactttaggattaacttgtaaaaaacatatcctgaactgagatatgcaaaatactcattttcaagttatggaaatgtgtttgtggcatataggactgtggggtctgtgtgtgtagtgagagtgtgtagccactattataactggaatttaatttacattcataaactactatatttcccatcttgcaaatcattttatgtctcatctgtttttcctttcggttatatctttggttttgaataccaacatttaaaatgatggtattttatcttttaaacttaaaaattatttaatacagctatatggaccttataaaattgatttcttatttattattagacattactactaaaaggtacatctaactattcagggacatttttccatttccaaaaaataaaatttattatgctttataacctcttctgtattttctaattttttcattgtctttgataaataaaacagttttgtttnnntaaaaaaaaaaaaaaaaaaaaaaaaaaaaagggggggggctaaaaatttcccccgggggcccaattaagggtaccccgttttctgttaaaagggggccataaggggagggataaaagaagagagggggggtttaaaagcggggcgggaaaacgtccgggcctttgggaggacccttttgggggcaaatcg

SEQ ID NO: 402766 - DNA, 4872 bp, Homo sapiens
gtaacttctcaatttttctgtaaactctaactactctatattagtctttaaaaaatcgcttatcttacgaatgattttgaataagcgttttgggaatgttctagagatgaatctcctccccatgtcctacgctgggtgaggaagtgtcgggtacccgggcgacctgtcctcaggtgttctaggaacgcggccccatcccttgtcagcctctgtctctgtgtggtgagaaggcgcactggctcgtgcctccgcgaaactcgcgcacacagaaaagaccaatcaaggacgggtcattcccgccccccgcgcgccttttgcgaccgcccactcgacaggttgacaacctagacagctcccccggacttgccttacttttccatctcctcccacccagctataccctcccactggcggcgcggatggcacgccgcggagccagcgagtctgcgcgagcggtccgagcatgctcaatcagcgcgcggcgccccggagcttctccgcggaaccgcgaccaacgcggaggtctcggcggccgctgcgggagccacaggaagtgaagagcttccgccgggagaccgcggctgcaggaacggaggcggaaggggccctgcggcgacgacgtcgtcgacgggggtggccgtgggagctgagcacggagaagactccctctctcggaagccggatcccgagccgggcaggatggatcaccaccagccggggactgggcgctaccaggtgcttcttaatgaagaggataactcagaatcatcggctatagagcagccacctacttcaaacccagcaccgcagattgtgcaggctgcgtcttcagcaccagcacttgaaactgactcttcccctccaccatatagtagtattactgtggaagtacctacaacttcagatacagaagtttacggtgagttttatcccgtgccacctccctatagcgttgctacctctcttcctacatacgatgaagctgagaaggctaaagctgctgcaatggcagctgcagcagcagaaacatctcaaagaattcaggaggaagagtgtccaccaagagatgacttcagtgatgcagaccagctcagagtggggaatgatggcattttcatgctggcatttttcattttctgattattttactggatatttcaatggacagtattggctttggtggatatttcttgtacttggcctgctccttttcttcagaggatttgttaattatctaaaagtcagaaacatgtctgaaagtatggcagctgctcatagaacaaggtatttcttcttattgtagagactgcatcaacccgacattcctttcttataccaatgtgaaatttccagatcatctgtaaacctacaactttaatagaagactactaataacagaagacaaattagtgaagaaaagacggagtttcgaaattgaatggcagggtggtttttgcttacaagccatttctgttcattctttaagtatctatatttcatttgttttgcacatatgcatatgtgcccatttaagatatttgcatatacttgatagaaaccataaagttgtagcagttaagtccagtcacatttggttaatcagtgtttgatataattgaaagagttgagtggataaacagtcttccagcttgtaaatgccattgacttctgacctgacatttagtataataaaaatgaaattcttaaccatgtcaaatgatttagtttctggctcttagactcatctggcagttctacacatgaaacatcttttgttatataaggtgtattgaaacctgcagtgctgattattagaaaggatttgtcagatttttgaacatgatatttacattattatttaggaaaactcttcctgtaaataaccatgcataacttactttctgcaatgttttcttagaaattgtgtccagatagctttcactaattttaaattaagtgaactaaatatatatgtgtatatgtatacacatatatatacacacacacatatatatatttagaaacgtgagtgttaaagatagaatttgttttaggacaaattttaagaaaatgtgggaataccaaatgtcctttataagaaaaataaattttgttttaagggacatactagttttagggattttcagatgggaagctgcatttttaggattgcccatcttaagagatcttgcaggaagagattgtattagatattatatttatttcatttaagataattttcaaagttaattttctaaataagataattctcatttgtgtttgtcttttaaaaggccaataaaatatctttcagtatcattgtaataattttttagagtttaatttgtaaagcttagcaaataaaatcttgtactatgaatagcttcttgctttatgactttaggattaacttgtaaaaaacatatcctgaactgagatatgcaaaatactcattttcaagttatggaaatgtgtttgtggcatataggactgtggggtctgtgtgtgtagtgagagtgtgtagccactattataactggaatttaatttacattcataaactactatatttcccatcttgcaaatcattttatgtctcatctgtttttcctttcggttatatctttggttttgaataccaacatttaaaatgatggtattttatcttttaaacttaaaaattatttaatacagctatatggaccttataaaattgatttcttatttattattagacattactactaaaaggtacatctaactattcagggacatttttccatttccaaaaaataaaatttattatgctttataacctcttctgtattttctaattttttcattgtctttgataaataaaacagttttgttttgctaatatagcctattttttgttttgtctcattcagtttactttcctgcgtagaatttttattgttatattaaaatttttattgttgtattaaagtacctgtgttacaccccttgaagtaagacagtagcatggggtaaagaaaaaatatttagtttagttgcctaatttggaagttaattaaaattaaactgtactaataacatattcaaactcatgctggatctctttcatattaatttcttatagacctgtactttattctttcaataatttttaaatgaaattaagctttgctacatggtaattaaataattactaggaagcttagctatcaaacatcgacttactaaaatttcattttagcttttatggtatatgtgcttgttttctgaatatggatacatgttacttttgatccagcatcaaaacttcactttttgttttgacttttccccccaaatctgtaaggttcaagtatacatattactgaatcctctataattggcataattcaatggtagccttaaatctcatcatgtaagcaggggaatcagaatgttattttcaagaacttaatgttcccttcagatatataaaatcctgcatacttcatttcctgtgagcttgaacagctgctgttgtgttttggggatgcttgatcatctttgcactctgccttaaagattgaaaaatcaaaactcttgttagggtatctaaacatttttgagtgtgaactggggattggaagttaatacaaaaaaatttcaaattatttctattgtaaatgaataagctagtcatggctaggataatccattttcatgtatttatgcaataaactgaattttaaggcaaaaacaacacttttctatatagtgtatgcaggacagattttagaaacttagattaaaatacaaatcccattacatttggttaaaatgaaaatctctgcttaatggaaaaaatactaatctttagcctattttgagtctataagatatatttcattttagacatgccttctaagttgttcacagatttttacctgctaaaacaatattatttccagtaaaacctctcctaacaggaaaagtggagttcaaaatatccaattggagaaaaattcagagttccttcattaaatataatttttttcatctagtatgtactatttcaagaagtgcaaaaagtaatgatagtgaatgtgataccatacttaactaaggtaatatatatccttagtttgctcaaaagagtcctggttattcctgttttctcagcttaatagtgcctcatcgtactctcaaaagtgttctaatttggaggataagttatatgatcatcctgtgtataattgtagactgtaccaagaagcaactaccttagctccactgccctttgagggatggaactggggtaagggcaggagccagttattattgccacagtgttttctaatgaaccatttggcctgtagaagaggaatagtattttttttaatagttgtatttgaatgattccagcttatcgtaaatactaaactgaatggcttttatatttttaactgctgttaaatgttattttagcatttattagttgtttattatttaattcttcaaatagtcatatgaaaacatatatttgataaaggtcaattgttagatgataatgtgccattcattatcataggaatgtccttgcccatatataaaacatgctggcatgtattttacttgttaataaagttgtatagatgtggaagtgtgaacctgtgatgcatccttttcaaaatcagtttaagattcgcatattatcatgactgtgacctcactaaactgtttatgtgacaaacctttcaagattggagatgaaaacaacacttgtgaaattaggttggggttgcaacatcttttaacttctcagttatttgtatgtcaggagacagattgtggtttaattttaataaacaaaatatcatctttttgaaaaaaaaaaat

SEQ ID NO: 402767 - DNA, 4552 bp, Homo sapiens
agctcatggttgtaatcccagcgccttgggaggccaacacaggggtattgcttgagcccaggagttcaaggccagcctgggtaacatagcaagacttcagctctacaaaaaaaatagattgggtttcaccatattgcccaggctggtcttgaacacctgagctcgagcagtccgcttccctcagcctcccaaagtgctgggattacaggtgccagccactgtgcccagtccaacatgctgttctttctaaattccaaaattcatgttcattttgctacatcacattcaaattgcttcttaatgaagaggataactcagaatcatcggctatagagcagccacctacttcaaacccagcaccgcagattgtgcaggctgcgtcttcagcaccagcacttgaaactgactcttcccctccaccatatagtagtattactgtggaagtacctacaacttcagatacagaagtttacggtgagttttatcccgtgccacctccctatagcgttgctacctctcttcctacatacgatgaagctgagaaggctaaagctgctgcaatggcagctgcagcagcagaaacatctcaaagaattcaggaggaagagtgtccaccaagagatgacttcagtgatgcagaccagctcagagtggggaatgatggcattttcatgctggcatttttcatggcatttattttcaactggcttggattttgtttatccttctgtatcaccaataccatagctggaaggtatggtgctatctgcggatttggcctttccttgatcaaatggatccttattgtcaggttttctgattattttactggatatttcaatggacagtattggctttggtggatatttcttgtacttggcctgctccttttcttcagaggatttgttaattatctaaaagtcagaaacatgtctgaaagtatggcagctgctcatagaacaaggtatttcttcttattgtagagactgcatcaacccgacattcctttcttataccaatgtgaaatttccagatcatctgtaaacctacaactttaatagaagactactaataacagaagacaaattagtgaagaaaagacggagtttcgaaattgaatggcagggtggtttttgcttacaagccatttctgttcattctttaagtatctatatttcatttgttttgcacatatgcatatgtgcccatttaagatatttgcatatacttgatagaaaccataaagttgtagcagttaagtccagtcacatttggttaatcagtgtttgatataattgaaagagttgagtggataaacagtcttccagcttgtaaatgccattgacttctgacctgacatttagtataataaaaatgaaattcttaaccatgtcaaatgatttagtttctggctcttagactcatctggcagttctacacatgaaacatcttttgttatataaggtgtattgaaacctgcagtgctgattattagaaaggatttgtcagatttttgaacatgatatttacattattatttaggaaaactcttcctgtaaataaccatgcataacttactttctgcaatgttttcttagaaattgtgtccagatagctttcactaattttaaattaagtgaactaaatatatatgtgtatatgtatacacatatatatacacacacacatatatatatttagaaacgtgagtgttaaagatagaatttgttttaggacaaattttaagaaaatgtgggaataccaaatgtcctttataagaaaaataaattttgttttaagggacatactagttttagggattttcagatgggaagctgcatttttaggattgcccatcttaagagatcttgcaggaagagattgtattagatattatatttatttcatttaagataattttcaaagttaattttctaaataagataattctcatttgtgtttgtcttttaaaaggccaataaaatatctttcagtatcattgtaataattttttagagtttaatttgtaaagcttagcaaataaaatcttgtactatgaatagcttcttgctttatgactttaggattaacttgtaaaaaacatatcctgaactgagatatgcaaaatactcattttcaagttatggaaatgtgtttgtggcatataggactgtggggtctgtgtgtgtagtgagagtgtgtagccactattataactggaatttaatttacattcataaactactatatttcccatcttgcaaatcattttatgtctcatctgtttttcctttcggttatatctttggttttgaataccaacatttaaaatgatggtattttatcttttaaacttaaaaattatttaatacagctatatggaccttataaaattgatttcttatttattattagacattactactaaaaggtacatctaactattcagggacatttttccatttccaaaaaataaaatttattatgctttataacctcttctgtattttctaattttttcattgtctttgataaataaaacagttttgttttgctaatatagcctattttttgttttgtctcattcagtttactttcctgcgtagaatttttattgttatattaaaatttttattgttgtattaaagtacctgtgttacaccccttgaagtaagacagtagcatggggtaaagaaaaaatatttagtttagttgcctaatttggaagttaattaaaattaaactgtactaataacatattcaaactcatgctggatctctttcatattaatttcttatagacctgtactttattctttcaataatttttaaatgaaattaagctttgctacatggtaattaaataattactaggaagcttagctatcaaacatcgacttactaaaatttcattttagcttttatggtatatgtgcttgttttctgaatatggatacatgttacttttgatccagcatcaaaacttcactttttgttttgacttttccccccaaatctgtaaggttcaagtatacatattactgaatcctctataattggcataattcaatggtagccttaaatctcatcatgtaagcaggggaatcagaatgttattttcaagaacttaatgttcccttcagatatataaaatcctgcatacttcatttcctgtgagcttgaacagctgctgttgtgttttggggatgcttgatcatctttgcactctgccttaaagattgaaaaatcaaaactcttgttagggtatctaaacatttttgagtgtgaactggggattggaagttaatacaaaaaaatttcaaattatttctattgtaaatgaataagctagtcatggctaggataatccattttcatgtatttatgcaataaactgaattttaaggcaaaaacaacacttttctatatagtgtatgcaggacagattttagaaacttagattaaaatacaaatcccattacatttggttaaaatgaaaatctctgcttaatggaaaaaatactaatctttagcctattttgagtctataagatatatttcattttagacatgccttctaagttgttcacagatttttacctgctaaaacaatattatttccagtaaaacctctcctaacaggaaaagtggagttcaaaatatccaattggagaaaaattcagagttccttcattaaatataatttttttcatctagtatgtactatttcaagaagtgcaaaaagtaatgatagtgaatgtgataccatacttaactaaggtaatatatatccttagtttgctcaaaagagtcctggttattcctgttttctcagcttaatagtgcctcatcgtactctcaaaagtgttctaatttggaggataagttatatgatcatcctgtgtataattgtagactgtaccaagaagcaactaccttagctccactgccctttgagggatggaactggggtaagggcaggagccagttattattgccacagtgttttctaatgaaccatttggcctgtagaagaggaatagtattttttttaatagttgtatttgaatgattccagcttatcgtaaatactaaactgaatggcttttatatttttaactgctgttaaatgttattttagcatttattagttgtttattatttaattcttcaaatagtcatatgaaaacatatatttgataaaggtcaattgttagatgataatgtgccattcattatcataggaatgtccttgcccatatataaaacatgctggcatgtattttacttgttaataaagttgtatagatgtggaagtgtgaacctgtgatgcatccttttcaaaatcagtttaagattcgcatattatcatgactgtgacctcactaaactgtttatgtgacaaacctttcaagattggagatgaaaacaacacttgtgaaattaggttggggttgcaacatcttttaacttctcagttatttgtatgtcaggagacagattgtggtttaattttaataaacaaaatatcatctttttgaaaaaaaaaaat

SEQ ID NO: 402768 - DNA, 403 bp, Homo sapiens
cctttgcccttccataagtattttgaacatgtttgtacatatccatcacattgtactatacgtgttgaaatgtgtttcaccataatatctatcgcagtgactgggcacattgggaatctctagtaactgatgtttcaatagcttcttgctctcaagaagctgtgttgattaacagtgactctttgtttccataacacatctatgaaacgctgccgcatatcaagttctaaagatatagattgtgcagctggggaaaaatcttaaaaagcagagggatcagtcccatagaagtaaaacaactgcaacatggagaaacctcatctctacaaaaaatacaaaaatttactagttgtagtggtgcacgcctgtgagtcccagctactcaggagactgaggcaggagg

SEQ ID NO: 402769 - DNA, 401 bp, Homo sapiens
taattgagatagtctcgtcctgatggccagactggagtacagtggtgtgatctcggctcactgcatcctccgcctcctaggttcaagcgattcttccacctcagcctcccaagtagctgggatcacaggtatatgtcaccatgcctggctaatttttgtattttttgtagagatggggtttcgccatgttggccaggctggtcttgaactcctgacctacagtgatccgcctgccttggtctcccaaagttctgggattacaggcgtgagccactgaacctggccaaaagtggtattttctattgcatttgaggtaacagaaattgatgggcttgttattgcatttggcgtggctggttttttttttccatgttgtctttctccactgactgtcaaaaaaa

SEQ ID NO: 402770 - DNA, 4100 bp, Homo sapiens
  misc_feature (342)..(342): n is a, c, g, or t
tgtccatccccccttcgtgacaagaataaaatgcaaagagccaactctgttactgtagatggacaaggcctgcaggtcactcctgtgcctggtactcacccacttttagtttttgtgaaccccacaaagtggtggaaaacaaggagaacgacaatagattttgaaggtttcaaactattcatgaagacattcctggaagccgagcttcctgatgatttcactgcacaccttttcatgtcatttagcaacaagtttcctcattctagtccaatggtaaaaagtaagcctgctctcctatcaggcggtctgagaatgaataaaggtgccatcacccctccccgnactacttctcctgcaaatacgtgttccccagaagtaatccatctgaaggacattgtctgttacctgtctctgcttgaaagaggaagacctgaggataagcttgagtttatgtttcgcctttatgacacggatgggaatggcttcctggacagctcggagctagaaaatatcatcagtcagatgatgcatgttgcagaataccttgagtgggatgtcactgaacttaatccaatcctccatgaaatgatggaagaaattgactatgatcatgatggaaccgtgtctctggaggaatggattcaaggaggaatgacaacgattccacttcttgtgctcctgggcttagaaaataacgtgaaggatgatggacagcacgtgtggcgactgaagcactttaacaaacctgcctattgcaacctttgcctgaacatgctgattggcgtggggaagcagggcctctgctgttccttctgcaagtacacagtccatgagcgctgtgtggctcgagcacctccctcttgcatcaagacctatgtgaagtccaaaaggaacactgatgtcatgcaccattactgggttgaaggtaactgcccaaccaagtgtgataagtgccacaaaactgttaaatgttaccagggcctgacaggactgcattgtgtttggtgtcagatcacactgcataataaatgtgcttctcatctaaaacctgaatgtgactgtggacctttgaaggaccatattttaccacccacaacaatctgtccagtggtactgcagactctgcccacttcaggagtttcagttcctgaggaaagacaatcaacagtgaaaaaggaaaagagtggttcccagcagccaaacaaagtgattgacaagaataaaatgcaaagagccaactctgttactgtagatggacaaggcctgcaggtcactcctgtgcctggtactcacccacttttagtttttgtgaaccccaaaagtggtggaaaacaaggagaacgaatttacagaaaattccagtatctattaaatcctcgtcaggtttacagtctttctggaaatggaccaatgccagggttaaactttttccgtgatgttcctgacttcagagtgttagcctgtggtggagatggaaccgtgggctgggttttggattgcatagaaaaggccaatgtaggcaagcatcctccagttgcgattctgcctcttgggactggcaatgatctagcaagatgcctgcgatggggaggaggttacgaaggtgagaatctgatgaaaattctaaaagacattgaaaacagcacagaaatcatgttggacaggtggaagtttgaagtcatacctaatgacaaagatgagaaaggagacccagtgccttacagtatcatcaataattacttttccattggcgtggatgcctccattgcacacagattccacatcatgagagaaaaacacccagagaaattcaacagtagaatgaagaacaaattttggtattttgagtttggcacatctgaaactttctcagccacctgcaagaagctacatgaatctgtagaaatagaatgtgatggagtacagatagatttaataaacatctctctggaaggaattgctattttgaatataccaagcatgcatggaggatccaatctttggggagagtctaagaaaagacgaagccatcgacgaatagagaaaaaagggtctgacaaaaggaccaccgtcacagatgccaaagagttgaagtttgcaagtcaagatctcagtgaccagctgctggaggtggtcggcttggaaggagccatggagatggggcaaatatacacaggcctgaaaagtgctggccggcggctggctcagtgctcctgcgtggtcatcaggacgagcaagtctctgccaatgcaaattgatggggagccatggatgcagaccccatgcacaataaaaattacacacaagaaccaagccccaatgctgatgggcccgcctccaaaaaccggtttattctgctccctcgtcaaaaggacaagaaaccgaagcaaggaataatcctgtgttgtttcactcttagaaattgaattagcataattgggccatggaacacatatgctggaaatctttgaaccatttcaagtctcctgctcatgcaaaatcatggaagtggtttaacagtttttgttactaagctaatgtaaaattcagctattagaaaatttattgtctcagtttttataggcatctttgcatgaagaaagcagaagtttacctgaagtgatactgcatatttttggtgcatgcattcccatagatttttacatctcccacccaactcttccccaatttccttttactaacctgtgagaaaaacccgtgaaacatgaaaaaggaaataccatgggaaacgtgattctcagtgtgattccaattattacgaagcactaatcagtaacgctacaatgatcataattgcagattgctatacgtttcccttttagaatcagtgtatcagtgacctatgacttgaggagaaacttttaattcgaagattttattaaatagttgactacaataccttgctatatatacatagtttttcttcaacatcttaactcttctgagtggaaataaaaatatcaggcataaggttttctcatgctgaaaaatagaacgcggtttttattttgcttagttttctttttaattccagaaataagtgaaaacatgttacttgacagtcaagtgtggtaatatggcaagccttgttcctttctgcatgagaatctaggagagaattcataaccacaccaataacgaaatagaagttttaaactatgtgcctaatcaatgtgtttcccaccaaagattcagaaaacaatgcttgagagaaatgggttaatgcataattaattaagcattgtggagcaaatttagggttcctgtgattaattttgtgatgactaaaatgctggaaagcaagtgagttgcccattaattatgattaaaattctcacctttcacagacagacaataagccagacaacacaatcaaagctcaatagatgatttcttgcttttttcagtcatttataaatataggtgtaatttttcatggatcagttaagtacacttgaaggaagtaaatgattgtatcagtttatttctagtataaatgggtacctgtaataatactgagctcttggaagcgaatcatgcatgcaattagctccctcctcctcacctactccactcccatctttatgacatttcaaatgtttatttggaaacaacagcctagatcactgttgaaggtgttcatggcatagttggagtctctgactgtttaaagaaatcacagaacagtacttttcttttagtgtttcattaagcctatgatgtaaaatgaaatgcttctgagcagtcttgtaatattgttcattcatattgacctgcatctcatcattgcatgttttatgttttcaaacatgccataaggaaaacgagtgcctgaactgcatgatttattagtttctctccactctgcattaaagtgctaatgatttatcggttctattttgttattgattcattcatctttctttgaataacaaatagcatttagtgattctgttgaacacaatcctgtgcatggatttatggatttcaagtgaaattgctataattttagttctttggtttgaaaactcaactgaatgctgttatatcaaatagctgctctcaagcaatgtgctata

SEQ ID NO: 402771 - DNA, 4158 bp, Homo sapiens
  misc_feature (342)..(342): n is a, c, g, or t
tgtccatccccccttcgtgacaagaataaaatgcaaagagccaactctgttactgtagatggacaaggcctgcaggtcactcctgtgcctggtactcacccacttttagtttttgtgaaccccacaaagtggtggaaaacaaggagaacgacaatagattttgaaggtttcaaactattcatgaagacattcctggaagccgagcttcctgatgatttcactgcacaccttttcatgtcatttagcaacaagtttcctcattctagtccaatggtaaaaagtaagcctgctctcctatcaggcggtctgagaatgaataaaggtgccatcacccctccccgnactacttctcctgcaaatacgtgttccccagaagtaatccatctgaaggacattgtctgttacctgtctctgcttgaaagaggaagacctgaggataagcttgagtttatgtttcgcctttatgacacggatgggaatggcttcctggacagctcggagctagaaaatatcatcagtcagatgatgcatgttgcagaataccttgagtgggatgtcactgaacttaatccaatcctccatgaaatgatggaagaaattgactatgatcatgatggaaccgtgtctctggaggaatggattcaaggaggaatgacaacgattccacttcttgtgctcctgggcttagaaaataacgtgaaggatgatggacagcacgtgtggcgactgaagcactttaacaaacctgcctattgcaacctttgcctgaacatgctgattggcgtggggaagcagggcctctgctgttccttctgcaagtacacagtccatgagcgctgtgtggctcgagcacctccctcttgcatcaagacctatgtgaagtccaaaaggaacactgatgtcatgcaccattactgggttgaaggtaactgcccaaccaagtgtgataagtgccacaaaactgttaaatgttaccagggcctgacaggactgcattgtgtttggtgtcagatcacactgcataataaatgtgcttctcatctaaaacctgaatgtgactgtggacctttgaaggaccatattttaccacccacaacaatctgtccagtggtactgcagactctgcccacttcaggagtttcagttcctgaggaaagacaatcaacagtgaaaaaggaaaagagtggttcccagcagccaaacaaagtgattgacaagaataaaatgcaaagagccaactctgttactgtagatggacaaggcctgcaggtcactcctgtgcctggtactcacccacttttagtttttgtgaaccccaaaagtggtggaaaacaaggagaacgaatttacagaaaattccagtatctattaaatcctcgtcaggtttacagtctttctggaaatggaccaatgccagggttaaactttttccgtgatgttcctgacttcagagtgttagcctgtggtggagatggaaccgtgggctgggttttggattgcatagaaaaggccaatgtaggcaagcatcctccagttgcgattctgcctcttgggactggcaatgatctagcaagatgcctgcgatggggaggaggttacgaaggtgagaatctgatgaaaattctaaaagacattgaaaacagcacagaaatcatgttggacaggtggaagtttgaagtcatacctaatgacaaagatgagaaaggagacccagtgccttacagtatcatcaataattacttttccattggcgtggatgcctccattgcacacagattccacatcatgagagaaaaacacccagagaaattcaacagtagaatgaagaacaaattttggtattttgagtttggcacatctgaaactttctcagccacctgcaagaagctacatgaatctgtagaaatagaatgtgatggagtacagatagatttaataaacatctctctggaaggaattgctattttgaatataccaagcatgcatggaggatccaatctttggggagagtctaagaaaagacgaagccatcgacgaatagagaaaaaagggtctgacaaaaggaccaccgtcacagatgccaaagagttgaagtttgcaagtcaagatctcagtgaccagctgctggaggtggtcggcttggaaggagccatggagatggggcaaatatacacaggcctgaaaagtgctggccggcggctggctcagtgctcctgcgtggtcatcaggacgagcaagtctctgccaatgcaaattgatggggagccatggatgcagaccccatgcacaataaaaattacacacaagaaccaagccccaatgctgatgggcccgcctccaaaaaccggtttattctgctccctcgtcaaaaggacaagaaaccgaagcaaggaataatcctgtgttgtttcactcttagaaattgaattagcataattgggccatggaacacatatgctggaaatctttgaaccatttcaagtctcctgctcatgcaaaatcatggaagtggtttaacagtttttgttactaagctaatgtaaaattcagctattagaaaatttattgtctcagtttttataggcatctttgcatgaagaaagcagaagtttacctgaagtgatactgcatatttttggtgcatgcattcccatagatttttacatctcccacccaactcttccccaatttccttttactaacctgtgagaaaaacccgtgaaacatgaaaaaggaaataccatgggaaacgtgattctcagtgtgattccaattattacgaagcactaatcagtaacgctacaatgatcataattgcagattgctatacgtttcccttttagaatcagtgtatcagtgacctatgacttgaggagaaacttttaattcgaagattttattaaatagttgactacaataccttgctatatatacatagtttttcttcaacatcttaactcttctgagtggaaataaaaatatcaggcataaggttttctcatgctgaaaaatagaacgcggtttttattttgcttagttttctttttaattccagaaataagtgaaaacatgttacttgacagtcaagtgtggtaatatggcaagccttgttcctttctgcatgagaatctaggagagaattcataaccacaccaataacgaaacacattgattaggcacatagtttaaaacttctatttcgttattggtgtggttatgaattagaagttttaaactatgtgcctaatcaatgtgtttcccaccaaagattcagaaaacaatgcttgagagaaatgggttaatgcataattaattaagcattgtggagcaaatttagggttcctgtgattaattttgtgatgactaaaatgctggaaagcaagtgagttgcccattaattatgattaaaattctcacctttcacagacagacaataagccagacaacacaatcaaagctcaatagatgatttcttgcttttttcagtcatttataaatataggtgtaatttttcatggatcagttaagtacacttgaaggaagtaaatgattgtatcagtttatttctagtataaatgggtacctgtaataatactgagctcttggaagcgaatcatgcatgcaattagctccctcctcctcacctactccactcccatctttatgacatttcaaatgtttatttggaaacaacagcctagatcactgttgaaggtgttcatggcatagttggagtctctgactgtttaaagaaatcacagaacagtacttttcttttagtgtttcattaagcctatgatgtaaaatgaaatgcttctgagcagtcttgtaatattgttcattcatattgacctgcatctcatcattgcatgttttatgttttcaaacatgccataaggaaaacgagtgcctgaactgcatgatttattagtttctctccactctgcattaaagtgctaatgatttatcggttctattttgttattgattcattcatctttctttgaataacaaatagcatttagtgattctgttgaacacaatcctgtgcatggatttatggatttcaagtgaaattgctataattttagttctttggtttgaaaactcaactgaatgctgttatatcaaatagctgctctcaagcaatgtgctata

SEQ ID NO: 402772 - DNA, 855 bp, Homo sapiens
ctcacagtgggcgggagcggaggcaacagctgggccaggttcatgggggctttggggtggctgggaaagttctattcttgacctgcgtggaattcaaaggtgtttgtcttatggaaacccactaagctttatattggtttatgtgcttttttctatctatgctttcttttatagtaagacagtttagaaggaaagctgtcaggaggtgagtggggactctgctgagggttacgtggaacggaaggcaagacagtggagggtgcaggagtaggggaggcaaggacaaagtggggacaggacgtgcagacttgttcaggtccccctggctgaggactcagcggagagggaaggtggcagcagggggcgctggtggtcaagggtggttctgaaggagaggaggatggaattgcttctggagggtaggaggaaggcgtaggtgctgggccttccaggaagaccagaggcccctccctaggccttgactcagcttgaaacctggggagtaaggatgcgctgtgagggcacagaaggaaagctttgtataaaccaaagaatgtgaaaaatctcaataatttaagaatactggaagtcctcgccagatcaactaggcaagaggaatagaggcatccaaattggaaaagaggaagtcaaattatccctgttcactgatgatatgattttatatctagaaaaccctgaggatgtcaccaaaaaattctgagttaataaattaattcagtaaaatttcagaatacaaaattaacatacagaaatcattagagttcctatataccaatgacgatccagccccaaatcaggaaggcaatcccatttacaatagctaccaaaaaaaaa

SEQ ID NO: 402773 - DNA, 400 bp, Homo sapiens
acacctgactcttcagctccaggtatctcacaaagggtctcgccactcttcttcactttatgctttcatcagatcagttatggggcttccaacagtgggaacagacaagggtcaccaaattacacccaacatctacttgaaaattacagatgctattaggggcatcccatggatgaccaccacatcgactgtgatgcacagttgccaacacggcttgcttctctcttgattaaggtatgtgtcaatgcaattctgtttggcagcactagaaaaactcaaggtaccctctaggttcacagtgcaggggccaacagtgtgatggctgttaaggctcagggctcatcagcgaaagggctctatagaaatgcaacatgctattatcacaacaatcatagctatt

SEQ ID NO: 402774 - DNA, 481 bp, Homo sapiens
ggtttgtttacaccagcatcatcacaaatacatgagtaatatgttatgctatgactttacaaatggctacgatatctctaggcataggaatttttcagctcctttataatcttataggactaccttcattaatgtggtctgtcgttgacccaaacattgttatgttgtgcatgactataattacaactgtgaccacccctgccagtccgtctagcctactccctatcttcactccgttatttctcaatgacccctaaatctccaatctatttatattacattaatatttctatacccacaatcccaccccccatacactcacttcctttattatttagcttatattctggagtccttcaattgtagcaagtctctggccattactaacttacttgcccttcatactgcacttacctggcaaaatgctttaccttccacatgatctctttatctcatttacattttgttttctaagatattc

SEQ ID NO: 402775 - DNA, 287 bp, Homo sapiens
aattatacaaccatcaccacaatcaactttagagcatttttaacaacctcaaagaaacttgttctcattagcacccactcccaattcctccctactcccagccaaaacaaccactcatctaccttctctctattgatctgcctattctagatatttcgtataaatgaagtcataccatatatggtcttttatgactggcttctttcacttagcataacgttttcaagggtcatccatgtagtagcatgtatggatatctcgttctttttatggctaaaatatagtcc

SEQ ID NO: 402776 - DNA, 477 bp, Homo sapiens
catctcttttgggactcattatttcctactttgacttataatcatttgtgcactattgtttatccccccctactgtactgtaacttcttggttgaagggatcttgacttatccttatttgtaattccctctagcacctgaggcaatgtagcgcacagtgagtggcctgtaaatagcttttgaatgaataatatataaaacactaacaatacaagactctatatctgatctgccaaatgcatagaactggcagcaagtgctgtagaagttcattgggattgggttgctcaggagagtttccatagaggaaggagtgtcttcaattgaaaacgtgaaaaatgaactggagaaacaagggtgggggcggtccaggcaagtggaagagtatgcagggtgtttataaggtggaaacacagaaaagttatattttatgctttagtggacactgcagatttcttggaatggtacgatttttgta

SEQ ID NO: 402777 - DNA, 1310 bp, Homo sapiens
ctcacaggagctcagagcgagaactcattcattatggcaaggacagcaccaagccattcatgaggggtccacccccatgacccaaaaacctcccattaggttcctcctccaacaacggggatcaggttttaacatgaggcttgatgtggccaaaaaaccacatccaaaccatagcagtagcccagcttctcttttcactcattgtgtttgttgccaataaactctgtagcctcaaaagatgggaacttttccttttgggtgttgtggatcccatccatgaaaccgaaagtaagtgttgagcagagcaagctgtatgtaaaggccaaggaatgaagaagcaggagtgtggctcacaaatcaacttctctactcctgaggggtgaggggattgaaatagagggtttcttgaatgaaggggttggacattgaaagcaaggggaagaatattcatggcttttctggaaatggacggtgaacttctgggagctgaagcactgccatctttttgtccttttacggcgtcttcccgtcattgtcatggtgattgtcagccgctgtggcactggtgggagtgtcacggagcatgcaaatgaggttgtaatgaagttggaggccctgcaaaggccaggtggacttccacttagcatcctgctggtcttagctggtttaaccaagaggggagcctctgacctcaggcatcctattgctgaagataggcagagtttgagttgtgcaactgttcagccaagcctacaagatgtatagtgctgtgggggtaacatggcctccctacccagcctcgcttcagaactttcgtaccaaggctggactgtagaaaagtccttcctatgccatggcactttcccactgaggcctcccatgggtgccgtttcctttgctggaaggttctcctcgactcctggcagtctatactcatttaaaggtttccgccttctctaaagcctctcactgctggacttcacggtggatcagatttcccttttataaacattcatagcagactgtacatttctttcactgcgtttaccaaacgatttgatggcgaagtgcgtcagggcgtgggccttctccatcactagcgttccttgcaccccaggagctcaatccgtgtttcctaaatgaatacttgacatttcgcttgatcgtatatttttgcacagcagtgatcttcacgacctttgattaggcagtggcttctcagatacgacaacaaaagcataagcaaccaaaggaaaaaattaattggacttcatcaaaattaaaaactttagacttcaaaggacattctc

SEQ ID NO: 402778 - DNA, 431 bp, Homo sapiens
gaagaagataatgttcttaaaccactcttggtgaaacaaatgcacttatcatctccccttcctacgccacttccaaacccaattctctccagtggctggtgatgctcacctggactgaatttcccagcttctgccgcaggtctgtgaggccatgtgacctgagaagcagtgaaggtggcagaagtgggatccaccacatccaagctcaggccatgaaactgcctgtggcatcctccacactcttgctcttctctctcctgctggtcagacatggatgatccagtggaggcctccaaggccctaggggatggcagaaccgctcgatagcagatgcttggggccctggaggactgcatggatcaaagccccctccaaccaaccttgattgtgaaatgatgatgaaataaaccttcattatggtgtgtcaaaga

SEQ ID NO: 402779 - DNA, 416 bp, Homo sapiens
ggtccatgggagcaggagttgtctcgctttctgctgagtcctctgcgtccccttcttgcagtcagagccccacagttgacgtgtgctcttaccgctggactgaatttcccagcttctgccgcaggtctgtgaggccatgtgacctgagaagcagtgaaggtggcagaagtgggatccaccacatccaagctcaggccatgaaactgcctgtggcatcctccacactcttgctcttctctctcctgctggtcagacatggatgatccagtggaggcctccaaggccctaggggatggcagaaccgctcgatagcagatgcttggggccctggaggactgcatggatcaaagccccctccaaccaaccttgattgtgaaatgatgatgaaataaaccttcattatggtgtgtcaaaga

SEQ ID NO: 402780 - DNA, 565 bp, Homo sapiens
  misc_feature (24)..(24): n is a, c, g, or t
  misc_feature (34)..(34): n is a, c, g, or t
  misc_feature (50)..(50): n is a, c, g, or t
ctggagcggttttctcagtgctcnatgttgcccnggctggagtgcagtgnttacagtcttggctcactgcagcctctgcctcctgtgttctatgcaattctcatgcctcagcttcccgagtagctgggactacaggcatgcaccaccatgcctggctaattttttgtattttagtggagacagtgtttcactatgttgcccagggtggtcttgaactcctgagctcaggcaatcctcctgcctcggccttccaaaatgttaggattacaggcgtgagccatgaaacctggcctcagatacaacagctttctgatactacagagtcactccagctaaatgcaggaggtttgtcaatttctttgagacaatgggaaataataatggaaaacttttaaaaacaattgaatttaaattggtgggttttttcttcaaaagtgttatcctggattaaattttacactgttgaccttatttgaatatttactatctggccaatcaagatatgcttttgatttgttttgggtttactctagaataattgtctccagattttatggggggaatc

SEQ ID NO: 402781 - DNA, 314 bp, Homo sapiens
tggggtctaagaggaggagaaaggctgggggattcctttggggagggggttgagttggatcctgaaggttctacaggaagccattgggggccctctgtatttgttgttttcacagattgacgttttttgggacatgtgttttgagggttttgtcccataccatacctcactggttctataactcctcctcaccctttgccccaacactgctaaatcatcgatcaacagaaaccccaggtttgaccctgcttctggtgggtgcccagcagcagctgtgctggagcacactactgctaattcccccccacactgaa

SEQ ID NO: 402782 - DNA, 555 bp, Homo sapiens
ccctacccccctcttacatgaaaattgtgtacttttaaatatctcaccctttcccctttaaaattggagccctcaaaatcatcttcggagaaaggcgtagacctgtctccccggcgtggtgtccttaactttggcaaataaacctcctaaaatgattgagacttgtctcatcatttttctcgattgacagagcttaagggcaaaatgtggtcttttaataaagtatctttaagcatttatgctcctgtaaaagatccctccattgatatatctgttggattttgtgagagagcagaggcaaagtcatgttttcactctctgctgactttaacagaaagcctccattaaaaaaaagtgtataggccaggcatggtggctcacacctgtaatcccagcactttgggaggccaaagcaggtggattacctgaggtcaggagttcaagacaagcctggccaacatagcgagaccctgtctctaccaaaaatacaaaaattatctgggtgtggtggtgcatgcctgtaatctcagctactctagaggttgaggcagaaga

SEQ ID NO: 402783 - DNA, 467 bp, Homo sapiens
ctgtcatctcagctactgaggaggctgaggtgggagaatcacttgagcttgggaggtcaagtctgcagagagccccaccattgcactccagcctgggtgacagagtgaaaccctctctcaaaaaaataataataataataaaataataaaaataaaaataaaataacaggaaaaagtgggagataagatagatgaagtgtgaaattgtgaagaatcttttattcagccaaagactttggacttgatgctgtagatagtcaggaaaccattgggaaattttaagtaatggtaaggggcaaaggagggggtggatactagaggaccgatttgaaagcgattgtagaaagtattaagaaatgacaggatttgttacattcgatataagacagagtgaataactgaggataggccaggtgtggtatgcctgtaatcccagcactttgggaggctgaggcaggcagatcacg

SEQ ID NO: 402784 - DNA, 253 bp, Homo sapiens
ggaaaagtagtttaaatatggtgccagctgtggcatatgactgcctcaggcagttagaaatgtttccactgatacctctgagagagaaaatcatcactcaatctaaccataaaagctacatagagacaaaaatcaatcattctaaaagagcaaagaaaaatatcatgatcctcaggggcatcaataataaacacacacacacacacacacacacacacacacacacacatatacatatacacacacacacacc

SEQ ID NO: 402785 - DNA, 474 bp, Homo sapiens
  misc_feature (451)..(451): n is a, c, g, or t
agagaacggttatcctgatttcaccactaggaaaacactggccaacaaatttgattgtccggttaacgtgataaacgtaagttcaacctcgtatgcatgtttcttagatttttttttttttttaggaaaggtctcactccagtcgcccagtctggagtgcaatggagcgatcacggctcactgcagcctcaacttcctgggctcaggcgactccccaacctcagcgctccccatttagtagcaaggactacaagctcccaccaccacactgggctttgtattttttgtaaagatgggagtcctgccatgttgcccgggctggtgtcgaactcctggggtcaagcaatgcacccatctcggcctcccaaagtgctaggattacaggcgtaagccaccgcaacaggcctatatttttcatattgtgtgtgtgtgtacaattttctctcaaatnggttctggatacacatgatcttg

SEQ ID NO: 402786 - DNA, 609 bp, Homo sapiens
atgcaggaaacagactcagaattgtgcttcaggtgggaccgttgaagtttgttcctggaaccagactaaggatcctatcataagtacccttgcccaccacacccaccctttttaaatataatcttgacacatatcataaaagttgaaactacatttcaaaatcatatttggctttagtgttagaataaccaatcccaacaatactaaaatactggacttgccattttcttttcatgcttcattttaaaaacatttaaaaagcttggatgtattgagtaaatctggctgttatcatttggtgggattacattctgtataggataaattttaaatttctgttcctctgcttgttctgttgagtctgtattaactgcttgaagcagttaatacagactcaaaaagcaatgtgctcaaattgcttaagctaaggtgtagggcagaaactccttatactacccactctaagtataaccccaaactcaccaaagcaaatgggctgaacttggggaaaaatatgcaaattcatggatttcctggctagtgctactattttgagaaacagacacgtacacacctctaccttccaactccacaagaattactccatgg

SEQ ID NO: 402787 - DNA, 225 bp, Homo sapiens
acaatgaagaatagatttttgagatgagatgcagtaaattgatgacattatttttgactcaatttatgatttgcggcttcttatttggaatattttctttgtctatagaatttccttaggtctcctgcttctcttccacctattctgtgttccttgccatatcttccctatacccaagctcagacttctagtgcattgcccagcattcacttctgctgttatatc

SEQ ID NO: 402788 - DNA, 424 bp, Homo sapiens
gtcctggatactaggactagagaagtcttgtccagcaggcggatatctgaagagtatagcagtggacagtcaatgatttaagcagtcaccttgcaggttagcttacgtgaaatagaaaggtagaaggagttaggccactttgcatcaggagccctaagggtctgtggccatttggaagacaagtagggagaatggttacctgcatggcttccagtgcttacggagagaggaggggaatatggcatggcaaagtggggatgaaggttatcagttaggtgtgaagtctgagattggcaaataaagcaggaatcataatatcaaaggtgatggacaacacgggagagaggcacaaagtgttgggaccatgaagagttgtccagcttccagagctggagcataaagttaggaccagaggactagcctg

SEQ ID NO: 402789 - DNA, 358 bp, Homo sapiens
tctacacttccattatagtatttctatcaaactataaatttaaaagtctcacttctacaagttcagggatccatactcccaaggtttccacaaatcctctaaattataggcaaaattttataggttcattttcttactgggaaagagttcagagctcacatcagtttctcaaaggagtctataattactctctcatgagttctagagttctttgagtttctacagatagatgcctaatattagctgaatgagcatttcagttattgtttagaggtagctgcttattctagtaaagatatatactaaattcaacttcctctgtttttttatttaagtggatagaaagtgtgatactgtg

SEQ ID NO: 402790 - DNA, 459 bp, Homo sapiens
ctggtaacttcccttctgctttttgcttctatgagtttggcttttttatatttcacaccaaggtgagaacatgcagtatttgtttttctgtgcctggcttatttcacttaacatgatgtccttaggttcacccaggttttcacaatgacaggatttccttcttttttaaagccaaatagtattccattgtgtatacatactacattttctttatccattcatccattgatggactctttggttgaatccgtatcttggctactgtgaatggtgctgcaataagcgtgagagtgcagatctctctcctttctttcatttaaatacattcttttatttgaaaatttgtgttttttcattttctttttaaaaatgttttcatttttaatttttatgggttttcggcggcaacaacttcgtccaccaggatatgaagaagtgtttgggtcctcggcgtgtgca

SEQ ID NO: 402791 - DNA, 296 bp, Homo sapiens
tctgagctagggaataaagtaaacaggcatctagcaacaggggagatgcaagaatggagaagacaagttgttcacgaatcctgcttctgttccctcactgtctacaaggaccacatggaacagtgaaaaccacacaggcttgaaccctatcgttacgacttcatggccttatgaccccagacaagttccagggatgatgctctacccataggcttactatgtggaatagaggaaaacagacgtgaaccaaactgctcatgcatggagctgtgaactacaatgctggcccctcaggt

SEQ ID NO: 402792 - DNA, 355 bp, Homo sapiens
ttgtggcaaatgctacagtaatgaccagacacatcacacccgccttctagaagccctccctcacaaaccggatcaactgctatgataaagtgtccactaccattccttgagggcttacaatggcttctggttgggagaaagatgggaagaggaggacattcaagaagatcagagacgtctggggtgtgcagaagtatttttccttcttattttcctgtattcaataggtaacaccatggtgtgtggcttttctgggcagcctgcaaatgtcattgctagtgacaacatttttctgcaggaaaacatattccagcttttaatcatctttagaataaacccatttataagcagtata

SEQ ID NO: 402793 - DNA, 601 bp, Homo sapiens
ttcatgcctcctaaaatcaaaggcttttcacatttcatatttccaagtgttgtcataagtctgactttggaatcatcatttacactattcatagttcttttcatctatcaaatgttataacctgttgttccctggattctgtatgaaaccagagctcttctgcttttgtgtccaaatattctctctgaattttccctcgagtcattaaaaaagaactattatctgactcttccatgatttgtctctggataggaagccccaaattgcattagttgtttttattatcctaatacactgaaagcctgattttactataatttgttcttcactttcatcccagccctaggtctcctgataatactgctttctaaattgtgtctattaaatgccttatttgatattattatttcacagattcatatcttacatttacccaagtttcatttcatttcttctttcttctttgtaacctctttagattcttttgtgctagttatcttttttctgagaattgaaagtagttcccaaattatagccaactacaaatttccttagtgttcttttgacctcactttccaacggtctcactaaataagacaga

SEQ ID NO: 402794 - DNA, 353 bp, Homo sapiens
gacagaacctgaaatctacttggagtttggggaatcagagttttagttgtgattcatttgtgaactttgacagctttgttgtcttctctgagctttaggttttggaaatgagatatgagttatagggtgtcagaacaggttctgggcttgtatttaaggttctgctttctctttcttagcatgtcatccagtcctaacaccaggaatgtagtttctgttccagtatttgttaggagttgggacagcttgggtattggcaggcttccttggttctgcctggcctggaagtgtatctttccttccaccgtgccatgtgggaccacaaaggagaatgccatgtaccaattattgta

SEQ ID NO: 402795 - DNA, 610 bp, Homo sapiens
tgacagagtgaaactccgtctcaaaaaacaaaaaaaaacctgctatctttccccaagttaataaccatatgcagtaatatttcagttataatatttttcctcgcaataacatatttattttatttctttagaataaatgtagtcagtaatttcttctacctttttataagattataaaatatgcctaaaattaaggtttccaaaaaagtgataatcttctctaaagtcaaattctatacattgataaaaatgactattttatcagtatcaaaatgttaacttctgtttttatatatttaaataaaatatacagcatactaaacttcgttttaagtcagtagcccacataagaagtcattatactagaaccagagcatttaacaggtatcttcgatacaatctatgctgggtttaaaaaaatttttgctacctatattatgaagccaaccccacttgaatttgacttacaattttaacactgaagttctctcacaatatatcagataagttatttcgttgtttagactgagtactacttgaaggcagtttgcataagttgctcatctcagtgcatacaacagctaggtaatagcaggcactcagatacttg

SEQ ID NO: 402796 - DNA, 122 bp, Homo sapiens
ccgccccccccccccgccccccgcaaaccttcctattgccccctcttccccgcacccagtgctccttccgagaaagtacggctggagcggactggggagacggaaatattgagtcgcggccg

SEQ ID NO: 402797 - DNA, 480 bp, Homo sapiens
cagaaaacgaatatacaaatccatttacaaaaacaaagcaaaaccgttgtgagaggtgagagctgggcttgaaggttggagggagtagcggaaggtcccagtgagctgcagggggtctctgtgatggaaaggtggcttcctcagacaaggaaggtgctgcgaatgggggaagacagaatccaacaaagaaagagaccacacaccccacacgcacacaggcacgttcacacacacatacacagtccacttagcccagcactgcagtcactcacagggacacactcagtctcaacccttccatcccatacacggccaggggcgtggctcaaaggaaattgactcatgccctccaaagccatggacgacaacaactccacactggcctttgtgttcattcacaacctcccaacagagcatacacatgaacacacacatgcacacatacccacacacgcacacatacccacacacacacacaca

SEQ ID NO: 402798 - DNA, 350 bp, Homo sapiens
tgtgagacaggtagcaacatcttgggtagtttggagcaagggcttggaagcccctgctggagtgtggaagaagtcaggggactatgggtagtggtgcagcagccatgtcctggtatctgttctcaggcagcccttgcgtgctcttccttacccaccacctccactcccagctgttcagcctatgctaaccagcccagccaccagaagctcttgcccccagagtcctaggtggagagtttgacagtaggggcttgtttacccactgggcctgggccatactattggtcacatgtgaaattctgagtcttctgttgatcttagacaagtgatctacagtaaggtttgcctgg

SEQ ID NO: 402799 - DNA, 494 bp, Homo sapiens
ccagcagcagcagaatacacaatcatctcatcaacacatggaacattctccaggatagaccatatgttaagacacagaacaaggctcaataaaattttaaaaattaaaatcatatcaagtatcttctcagaccacaatggaataaaacttgaaatcaataagaagaagaaatttggaaactgtacaaatacatggacattaaacatgctattgaataatcattgggtcaatgaagaaattaagatggacatcaaaaattttttttaaacagaaaatggaaacacatcatgcaaaacctatgggatacagcaaaagcagtactaggaggaaagtttatagcaataaatgcctacaccaaaaaagtagaaagattttaaataaacaacctaatgatgcacctcaaggaattcaaaaagcaagaacaaatcaaacacacaattagtagaaagaaaaaatataaataaaatagcagaaccaaatgcaacagagacaaa

SEQ ID NO: 402800 - DNA, 1463 bp, Homo sapiens
  misc_feature (57)..(58): n is a, c, g, or t
  misc_feature (67)..(67): n is a, c, g, or t
  misc_feature (352)..(353): n is a, c, g, or t
agaaaactgtccaagaaactaaccttccttgggtcactcttcttcccatggctttanngtggcgatnaaagtcacaggaatggactcctggatgcatcactcaagtcaaagcctggaaacctgagagagagagcaaccccagacagcccagaggaatgtcctggatatccatgtgaagaaataggagatcttaagctgaaaatcataaaagataagtaaatgagtaagggctattcatcctactcagtcccactcctaccttatcagatactttcagttatttctacttttcctctcgagattcgctgtgagatactagaacttctttttgatgcatacttgtgggaagatnntgattatccatgagattacagttgtaacttcatagactcccaaagggaaattcttgaaagatcactctggctgacagataggaggatgggctgggaggcaagaaactgcagactgggaccaaacaggaggataacagcaatgagcagagataaggtctcactacgttgcccaggctggcctcaaactcctgggctcaaacaatcctcctgcctcagcctcccaaagtgctgggattacaagtgtgagtgaccatgcctggccaacccacagctttcaaagcgtgctgatttcaactgctactctgatgcagaatatcatactgactggacctggcgagcaggaaaagttgcaaacaccctagatgccttagtaagatacctgtgtgttacaggatggagagcctgactggctcatggagaaagcctacctaagaatgaaggcgggacccggcagaatggctcctgtgaagaagggtggcaagaagaaaaagggccgttctgccatcaatgaggtggtgacccgagaatacacccatcaacattcacaagtgcatccatggagtgggcttcaagaagcatgccccttgagcactcaaagagattcggaaatttgtcaggaaggagatgggaactctagatgtgcacaactgataccaggctcaacaaggctgtctgggccaaaggaataaggaatgtcccatgccgaatccatgtgcagttgtccagagaatataatgaggatgaagattcaccaaataagctctgtacttcggttacctatgtacctgttaccactttcaaaaatctatagacagtcattgtggatgagaactaatcactgattgtcaactatatcaaacaaagttataaaactgcaaaaaaaaaaaaaaaaatgaagccaacaccaaggaaaacaaagatgtcttcatgtgtatgacagaacaagtaacagactaacagaagctgcacacatgctcaagaaatagagatgcacgcagagacctgacaacatcctgtgcgcctatatccagccaaagcatccagcagactgacctcatgatttttcacatacatgaaccaataaattcccttttttgtttaagccacttt

SEQ ID NO: 402801 - DNA, 416 bp, Homo sapiens
aaaacaaattcaacagtatattaagaagatcattcatcggccaggcgcagtggctcatgcctgtaatcccagcactttgggaggccaaggtgggcggatcacctgaggtcgggagttcaagaccagcttgatcaacatggagaaaccccatgtctactgaaaatacaaaattagccaggcatggtggcatatgcctgtaatctcacctcccaaagtgctgggattacaagtgtgagtgaccatgcctggccaacccacagctttcaaagcgtgctgatttcaactgctactctgatgcaggtaggaatacatttattctccccctcatatataagaacatgaaagtgcagggtgggggagacttgccttattttatgtaactaggctttccactgaaaacaactagaatgatgaat

SEQ ID NO: 402802 - DNA, 424 bp, Homo sapiens
tgatttttaagagtgcttaccttttagagctacatactggaatatttatagatgaaataatatgaaacatttatggctgtatatatctgagatttttcttcagaatattccaggagggggcgtgatgggggcatagatgaaacaagattggccatgacttgataattgtcaggtgataattgttggtgataggtacctggagtcaattttatgatagactctaattttatatgtgtttaaaaactttccataacaaaataccaattacctctccctgccaagaattaataaatgaataaaccaatcagtaaaccaattaataccatctatttgtaataccttgagtgggttttgtatttctgtctacagcctgactggctcatggagaaagcctacctaagaatgaaggcgggacccggcagaa

SEQ ID NO: 402803 - DNA, 1206 bp, Homo sapiens
cgacatcagtctccagagtgaatccaaggagtggacccaagacatttgtgttctgtgatgtggtggcatgttacctgtcatctccgatgcataactcctaaagtgcgtctggggcagttgtacagattgcagaggataatactcaagatgttctccaaggccaactagtcatcagtttattcatagctcccaagatggtggtgggccacttccaagatggtggcaagagtcgtattctctgacctggggttcttggtctcatggattccaaggaatggaatcttgcgccatgtggagaagcgtcagataattaggcagcagtccaacaattaggttttgtggaacttttactatgtcatctatttattggaattccccctggataccaggaccccctccagcagagcttaaagttatagttacaggaagtacaaattccttatgtggatccctggaagtgtgatgagaagaaccactgtttccaagatctatttattctatttatcaggcctataaaatcatgtaatggccatggcttcaactagactccacatcttgaatcacagaactcaacgaatggcatcaactacaagctggtattctgctatacatttaagaggccattttaatattctattagtctagcagcttctaagtgatgagggatatggggggactggaggatcccgtgctcacttccttttctgtaaaaggagctctttgatccaaggtgacatggtatgggatccaatgacaataaatcagttattctgtgaaccctgatcaaaacttgactcaacttttgacagttaggttttttcctgaccacagactcctcacctttcttttcttagaaaatttacattggaaaacagatgtaaattttctccagcctcttgcaaggtttacagtccaggactttgaggtcctgggagtcatccttttgaaatacaatcatcaaagaagatagtgctccaatctcctagtctctgtgggagggttggaacctaacttcagtaaactaatcaccaattagcaaacacagaggggctgatcatactgacccactttcccactaaaatgtctagtactttccaccagctcaccacagtgcttaaaaactctcctgtcttttgttttactagagttgagtccaatctctttcatctattgcaatagtgttgaataaagtcttccttgcctaac

SEQ ID NO: 402804 - DNA, 498 bp, Homo sapiens
ctcatctataagcaaggacacctctggaagacgcaaggcctggatgtcacagccagccttatcaataaacaatcttctgccttgacagacggaagaggaagggccaattcaatgaatactcagatcaagtgtctgtctggaaagctggcagtcttccagaaatacaattagggcccattccagtggaacagaagtgctactttgggggtggactgaaacaagttgctgggcttccattggccattgccacttgcttgtcgttgtgaggaggggccgtgcctccacaggcccatacctgtaacctgacgatactgttgtgagcgggaatggaggaagtgcatggaagcccctcagcacgatgcatagtgaacagacaagctgtgaaccttgggagttatcaccatgtgtgatgatgctggtgaagaaagcctgcactgcggaggctgacagcctgggtttgaatcccctcatttggaatataatcttggcaaagtcaaa

SEQ ID NO: 402805 - DNA, 385 bp, Homo sapiens
gcatcttcaatacgtctgcgtcaaagggagcagaatagggcagaagagaaggactgggagagactcgagaaacaaaaccaccaggtttgagggataatctttgaaggatttgaacaaacctgctgtaaagacatttcaaagggggtcgggcacagtggctcatgcctgtaatcccagcactttgggaggctgaggcaggcggatcacctgaggtggagagttcaagactagcttgaccaacatggagaaaccctgtctctactaaaaatacaaaaaaattagttgggcatggtggcacatgccagctactccggaggctgaggcgggagaatcgctcgaacccgggaggtggaggttgcggtgagccgagatcgcgccattgcac

SEQ ID NO: 402806 - DNA, 742 bp, Homo sapiens
tcagtggtttacatgcctctgaaactatgtgcaatatttttggttgacacttgtatccatccttaagaaattagtgcagattgcagatgttctgtcttccatcccaaacaagcctgccatgaggtaggatcctaggggtttggctgttcttactccactgctcagaaagcttccattctgctgtcctcagcctcgaccctcttctgtgctggacttccacccacccacccttttcaagtttagatagtgtttcagctgctgtcccaaagtaacaaaacaatacctactgttaagtaggaagtcaatctgtgtgctggttttgttggttatgtggaaatcacaaactccagaggagcaaaggggtttttcaatgtcttttgctttcagaaacagagaatataatattctcactaaggccttgaattgatttttttctcataaaatagtctgataagctaatttttaaaaagaaatgccattaactgtgttgtatcgtggtttaaaattactaacaagttgtgggaaagaaaaataatatttgattttgaatcttaaatgtttttaaaaattagacttgaatgggcacaaagtataaatattttgtttctttatggaggacatgtggaaggagtttgagggtttgggatgggagaagtattttgcagagctatcaatgtccaaataatttaaaaaaaaaaataaaggtatttaagcagtgaaaaacaacaaaaacaacaaaaaa

SEQ ID NO: 402807 - DNA, 735 bp, Homo sapiens
gaaggcagggaccactttttccagggatttgtttccctatgctagtgctccattcacccttgcaccacttcagcaaagcacatagtaggtgtagcagggagatgttaagatggaaacttggccctgaccataggccaagccagggtgtctagtcgggatttatccataaacatcaatatttatcactagatgatatattgatttcttatctgcctcctatacctattgatctatttttcacagcttatagtggggagggtcatgttcagttattatccttaaaccaaaacaatctcttcttgaaaaataggatgctatgctctgatgtttgcagaggccaggaaattcttgctctgagagttccagaaaaaaagatttgtccagatttgaactaatttcagaaaaacaaaacaaaaacaaaaaaccatccaaggttaagaggtgacttctgactcacagaatgaacaagaaggcaggggaaaaaataagtcccccaagattcaggtcaaaggaaatgaacagaaggatgatggagtggcccagaggaggatcacgtgacagaaaagtcaagataaattagtggcaggacagaggaaaagaactaaagacctgcaggatcctgaaagaaagaatgaaaggaagcagatgaagattctagagcccagctgaatagccaggccgcctgagggtaaagagggagagaaagaggaagcagtgaatcaaatcaaaaaaaaa

SEQ ID NO: 402808 - DNA, 330 bp, Homo sapiens
aaaaggcggagggagcgcatgtggcccaggtccacgcggaacacgccgcaaatctgctccagggcgcacacccgctgcggctcgtcccagcgtggggtctgcaggaggccgttgctgtccgggaaccgcaggccggcgtcggagctggacggggggctggtggaacaggttatgtgatgatcgccacacttctccctgcccacactacccagagggggacgggggtcatgggggagtcatttaaacctacgcaccaagcttaaacacacatacaggcacggctgaatatgccctgtaaacccctgtgaataaatgaatgtatgaacccca

SEQ ID NO: 402809 - DNA, 209 bp, Homo sapiens
gtgtgttcatttaagaacaatgggcaaggctcaagacaaaataatacaggaccgtcgcatttctttttctttatcccaccctccccaacctgagagttcacacacaggattgtattcttatattttctttctattcctccagtgaaaactcaaagatcaaatacactcatttaccttaagccataataaagctaaccaatgaggcttac

SEQ ID NO: 402810 - DNA, 360 bp, Homo sapiens
tgctgggattacaggcgtgagccaccacgcccggccaggattattattttaatgtaaagaagtagcaaatgtgttaagtttaccaagatttatttttattttattttattttattttttgagacaggatctcactgtgttgcccagggtggagtgcagtggcgtgaagtcggctcactgcaactcccctccttccgggttcaagcgatcctgtcacctcagcctcccaggtagctgggactacaggtgcccaccaccatgcctagctaacttgtgtattttttagtggagacggggtttcaccatgttggccaggctagtctcaaactcctgacctcaagtaatccgcccgccttggcct

SEQ ID NO: 402811 - DNA, 595 bp, Homo sapiens
aatatgcgcagtcatctctgggctttttatgtgtcactcattgatgagaaccaaaactggacaagattagaagtgaggctttccttctttccaagattggattttctgttccacccagaacaacctgctgttccccagctgcacgccctggtttcaagtaggtctaaaattacaagagaatcaccttgctccaaggaagctggcatctctgtttcctgatgaaagtaggtactagagagtggagctacccagaaaccagggggtggcatgttggccatgtggaggcaaacagagctgtgttttcttttcttggccttcttaaagatgtatctaatttggggcatgttttgtttggttcatcttgtatctggagaggttcttcttttctccctaagtgacatccctcttgagcccacaattccctcttctcaaggtgagtaatcctctctctagctgttcataattgctaattagtgaacaaagaggctaaccaacaaaattagctattgggccagggtttaggattgaaccaaagggtggagaagggctttagtctgcttgttttttatttgtttgggttttttttccttaaaaa

SEQ ID NO: 402812 - DNA, 151 bp, Homo sapiens
ggctaggtttcaagagtagggaactgcccagagattatcctccctccaaaaaacccctagtgcgttacattctataccttctcccctagtccgttttattttccgtatcaaagagaatgctcaggattcagccccctcatcagtagcaaga

SEQ ID NO: 402813 - DNA, 212 bp, Homo sapiens
acacacacacacgcacacacacacagagttgacccttgagcaacacaggtttgaactgtatgggttcacttataatgtagattttcttttgcctctgccacccctcaacaaaaccaacctctcctcttcctcctccttagcctattcaatgtgaagataatgaagatgaagatctttatgattgatgatctacttccgcttaatgaatagta

SEQ ID NO: 402814 - DNA, 461 bp, Homo sapiens
agtggtttttgtaattgtgatcgcccacattttgcatgttgttggcagattggggtgggggaaattgtgttgaacttcctttaaaagtttgtatatttttaagtagtttggagactcagaactgttcagaatacttccctttttaaaaaaaataatataaaactgttaatagtatgatatttatagtggcaaaaccatggaaacaaatggagttcctaaaattagggaataattgaaatgaattatggtatatccatactttgcaatgttacacaactttcaaaatgagttacatctgttcaaagtatttctgataggttaagattagcagtaggatctcattaaaattaattgccttagttgctgattttatttacttctgatatttttctaagttaatgatcaaagcatatttgctgatcattggttaataatttaaaatcaaggtatggaaaaaaaaa

SEQ ID NO: 402815 - DNA, 180 bp, Homo sapiens
gcatgaggcaccgtgctggccggcaaatcctgttttctagactacatctggaatttgatcacttcccatcaatcctgtcactcccactcagattattttggtaatgtcctaactgacctacttgtgtctgccctcatccctctattcatcccagcctccagggcgagcctttgaacacac

SEQ ID NO: 402816 - DNA, 613 bp, Homo sapiens
ataatatatcaggactgcattggatttgtgcaagattgtcttaacattaattgaccccattgacagcttaaggggaaaaaatgtgatcatctcattggatacagaaaaagtagtaggtaaaatccaatagccatttatgacaaaaatttttagcaaactgggaatagaagggaactttcttaaatggctgaaatatcagcagagttctacagtaagtttacttaatgtttaaatactaaaagcattcctttcaagaacagaataaggatgcatgctatcactacttctattcaattatggagttcctaactagaataataaaacagaaaataagaaaaatagaaaaaattatcacttgtggttggtaattattgtctacatagaaaattctctatgtagacaataattttctatgtagataataactaccaactacaagtgacaattttgtttctatttttcttattttagaattaagaaagtttggggccaggtgtagtggctcacacctgtaatctcagcactttggaaggccaaggtgggaggatcacttgagcttaggagttggagaccagcctgagagacataggaagaccccatctttacagaaaaa

SEQ ID NO: 402817 - DNA, 340 bp, Homo sapiens
tacattttgttctcaatagtgtacattaagcacacttgcacatttaaagtattcatggaatttataatatagtatttcaaacaaagtaacaaataacttcctatcacagtccatcatctatacccccttcctccagctcccccagaaaacaccagctgctctatcaccttttaacctacaaaactcaaaggatgatatctctgcatatttattggttccctttccctggggcagaaggtaattaatttgacttaaaaatcctcctcttcaaattccttccaggctagataagctaagatcctgtttatgtaaacaaaagtgctttattaaactgagcatg

SEQ ID NO: 402818 - DNA, 287 bp, Homo sapiens
ctagatctaacacgtggaaaagagagacagaaggaaggatgatgggagaggaagagtcttcaactgcagtgcagtgagaaagtttttacaaagtcaagggggagtccttgatccaaagctgcctgttcgaggagtcctgtgtctccacgaacagacgcgccttagttctttggctgggatcagctcgtgggaagcaaaccagagccttcctgtgtgaaccacagatgggtttcacacaggaaggctgtggtttgcttcgcaggggggtacgcgagctcgaaatgcgt

SEQ ID NO: 402819 - DNA, 268 bp, Homo sapiens
tctgccatgtgcagttactgttctggatgttggagatgtgataatgaactagacccatccagtcctgctcttcaggaatgtggtttaggtcaaaaggcaattgattagagcctgccttttcccacttgcttgccatgtgcttttaacagttgcctgggccttaatctccttttcctggccttatttatatagcaatgacaaacacacatgttcacttaccagccccacctcttgcattcaaagcaaacatcactaatcaatctgtctc

SEQ ID NO: 402820 - DNA, 343 bp, Homo sapiens
agactgtgattcctgggggaattttctgtgctttgtgcctggtagatagggggaaggatgttgcagatacagaaattcgtttcttttattatctgcttggcgtttttcatgtctctggccccagggatcatttcagcttcagacttgagttctgggatattgctggtgataatcttggtgctgggtattttttttttttttttcgattttctgttggggagagtgaagccagattgtttctactctgagattttggcgttgccacagatatgtacacatatactaatccttatcagcggtataaaattgtatgcacttcctcacttatgtaccttttaacata

SEQ ID NO: 402821 - DNA, 654 bp, Homo sapiens
attgatgatatttttgagttccctaagtgagaatgctacattagatgcttttatatggcattaaatactactcctacctaagcggtttttcctgttcttaacatcttgaattagtatggtacatttgttacaactgatgaaccaatatcgatacattattatattaactaaagtctatagtttaattaggattcactctttgtgttggatagtcttacggtttttaccaaatgcctattatgtctctgttgttataataccatacagaatggtttcagtgccctaaaaatcagtgcttcacctattcatcgccttcttctcccctctccctgagtgcctagtaaccactgatcagtttactgtctcagtagatttgccttttcttgaatgtcctacagttgggaatcatgcagtatatagcctttcaaattggctttcatttaacgacataccttcaagattcctccatgtctttttagagcttggtaacttctctttatcactgaatagtatttcattttttgtttcattttgtggatgtaccatagtttgcttatccattccacctcctgaaagtatgtgataggtacaagagtcacagcccttatgacatgttggaacgcatcaggaaagaggttaaaggagacctggaaa

SEQ ID NO: 402822 - DNA, 395 bp, Homo sapiens
ttcaggcgcccaccaccacgcctggctaattttttgtgtatttttaatagagacggggtttcactatgttggccagactagtcttgaactcctgacctcatgatccgcctgcctcgacctcccaaagtgctgagattacaggcgtgagccaccgcacctagcccttagcctatgttaacattatagtgaggtactgtgggttaagaaaaaattaaatgactcaaccaacattatttcttactgcgtgtgtgttttttaattcaaaatagtgtaacattttctctttttggaagacaaaaaataactgaaataaataactgctagagattggcatttgggtggacagacagagacttagaatctagtgttggcggataggctttccttcctactcc

SEQ ID NO: 402823 - DNA, 724 bp, Homo sapiens
ccgtgagctaaggtgaaacaaccaggctgaaggctttgcatgctgcagtgctgggtacaaccatgtcagttcaaaccagattcaatttggttggttaatgtgcccatttcccattgctgccatacaaacttagtagcttcaacagtacaaatcaattacctgtataatcctggaggtcagaagtccaaaatggatctcactgagctaaaatcagtgtcgtcagggcagtgttcccttctggaggctgcagaaaagaaagtgttgtcttgttttttccagcttctagaggccgcccacattccttgactcatgggccccctttctctgtcttcagagccagcaacatcacagctctccgaccaatcattcttccattggccacttctccctctgacttggattcctcttctgcctccctcttcttcttttaggacccttgtgattacgttgggccaggacaatgtgcctgttttaaggttagctaactaacagccttaattccctttttcctgtcagggaacatgtttataggcttcaggaaataggccgtggacacctttgaggggccgttattctccctaccacatatagttagttggttgattgttagttgttcagttattggttgtttggtgttggatggctgttttttgtttgtttgtttgttttttgagaatctccttggctcaggtcctcacctgagagccagataatcacgtttgtt

SEQ ID NO: 402824 - DNA, 360 bp, Homo sapiens
ggcccccttgatctctagggcattaaaatatatgggagatttccacccttcctcacggggcttgcaggctgagggagtgagaatttcctcaccagcagcatgggcaaattcgtaaaaagaaagaaataatttgcttgtttttaatggccaccaaacttcaaagtctagtgaccaccaaccagtccctcctcagtgaacatggtcgaatacagaaaggctttctctggaagagcccagaaacctgctgtctcatttcaaaagccatcttccttccccgagacaaacatggtggaaaggaggcccgcctgataacactgagggttttggggccagatttttttctgcaggcagttttggaca

SEQ ID NO: 402825 - DNA, 5053 bp, Homo sapiens
gggaaaaaaaaaaaaactgtccaccaagaattctatacctaaatatcttttaagtgaaggtgacataaagatgtttccaaacacacaacagctgaactagttcattaccagcagaccttcactgaaagaaatgttacagatgctttaggctgaaggaaaacaaaaccatgtggaagtctggatctatacagaaaattgaagagtactggaaatggtaactacatggattcaacacaactgcaatcaaaatcccagcaggctattttgtagaaatcgagaagctgatcctgaaattcatatagaaatgcaaaggacctggaataattaaaacaacttcaacaatgaaaagcagagtttggggactcgcagtgcctgattgcagacccggtgcatttggactcactgtggcgtggggtcccagatgggaggaagcttcctgagaggtgacgcctgagttgagtctaagaggacaaggagtgcggcaccttcccgtctgatgctggcgttgtgcgtatggtgccctgacgtctgtccacgtgggcgcggaagcaaacagcgatgtcccagacgcaggactacgagtgcaggagccataatgtcgacctgccggagtcgaggattccagggtcgaacactcggttggagtgggtggagatcatcgaaccgcgcacccgcgagcgcatgtacgccaacctggtcaccggtgagtgcgtgtgggacccgccggccggcgtccgcatcaagcgcaccagcgagaaccagtggtgggagctgttcgaccccaacacgtcccgcttctactactacaatgccagcacgcagcgcacggtgtggcaccggccgcagggctgcgacatcatcccgctggccaagctgcagacgctgaagcagaacacggagtccccgcgcgcctcggcggagagcagccccgggcgcggcagcagcgtcagccgtgagggcagcaccagctcctccctggagcccgagcccgacactgagaaagcgcaggagttgccagcgagggccgggcggcccgcggcgtttgggacagtgaaggaggacagcggcagctcttcaccaccaggagtgttccttgagaaggactatgagatttaccgggattacagtgcggacggccagcttcttcactacaggacctcctcgctgcggtggaactcgggcgccaaagagcgcatgctcatcaaggtcgctgatcgggagcccagcttcctcgccgcccagggcaatggctacgccccagacggcccacctggggtccgctcccgcagaccctccggcagccagcactcacccagcctgcagaccttcgccccggaggctgacggcaccatcttcttcccagagaggaggccgtcacccttcctgaagagggccgagctcccagggagcagctccccgctgctggcccagccccgaaagccctccggggactcgcagccctcctccccgcgctatggctatgaacccccgctctacgaggagcccccagtggagtaccaggcccccatctacgatgagccccccatggacgtgcaattcgaggctggcgggggctaccaggccggctctccccagcggtcgccgggccgtaagccccggccgttcctccagcccaacaagcagggccccccctcgccctgccagcagctggtgctcaccaagcagaagtgtcccgagcgcttcctgagcctggagtacagtcccgccggcaaggagtacgtgcggcagctggtctacgtggagcaggcgggctccagccccaagctgcgcgccggcccgcggcacaagtacgcgcccaaccccggcggtggttcgtactccttgcagcccagcccctgcctgctgagggaccagcgcctgggcgtcaagtccggagactacagcaccatggagggacctgagctgcggcacagccagccgcccacgccgctgccacaggcccaggaggatgccatgtcctggtccagccagcaggacaccctgtcctccacaggctactccccgggcacgcgcaagcggaagagcagaaagccctctttgtgccaagccaccagcgccacccccactgagggccccggggacctgcttgtggagcagcccctggccgaggaacagcccccgtgcgggaccagcctcgcccccgtgaagcgagcggaaggtgaggccgaaggggcgcggggcgcggccgagcccttcctggcgcaggctcggctggcctgggaggcgcagcaggcccacttccacatgaagcagaggagcagctgggactcccagcaggacggctctggctacgagagcgacggcgccctgccactgcccatgcccgggccggtggtgcgggccttcagcgaggacgaggcgctggcccagcaggagaacaggcactggaggaggggcaccttcgagaagctaggcttcccccagatcctgctggagaagagcgtctccgtgcagaccaacctggcctcaccagagccctacctccacccctcacagtctgaggacctcgctgcctgtgcccagttcgagagcagccggcagagccgcagcggcgttcccagctccagctgcgtcttccccactttcacgctgcgcaagccctcctcggagacggacatcgagaactgggcctccaagcacttcaacaagcacacgcagggcctcttccggcggaaggtgtccatcgccaacatgctggcctggagcagcgagtccatcaagaagcccatgatcgtgacaagcgaccggcacgtgaagaaggaggcctgcgagctcttcaagctgatccagatgtacatgggtgaccggcgggccaaggccgacccactgcacgtggccctggaggtggccaccaagggctggagcgtgcagggcctgcgggacgagctctacatccagctgtgccggcagaccaccgagaacttccgcctggagagcctggcccgcggctgggagctcatggccatctgcctggcctttttcccgcccacccccaagttccactcctacctggaaggctacatctaccggcacatggaccccgtcaatgacactaaaggggtggcgataagcacgtatgccaagtactgttaccacaagctacagaaggcagccctgaccggggccaagaaggggctgaagaagcccaacgtggaggagatccggcatgccaagaacgccgtgttcagcccgtccatgttcggcagcgcactgcaggaggtcatgggcatgcagagagagcgctaccccgagcgccagctgccctgggtgcagacacggctctctgaggaggtgctggcgctcaacggtgaccagacagagggcatcttcagggtccctggggacattgacgaggtgaatgccctgaagctgcaggtggaccagtggaaggtgcccacaggcctggaagacccccacgtccctgcgtccctgctgaagctgtggtaccgggagctggaggagcccctgatcccgcacgagttctacgagcagtgcatcgcgcactacgatagccccgaggcggcggtggccgtggtgcacgcgctgccccgcatcaaccgcatggtgctgtgctacctcatccgcttcctgcaggtcttcgtgcagccggccaacgtcgcggtcaccaagatggatgtcagcaacctggccatggtgatggcgcccaactgcttgcgctgccagtccgacgacccgcgcgtcatcttcgagaacacccgcaaggagatgtccttcctgcgggtgctcatccagcacctggacaccagcttcatggagggtgtgctgtagcgggggcgcccggggacaggagggatgtcctgccgcccccagccaggccgaactccgcactcgctctcccggcagaggggccagaatcgcccggcccagccctggagccccctccactcccccaggcccctggccccggcgctccccacgtcttctgcctggtctgagggtgcagccagggcacagcagcggcggggagggcgcctctggccccccacctcacggccagttcccgcgggcaccgcctcgccctccgctggccgcgggtcagctccgagaaagtgccttctgtgtcctggagccgagcgacgctgcctccttggggccgggctgcctccctgtggctcctgcgcgccctggcctgggccttgcccagccgccccggtctctccttccctttctcctgtcctcgtcctggcctgcagctcttcccagccccgagagagcttcccgacctgtccccgcctcctctccctccctcggcccgtggtccccagctggtgactgctcaggagtttgggggctccaggacagtgggcccggggcctggcaggctctcggtgggtggggtgggggcccccaaaccaaagtcctctggggtagggagcagggctgggcaggcattctgggggcagggtgggggaggggcgagagtatttttttcttcgtgtaactgtaaatccagaatctatcctgcatcgcagcccaccgtgtatagagatataaatagagggaaagatataagaactaaatttgctaatgacatagttttaacctaaatgctatttatctctgagccgtccccgtcctccgtgcagagcaagttgaggtcattccttcttttcttctccgatcttttttcttggcttctgaccaaaaaccaagctctaccccatccccatcccagacctgcaggagacgagcgagcgggaaggcgccgggcccgggactgtccgttctcggggccagagctgctgggggaccgagtttgtacattttccattttggaattttgagttccaattgttgtaaaacttaatttctccccagtttttatatatatattttttagagttccgtttttatttattaaaaacaaaagccccagccctgccgaggcctgggcggcgtcctcagtcgggtggtcccggggcctttgcggtcccgcccggctgagacgctcgccccgacgcatggacccgagaggcgacgacacgagtgaataaagtgcacatggaccctg

SEQ ID NO: 402826 - DNA, 755 bp, Homo sapiens
cagtgaccccgcctccacagggtccgttccgccacactgacccttccgtgtcgctcgcgggaccccacccctgtccgcctgctccggtgcccatggggaagcctggtgccaggggtcaccagtcagtccaattcaccgcccgactggtgggacaaggacaggtcagcgggtcacaggccggaagtgagactcgcccggccgctctgggacgcgggaagaccgaggcctcggtggttcccctctctcccgcctggctccctcaggagaaggagcggctaagtgcggcaccttcccgtctgatgctggcgttgtgcgtatggtgccctgacgtctgtccacgtgggcgcggaagcaaacagcgatgtcccagacgcaggactacgagtgcaggagccataatgtcgacctgccggagtcgaggattccagggtcgaacactcgctgcagtcctttgattcaaagatgcctccgccctccctccacgtgctcttctagatggagacaggaccagtcggccccacccagagaagacgttgggctttggactggaggcgtagggcggtgtggctgctggtgcagagtgtcctgggatttgatgaggtggttgctgcatcgggtggagctgcctccccacgtcctcacagagcaaacgcatctcctgctggcttcaccttgctgttgtgagccctcgttacagccctaaggctgttagggttctggtcgccctcctcccaggctccacaggcagtcagcca

SEQ ID NO: 402827 - DNA, 750 bp, Homo sapiens
aggtccctgagtccctcctcaggtgctgactcaggcacactgcccctcccctcagggaccctgctgtcgggctgagttttaggaagcccctcctttgagaaaggagactgggccctctcattgctgcctcagtccttcagaagagcccagaggtggtacttcaggcccagggctgcagcagagctgggcttgctgtgcagatagctcagtgcctgcctcccccagcactggctgcgggtgctgggtaggtggaaatgactcctccaggggctcctgcccacagcctaaaagccagggaggggcctgaagcagagaagagtcaaatacctggacagctccctgggtcaggccccggggagggagcagtggggtctagaggccctcagacccaggtcctgcccttcctgttcctgcgtggccgtaggagggcaggtggagctgccaggcggttcctcccaagcctgtccctctgcaggtggggaagtgctccttgggcctctgctctaaaggacactgcctgggagagtgtgaggacccgctgtgctgggcagggggtgaccggggcaaggccagcccagccccccagggccctcgaaggagctgtgtctgctcacccctctcctggccccacacccacacacccacaccaggctgatcaggccccattcctttccaggggtggcgataagcacgtatgccaagtactgttaccacaagctacagaaggcagccctgaccggggccaagaag

SEQ ID NO: 402828 - DNA, 1995 bp, Homo sapiens
aggatcccgaacgggtgatgcgggtggcgataagcacgtatgccaagtactgttaccacaagctacagaaggcagccctgaccggggccaagaaggggctgaagaagcccaacgtggaggagatccggcatgccaagaacgccgtgttcagcccgtccatgttcggcagcgcactgcaggaggtcatgggcatgcagagagagcgctaccccgagcgccagctgccctgggtgcagacacggctctctgaggaggtgctggcgctcaacggtgaccagacagagggcatcttcagggtccctggggacattgacgaggtgaatgccctgaagctgcaggtggaccagtggaaggtgcccacaggcctggaagacccccacgtccctgcgtccctgctgaagctgtggtaccgggagctggaggagcccctgatcccgcacgagttctacgagcagtgcatcgcgcactacgatagccccgaggcggcggtggccgtggtgcacgcgctgccccgcatcaaccgcatggtgctgtgctacctcatccgcttcctgcaggtcttcgtgcagccggccaacgtcgcggtcaccaagatggatgtcagcaacctggccatggtgatggcgcccaactgcttgcgctgccagtccgacgacccgcgcgtcatcttcgagaacacccgcaaggagatgtccttcctgcgggtgctcatccagcacctggacaccagcttcatggagggtgtgctgtagcgggggcgcccggggacaggagggatgtcctgccgcccccagccaggccgaactccgcactcgctctcccggcagaggggccagaatcgcccggcccagccctggagccccctccactcccccaggcccctggccccggcgctccccacgtcttctgcctggtctgagggtgcagccagggcacagcagcggcggggagggcgcctctggccccccacctcacggccagttcccgcgggcaccgcctcgccctccgctggccgcgggtcagctccgagaaagtgccttctgtgtcctggagccgagcgacgctgcctccttggggccgggctgcctccctgtggctcctgcgcgccctggcctgggccttgcccagccgccccggtctctccttccctttctcctgtcctcgtcctggcctgcagctcttcccagccccgagagagcttcccgacctgtccccgcctcctctccctccctcggcccgtggtccccagctggtgactgctcaggagtttgggggctccaggacagtgggcccggggcctggcaggctctcggtgggtggggtgggggcccccaaaccaaagtcctctggggtagggagcagggctgggcaggcattctgggggcagggtgggggaggggcgagagtatttttttcttcgtgtaactgtaaatccagaatctatcctgcatcgcagcccaccgtgtatagagatataaatagagggaaagatataagaactaaatttgctaatgacatagttttaacctaaatgctatttatctctgagccgtccccgtcctccgtgcagagcaagttgaggtcattccttcttttcttctccgatcttttttcttggcttctgaccaaaaaccaagctctaccccatccccatcccagacctgcaggagacgagcgagcgggaaggcgccgggcccgggactgtccgttctcggggccagagctgctgggggaccgagtttgtacattttccattttggaattttgagttccaattgttgtaaaacttaatttctccccagtttttatatatatattttttagagttccgtttttatttattaaaaacaaaagccccagccctgccgaggcctgggcggcgtcctcagtcgggtggtcccggggcctttgcggtcccgcccggctgagacgctcgccccgacgcatggacccgagaggcgacgacacgagtgaataaagtgcacatggaccctg

SEQ ID NO: 402829 - DNA, 397 bp, Homo sapiens
aatcacgaaagagactgtggatatggcaaagaaaacgtggaaggtgaagggttagctaacagacaccacaccagaggaattaaaagaccacttgatggagatgagctgcttccaaaccagtgccagatgatgaggaagaagacactaaagaagcagtgccagaaaataaattgacattagacaatttggcagaagggttctgattacttaagactgctttggacttcctttatgaatggacccttctattataccagcactgaaactaaagcaaatggaaagaggattgttactatacagaaacatttttagagaaatgaaaatgcaaaacggttcgtaaggttttcctgtaaagttacaccaagtgtgcctgcatctcctgaatcccattcgactt

SEQ ID NO: 402830 - DNA, 662 bp, Homo sapiens
gttaggaaggtttctaaaagtcctcattatcaatggtttatacagaaaaaaaataaatgcttggttagtgctagttttcaaaataatgaaattattttgtttgttcacaaacatcctccactggcaacaattagttttcctaatattctttttaacatttcattacaaaataacgaagtcgaatatatttgctgggtttcattcattatggttattaaatttaatgatgtttaaattgtcccatcttcagctggtgggagcctctaatgttgcctcctgagcctttctgacacgatcttattattctgtaatctcttccttgctttctagtaggacaaaatgtttcaggctgaaattgtacattccctgcctgagacctacaatcagccatttttccaaggagccctgggtccgtttgatgataaatgatttataatgatcacaatttggatgtcacaggttttcatcactactgaattgtccattgtttctagcttccagtagatggagatagataatatgcatttataaattacagggtttttacctcacttcatcagtcttacatctgattcttctttatcttatgctgagaatgctggttctcaatgacaccactttaattgatcattttcttcttatcacaatcagtcacaaaacag

SEQ ID NO: 402831 - DNA, 608 bp, Homo sapiens
gttaggaaggtttctaaaagtcctcattatcaatggtttatacagaaaaaaaataaatgcttggttagtgctagttttcaaaataatgaaattattttgtttgttcacaaacatcctccactggcaacaattagttttcctaatattctttttaacatttcattacaaaataacgaagtcgaatatatttgctgggtttcattcattatggttattaaatttaatgatgtttaaattgtcccatcttcagctggtgggagcctctaatgttgcctcctgagcctttctgacacgatcttattattctgtaatctcttccttgctttctagtaggacaaaatccaaggagccctgggtccgtttgatgataaatgatttataatgatcacaatttggatgtcacaggttttcatcactactgaattgtccattgtttctagcttccagtagatggagatagataatatgcatttataaattacagggtttttacctcacttcatcagtcttacatctgattcttctttatcttatgctgagaatgctggttctcaatgacaccactttaattgatcattttcttcttatcacaatcagtcacaaaacag

SEQ ID NO: 402832 - DNA, 266 bp, Homo sapiens
atctcttcttttttctacctgtcaaatcttattactgtagcacagcaaggctccccaatgggtcattatttcaaataatagtagttccactcccatttgactctcttatgccagcatttcctcgggaattgactcacacattcaagtcatacgtatgaactggcttccggtttcatctcagatatgtaaacggtgtgttcaaaatacttaaacatgtttcttgctatcaaatgcaacaaaaataaaatgaacaccatcataatgga

SEQ ID NO: 402833 - DNA, 373 bp, Homo sapiens
gtcttgcagattagcatttcatttatgtttactattgtctccttatgggcctatttcagagcccatctgaaacaaagtaggtgagaagaatgaaaaggacaaaggaaaggtggaaaggttgataaagaagatgggaagaaaaaggaagggagggaggcagagggaaggaaaattgaagctttcctgtatcccttagccatatctaagcatttcttcttctgggttcccacagtattgtttccatatctctattaaggcatttaccactatattctttttttttttttttttgacatactctcattctgtcacccaggatggagtgcaatgacaagatctcgtctcactgcaaacttcacctcctgggttcaag

SEQ ID NO: 402834 - DNA, 144 bp, Homo sapiens
cactgtgcttggctgagttcacaaatctgttgtaacctgtagcttccctgtcacttctctggctctcctctcctgctaagctttgtttcctaattaaaatcttctgccactgccatagctactgctgctactggaaccaccata

SEQ ID NO: 402835 - DNA, 791 bp, Homo sapiens
gtttagagattttttaggtgctaatgataccttgaagtgattgtctctctgtaggatatgacagacatatgtggaagcatcttcaagaactgattagaaaatgaaactctcggccgggcgcggtggctcacgcctgtaatcccagcactttgggaggccgaggcgggcggatcacgaggtcaggagatgcgaccatccggctaacatggtgaaaccccgtctctactaaaaatacaaaaaattagccgggcgtggtggcgggcgcctgtagtcccagctactcgggaggctgaggcaggagaatggcgtgaacccgggaggtggagcttgcagtgagccgagattgtgccactgcactccagcctgggcgacagagtgagactccatctcaaaaaaaataaaataaaacaaatgtgtaatatctcttacggagaaaaagcagcattcttagagacctgttcactgttgaagatgtttgtttctctgtttcactttatttatatgaatccttttaactgttatacctccttgctcacatgatctagtttatttggcttatttaggagcatctgtatttccatagaaagatatgtcaatactagtaagggattgtggacattcctatgtgcctaaaggagttccaaggagatctgtggatgtttgtttagtagtagtttttataatttggcatccacatttgtttagagattttttaggtgctaatgataccttgaagtgattgtctctctgtaggatatgacagacatatgtggaagcatcttcaagaactg

SEQ ID NO: 402836 - DNA, 384 bp, Homo sapiens
gcaagtcaggggctcagtgaatgctgactgtgagtgccatgggctgctccagggctcctcgtccaggtggccagagtggcatgcacgaggcagagagccgggcacccagcaggtaatgaacactgcagcgtgcccggtggtgagccagcagcccgtccaggaaaccagggctcagagacattgagcagcttgcccaaaatagttggccaacggagcaattaggggtttgaacacagttctctcagctggaaaggttgtgcctcttacctgtgtttcttgctgactatcctaaataccagactccaaagcttacaggattgaaaagtttggcttgaacatgaccaaaaataaaagctcctcttctaactattgtaagtcggagca

SEQ ID NO: 402837 - DNA, 476 bp, Homo sapiens
ctgttatccaggctggagtgcagtggtgtgatctcactgcagtctcaacctcccggggcccaagtgatccttctacttcagcctcccgagtagctgggactacaggtgtgtaccaccatgcctggctaattttgtatttatttatttatttttttttggagagacagggttttgccatgttgcccaggctagtctagaactcctgggctcagacaatctgcccgccttggcctcccaaagtgctaggattacaggcgtgagcccatgtgccccgcctattctgaattttctaagattgctctgatcatgtaacttgaaggaatatgatacatggttttgttcagggcctcaccatgggttgagtcccttgttggtgtttgaattgtcaattcgacatatgtgtgtatccatctgtatttttgttaacctgattctagatgtggttacaggcatctgactgcttcagaaaatcttcc

SEQ ID NO: 402838 - DNA, 296 bp, Homo sapiens
aaagactggatcactcaactctgccatgggtgccaggacccaatttttccctggctaactctgtcacctcctgtctgggatctccaactactaagtctcagctaaaacagcaattcaaaggcgaacttttttctgaggctccaggattgggccaggccctctccatggctttctgcccttcccctactgcagaacttagcacctgtatgtcactattggttaaaacatgtgcctttcatatgctctccacgttatctgcagcatctgcaaagaataataatgaatggtaaaaccta

SEQ ID NO: 402839 - DNA, 923 bp, Homo sapiens
  misc_feature (849)..(849): n is a, c, g, or t
ctcgtggtgctggctgccgctgttcaggcggccgggaacgggcggtggggagcgggcggagctggccctgcctctgcctggccggcgccgcagtcggcgcgggccgcgcccgccgccgccaactgccctgagcgcttgctgaggccgagggagacgtcggggcctgcacctggagggagcctgccgcgctggccccgaggagggggcgttgccatggcgacagcctctcccctcctccccttactctcccctggacttggatgggcccgagttgggggcaacaccccgggcattggggctttccagctctcacagaaccttcagcatccccagctgccggtcttggcatcttcgaagtaaggagagttttagatgcttctggatgttcaatgctagcacctttacagactggagcagctcgattttcttcgtatttactttcaagagcaagaaaagtgctgggctcccacttattttctccctgtggtgttccggagttctgctccatatccaccagaaagctggcggcccacggctttggcgcatccatggcggcaatggtgtccttccctccccagaggtatcactactttttagtgctggactttgaggccacgtgcgacaagccacagattcatcctcaggaaatcatcgagttccccatcctaaagctaaatggccggaccatggagattgagtctacctttcacatgtatgtccagcctgtagtccatccacagcttaccccattctgtacagagctcaccgggattattcaagccatggtggatggtcagccaagcctgcagcaagtgctggagagggtcgatgaatggatggcgaaggaanggctcttagatccaaacgtcaagtcaatttttgtcacctgtggaagactgggacttaaaagttcatgctcccag

SEQ ID NO: 402840 - DNA, 982 bp, Homo sapiens
  misc_feature (246)..(246): n is a, c, g, or t
  misc_feature (908)..(908): n is a, c, g, or t
ctcgtggtgctggctgccgctgttcaggcggccgggaacgggcggtggggagcgggcggagctggccctgcctctgcctggccggcgccgcagtcggcgcgggccgcgcccgccgccgccaactgccctgagcgcttgctgaggccgagggagacgtcggggcctgcacctggagggagcctgccgcgctggccccgaggagggggcgttgccatggcgacagcctctcccctgtgacggggggcngggggggccgccctcggaaagaagaggctgtctctgggcccccgcccctccccttactctcccctggacttggatgggcccgagttgggggcaacaccccgggcattggggctttccagctctcacagaaccttcagcatccccagctgccggtcttggcatcttcgaagtaaggagagttttagatgcttctggatgttcaatgctagcacctttacagactggagcagctcgattttcttcgtatttactttcaagagcaagaaaagtgctgggctcccacttattttctccctgtggtgttccggagttctgctccatatccaccagaaagctggcggcccacggctttggcgcatccatggcggcaatggtgtccttccctccccagaggtatcactactttttagtgctggactttgaggccacgtgcgacaagccacagattcatcctcaggaaatcatcgagttccccatcctaaagctaaatggccggaccatggagattgagtctacctttcacatgtatgtccagcctgtagtccatccacagcttaccccattctgtacagagctcaccgggattattcaagccatggtggatggtcagccaagcctgcagcaagtgctggagagggtcgatgaatggatggcgaaggaanggctcttagatccaaacgtcaagtcaatttttgtcacctgtggaagactgggacttaaaagttcatgctcccag

SEQ ID NO: 402841 - DNA, 884 bp, Homo sapiens
  misc_feature (810)..(810): n is a, c, g, or t
ctcgtggtgctggctgccgctgttcaggcggccgggaacgggcggtggggagcgggcggagctggccctgcctctgcctggccggcgccgcagtcggcgcgggccgcgcccgccgccgccaactgccctgagcgcttgctgaggccgagggagacgtcggggcctgcacctggagggagcctgccgcgctggcccctccccttactctcccctggacttggatgggcccgagttgggggcaacaccccgggcattggggctttccagctctcacagaaccttcagcatccccagctgccggtcttggcatcttcgaagtaaggagagttttagatgcttctggatgttcaatgctagcacctttacagactggagcagctcgattttcttcgtatttactttcaagagcaagaaaagtgctgggctcccacttattttctccctgtggtgttccggagttctgctccatatccaccagaaagctggcggcccacggctttggcgcatccatggcggcaatggtgtccttccctccccagaggtatcactactttttagtgctggactttgaggccacgtgcgacaagccacagattcatcctcaggaaatcatcgagttccccatcctaaagctaaatggccggaccatggagattgagtctacctttcacatgtatgtccagcctgtagtccatccacagcttaccccattctgtacagagctcaccgggattattcaagccatggtggatggtcagccaagcctgcagcaagtgctggagagggtcgatgaatggatggcgaaggaanggctcttagatccaaacgtcaagtcaatttttgtcacctgtggaagactgggacttaaaagttcatgctcccag

SEQ ID NO: 402842 - DNA, 297 bp, Homo sapiens
gggggaagaggaaggaagagcgacagctctgcatgtagccatagccctgcattctctctcagttttgctaaggaacccagtgcatgcttgcatgctgctttgctggatcctcaacccaccttactcaggatttgaagagttgagaattgtattcctctttctaggatcatatagacttagatctttcttgacccagcgccaacatctgtcaagttgacaggggtgggagaacctggaaacagacacctctccagcccaccctgatttagactcctgaatctttcttgagacggagtc

SEQ ID NO: 402843 - DNA, 512 bp, Homo sapiens
agtgcattacagtgcttagaagattttgttttttgcttttaagttattttagactttaattcaattgccaataatctatttagatttcttcaaactaggcatgcagttaataattcatccatttcttcctgattcatagtcatttggagtcattttccagcacatggtggtacctcaggagtttttgaggcacacggggctatttgcttcagttctgtagtaatatttatttagtgtttttgtgcttggaattgtatggggcagtggagggaaataccaggatgactaaagaggatattttcatcagcagggagctcactgcgttaattcgtttccttaagtttccttttttattattttttatttttattttccctgaaagcacacattggtatcttgagtttttgaagccaaataatgagtataatgaaatggctcattagagcttatgtttgtaaccaaccctgaggagaattttgtttttgacattgaccctgttgatattgcctgaa

SEQ ID NO: 402844 - DNA, 468 bp, Homo sapiens
tcagcaatcatctcaaaagaaatgctcttggtgtgatggttgagagcgctgttctggaataggagagacacagacctgctgggcctttgcctcattttattacttagttcattatgcaatgaacttaacatctgtctacctcagtagtttccctgtctgtgaattgagtctgttacatatatatatatctatttaaatatatatatctatttaatatatattaaataatatatatttaaatagatatatatatattacagactcaatttaacccttagggaaatatatatgtatatatgtgtgtgtgtgtgtatatatacatatatatttaaataagatagagacctggtatggtggctcatgcctgtaattccagcactttgggaggctgaggcaggagagtcacttgagctcaggagtgggaaaccagcctgggcaacatagttggaccctgtctctacaaaaatg

SEQ ID NO: 402845 - DNA, 515 bp, Homo sapiens
ttgtctggagattggaaagagcctacttttttgttgtaatccttctgttcctttttcccccttttaatgtaaatgttattaaaacataacatccacatagaaagtgcacatactgataaattttcaccaacagaaacacacatgtaaccagcacccacaccaagaaacaaaatatgactcacactgaagaaagaccccatgtccctctggtctctgatctccaccgtagggaaaaccatctccagatttctgatcctaggtattagttttgttctttttaactttgtctttgtatatacccttttgtatgtcagttctttcactcattgttatatttgtgaggtttattcatgttgcttcacattgtggtggtttgtttattctcgtatagtatttcattagacgaacgttcaacaatgtgtgcatttgactgtgaatggacgtacagattattttctgctggaggccatcgctgaatggtattgctgtgacgtgtggacctatcttagtgaacg

SEQ ID NO: 402846 - DNA, 576 bp, Homo sapiens
ttgagatagggtctcactctgttgtccaggctggagggcagtagcatgatcctggctcactgaagccttctggattcaagccatcctcctacctcagcctcctgagtagctggaaccataggcatgtgccgccatgccaggctaatttaaaactttttttgtaggtacagggtggggatgtctccctgtgttgcccaggttggtctctgactcctgggctcaagtgatccttctgcctcagcctcccaaagtgctgggattacaggtgtgagccattgctcttggcccattttaaccattttaaactatgcacttctttacaaggattaaatataatataaatatgtgttaattagcataataccttaagtgcataaggtacctaagtgcttgataaatgtacaagtatgcagatgtgtgtgggtgggggtaaagtatagaggagataccaaaccacttagaaaatagtgtcaaattgactcctctaaacagaggccaaggtgggattagatagatacacaggagatttattggagaaaatgcctgtgaaggataaagtggtagggagctgaagta

SEQ ID NO: 402847 - DNA, 354 bp, Homo sapiens
ctcaatatagaagggacaatgatacatacgtatcaaggccaatcagttagaagtgcacagctatttttcatgtactcttcagatcattgttttggcagacagcaggttctggagtcagactgcctgtgctcaaatcccagctcttcaactagtaggtttaataaccctaggcaagtttagtaacctctgtgcctcagttccctcaggaaaggatagtattatctcagaggaaggtcagttgtaagaattacatagtatgtctgaatttgggttctcctgaaagaagaccctgagatgggtcttaggatcaggtagcttgttggggaggtgaaagagtggagggaggagttggaa

SEQ ID NO: 402848 - DNA, 620 bp, Homo sapiens
ataggggtggagcctggggtactgggtgcagagtgatgagactggcacggccaggcaggtgtatggctgggaagggtttcagatgggagaatgatggagtcagtgagtatgttttataaaccgctccagcagtccactgcatggaggtttgcttggtagggatgagactggagcctgctgcttttcagagagggctgtggctggagtaattgaggagggctcagaagagcaaatgcttttcattacaatgtatcattagacattaaaggtaagcagttggaaccaggaaatgcttttcattacaatgtatcattagacatcaaaccgtaagccattggaacgagatctaaagaacatgtaacctttcgaggaaggaacactaggttgggggtaaactgcaacatcctgaatctgtcagaaaacagctctgttaacagctcttcacatccctgagtctcaaatttctcatttatcaacaagcccactggagtaaataattcagaaggctccatccaagctctgatattctgaaatacaattttttcttgcttgcatttttgaaaaaattctctgctagttacaaaaaacaaatgtttattgtgaaaaacttggaaagtaca

SEQ ID NO: 402849 - DNA, 338 bp, Homo sapiens
aacaaggaaaaatgaacaaattggagaattcagtgcttggcaggcttgtcttcatatacatgatgaatatcagcctttcctgaagctttaaaattctcttggtctaagttacttttccttgaaggatcattcctgccccttgacatctttgagaattgttcaacatgtaaatgatgtgcatcaattgatcaacttacattttagcttctttatactatcagcgtattttttttctgtcactttcgtgttagtgaagtatagtagatatttgtaaaagtattgtgactatatattttttaatttttatttttgattatagtaaaaaatgcataacagaa

SEQ ID NO: 402850 - DNA, 721 bp, Homo sapiens
aaaaactgccaagaagaaaagagtgggaaagtttgaagaaaataaaatgtttaggcttgtgagaaaaaacaaaggacactgtaaaagaattgataagaaacttcactactcagcaaaggttaatctagtaatatatgagacaagtgaatattgaatttttttcattgtattaaaaagtaaaatgtctagtaggagaaatttgagtaagttagtaacacagagaaaagattatcttcatttcccatcagattaacaactgaagtgaatgtcagaagacacacaacgaagtcactctccaggtatacattgaatgataggtgaacaagttcagtcccaagggaaattagtgggcaaaatttatttgaaaaagtaattatctaaagtaaggaacccttttaagctctttgaactctgaaatgggaaattcctctcttaaagatctaaaaagactgggaaaaataaagtactatgcattctctcctttttaaaggaaaatgtagtgcctttcatccacctaaatctgaaataatttcactgtccttgccagtagtcctaaataaaaccaagctaacatggcattatctgctccacaagataaaatgggctgcacttcgaaaaaaacttttattcctcttaagacaatactcaaaataccaaacaaatttatgacaaatgaagatacagttgtctaaattaatgatttcaaaaagccacagtacaa

SEQ ID NO: 402851 - DNA, 281 bp, Homo sapiens
gcggccgcctactactactgctcgaattcaagcttctaacgatgtacggggacatgtacaaccggttttttcttatataggggtcttatctgtgtgaaagctatgtccacgtgtaggtgggctgaccgcgtgacaaaatgtagtactttgtcgacttaaagaaagttatcctggctgaggcaggagaatggagtgaacctgggaggaggagattttttattcctcgtttctagctcttaataggaaggtgggagacagtgagactcgttctaaaaaaaaaa

SEQ ID NO: 402852 - DNA, 178 bp, Homo sapiens
tactagtcattttttaaaaatttagctgttatgtcctcaaatctcttaaagattatccaacaggcattttgtattaggtctttaagaagtcagacaataggccagacgtagaaggtgcctggggtaggcttcatcttattaagcatatgctcctcatttctgtaggcattttggatca

SEQ ID NO: 402853 - DNA, 2019 bp, Homo sapiens
aacagagactgtggttgctgcggatggagggaccgctgatggtggctttgccttctccccggcagatctgtatcttcgtcggggagacgctgctgttttctaactgggccatcactgcagacatcctcatgtacgtggtcatccccacgcggcgcgccactgccgtggccttgcagagcttcacctcccacctgctgggggacgccgggagcccctacctcattggctttatctcagacctgatccgccagagcactaaggactccccgctctgggagttcctgagcctgggctacgcgctcatgctctgccctttcgtcgtggtcctgggcggcatgttcttcctcgccactgcgctcttcttcgtcagcgaccgcgccagggctgagcagcaggtgaaccagctggcgatgccgcccgcatctgtgaaagtctgaggtggtgccattgggacaatgaagaacccacactcccacctcgtctgggaggtgtcctacagcgtccgggaccggctgggctgccccaaagctttctgtgtgatccacggctaggcacccaccctctctggcccaggcctgctgagtggccctggcatcaagaagaggctgtgtcctcagttaccctggaaggatgtgtgtgttggagccacacggttggacaggttcccagccctaggtttgggccgcagggccctggggccaaggaagaagacagccccaagtgggtgtccggggagagcctggcctgccaccagcttatgtgatcttgggcaagtccctgccctccctggaacgaagggccagggggctggactttcccacacaacttgctgggcaaagcacgatctgcagctttgaagactcaacagaccctggaccatacggagagcaggtggcccaggcctcagggcggcagtcccggctttgaggctcacgcgagggcctggtatgcagggaccactgctcagctgggcctcggaccttggggatattggacgcaacctggcaaatgaagctgggcgcccaagtctctgggtactccctggaggacactgtctcactgtctcgggttggctcccagcctggaggtcccagatggggactgttctgacaagctggcatcaccaggggtgaaggccctggctgcagctgtacaccacctgtgcccccaggctcaaggtctctggcaggtgcacaccagcccaactctgcagggcttctctccctgccaccaccccccaagccaggaccccactccttccccgaggctgagctgagccttttccaggggcagggcccaggagaccattcccagaatccatggggcagtagccagggctccggctgctggaggaagcagctatccacaaagcttcctgccccagagctgaggctgaggccccgggagaggcggcccctacccaaacactggctgctggcattccaccaagtgaccccaggggccaggccttcgatcacccacctcccatccatgcacacaccaggatgcagctgccaacttcacaccagccccaacccgctttgggggagcttagccccctgcgtcacccactccctgcacttctgctgcaatcaaggtggttctggtgcgggggtggggtggggggtgaggccttgtggccaatgggggaccccccaagagccagcttggacaatgctcttcttgccccttagttactggctggctgtggcttcagtggtgtgtaagcaggtggaatactcacccaccaagctctggggtaccccgagggcctgacaagaggatggggtgggggtggcatcctccaaagaccagcctccacccccactccagcctcagcggggccccagcgatgttttcttgttgtacaagaaccaggtccgagtgttgcctcctcttccttccggaagccaaactgctcctttattttttagagctgctgattgtgaatctcagagtcttaagagagaagccaaatatattcctcttgtaaatgaagaaataaacctatttaaatca

SEQ ID NO: 402854 - DNA, 2492 bp, Homo sapiens
aggagtggagctaggagttcatggccctctgggcgtggcagggtacgtggtcatccccacgcggcgcgccactgccgtggccttgcagagcttcacctcccacctgctgggggacgccgggagcccctacctcattggctttgtgagtagccccggggtggggctggccgggggaggctgggggactgcaggagggctctgccctgacatccacccccaaatcctcgcagatctcagacctgatccgccagagcactaaggactccccgctctgggagttcctgagcctgggctacgcgctcatgctctgccctttcgtcgtggtcctgggcggcatgttcttcctcgccactgcgctcttcttcgtcagcgaccgcgccagggctgagcagcagtgagtgggggggaggggaggccctgctgcaccgccgggaagcagggaccgtgatagccaccgtgagccctgccctggggtggggcggggagggtacagacctcccatgcactcagtgcacccactggttgctggggtccagccctgaggcccagtgccagggtcagcctggagctgtgggaggccacgggggtgtctggtggatccagacttgggtttgtctctggacttagtggttttcaaagctggggcccctccccttcctcttactttctgacttctttctcctttcctctttactcctctctctctcctctccccacccctgggctctcccatctccccctggggctgacgaggtccctgcccagcacctccggtcagctggcccccacgacacgatgtgccagagcagtgcccgggcccggcccccgctgatgcaccaccctgacccccgcccgtctctcccccagggtgaaccagctggcgatgccgcccgcatctgtgaaagtctgaggtggtgccattgggacaatgaagaacccacactcccacctcgtctgggaggtgtcctacagcgtccgggaccggctgggctgccccaaagctttctgtgtgatccacggctaggcacccaccctctctggcccaggcctgctgagtggccctggcatcaagaagaggctgtgtcctcagttaccctggaaggatgtgtgtgttggagccacacggttggacaggttcccagccctaggtttgggccgcagggccctggggccaaggaagaagacagccccaagtgggtgtccggggagagcctggcctgccaccagcttatgtgatcttgggcaagtccctgccctccctggaacgaagggccagggggctggactttcccacacaacttgctgggcaaagcacgatctgcagctttgaagactcaacagaccctggaccatacggagagcaggtggcccaggcctcagggcggcagtcccggctttgaggctcacgcgagggcctggtatgcagggaccactgctcagctgggcctcggaccttggggatattggacgcaacctggcaaatgaagctgggcgcccaagtctctgggtactccctggaggacactgtctcactgtctcgggttggctcccagcctggaggtcccagatggggactgttctgacaagctggcatcaccaggggtgaaggccctggctgcagctgtacaccacctgtgcccccaggctcaaggtctctggcaggtgcacaccagcccaactctgcagggcttctctccctgccaccaccccccaagccaggaccccactccttccccgaggctgagctgagccttttccaggggcagggcccaggagaccattcccagaatccatggggcagtagccagggctccggctgctggaggaagcagctatccacaaagcttcctgccccagagctgaggctgaggccccgggagaggcggcccctacccaaacactggctgctggcattccaccaagtgaccccaggggccaggccttcgatcacccacctcccatccatgcacacaccaggatgcagctgccaacttcacaccagccccaacccgctttgggggagcttagccccctgcgtcacccactccctgcacttctgctgcaatcaaggtggttctggtgcgggggtggggtggggggtgaggccttgtggccaatgggggaccccccaagagccagcttggacaatgctcttcttgccccttagttactggctggctgtggcttcagtggtgtgtaagcaggtggaatactcacccaccaagctctggggtaccccgagggcctgacaagaggatggggtgggggtggcatcctccaaagaccagcctccacccccactccagcctcagcggggccccagcgatgttttcttgttgtacaagaaccaggtccgagtgttgcctcctcttccttccggaagccaaactgctcctttattttttagagctgctgattgtgaatctcagagtcttaagagagaagccaaatatattcctcttgtaaatgaagaaataaacctatttaaatca
